United States Patent Application Publication US 2017/0114356 A1 - sequence listing, part 12

SEQ ID NO: 14976 - DNA, 2669 bp, Zea Mays
ctggcccctgtgctccccttgccaccgaacgagagccaaaagcctcccgccccacgacgcgcccgccccggcggcgacgccccggaggacgtttcccgcagcgaccggcgaccaagccttgattgcctccgccccatggctacccgggcgcgggcgtagccgccgcctcggccgcagcaggctcggtccgcccccctcggcgatttctgttccagtcgcatcgcgcgacagctcgtcgtccgattcggatccccgccaccgcggcggaacgaggcgtctccggtccccgagggtattcggggaatttgagactgataagtcgggatcctgtcgataatgcggggctacgtgtacgagaccaatgaagtggaagatgagtacggagatgagtactatgatcaagatgagtatgaggaggaaggttcgggtgctggggatgggtatgctgaggaggaagagcctacagagggacaaaaggagatccttgaattgagagaaagattaaaagagcagattaggcgaaaggcaaaggctgctgctgcctgcacagctggtcgatcatcttcttcacaaatacctcaagccagggacaaatttggctctttttttgggccatccaagccggtgatttctcgtcgagtgatagaagaaagaaaatcattgaaagaactgcatagcacggttgcaagggagccaaggccttctggagtacataaggatattccatcgtcctctaaagtgcaaagtagagtaaatggacatcagcataaacaaaagattgttaatcaggtaaagaagaaggctgaggcacttaaggataaccgggattattcatttctactctcggatgatgctgacctgtcatcctctccaaaggagaaacctgctgctagatcttccttgactcaaagggctgatcgtgaggtgacacaatcaacagtaaagaggaaggcaccaacaagtcaacctgcacgcttgtcaaatggatatggacctaagaacacaatgtcaactcaaaggcatgctgaaggtaaggtaaattccatgagaagggaggatttctcgaatacagaaagggttgtttcacgtgacaatgagaggatgtatgaaagggttgtttcacgtgacaatgagaggatgcatagtattgcaagaaatggatccaaccaggcaagtactagcaaaaccacaatccaaaagcatccaagcaggggtcccattgctaataagcaaccgtccaaggattcgaatgatgcaactctgaggaagagcagtgtagcctcaaagcaccatcccttagagattgacagaccaaaatcctcgcaaagtcagaggatgcagtcagctggtcagagaccacagcattcttcccatggtcagacgccacatcaatccatgcagcataggacgcagcagtcattgcagagtcggaggccacaacaaatgacacagggtcagaagccacaacagtctttgcagagtcaaaggactcaacagtccttgcagaatcgaaggccacagcagtcctcacatattcagaaatcgcaatcctcacaagcacacagaccacagtcattaagtaacaggtctcaggctttacaaggacaaaggcctctttcttcacagggtcaatatccggagcaaagaagagtacatgcaagtgacagagtcaaacaagctgaaaggcagattcggcctccttccaagtccatgccatcacggccagtctcttccaatggaattcgtgatgatcatgcaaaaaggaagcaagtggcaaaaagaagatttgatgaagatgatgaagaccccttagcaatgatcagaaatatgtttgggtatgatcctagtagatatgcaggcagagatgaagatgtcagtgacatggaagccgattttgctactatagaaatggaagagaaaaggagcgcgaggattgctaggcaggaggatgaagaacaacttcgcttgattgaggaagaagagagacgcgagcaggagagaaagaggcgaaagatggcacgaggccgatagtcgaatacactcctatttggatgttataatatactaccttcgttctcgaatatttgtcgtccgctggttcatttttgaactaaaccgtgacaaataaaaaagaacgcaggagtatctggcaggcctgattgcctgaatacgaagccccatggcggatcagacaggcacttctcttgcagtcctgtttacccttaccacgatgattatctggaggcaaatcaagggaaaacgacaggtgaccaacactgggcacgtgtaacagcagactgtagttgtagtggtttagttctcgaagctgacatggactatatttaagttctcgtcagattgtttggatagcagaaggtttccattgttgcagcgcctcaccagattgtttcttcatatgatatactgattctttcagtcaagcctatataaggatgcgtaatacaagtgcccctcttgtatatctttttcgggtgtaatagtgttgtaataaacgatgttcgaattttcggatatgattttgagctttgtcaggcgatcactgcaccacggtccacagagatgcgcttctggccgggagccaatcgaaggaagcgggaaaggggatgctgcacctttcgtagacaacattattattttgcaggttttgg

SEQ ID NO: 14977 - DNA, 2745 bp, Zea Mays
ctggcccctgtgctccccttgccaccgaacgagagccaaaagcctcccgccccacgacgcgcccgccccggcggcgacgccccggaggacgtttcccgcagcgaccggcgaccaagccttgattgcctccgccccatggctacccgggcgcgggcgtagccgccgcctcggccgcagcaggctcggtccgcccccctcggcgatttctgttccagtcgcatcgcgcgacagctcgtcgtccgattcggatccccgccaccgcggcggaacgaggcgtctccggtccccgagggtattcggggaatttgagactgataagtcgggatcctgtcgataatgcggggctacgtgtacgagaccaatgttgctgtggacagaccgcagaagggaagggagcctgcgctagttgctaatgacggagagcgagggttaccaccaggaagtggaagatgagtacggagatgagtactatgatcaagatgagtatgaggaggaaggttcgggtgctggggatgggtatgctgaggaggaagagcctacagagggacaaaaggagatccttgaattgagagaaagattaaaagagcagattaggcgaaaggcaaaggctgctgctgcctgcacagctggtcgatcatcttcttcacaaatacctcaagccagggacaaatttggctctttttttgggccatccaagccggtgatttctcgtcgagtgatagaagaaagaaaatcattgaaagaactgcatagcacggttgcaagggagccaaggccttctggagtacataaggatattccatcgtcctctaaagtgcaaagtagagtaaatggacatcagcataaacaaaagattgttaatcaggtaaagaagaaggctgaggcacttaaggataaccgggattattcatttctactctcggatgatgctgacctgtcatcctctccaaaggagaaacctgctgctagatcttccttgactcaaagggctgatcgtgaggtgacacaatcaacagtaaagaggaaggcaccaacaagtcaacctgcacgcttgtcaaatggatatggacctaagaacacaatgtcaactcaaaggcatgctgaaggtaaggtaaattccatgagaagggaggatttctcgaatacagaaagggttgtttcacgtgacaatgagaggatgtatgaaagggttgtttcacgtgacaatgagaggatgcatagtattgcaagaaatggatccaaccaggcaagtactagcaaaaccacaatccaaaagcatccaagcaggggtcccattgctaataagcaaccgtccaaggattcgaatgatgcaactctgaggaagagcagtgtagcctcaaagcaccatcccttagagattgacagaccaaaatcctcgcaaagtcagaggatgcagtcagctggtcagagaccacagcattcttcccatggtcagacgccacatcaatccatgcagcataggacgcagcagtcattgcagagtcggaggccacaacaaatgacacagggtcagaagccacaacagtctttgcagagtcaaaggactcaacagtccttgcagaatcgaaggccacagcagtcctcacatattcagaaatcgcaatcctcacaagcacacagaccacagtcattaagtaacaggtctcaggctttacaaggacaaaggcctctttcttcacagggtcaatatccggagcaaagaagagtacatgcaagtgacagagtcaaacaagctgaaaggcagattcggcctccttccaagtccatgccatcacggccagtctcttccaatggaattcgtgatgatcatgcaaaaaggaagcaagtggcaaaaagaagatttgatgaagatgatgaagaccccttagcaatgatcagaaatatgtttgggtatgatcctagtagatatgcaggcagagatgaagatgtcagtgacatggaagccgattttgctactatagaaatggaagagaaaaggagcgcgaggattgctaggcaggaggatgaagaacaacttcgcttgattgaggaagaagagagacgcgagcaggagagaaagaggcgaaagatggcacgaggccgatagtcgaatacactcctatttggatgttataatatactaccttcgttctcgaatatttgtcgtccgctggttcatttttgaactaaaccgtgacaaataaaaaagaacgcaggagtatctggcaggcctgattgcctgaatacgaagccccatggcggatcagacaggcacttctcttgcagtcctgtttacccttaccacgatgattatctggaggcaaatcaagggaaaacgacaggtgaccaacactgggcacgtgtaacagcagactgtagttgtagtggtttagttctcgaagctgacatggactatatttaagttctcgtcagattgtttggatagcagaaggtttccattgttgcagcgcctcaccagattgtttcttcatatgatatactgattctttcagtcaagcctatataaggatgcgtaatacaagtgcccctcttgtatatctttttcgggtgtaatagtgttgtaataaacgatgttcgaattttcggatatgattttgagctttgtcaggcgatcactgcaccacggtccacagagatgcgcttctggccgggagccaatcgaaggaagcgggaaaggggatgctgcacctttcgtagacaacattattattttgcaggttttgg

SEQ ID NO: 14978 - DNA, 3208 bp, Zea Mays
ctggcccctgtgctccccttgccaccgaacgagagccaaaagcctcccgccccacgacgcgcccgccccggcggcgacgccccggaggacgtttcccgcagcgaccggcgaccaagccttgattgcctccgccccatggctacccgggcgcgggcgtagccgccgcctcggccgcagcaggctcggtccgcccccctcggcgatttctgttccagtcgcatcgcgcgacagctcgtcgtccgattcggatccccgccaccgcggcggaacgaggcgtctccggtccccgagggtattcggggaatttgagactgataagtcgggatcctgtcgataatgcggggctacgtgtacgagaccaatatccaatctttgtttgggtctatattacgtcctaacaggttgctgtggacagaccgcagaagggaagggagcctgcgctagttgctaatgacggagagcgaggtagagagcttgatcttggtctcgggcgcgaaggagctcctggtgatggtgcagctgctggtgcgctgtcgaccccttgcttgctcccttgtcaagccccagatgtccaggaaggtggactccctcgtgctccccatggcgcggacccatgtgcagggttgggggatggcgtggtcgtggctgacgggaagcgtggcctctacaaccacgagcgttggccagcatgctttgtcactgtgcgccagtttggaagaagggaaaggtcctctacgtgggcctccagttgctccttgtgtgctaggttggtgaggcccccgagcatggtggacatggcggggtcctgcatcattgccctgcccagccgcttcgccatggccacgagctatggattctgcatcggatatgtacctaagtggttcaactggggttaccaccaggaagtggaagatgagtacggagatgagtactatgatcaagatgagtatgaggaggaaggttcgggtgctggggatgggtatgctgaggaggaagagcctacagagggacaaaaggagatccttgaattgagagaaagattaaaagagcagattaggcgaaaggcaaaggctgctgctgcctgcacagctggtcgatcatcttcttcacaaatacctcaagccagggacaaatttggctctttttttgggccatccaagccggtgatttctcgtcgagtgatagaagaaagaaaatcattgaaagaactgcatagcacggttgcaagggagccaaggccttctggagtacataaggatattccatcgtcctctaaagtgcaaagtagagtaaatggacatcagcataaacaaaagattgttaatcaggtaaagaagaaggctgaggcacttaaggataaccgggattattcatttctactctcggatgatgctgacctgtcatcctctccaaaggagaaacctgctgctagatcttccttgactcaaagggctgatcgtgaggtgacacaatcaacagtaaagaggaaggcaccaacaagtcaacctgcacgcttgtcaaatggatatggacctaagaacacaatgtcaactcaaaggcatgctgaaggtaaggtaaattccatgagaagggaggatttctcgaatacagaaagggttgtttcacgtgacaatgagaggatgtatgaaagggttgtttcacgtgacaatgagaggatgcatagtattgcaagaaatggatccaaccaggcaagtactagcaaaaccacaatccaaaagcatccaagcaggggtcccattgctaataagcaaccgtccaaggattcgaatgatgcaactctgaggaagagcagtgtagcctcaaagcaccatcccttagagattgacagaccaaaatcctcgcaaagtcagaggatgcagtcagctggtcagagaccacagcattcttcccatggtcagacgccacatcaatccatgcagcataggacgcagcagtcattgcagagtcggaggccacaacaaatgacacagggtcagaagccacaacagtctttgcagagtcaaaggactcaacagtccttgcagaatcgaaggccacagcagtcctcacatattcagaaatcgcaatcctcacaagcacacagaccacagtcattaagtaacaggtctcaggctttacaaggacaaaggcctctttcttcacagggtcaatatccggagcaaagaagagtacatgcaagtgacagagtcaaacaagctgaaaggcagattcggcctccttccaagtccatgccatcacggccagtctcttccaatggaattcgtgatgatcatgcaaaaaggaagcaagtggcaaaaagaagatttgatgaagatgatgaagaccccttagcaatgatcagaaatatgtttgggtatgatcctagtagatatgcaggcagagatgaagatgtcagtgacatggaagccgattttgctactatagaaatggaagagaaaaggagcgcgaggattgctaggcaggaggatgaagaacaacttcgcttgattgaggaagaagagagacgcgagcaggagagaaagaggcgaaagatggcacgaggccgatagtcgaatacactcctatttggatgttataatatactaccttcgttctcgaatatttgtcgtccgctggttcatttttgaactaaaccgtgacaaataaaaaagaacgcaggagtatctggcaggcctgattgcctgaatacgaagccccatggcggatcagacaggcacttctcttgcagtcctgtttacccttaccacgatgattatctggaggcaaatcaagggaaaacgacaggtgaccaacactgggcacgtgtaacagcagactgtagttgtagtggtttagttctcgaagctgacatggactatatttaagttctcgtcagattgtttggatagcagaaggtttccattgttgcagcgcctcaccagattgtttcttcatatgatatactgattctttcagtcaagcctatataaggatgcgtaatacaagtgcccctcttgtatatctttttcgggtgtaatagtgttgtaataaacgatgttcgaattttcggatatgattttgagctttgtcaggcgatcactgcaccacggtccacagagatgcgcttctggccgggagccaatcgaaggaagcgggaaaggggatgctgcacctttcgtagacaacattattattttgcaggttttgg

SEQ ID NO: 14979 - DNA, 2651 bp, Zea Mays
ggcccctgtgctccccttgccaccgaacgagagccaaaagcctcccgccccacgacgcgcccgccccggcggcgacgccccggaggacgtttcccgcagcgaccggcgaccaagccttgattgcctccgccccatggctacccgggcgcgggcgtagccgccgcctcggccgcagcaggctcggtccgcccccctcggcgatttctgttccagtcgcatcgcgcgacagctcgtcgtccgattcggatccccgccaccgcggcggaacgaggcgtctccggtccccgagggtattcggggaatttgagactgataagtcgggatcctgtcgataatgcggggctacgtgtacgagaccaatggttaccaccaggaagtggaagatgagtacggagatgagtactatgatcaagatgagtatgaggaggaaggttcgggtgctggggatgggtatgctgaggaggaagagcctacagagggacaaaaggagatccttgaattgagagaaagattaaaagagcagattaggcgaaaggcaaaggctgctgctgcctgcacagctggtcgatcatcttcttcacaaatacctcaagccagggacaaccggtgatttctcgtcgagtgatagaagaaagaaaatcattgaaagaactgcatagcacggttgcaagggagccaaggccttctggagtacataaggatattccatcgtcctctaaagtgcaaagtagagtaaatggacatcagcataaacaaaagattgttaatcaggtaaagaagaaggctgaggcacttaaggataaccgggattattcatttctactctcggatgatgctgacctgtcatcctctccaaaggagaaacctgctgctagatcttccttgactcaaagggctgatcgtgaggtgacacaatcaacagtaaagaggaaggcaccaacaagtcaacctgcacgcttgtcaaatggatatggacctaagaacacaatgtcaactcaaaggcatgctgaaggtaaggtaaattccatgagaagggaggatttctcgaatacagaaagggttgtttcacgtgacaatgagaggatgtatgaaagggttgtttcacgtgacaatgagaggatgcatagtattgcaagaaatggatccaaccaggcaagtactagcaaaaccacaatccaaaagcatccaagcaggggtcccattgctaataagcaaccgtccaaggattcgaatgatgcaactctgaggaagagcagtgtagcctcaaagcaccatcccttagagattgacagaccaaaatcctcgcaaagtcagaggatgcagtcagctggtcagagaccacagcattcttcccatggtcagacgccacatcaatccatgcagcataggacgcagcagtcattgcagagtcggaggccacaacaaatgacacagggtcagaagccacaacagtctttgcagagtcaaaggactcaacagtccttgcagaatcgaaggccacagcagtcctcacatattcagaaatcgcaatcctcacaagcacacagaccacagtcattaagtaacaggtctcaggctttacaaggacaaaggcctctttcttcacagggtcaatatccggagcaaagaagagtacatgcaagtgacagagtcaaacaagctgaaaggcagattcggcctccttccaagtccatgccatcacggccagtctcttccaatggaattcgtgatgatcatgcaaaaaggaagcaagtggcaaaaagaagatttgatgaagatgatgaagaccccttagcaatgatcagaaatatgtttgggtatgatcctagtagatatgcaggcagagatgaagatgtcagtgacatggaagccgattttgctactatagaaatggaagagaaaaggagcgcgaggattgctaggcaggaggatgaagaacaacttcgcttgattgaggaagaagagagacgcgagcaggagagaaagaggcgaaagatggcacgaggccgatagtcgaatacactcctatttggatgttataatatactaccttcgttctcgaatatttgtcgtccgctggttcatttttgaactaaaccgtgacaaataaaaaagaacgcaggagtatctggcaggcctgattgcctgaatacgaagccccatggcggatcagacaggcacttctcttgcagtcctgtttacccttaccacgatgattatctggaggcaaatcaagggaaaacgacaggtgaccaacactgggcacgtgtaacagcagactgtagttgtagtggtttagttctcgaagctgacatggactatatttaagttctcgtcagattgtttggatagcagaaggtttccattgttgcagcgcctcaccagattgtttcttcatatgatatactgattctttcagtcaagcctatataaggatgcgtaatacaagtgcccctcttgtatatctttttcgggtgtaatagtgttgtaataaacgatgttcgaattttcggatatgattttgagctttgtcaggcgatcactgcaccacggtccacagagatgcgcttctggccgggagccaatcgaaggaagcgggaaaggggatgctgcacctttcgtagacaacattattattttgcaggttttgg

SEQ ID NO: 14980 - DNA, 2694 bp, Zea Mays
ggcccctgtgctccccttgccaccgaacgagagccaaaagcctcccgccccacgacgcgcccgccccggcggcgacgccccggaggacgtttcccgcagcgaccggcgaccaagccttgattgcctccgccccatggctacccgggcgcgggcgtagccgccgcctcggccgcagcaggctcggtccgcccccctcggcgatttctgttccagtcgcatcgcgcgacagctcgtcgtccgattcggatccccgccaccgcggcggaacgaggcgtctccggtccccgagagggtattcggggaatttgagactgataagtcgggatcctgtcgataatgcggggctacgtgtacgagaccaatggttaccaccaggaagtggaagatgagtacggagatgagtactatgatcaagatgagtatgaggaggaaggttcgggtgctggggatgggtatgctgaggaggaagagcctacagagggacaaaaggagatccttgaattgagagaaagattaaaagagcagattaggcgaaaggcaaaggctgctgctgcctgcacagctggtcgatcatcttcttcacaaatacctcaagccagggacaaatttggctctttttttgggccatccaagccggtgatttctcgtcgagtgatagaagaaagaaaatcattgaaagaactgcatagcacggttgcaagggagccaaggccttctggagtacataaggatattccatcgtcctctaaagtgcaaagtagagtaaatggacatcagcataaacaaaagattgttaatcagttgcaattttcaggtaaagaagaaggctgaggcacttaaggataaccgggattattcatttctactctcggatgatgctgacctgtcatcctctccaaaggagaaacctgctgctagatcttccttgactcaaagggctgatcgtgaggtgacacaatcaacagtaaagaggaaggcaccaacaagtcaacctgcacgcttgtcaaatggatatggacctaagaacacaatgtcaactcaaaggcatgctgaaggtaaggtaaattccatgagaagggaggatttctcgaatacagaaagggttgtttcacgtgacaatgagaggatgtatgaaagggttgtttcacgtgacaatgagaggatgcatagtattgcaagaaatggatccaaccaggcaagtactagcaaaaccacaatccaaaagcatccaagcaggggtcccattgctaataagcaaccgtccaaggattcgaatgatgcaactctgaggaagagcagtgtagcctcaaagcaccatcccttagagattgacagaccaaaatcctcgcaaagtcagaggatgcagtcagctggtcagagaccacagcattcttcccatggtcagacgccacatcaatccatgcagcataggacgcagcagtcattgcagagtcggaggccacaacaaatgacacagggtcagaagccacaacagtctttgcagagtcaaaggactcaacagtccttgcagaatcgaaggccacagcagtcctcacatattcagaaatcgcaatcctcacaagcacacagaccacagtcattaagtaacaggtctcaggctttacaaggacaaaggcctctttcttcacagggtcaatatccggagcaaagaagagtacatgcaagtgacagagtcaaacaagctgaaaggcagattcggcctccttccaagtccatgccatcacggccagtctcttccaatggaattcgtgatgatcatgcaaaaaggaagcaagtggcaaaaagaagatttgatgaagatgatgaagaccccttagcaatgatcagaaatatgtttgggtatgatcctagtagatatgcaggcagagatgaagatgtcagtgacatggaagccgattttgctactatagaaatggaagagaaaaggagcgcgaggattgctaggcaggaggatgaagaacaacttcgcttgattgaggaagaagagagacgcgagcaggagagaaagaggcgaaagatggcacgaggccgatagtcgaatacactcctatttggatgttataatatactaccttcgttctcgaatatttgtcgtccgctggttcatttttgaactaaaccgtgacaaataaaaaagaacgcaggagtatctggcaggcctgattgcctgaatacgaagccccatggcggatcagacaggcacttctcttgcagtcctgtttacccttaccacgatgattatctggaggcaaatcaagggaaaacgacaggtgaccaacactgggcacgtgtaacagcagactgtagttgtagtggtttagttctcgaagctgacatggactatatttaagttctcgtcagattgtttggatagcagaaggtttccattgttgcagcgcctcaccagattgtttcttcatatgatatactgattctttcagtcaagcctatataaggatgcgtaatacaagtgcccctcttgtatatctttttcgggtgtaatagtgttgtaataaacgatgttcgaattttcggatatgattttgagctttgtcaggcgatcactgcaccacggtccacagagatgcgcttctggccgggagccaatcgaaggaagcgggaaaggggatgctgcacctttcgtagacaacattattattttgcaggttttgg

SEQ ID NO: 14981 - DNA, 2331 bp, Zea Mays
agcaagtctcttattaaaaccccatggagtttggcgtctccctgcgatccacggcatcctcgcccacctcctgccgacgtgtgttcccggatccgaatccttcatcaaatttagttgtgaacgcgggtcgcctctgatctgatctggccgccaaagccgtgcccgagcccctctccttgacgacgagttctccacccatctctcttcttcctccctctcgtcgctctctccttcgcctttgcctgccccagtcggtgaggcgaggagcgtggaatatcgcgatgctcgattcaagctgcaacaaactccctcactcgacagtacctcccgctgctcctctagccatttcttgctgctgctactacctaagctaacatagccttgatgctgctagcgcatgacctacgctcactataaataagaatgcaataagaataagattttttttcaacacaaaagttctcttaaacaagataaagaaacatatctatttcatagatagatttacaatatgttccctatgctaagttgttaactgggttcatatctattgtgaaagtgctgaccacgaacaatacatgcctcaagatacattggtcaacacagtttcttatgtctaagaaggcaggcgcctatttttcgtaccttttatatgcaggagtatgaagcaacagtggcagcactttcacaaatggagaagagagatgtaatggcaaaaacaatgctggaagctacaaagcaataccaggctggacaggttaaagacaaccaatctttcgcttcaagttattcttttggctacattttacttccactttccaagcatctagatcacttacgagatattattcgaagtctattacttcaaccgcggcatgactacttttcatgtgtcccactaactattccttgagttggtttcttttcctctccaattattttttcatgtgccctgttaacattttctcggtattcctacttttaatttaataagattgaaatctaatttgatactacaatacttcatttacttgtaaccttctgtaattcagttcacctcgtgcagaccatgttcttgggaagataaatcaagaaccaaaccaagatacgtcaacaagagaatcaacctgctttctaggggacttggatggcttgacaagagcaagtcatgcccctaaagtcaaaagtttaccaaaaataactatctgggttcatgacttctggtaccaggccctacatgtcattatcagagcccttgtttcttactagcctaattgatctagaaagatcatacaaagttgagttacagtggagtcactatatatgaatttttttagcagggaatgcaggattctgctgaaacatcttgaggctaaactcatctagagtccaagatgaagtcatagctcccaacaagatctagatttttcattaatgcttggattgcctgatcacgacaacaatgtgttgaaatcaacttatatgttttatagggagattgagattcagctggtattttccatgaagttttgtaggaagtgtatcttgtaccatattgagtttagctgtcagataaagttttgttgacggcaatgcaacaccacttaattggggattgaaggtgatgtggttcatctaagaccaagatttctgattttctgtttcaagttcaaaatacatgatagctgctggattatgctgccatgctggtacttagacataatgatcgagtccctcttcatggtcggagaaattgggggcaatgactacaacctacctctcgtctccaaagtgccgattgaaaagatttgctcattcacaccaagtgtcattgtcaaagtttcttcaacaaacaccgaattgattaggctaggagccaagactctggtagttcctgggggttaacctcccaactgggtgtgttccaaaatacatgttgaaattcaagagtgatgacaaagaagattatgagccgaaaacagactgcctcatgtggatgaacgaattttcaaagtactacaacaagcttttcttggaggagctagacaaaccgctcaagatgaatcctgcagtgactattatctatgttgactattacggagctgcaatggaaattttccattcccctgaaccatttggagctcattgctgatgtacttttttttattatcaatatccatgtgtggaactatttgagctcccccgtgtgattagagctcccctttgtgagtgggggagggagggggagcggttggagcaattcaaggcacgttagtacaccctattcggtgagggggcgcagagtgatggaactatttgaggttgtctgat

SEQ ID NO: 14982 - DNA, 2461 bp, Zea Mays
cctcgcccacctcctgccgacgtgtgttcccggatccgaatccttcatcaaatttagttgtgaacgcgggtcgcctctgatctgatctggccgccaaagccgtgcccgagcccctctccttgacgacgagttctccacccatctctcttcttcctccctctcgtcgctctctccttcgcctttgcctgccccagtcggtgaggcgaggagcgtggaatatcgcgatgctcgattcaagctgcaacaaactccctcactcgacagagtatgaagcaacagtggcagcactttcacaaatggagaagagagatgtaatggcaaaaacaatgctggaagctacaaagcaataccaggctggacagaccatgttcttgggaagataaatcaagaaccaaaccaagatacgtcaacaagagaatcaacctgctttctaggggacttggatggcttgacaagagcaagtcatgcccctaaagtcaaaagtttaccaaaaataactatctgggttcatgacttctggtaccaggccctacatgtcattatcagagcccttgtttcttactagcctaattgatctagaaagatcatacaaagttgagttacagtggagtcactatatatgaatttttttagcagggaatgcaggattctgctgaaacatcttgaggctaaactcatctagagtccaagatgaagtcatagctcccaacaagatctagatttttcattaatgcttggattgcctgatcacgacaacaatgtgttgaaatcaacttatatgttttatagggagattgagattcagctggtattttccatgaagttttgtaggaagtgtatcttgtaccatattgagtttagctgtcagataaagttttgttgacggcaatgcaacaccacttaattggggattgaaggtgatgtggttcatctaagaccaagatttctgattttctgtttcaagttcaaaatacatgatagctgctggattatgctgccatgctggtacttaggtcagccctcacctttctatgttaaactgaatccagtgaaggtgtaagtgtaattttttgtagttaggtgttaaataacttaacattcactatattttcttgtgttaatgcaaaattctgttacattttccttttggtgaagtagaagaaggtcaatttaaatgtcctaaaagaaaatcattgtacagtatctgccacaaggcagggttatgggaggttggcaaccaatttgggtgcagtgctgagcatttaggtcatcatttgacattaactaagatacttgtatgtgatctaagcttgcacttcacattttttagaactatactgcttgtgcaacctaccaactttctgcatatattttcatgtcgaaaagaagttcttctttatagaaaatgatttctaggttgacacctcacatgcatattgtttcctcaatgataacaaaaatggtgaaagaacaacattcaagtccatatattcatgaatactctttgagttagtttttcatggttcactaatataagcagatagtgcctacacttatcaatttgctaatgacaggttaaaccaaacatcgttgtactgatcacatgggacgacacatgctaaaatcaatataacagtaacttgatgggactaacaatgcctaaccactagaaatgttgtagttctgtcacttctttaaacattttttgttgtaattttacatggtaattcagaactctgtttatggcacatgttgctcagacataatgatcgagtccctcttcatggtcggagaaattgggggcaatgactacaacctacctctcgtctccaaagtgccgattgaaaagatttgctcattcacaccaagtgtcattgtcaaagtttcttcaacaaacaccgtgaatgtctacgtcattttatatgttgttgctgctgctgagctgacatattatatagatagtaatgtaactgattggagtttgcaggaattgattaggctaggagccaagactctggtagttcctgggggttaacctcccaactgggtgtgttccaaaatacatgttgaaattcaagagtgatgacaaagaagattatgagccgaaaacagactgcctcatgtggatgaacgaattttcaaagtactacaacaagcttttcttggaggagctagacaaaccgctcaagatgaatcctgcagtgactattatctatgttgactattacggagctgcaatggaaattttccattcccctgaaccatttggagctcattgctgatgtacttttttttattatcaatatccatgtgtggaactatttgagctcccccgtgtgattagagctcccctttgtgagtgggggagggagggggagcggttggagcaattcaaggcacgttagtacaccctattcggtgagggggcgcagagtgatggaactatttgaggttgtctgat

SEQ ID NO: 14983 - DNA, 2981 bp, Zea Mays
ctcctgccgacgtgtgttcccggatccgaatccttcatcaaatttagttgtgaacgcgggtcgcctctgatctgatctggccgccaaagccgtgcccgagcccctctccttgacgacgagttctccacccatctctcttcttcctccctctcgtcgctctctccttcgcctttgcctgccccagtcggtgaggcgaggagcgtggaatatcgcgatgctcgattcaagctgcaacaaactccctcactcgacagtacctcccgctgctcctctagccatttcttgctgctgctactacctaagctaacatagccttgatgctgctagcgcatgacctacgctcactataaataagaatgcaataagaataagattttttttcaacacaaaagttctcttaaacaagataaagaaacatatctatttcatagatagatttacaatatgttccctatgctaagttgttaactgggttcatatctattgtgaaagtgctgaccacgaacaatacatgcctcaagatacattggtcaacacagtttcttatgtctaagaaggcaggcgcctatttttcgtaccttttatatgcaggagtatgaagcaacagtggcagcactttcacaaatggagaagagagatgtaatggcaaaaacaatgctggaagctacaaagcaataccaggctggacaggttaaagacaaccaatctttcgcttcaagttattcttttggctacattttacttccactttccaagcatctagatcacttacgagatattattcgaagtctattacttcaaccgcggcatgactacttttcatgtgtcccactaactattccttgagttggtttcttttcctctccaattattttttcatgtgccctgttaacattttctcggtattcctacttttaatttaataagattgaaatctaatttgatactacaatacttcatttacttgtaaccttctgtaattcagttcacctcgtgcagaccatgttcttgggaagataaatcaagaaccaaaccaagatacgtcaacaagagaatcaacctgctttctaggggacttggatggcttgacaagagcaagtcatgcccctaaagtcaaaagtttaccaaaaataactatctgggttcatgacttctgggaatgcaggattctgctgaaacatcttgaggctaaactcatctagagtccaagatgaagtcatagctcccaacaagatctagatttttcattaatgcttggattgcctgatcacgacaacaatgtgttgaaatcaacttatatgttttatagggagattgagattcagctggtattttccatgaagttttgtaggaagtgtatcttgtaccatattgagtttagctgtcagataaagttttgttgacggcaatgcaacaccacttaattggggattgaaggtgatgtggttcatctaagaccaagatttctgattttctgtttcaagttcaaaatacatgatagctgctggattatgctgccatgctggtacttaggtcagccctcacctttctatgttaaactgaatccagtgaaggtgtaagtgtaattttttgtagttaggtgttaaataacttaacattcactatattttcttgtgttaatgcaaaattctgttacattttccttttggtgaagtagaagaaggtcaatttaaatgtcctaaaagaaaatcattgtacagtatctgccacaaggcagggttatgggaggttggcaaccaatttgggtgcagtgctgagcatttaggtcatcatttgacattaactaagatacttgtatgtgatctaagcttgcacttcacattttttagaactatactgcttgtgcaacctaccaactttctgcatatattttcatgtcgaaaagaagttcttctttatagaaaatgatttctaggttgacacctcacatgcatattgtttcctcaatgataacaaaaatggtgaaagaacaacattcaagtccatatattcatgaatactctttgagttagtttttcatggttcactaatataagcagatagtgcctacacttatcaatttgctaatgacaggttaaaccaaacatcgttgtactgatcacatgggacgacacatgctaaaatcaatataacagtaacttgatgggactaacaatgcctaaccactagaaatgttgtagttctgtcacttctttaaacattttttgttgtaattttacatggtaattcagaactctgtttatggcacatgttgctcagacataatgatcgagtccctcttcatggtcggagaaattgggggcaatgactacaacctacctctcgtctccaaagtgccgattgaaaagatttgctcattcacaccaagtgtcattgtcaaagtttcttcaacaaacaccgtgaatgtctacgtcattttatatgttgttgctgctgctgagctgacatattatatagatagtaatgtaactgattggagtttgcaggaattgattaggctaggagccaagactctggtagttcctgggggttaacctcccaactgggtgtgttccaaaatacatgttgaaattcaagagtgatgacaaagaagattatgagccgaaaacagactgcctcatgtggatgaacgaattttcaaagtactacaacaagcttttcttggaggagctagacaaaccgctcaagatgaatcctgcagtgactattatctatgttgactattacggagctgcaatggaaattttccattcccctgaaccatttggagctcattgctgatgtacttttttttattatcaatatccatgtgtggaactatttgagctcccccgtgtgattagagctcccctttgtgagtgggggagggagggggagcggttggagcaattcaaggcacgttagtacaccctattcggtgagggggcgcagagtgatggaactatttgaggttgtctgat

SEQ ID NO: 14984 - DNA, 2062 bp, Zea Mays
agaaagctggcctcctccgcctttctttccttcctccctcggggctccgcgcgcgcagcagccaggaacagctccgctgcctgctcccttggggaaaaaaaacttcaagaacagcggcggtcggctcttctccaatcctgcttcaaggctgcaccgaccggctctatttgagctatatctctgcaggaaagctcagttcagatccattcacttcactcatgggctcatcctcgggccatcagagaagcaaaacgcgcagcaggaacaggaagcccttgggaattcagctcttggagcggctaccacgccaccaggaaaaccacgagcgtcgtcaagagcgtcctcgacccaaagacgaagacgaacctaggcacgtcgtcggcgcattactggccccccagccacctcttctatctccataatctcaaagatgcggacaacagcagcgccggcggctctctctccagcggcggcggcggcggctgggttccgttcaacgaggcggaagacggcacggcgttgctgggcgagatcgacctggcgttcctcggcgcgtacgcggccggcatgttcttcgcgggccacctgggcgacagggtggacctgagggtcctcctcaccgtagggatggtggggaccgggctcttcaccgccgccttcggagcgggctactggctcgacgtgcacagcttctactacttcctggccgtgcagatggtggccggcctgttccagtcgtccgggtggccgtcggtggtggcggtggtcggcaactggttcgggaagagcaagagggggctcatcatgggggtgtggaacgcccacacctccgtggggaacatttccggctcgctggtcgccgctgccatgttgaggaggatctctgtttgaaggacgctccattgcttgaacgacgacgcgcagatgtagaggaaaaggcggttgggtttattgaggcgtggaggatccctggtgttgcccctttcgccctctgccttttcttctgcaagcttgtggcgtatacgttcctgtactggcttcccttctatatcagccacacagctatcggtggagaatacttgtcggactccgcagccggggtactgtcgacgctgttcgacgtgggcggcgtcgtgggcggcatcctcgccggccacatctccgaccacctggacgcccgggcgctgacggccgcgagcttcaccttctcggcgataccggcgctcttcttctaccgcgtctacgggaacgtctcgctggcctggaacatcgccctcatgttcgtcacggggatgctggtgaacggcccctacgcgctgatcacgacggccgtgtccgcggacctcggcacgcacagctcgctcaacggcaactcccgcgcgctggccaccgtcacggcgatcatcgacggcacggggtccatcggcgccgccgtcggcccgctcctcacgggctacatctccgccaggagctggagcgccgtgttcacgatgctgatggcgtccgcgctcgtcgcggggctgctgctgtccaggctcgtggcggcggaggtggtcgccaagatggagtcccggaggacgcccgcccctgctgcgagcgacctgctgcccgtgtcctcctcctccatggacgaaccgtagatcgcttctagctgcgccccggctgtggtctcctggtgacatggaatggtggcgggagagtagatcacctgtgattttaggcctggtgggactgtggcagcaggtgcgcagtgcgcttctgtcccggaactgtgggatcttgctcctgccgtgccgtgcttcaccgcttctggttcgtcatggtatatatgtatatggaatgtcttctggttgccgacgaagatgaatgcggttggctactcacgctgcaatactccggctgcggacgggcgtttcctggctccgacagcgcccggaggagagggactggctagatgtgccccataatagttgcaacctgctcgcaggaactccgtaggaggccactcttttaactgtgtcgcacacgtttacgaattctaaagtgggcttgatgacggcct

SEQ ID NO: 14985 - DNA, 1658 bp, Zea Mays
agccgcagccgccgccgccgcctctctctcccttccctcttctctctgccctcacctctctcccccttccatcacctcgctagtaacaggtcaccgtgtgtgtgcgcgccatggggattcatctgccgccgcctgccctcgccttctgcctctcggcgcccactcggttctagtggccgcttcgaggaggcgctcgcgcgcatcgaggagctccaggagcgcgacactggcgccgacgatagcagcacagcctcgtcgttcttgagcgacggagaggcggcgtcgcggccagcaggcgagcagcagtcgcactccgcagatttcttgagcgacggagaggcggcgtccggtggcattcagagacgtgcgtgacggtcggaggtcgtcgagcgcgtctagatagcatccaagacaaatagcgctgttcgcgatctgaggcagctggtaggcagtctgggcttgggcgcacgcgagccagagagggagggctgggagcacgtcatctccaagagcagcgacgacgtctcctacaaggcctggtgcgacaagcccacggtagttgccaattgcgtacatgcattgcaacagatctgggctctagaagctgctaacttggtagcagaaagattgaggcattgcatagcaaaccactggatcaaagagtttagtgaatggccacagtgcatgttcttgagttgcaatcaaagttccttccatataataataacaaaatatttgacataatgaatctgttggaggatagacttcaacatgcaaatggagtcgttgttttggcaacaattaaagtttttctccattcccatgactgttgttcatcaacaggtacgcatgttactcctagagaggtggtctctggatcatgctgcattattgctattacttctcaaaagcatttctttcttgttttagaatatgagatttagtatatgagcaccttctgttgatgcataaaaacaaaatcttatttagattaagatcccataacggactagcacatgacatcacaacaacaacacacttggtccatagataatgttttatttggaggttaatttacttgaatttttttaattccatggactctttactctgggtactggcagtcctaaatagtcattggcccttttatgtgtaaaataacagcttcctggtgttgatcccaatgatccatctgttaaaggtctctgtattgtgatgcaatgaaattcatgttgcctctagactatagcattgttctgcttcaccgtaccttgactaaataagaataaatatattatatgtcaccaaatcttcacatgaactgctatcctgtattatctggtggaaatatgaaggtttctttatttctcttcttaaacagcaagagaagaaggaagacaagtcagacaaaacagaagacgagaagaactgatgtagccatgttcatgcttccactgttgaaatgcatattcaacatagcttgctcagctcctatctgttgtttcaacgttgatttaaaagaagagctggtagttgtgggctttcgaacaatagctggaatgatctagctagctatatgtaaatgatctagttgtgaatgatattataactgtgatgcttttgtgaatatataattgtggtgcttttgtgtttgtgat

SEQ ID NO: 14986 - DNA, 2229 bp, Zea Mays
ggctcacgctcaggctcagcttgctgtgtgctggttgctgctcaaccgggttaggtcagctggccagccagcagccaggtccgtccgatcgctcgaagtcgaagcaccgcgttcctcgtctcgcgtcttcttccactgctccctcccacctccgctcccagcttttcccattctcgttgatacgagcgagagtcgagacaggtcaaaaggagattgagtaaggaaaagaaaaaaaaaatcgctgctcccgaggcacggcggcggcgagcgtgcgacacctccggcggctccacagatccggcgaccgatctccggccgcctgcggatgctccggggccggcgcggtaaggcccaggggtccacgctcgtagccagatctcggggcgctgctgggaagtggggttcgttccgtccctgcctccctggtggtggggatggggtggtccgcggggctgtggtggctcgtggccgcgctgtgggtggtggcggcggcggcggcggcggcggagggtgaggtcgtggtcgggtcagcgccgaggcggcacgcgtacgcgtcgatgatgtacatgggcactccacgggactacgagttctacgtggccacgcgcgtcatgatgcagtccctgcgccggctcagcgccgacgccgaccgcgtcgtgatcgcctccctcgacgtcccaccgctctgggtccaggcgctatgatggtgtaaaggtggtctctgtggagaatttgaaaaatccatacgagagacaagagaatttcaacatgcgattcaagttgaccttaaacaagctgtatgcatggagcttggtttcgtatgagcgagttgttatgcttgactccgacaacattttcctccaaaatactgatgagttatttcagtgtggtcagttctgtgctgtcttcatcaatccctgtatcttccatacaggtctctttgtgcttcagccctcaatgaacgtttttaagaatatgctacatgagctatcggttggacgtgaaaacccagatggtgcagaccaaggctttcttgctagttatttcccggacttacttgatcagccaatgttccatccaccagctaatggtacaaaacttcagggtacttaccgcctccctctaggctaccagatggatgcgtcttactattatctgaagcttcgctggagtattccatgtggaccgaacagtgtgattacatttccaagtgctccatggtttaagccatggtactggtggtcttggccagttttacctttggggctctcttggcatgaacaacgtcgtgaaaacctagggtattcatctgagataccagtagtattaattcaggctgtactgtacattggagtcatagcagtgacccgactggcgaggcctaccttgaacaagatgtgctacaacagaagaatggagaaaaacactatgttcttgctctctgttctcagagtcgtggctgcttggtccatacttgctgcctacaccatacccttcttcatcatcccaaggaccgtgcatccactgcttggctggcctctctacttgctcggttcttttgctctttcttccattgttatcaacattttcctcttccacccgatcaccgtcctcacaacatggtttggattcataggcgcactcctggtgatggccttcccttggtatctaaatggttttgtcagggccttggcagtgtttgcgtatgctttctgctgcgcgcccttgatctgggcatctttggtcaagacaatgagctccttgcaggtcctgattgagagggatgcattcaggctcggagaacctagccagaatgcggagttcacaaagctatactgagcctgggagcaagagtggttgtacacaatggaactatctggaaacctctagaatccatgaatgttgttatcttagacatgtaggtgacatatacagtggaaaaggggggagggctgtagaattggtgctgaactgaagaggaactgactggggtcagttgttagttattttgatttattgttcctctgaaaagccaaggcatttttggctttgtttgtaattgatatgatatgttccttcacaaatgaagaaaagggttgaaagttcaaacggtgtagtgttcgaaacagtactttgattttaccgtggtaaaattgtgtggcttgtgctgaacagttttcctttttataactgcttcgcctgaacgttgagttcagctcgtgtcgctgc

SEQ ID NO: 14987 - DNA, 1082 bp, Zea Mays
ctcataactaagggtataaagagcatgtccatcagatcccctttcccttcaaagctattataggggattgagaaaactcaatttcagactatggggagagctcctgcagcagattgagaagctccatccccttccatttacatgggacccataggtattcatctgagataccagtagtattaattcaggctgtactgtacattggagtcatagcagtgacccgactggcgaggcctaccttgaacaagatgtgctacaacagaagaatggagaaaaacactatgttcttgctctctgttctcagagtcgtggctgcttggtccatacttgctgcctacaccatacccttcttcatcatcccaaggaccgtgcatccactgcttggctggcctctctacttgctcggttcttttgctctttcttccattgttatcaacattttcctcttccacccgatcaccgtcctcacaacatggtttggattcataggcgcactcctggtgatggccttcccttggtatctaaatggttttgtcagggccttggcagtgtttgcgtatgctttctgctgcgcgcccttgatctgggcatctttggtcaagacaatgagctccttgcaggtcctgattgagagggatgcattcaggctcggagaacctagccagaatgcggagttcacaaagctatactgagcctgggagcaagagtggttgtacacaatggaactatctggaaacctctagaatccatgaatgttgttatcttagacatgtaggtgacatatacagtggaaaaggggggagggctgtagaattggtgctgaactgaagaggaactgactggggtcagttgttagttattttgatttattgttcctctgaaaagccaaggcatttttggctttgtttgtaattgatatgatatgttccttcacaaatgaagaaaagggttgaaagttcaaacggtgtagtgttcgaaacagtactttgattttaccgtggtaaaattgtgtggcttgtgctgaacagttttcctttttataactgcttcgcctgaacgttgagttcagctcgtgtcgctgc

SEQ ID NO: 14988 - DNA, 2308 bp, Zea Mays
tccaaaaacatcccaaacaactttcccctccccggctccccacatcttgtctgccacagttccacctctccatttcgccgaggaagaaaaaggaaaaaaacacagaaggggttggagagaaacggatcaggggcggaaggttccagccctagcacagcaatggcgggttggtgcgaggaggcggtggcgttgctgcagcgccccgcggcggcggagatggccgtcgacgtgctgctctgcgcggtgccgatctgggccgctgtcatgatcggcctcgtcgtcggctggtcctggcgcccgcgctggacggggctgctcttcctcggcctccgcacccgcctccgcatcatctggctgccgcccggcctcggggcccggcggctctggttcgcctgcactgcgctctccgcctgctccgtcgcgcccaggctcctctcctccgcattccgccgctgcagaggtaagcaacaggacaaggcctcccctgaggatactgctgctgtggctcgggacggcggaggttgcgccgatggcaggtgagcgtagtggttgaatctattttacattgtggctggcggggttggctgggtaccggggtgggtggcggaaatgcagcgcctgtcaatcttgtcaactgtctctcttggagaccagttgtctttcagtttgaaattgtattgaacgatcttgcggttctttcattgggcgaccctgtccttgtgttggaggcagtttaggagatttgaacttttttcccctcatgaaaattactctctttaagctgacttgatgaactgacacacatgacgatagagttggagttgagggagttattgtattttgaattcgtgacattgaccgatgttggaaacttgtgccttcgctgatagaagagtctatagctccgttcggtgaaaacttgctagttatgtaggctatatatactccctcggtcactccattcttttttatttgtcgcgttttagttaaaaattgaaaatagcgggcggcaaatattcgagaacggaggagtagtttttttggtgattggttactttcgttcgctttgcaccatggaaggattcacaacataaacttgcctgctgctggagtttcattgtggttgtggtttatttcatccttgtttggtggttctagtatgtgttcttgctgtgaacttgttcttgtggacataagaaaacaccacaagttcataatgttttgtgaaaacttagttcaattttaacattttctgatcggcaggacaaattttgagggtgaacatgatactgtcactgagaaggacctagaacttctccttcaacttttagataataaggaaagcggggatacagcttggcagaatttgatggagcgtacaacctccaacatgacctacaaggcctggcggcgtgagcctgaggagggacctataatgtactgcagccgcactatttttgaggatgctacacctgaactggttagagatttcttctgggatggtgattttcgtctaaagtgggatcccatgcttgcatactccaaatctttggatgagttccctcagaatggagcaacaattgtccactggataaaaaagttcccattcttttgcagtgaccgtgaatacatctttggaggacgcatatgggaatctgggaagacttactattgtgttacaaagagtcacgccttcatcttcctcgccgcactagggcagatgcctcgcaggagctactcacctgcaccagagctgcctgggaaaaggccgcgcgtcgtggccgctgccggggcagggacacggacccgggccttgcccatgccggggtgggggcaccggcaagtatgcacccacgccggctgtcagggtcacacatggacctcccaccaataatgttcttgctcgtgagacggaggaggaagacaagtcgctcgatggaaaaagaacgaatcaataactttcatagccactggcaggtggttgatttcgtggactttccgaactccatagcagatgaaagcagggagaaggctactgtgaaatttggactggtcagaagctgtttttggctgtggctttgggtgggagccaacccatctggttggctaaaagccaaagcaggttggaaagcccaactaaagggggccttactcatgtaattatgctccctttattatcttaaaaaaacaattgtttaattaactgatgttttatcctcttccatttccctgctcaatggttatgctttacttttagccttacacctactgcatgagatttatattccttttcgacccttctttttct

SEQ ID NO: 14989 - DNA, 2576 bp, Zea Mays
tccaaaaacatcccaaacaactttcccctccccggctccccacatcttgtctgccacagttccacctctccatttcgccgaggaagaaaaaggaaaaaaacacagaaggggttggagagaaacggatcaggggcggaaggttccagccctagcacagcaatggcgggttggtgcgaggaggcggtggcgttgctgcagcgccccgcggcggcggagatggccgtcgacgtgctgctctgcgcggtgccgatctgggccgctgtcatgatcggcctcgtcgtcggctggtcctggcgcccgcgctggacggggctgctcttcctcggcctccgcacccgcctccgcatcatctggctgccgcccggcctcggggcccggcggctctggttcgcctgcactgcgctctccgcctgctccgtcgcgcccaggctcctctcctccgcattccgccgctgcagaggtaagcaacaggacaaggcctcccctgaggatactgctgctgtggctcgggacggcggaggttgcgccgatggcaggtgagcgtagtggttgaatctattttacattgtggctggcggggttggctgggtaccggggtgggtggcggaaatgcagcgcctgtcaatcttgtcaactgtctctcttggagaccagttgtctttcagtttgaaattgtattgaacgatcttgcggttctttcattgggcgaccctgtccttgtgttggaggcagtttaggagatttgaacttttttcccctcatgaaaattactctctttaagctgacttgatgaactgacacacatgacgatagagttggagttgagggagttattgtattttgaattcgtgacattgaccgatgttggaaacttgtgccttcgctgatagaagagtctatagctccgttcggtgaaaacttgctagttatgtaggctatatatactccctcggtcactccattcttttttatttgtcgcgttttagttaaaaattgaaaatagcgggcggcaaatattcgagaacggaggagtagtttttttggtgattggttactttcgttcgctttgcaccatggaaggattcacaacataaacttgcctgctgctggagtttcattgtggttgtggtttatttcatccttgtttggtggttctagtatgtgttcttgctgtgaacttgttcttgtggacataagaaaacaccacaagttcataatgttttgtgaaaacttagttcaattttaacattttctgatcggcaggacaaattttgagggtgaacatgatactgtcactgagaaggacctagaacttctccttcaacttttagataataaggaaagcggggatacagcttggcagaatttgatggagcgtacaacctccaacatgacctacaaggcctggcggcgtgagcctgaggagggacctataatgtactgcagccgcactatttttgaggatgctacacctgaactggttagagatttcttctgggatggtgattttcgtctaaagtgggatcccatgcttgcatactccaaatctttggatgagttccctcagaatggagcaacaattgtccactggataaaaaagttcccattcttttgcagtgaccgtgaatacatctttggaggacgcatatgggaatctgggaagacttactattgtgttacaaagggtgttccatatccatcattgcccaagaaagaaaaaccaaggcgtgtggagttgtacttctcaagttggcgtattagagctgttcaatcgcctaaacatgtgggtcagcaatctgcgtgcgaagtaactttggttcactatgaggacatgggcataccaaaagatgtagccagggttgctgttcgccacggcatgtggggtgctgtgaagaaacttcagtctgggttcagagcgtaccagcaaatgagagacacagaaaataccctgtcacacagcgccattatggctcgaatgaccaccagggtatccatcacggcttcgaatggtggcttagaccatgacctctccatcgccgataaaatcagtggcgagaatgacagctcccatgcagttcagcatggttttgactggaagtgggtggtttttggtggtgcggtggctgcggtttgtgtgctcaacaccggactggtaggcaaggtcctgttgcttggagcagcgagacggcaggcaaagaagtgatgtgaggagcaaccttccagcctctgcagaaaggcattcgtcaggctgtagctacaaccgtacaggcaaaaagtattgaggaaataggtggggttcgacagatataattgcaatgtgtaattttggattgtgcacttgtgcagtagatgtagcatgcttgctaccataacagattccgctgtatcaggaatcgctggctaatactccgtatatctgaagatctaagaggtcactgcatgtttgcagctttctatgttcgatatacgtataacggcactgcatgttataagagaaatccattctctgacactgaacagccttttaacatttctttctgaggctgtcattaggtcctggtgccatgtcatatgaa

SEQ ID NO: 14990 - DNA, 866 bp, Zea Mays
cacctcgccgccgtctccatcttccatcgcctccgccgcaacctcgcctccgccttccatcgccgccgcgtgcagagagtcccgcacgctacgtagagaagtcgaggactggggtgttgtgtccagcgtgcccactgatggcgaggcccgcgccgccatcgccagttgtttgggaaggcttctgtcctggattctgaaccgactgaactacaagccctcgcattgcccgtctcagggcatccttcatctgggatattcatggatcatcttgctctggattcggatgcatctatggccatactcgatgaatggactgaaccagctaagctcgttctgaattcaagtgcgcttttaacagaggaacatcaaagtgtgctggatgcattccacttattgcgcgaagacgcctatgttcagaaaatggttatggctttgtcaactgacaaggctgtatggaatgctgtaatgaacaatgatgtggtacaagaatttaagaggtccttcaaggatgccaaggaaacgtatctcaagggaagctctactcctcctcctcctggatttatgatgtgggtcatgaaaaacgtccatgcaaaaattagggaattcttcaagacaatgtttgggcttacgaatatactcttccaagcgggtgaccatagctatcaagccggtgaacagaactatgatttctatgattgtatagtgaggatgtcattcatgctcacggtgttcgtatttgttatggtaaccgtagctcgtatacgatgagcacaacaattcgtcgtcgacctctagaatttaccttcataagttaccttcttggtggtggaaacttataatttggagtgcagggagtaagactatag

SEQ ID NO: 14991 - DNA, 3015 bp, Zea Mays
atttatttttgcgtccgtcctccaaatctggcgatggtgatgggggactcggacgggactgggacccccacacacccagcacggctggccagctcctctcctcctcctcctccgcctcccacgtccgtcgtaataaatcgccccgtcgtctccaattccccccctcctctcctttctccccgcccgcgtgagatcggctcgaatccaatcctctccaataatacgcaccggcacccatttgcgccatgctgccgcggccggccaccacgacgagccaagaacacgcgcggcatccctgagccacccacccaggcttaccaaaacggattccttttccctcttggatcccagccgctcccaagcgtgcgcgcgaattctctgcttgcctcgcccagcgccgtgtgctcttgtgctgaagatccatcccatccatggaagggtgccaactgctagtaggctgtaggatggagatggaggaggaagcgttctttgactcgcgagaggagctcacggcgtcgccggcgcccagcccgggccctgcattgccgtggtcgggaagcctcgacagtgtgtgtcagaggagggagcggttcatgagaagcatgggcctagagtgctgcccggctcccctgcaggccgatgccgtggccaccgtgggcgatgtcgacaaggaggaagaggctgtgccggaatttgggagatcgtggtcgcagtcggatgagaacgactgctccatgtcgagttggtccacggaggagacgaagagcttagaggatggtgtctcggatgacaattctgtcagtggatccagccgggatgatgctagcagcaaggtgagcaggagtttcagttcgttgtccttcatccagaggctcatgagccgcagtggtaagctctctggtgttcccaaggcggtcgagaggaggagaaacggatggcttcggaggctgggcttgaggtctggtatcctcgatcatggaggcgatgaggctagcaccagctcctcagagagtgagcaaaacaggggtggaaggtatgaaagggtcaaggtccgcagctacaggaagcggtcgaaagaactgtcagcagtttatcaaggccaagtgattaagggccatgatggtgccatcctggctatgaagtttagtccggatgggcagtttcttgctactggaggggaagatggagttgtcagggtctggggcgtcgcgcagtctgaggactgcaaaatcccaatggatgatccttcttgtgtttacctcaaagctcatcgccagagtggcttgggtcctgttgatgctgacaatgagaagaaatgcaaagttaagggcgtgaagcaatctgcagattctgcctgtgttgtgattccaacagtggtgttccagatctcaaagcaaccactgcatgagttccgtggtcactctggtgacgtactgagtctgtcatggtctaacaacaagcatctactgtcagcatcaacagacaaatctgttcgcttgtgggaaattggatctgcaaactgcatcactgtttttccgcacagcaactttgtgacttgtgtccagttgaatccaaccaatgagaatcaattcatcagtggatccatagatggcaaaatccgtgtgtgggatattcccagatgcagtgtcattgattgggtggatattagagacataataacagcggtttgctatcgacctgacggaaagggagcagtggtcggaaccattactggaaattgtcgattttatgatgcatcagataatctcctgaggtttgaaacacaagttgcactcagtggcaagaaaaagtcttctcttaaaagaatcactgctttcgagttctcaccaagcaacccaagtaaattaatggttacctctgctgactcgaaggttaaaattcttgaaggaaccactgtgactcagaattatagtggactccgtactgggtcttgccagtccttggcaacattcactcctgatgggcagcatatagtttgtgcaagcgaagactccaatatttatgtatggaaccatgaaaaccaagacgaggcttcactgaaacatgcgaaaaccatatggtcctcagagcgcttctactccaacaatgcagccatcgcaataccatggaatggcccgaaacccagaaacccggtctctctggcctcccaaatcttgtcaccacaaggagataacttgtggtgcatgagtaaggctgtcaagtgcagttcgagtcagagcgaagattctgctatcaacagttttgtgtcaaggtttgctcctggtattttcaatttgaatcaggagttctcctctgagtccacttgcagaagttcagcgacctggccagaggaaatcctgccgtctcgctcgattcgtgcaattctggacgagtcgcagtacaagttcctaaggaactgtttccagagcacaccaaactcgtggggtcaagtgatagtcactgcaggatgggatggcaagatcaggtcgttccagaactatggcttaccggcgcaccagtgaacaacagctggagcatctgctgaaactacaccggcagttttggcacctcacatggcgtgtggtttgttggtacaagacatcacatgctcagtgctcctcctgctgaattgtacatggaccagtgttgtacataatcaacctggtggtcctttgagatctccgcgtcagcggttgttcatggcaggacccgtggattgtacctttttgtagaaattttttgtgtgtagatcagatctgactctctccctttgcccccccttatcaattgctcattgatatatatactacagaaatgttagtctcagctgagtgtaagttcccctcccattgtattgcgggaacagccagatatatatatgtgccactcaagtatacaaaattctttcatttttttttgaacttttcctgctctgttgttctgcaagttttcattttgtcgatcgaatttcagatacaggtgactagttctcctgtttgacatcgtaagcagttg

SEQ ID NO: 14992 - DNA, 2926 bp, Zea Mays
ctcctctcctcctcctcctccgcctcccacgtccgtcgtaataaatcgccccgtcgtctccaattccccccctcctctcctttctccccgcccgcgtgagatcggctcgaatccaatcctctccaataatacgcaccggcacccatttgcgccatgctgccgcggccggccaccacgacgagccaagaacacgcgcggcatccctgagccacccacccaggcttaccaaaacggattccttttccctcttggatcccagccgctcccaagcgtgcgcgcgaattctctgcttgcctcgcccagcagcgccgtgtgctcttgtgctgaagatccatcccatccatggaagggtgccaactgctagtaggctgtaggatggagatggaggaggaagcgttctttgactcgcgagaggagctcacggcgtcgccggcgcccagcccgggccctgcattgccgtggtcgggaagcctcgacagtgtgtgtcagaggagggagcggttcatgagaagcatgggcctagagtgctgcccggctcccctgcaggccgatgccgtggccaccgtgggcgatgtcgacaaggaggaagaggctgtgccggaatttgggagatcgtggtcgcagtcggatgagaacgactgctccatgtcgagttggtccacggaggagacgaagagcttagaggatggtgtctcggatgacaattctgtcagtggatccagccgggatgatgctagcagcaaggtgagcaggagtttcagttcgttgtccttcatccagaggctcatgagccgcagtggtaagctctctggtgttcccaaggcggtcgagaggaggagaaacggatggcttcggaggctgggcttgaggtctggtatcctcgatcatggaggcgatgaggctagcaccagctcctcagagagtgagcaaaacaggggtggaaggtatgaaagggtcaaggtccgcagctacaggaagcggtcgaaagaactgtcagcagtttatcaaggccaagtgattaagggccatgatggtgccatcctggctatgaagtttagtccggatgggcagtttcttgctactggaggggaagatggagttgtcagggtctggggcgtcgcgcagtctgaggactgcaaaatcccaatggatgatccttcttgtgtttacctcaaagctcatcgccagagtggcttgggtcctgttgatgctgacaatgagaagaaatgcaaagttaagggcgtgaagcaatctgcagattctgcctgtgttgtgattccaacagtggtgttccagatctcaaagcaaccactgcatgagttccgtggtcactctggtgacgtactgagtctgtcatggtctaacaacaagcatctactgtcagcatcaacagacaaatctgttcgcttgtgggaaattggatctgcaaactgcatcactgtttttccgcacagcaactttgtgacttgtgtccagttgaatccaaccaatgagaatcaattcatcagtggatccatagatggcaaaatccgtgtgtgggatattcccagatgcagtgtcattgattgggtggatattagagacataataacagcggtttgctatcgacctgacggaaagggagcagtggtcggaaccattactggaaattgtcgattttatgatgcatcagataatctcctgaggtttgaaacacaagttgcactcagtggcaagaaaaagtcttctcttaaaagaatcactgctttcgagttctcaccaagcaacccaagtaaattaatggttacctctgctgactcgaaggttaaaattcttgaaggaaccactgtgactcagaattatagtggactccgtactgggtcttgccagtccttggcaacattcactcctgatgggcagcatatagtttgtgcaagcgaagactccaatatttatgtatggaaccatgaaaaccaagacgaggcttcactgaaacatgcgaaaaccatatggtcctcagagcgcttctactccaacaatgcagccatcgcaataccatggaatggcccgaaacccagaaacccggtctctctggcctcccaaatcttgtcaccacaaggagataacttgtggtgcatgagtaaggctgtcaagtgcagttcgagtcagagcgaagattctgctatcaacagttttgtgtcaaggtttgctcctggtattttcaatttgaatcaggagttctcctctgagtccacttgcagaagttcagcgacctggccagaggaaatcctgccgtctcgctcgattcgtgcaattctggacgagtcgcagtacaagttcctaaggaactgtttccagagcacaccaaactcgtggggtcaagtgatagtcactgcaggatgggatggcaagatcaggtcgttccagaactatggcttaccggcgcaccagtgaacaacagctggagcatctgctgaaactacaccggcagttttggcacctcacatggcgtgtggtttgttggtacaagacatcacatgctcagtgctcctcctgctgaattgtacatggaccagtgttgtacataatcaacctggtggtcctttgagatctccgcgtcagcggttgttcatggcaggacccgtggattgtacctttttgtagaaattttttgtgtgtagatcagatctgactctctccctttgcccccccttatcaattgctcattgatatatatactacagaaatgttagtctcagctgagtgtaagttcccctcccattgtattgcgggaacagccagatatatatatgtgccactcaagtatacaaaattctttcatttttttttgaacttttcctgctctgttgttctgcaagttttcattttgtcgatcgaatttcagatacaggtgactagttctcctgtttgacatcgtaagcagttg

SEQ ID NO: 14993 - DNA, 2909 bp, Zea Mays
ctcctctcctcctcctcctccgcctcccacgtccgtcgtaataaatcgccccgtcgtctccaattccccccctcctctcctttctccccgcccgcgtgagatcggctcgaatccaatcctctccaataatacgcaccggcacccatttgcgccatgctgccgcggccggccaccacgacgagccaagaacacgcgcggcatccctgagccacccacccaggcttaccaaaacggattccttttccctcttggatcccagccgctcccaagcgtgcgcgcgaattctctgcttgcctcgcccagcgccgtgtgctcttgtgctgaagatccatcccatccatggaagggtgccaactgctagtaggctgtaggatggagatggaggaggaagcgttctttgactcgcgagaggagctcacggcgtcgccggcgcccagcccgggccctgcattgccgtggtcgggaagcctcgacagtgtgtgtcagaggagggagcggttcatgagaagcatgggcctagagtgctgcccggctcccctgcaggccgatgccgtggccaccgtgggcgatgtcgacaaggaggaagaggctgtgccggaatttgggagatcgtggtcgcagtcggatgagaacgactgctccatgtcgagttggtccacggaggagacgaagagcttagaggatggtgtctcggatgacaattctgtcagtggatccagccgggatgatgctagcagcaaggtgagcaggagtttcagttcgttgtccttcatccagaggctcatgagccgcagtggtaagctctctggtgttcccaaggcggtcgagaggaggagaaacggatggcttcggaggctgggcttgaggtctggtatcctcgatcatggaggcgatgaggctagcaccagctcctcagagagtgagcaaaacaggggtggaaggtatgaaagggtcaaggtccgcagctacaggaagcggtcgaaagaactgtcagcagtttatcaaggccaagtgattaagggccatgatggtgccatcctggctatgaagtttagtccggatgggcagtttcttgctactggaggggaagatggagttgtcagggtctggggcgtcgcgcagtctgaggactgcaaaatcccaatggatgatccttcttgtgtttacctcaaagctcatcgccagagtggcttgggtcctgttgatgctgacaatgagaagaaatgcaaagttaagggcgtgaagcaatctgcagattctgcctgtgttgtgattccaacagtggtgttccagatctcaaagcaaccactgcatgagttccgtggtcactctggtgacgtactgagtctgtcatggtctaacaacaagcatctactgtcagcatcaacagacaaatctgttcgcttgtgggaaattggatctgcaaactgcatcactgtttttccgcacagcaactttgttgaatccaaccaatgagaatcaattcatcagtggatccatagatggcaaaatccgtgtgtgggatattcccagatgcagtgtcattgattgggtggatattagagacataataacagcggtttgctatcgacctgacggaaagggagcagtggtcggaaccattactggaaattgtcgattttatgatgcatcagataatctcctgaggtttgaaacacaagttgcactcagtggcaagaaaaagtcttctcttaaaagaatcactgctttcgagttctcaccaagcaacccaagtaaattaatggttacctctgctgactcgaaggttaaaattcttgaaggaaccactgtgactcagaattatagtggactccgtactgggtcttgccagtccttggcaacattcactcctgatgggcagcatatagtttgtgcaagcgaagactccaatatttatgtatggaaccatgaaaaccaagacgaggcttcactgaaacatgcgaaaaccatatggtcctcagagcgcttctactccaacaatgcagccatcgcaataccatggaatggcccgaaacccagaaacccggtctctctggcctcccaaatcttgtcaccacaaggagataacttgtggtgcatgagtaaggctgtcaagtgcagttcgagtcagagcgaagattctgctatcaacagttttgtgtcaaggtttgctcctggtattttcaatttgaatcaggagttctcctctgagtccacttgcagaagttcagcgacctggccagaggaaatcctgccgtctcgctcgattcgtgcaattctggacgagtcgcagtacaagttcctaaggaactgtttccagagcacaccaaactcgtggggtcaagtgatagtcactgcaggatgggatggcaagatcaggtcgttccagaactatggcttaccggcgcaccagtgaacaacagctggagcatctgctgaaactacaccggcagttttggcacctcacatggcgtgtggtttgttggtacaagacatcacatgctcagtgctcctcctgctgaattgtacatggaccagtgttgtacataatcaacctggtggtcctttgagatctccgcgtcagcggttgttcatggcaggacccgtggattgtacctttttgtagaaattttttgtgtgtagatcagatctgactctctccctttgcccccccttatcaattgctcattgatatatatactacagaaatgttagtctcagctgagtgtaagttcccctcccattgtattgcgggaacagccagatatatatatgtgccactcaagtatacaaaattctttcatttttttttgaacttttcctgctctgttgttctgcaagttttcattttgtcgatcgaatttcagatacaggtgactagttctcctgtttgacatcgtaagcagttg

SEQ ID NO: 14994 - DNA, 2927 bp, Zea Mays
ctcctctcctcctcctcctccgcctcccacgtccgtcgtaataaatcgccccgtcgtctccaattccccccctcctctcctttctccccgcccgcgtgagatcggctcgaatccaatcctctccaataatacgcaccggcacccatttgcgccatgctgccgcggccggccaccacgacgagccaagaacacgcgcggcatccctgagccacccacccaggcttaccaaaacggattccttttccctcttggatcccagccgctcccaagcgtgcgcgcgaattctctgcttgcctcgcccaggcagcgccgtgtgctcttgtgctgaagatccatcccatccatggaagggtgccaactgctagtaggctgtaggatggagatggaggaggaagcgttctttgactcgcgagaggagctcacggcgtcgccggcgcccagcccgggccctgcattgccgtggtcgggaagcctcgacagtgtgtgtcagaggagggagcggttcatgagaagcatgggcctagagtgctgcccggctcccctgcaggccgatgccgtggccaccgtgggcgatgtcgacaaggaggaagaggctgtgccggaatttgggagatcgtggtcgcagtcggatgagaacgactgctccatgtcgagttggtccacggaggagacgaagagcttagaggatggtgtctcggatgacaattctgtcagtggatccagccgggatgatgctagcagcaaggtgagcaggagtttcagttcgttgtccttcatccagaggctcatgagccgcagtggtaagctctctggtgttcccaaggcggtcgagaggaggagaaacggatggcttcggaggctgggcttgaggtctggtatcctcgatcatggaggcgatgaggctagcaccagctcctcagagagtgagcaaaacaggggtggaaggtatgaaagggtcaaggtccgcagctacaggaagcggtcgaaagaactgtcagcagtttatcaaggccaagtgattaagggccatgatggtgccatcctggctatgaagtttagtccggatgggcagtttcttgctactggaggggaagatggagttgtcagggtctggggcgtcgcgcagtctgaggactgcaaaatcccaatggatgatccttcttgtgtttacctcaaagctcatcgccagagtggcttgggtcctgttgatgctgacaatgagaagaaatgcaaagttaagggcgtgaagcaatctgcagattctgcctgtgttgtgattccaacagtggtgttccagatctcaaagcaaccactgcatgagttccgtggtcactctggtgacgtactgagtctgtcatggtctaacaacaagcatctactgtcagcatcaacagacaaatctgttcgcttgtgggaaattggatctgcaaactgcatcactgtttttccgcacagcaactttgtgacttgtgtccagttgaatccaaccaatgagaatcaattcatcagtggatccatagatggcaaaatccgtgtgtgggatattcccagatgcagtgtcattgattgggtggatattagagacataataacagcggtttgctatcgacctgacggaaagggagcagtggtcggaaccattactggaaattgtcgattttatgatgcatcagataatctcctgaggtttgaaacacaagttgcactcagtggcaagaaaaagtcttctcttaaaagaatcactgctttcgagttctcaccaagcaacccaagtaaattaatggttacctctgctgactcgaaggttaaaattcttgaaggaaccactgtgactcagaattatagtggactccgtactgggtcttgccagtccttggcaacattcactcctgatgggcagcatatagtttgtgcaagcgaagactccaatatttatgtatggaaccatgaaaaccaagacgaggcttcactgaaacatgcgaaaaccatatggtcctcagagcgcttctactccaacaatgcagccatcgcaataccatggaatggcccgaaacccagaaacccggtctctctggcctcccaaatcttgtcaccacaaggagataacttgtggtgcatgagtaaggctgtcaagtgcagttcgagtcagagcgaagattctgctatcaacagttttgtgtcaaggtttgctcctggtattttcaatttgaatcaggagttctcctctgagtccacttgcagaagttcagcgacctggccagaggaaatcctgccgtctcgctcgattcgtgcaattctggacgagtcgcagtacaagttcctaaggaactgtttccagagcacaccaaactcgtggggtcaagtgatagtcactgcaggatgggatggcaagatcaggtcgttccagaactatggcttaccggcgcaccagtgaacaacagctggagcatctgctgaaactacaccggcagttttggcacctcacatggcgtgtggtttgttggtacaagacatcacatgctcagtgctcctcctgctgaattgtacatggaccagtgttgtacataatcaacctggtggtcctttgagatctccgcgtcagcggttgttcatggcaggacccgtggattgtacctttttgtagaaattttttgtgtgtagatcagatctgactctctccctttgcccccccttatcaattgctcattgatatatatactacagaaatgttagtctcagctgagtgtaagttcccctcccattgtattgcgggaacagccagatatatatatgtgccactcaagtatacaaaattctttcatttttttttgaacttttcctgctctgttgttctgcaagttttcattttgtcgatcgaatttcagatacaggtgactagttctcctgtttgacatcgtaagcagttg

SEQ ID NO: 14995 - DNA, 5066 bp, Zea Mays
gtttgtagacgggtaaaaggaaatattagtacggtagtaccgtcaactagagccgacaggtcaacctctaatagcgtgtttggctggaggagtgatgaattctatagaaactaaataaaataaaatgtaaggactaaaaattagtcctagaaactaaatatctctagtgtaaatctttttttaaagaacagaccaaacaagaaagacgttaaaacgcactgattaaaaccgagtctctctctggtcgtcgtctccgcgtccactctcttcaccatctccacccctaaagcccaccgattaaaaccgagtctctctggacgtcccccgcgtctaccttctctatctccacccccaactccccaagagccgatcagaccatttgtaccgacccccgagaggcgaccaggcagtccggaagcgcgtccgtccgttggtgctgctggtgccttgtggtcgagcgatgtcgaacgccgccgacgtggaggcgggcgcccaggcgagggcggcgccggcgacgacggggatcaagccgcccccggggcggtacaacaacatgaccagcaacgggccgtacacgccaccgtcgccgttctactacgaccccgcggcggcgcacgggcggcaccactggtcgtggctggtgccgctggtggtcatcgccaacgtgctcatgttcgtgctggtcatgttctacaacaactgcccgcgcagcggcggggactgcgtcggccgcggcttcctccgccgcttctccttccagccgctcaaggagaaccccctcctcggccccacggccgccacgctgcagagatacggagccctcgactggtacaaggtcgtgcacgggaaccaggcctggcggctggagtcgtgcacctggctgcacgccggcctcatccacctgctcgccaacatgatcagcctcatcttcatcggcgtccgcctggagcagcagtttggattctggaaggtgggcctggtgtacctcgtctctggcttcggagggagcgtgctctccgtcttcttcatcaggaagggcgtctccgtgggcgcctccggcgcgctcttcggcctcctgggagcgatgctgtcggagctcatcaccaactggtccatctacaccaacagattgcagccatgctgaacctgatcatcatcgccgccatcaacctggcgctcgggatactcccgcacgttgacaacttcgcgcacatcggcgggttcgccacaggcttcctcctcggcttcgtgctgctgatccagccccagttcgggtggctggagcagcccttcggtgccaagaccaagtccaagtacaaggcatatcagatcatcctcctgcttgctgccctcgtcttgctggctgcagggttcgctgttggattggtaatggtgttcagaggagagaacggcaacgatcactgtagctggtgccactacctgacctgcgtgccgacgtcaagctggaagtgtgacaattgaactgatcagagattagtgacgggttagcatgcttgcgtcgtacagaagagaacatgcgtccccaccacgagagacaatgtcaagatagatacgtgcccctcaccttctatgacattgtcaatgtattgctttcaagtttgatttttaaagtctgcattgtacagaattctcctgcctccattggatccaaatgaggagtttattggtattttttcttgtatatgttaaaaaaaactctgtaaatcactctgcctgtgttctggtttatggttttattcattgatttcctctgctgtgtcatgtccattttcaaacgttcagactaataataggagtagatgacatcttgcagctgaaccacttcttccgcgttgctgaatggctccggccttttttttggtatatacaagaaccaaaacaaatcgtaacagaactaaaaaaatctcttatacagctagatcggttggtctcttgatcatagggtgctgtaaccaccacgggaataaaccagatggcttaaagtaatgttcataggctataacaacatcaatcagaatcaagggaatggagccacaacgagaatcacaccacacctaactttgcgctataaagaaatgaaggaaagaatgaccaccttgactaaactactccagcaatcccattagcctgctatatcccttcagcgcaccccaaaagaatacaaaattaagggagcgcaagtgaaaagggttcaaagttcaaactcgcattagcctattgttttgttagtggcagcttccaaaatgttttggtagccacaagtattttctcggtactgcctgattctggttcactgtcatgcacctgtgccttccaccgaatcgactgagcgatctgtgctgccttggctactacgtctggcgaggcccgtataacggcagttccttctgggcgcagtatgcgatccatctccaacatgacatcaaacaggtcacatctgaaaaagaaagtcatacaaaaccatgtgtaaggttagtcatgtaaaggtaaaactatgataacaatcttggctaatccatttacttgaattctaacaagacatgttcattgaattaagaatgctaaaggtcaaatggtcaatacagtagtacagcagcaacccgcaaagtacttcagtttcctttgttttatttgttcacctaagtcaactctaaccagatacttctttcctagaaaatacatcctccaatcaaaaataagttcattaggacatcaagtccaaaggttgtggcgggagaatagagaccaaagattttagactcaggccgtgtttctttcggagtataatctgtccagattatataatccagcataaataatctagcaggtaaataaacaattagattataggtccagattatataaatatataatctaaagcccagattatgataatctcataatctcctcaagagtagctaatttgagattatttttggcaaaagacccactattacaaatctgacatttttcttcttttcccaaatcacacgcacgcagggtattgttgtttttgtctttgtatctcaaaatcaataaccttcattcatataatctagttatccaaacagctccatatagattataatctcaacaaattataatctagattgtataatctataagttgaaacaaacatgccctcggtagaactaaaaccgaatatatgagattgatttcgatactactacatataaaggagatgttaatttggaagggcaggtagtgtacaggaagatacctttgtatttaggatcaatgttagatattcatgaagatgtttgccataatatcaaagcaaagtgaatgaagtgatgtcaattatctgacattctatataacaagagagtaccgtagaagctaaaaagcaagttttataagacgataattagacctgctatgttatatagtgcaaaatattggtctaaaaaagacaacatgttcatcaaataagtgttgcaaaatacgtatgttgcattagttttgtggccatacaagaaggaatcaagatcgtaataatgatatacgtggtagactagaagtagcactaattcaagaaaagctcgtccaacattggttgaaattgtttagatatgtccaacagagacctctaaagacaccaatgtatagtggtatcataaaacgaatagcaatgaaaagagagaaagaggaaaccaaaattaacataggaagaggcagtaaaaggagacctaaaatgataaaatatacacaaatatgagtgcatgaaaaataaccatacatgtgtccgaaccttgatttgtgggttttgttaggttttaactctagcctaccctaacttgcttgggactaaaagagactttgttttttttttgaacgaactttgttgttgttataggacatcgatgcggtctacaatatggtattttgggtaacaaaaaatatattgttattaaatgggtgattattgtagaagtatttttataaggaatttaataataccaatcttgtgttgtttcaggagtcaggtcaaacctaacctagatagagttatattccgatcaaaggaagcaattcaagttaaatcacgtttaggctgcaacccaaactcaagcttctgcaaaacacaaattgcaccgatcattgaaacaaataaatgatagaactttttttcctcgaacgcacaagagacatatgcatcatttcattaagaagggaggaaaaaaagatccaaaatggatcagtacatgctgcagaaaccattggaaacaaacaagatctacaaatttaaaattaaacagaaaacaagtcttaaggtatgtaacaagaacatagttgttactgtactaatttacatttggtgagattcacatgtcaaaggtcttttttactcattaagcagtacacattaacacctgcaccaacagtttattatggacatgtcttcaacttcaagataataacctaggcatagcaggaattgggacgctcaacatagtagtaacctataaatacatacaagtttcaggaaacatcactttctcaagcgaagtttgattcttatctcattagtgtaaagaaaagacagggagacaagttttaatgatgatatttttataaattattatggatttctgcagaatttaccaatcaagtgaaacgaactgtgaaatttaataataaagtacttatgtcaaacatcttaatggagatggagtacaagataaggttttctcatatcacactgatacaaggttaaataaatgaaatgagaataatataaaaatattagaaaatgggacaataactccaggtatatggctggtgtacctgctagtgcctgaaatcgggccacttatcaaggagtcaattgcatcagcatgaataagatcataggtacgaggatacgttgagaatggttcacacctgacaacaaaaacatataatcagtacaatttgggaacataactatctgtctactacttgagtatttcttcaaatctataaacctaaaatgacaagcagttcatttatatggagcattttatatttgatcaaaccatctg

SEQ ID NO: 14996 - DNA, 5067 bp, Zea Mays
gtttgtagacgggtaaaaggaaatattagtacggtagtaccgtcaactagagccgacaggtcaacctctaatagcgtgtttggctggaggagtgatgaattctatagaaactaaataaaataaaatgtaaggactaaaaattagtcctagaaactaaatatctctagtgtaaatctttttttaaagaacagaccaaacaagaaagacgttaaaacgcactgattaaaaccgagtctctctctggtcgtcgtctccgcgtccactctcttcaccatctccacccctaaagcccaccgattaaaaccgagtctctctggacgtcccccgcgtctaccttctctatctccacccccaactccccaagagccgatcagaccatttgtaccgacccccgagaggcgaccaggcagtccggaagcgcgtccgtccgttggtgctgctggtgccttgtggtcgagcgatgtcgaacgccgccgacgtggaggcgggcgcccaggcgagggcggcgccggcgacgacggggatcaagccgcccccggggcggtacaacaacatgaccagcaacgggccgtacacgccaccgtcgccgttctactacgaccccgcggcggcgcacgggcggcaccactggtcgtggctggtgccgctggtggtcatcgccaacgtgctcatgttcgtgctggtcatgttctacaacaactgcccgcgcagcggcggggactgcgtcggccgcggcttcctccgccgcttctccttccagccgctcaaggagaaccccctcctcggccccacggccgccacgctgcagagatacggagccctcgactggtacaaggtcgtgcacgggaaccaggcctggcggctggagtcgtgcacctggctgcacgccggcctcatccacctgctcgccaacatgatcagcctcatcttcatcggcgtccgcctggagcagcagtttggattctggaaggtgggcctggtgtacctcgtctctggcttcggagggagcgtgctctccgtcttcttcatcaggaagggcgtctccgtgggcgcctccggcgcgctcttcggcctcctgggagcgatgctgtcggagctcatcaccaactggtccatctacaccaacagatttgcagccatgctgaacctgatcatcatcgccgccatcaacctggcgctcgggatactcccgcacgttgacaacttcgcgcacatcggcgggttcgccacaggcttcctcctcggcttcgtgctgctgatccagccccagttcgggtggctggagcagcccttcggtgccaagaccaagtccaagtacaaggcatatcagatcatcctcctgcttgctgccctcgtcttgctggctgcagggttcgctgttggattggtaatggtgttcagaggagagaacggcaacgatcactgtagctggtgccactacctgacctgcgtgccgacgtcaagctggaagtgtgacaattgaactgatcagagattagtgacgggttagcatgcttgcgtcgtacagaagagaacatgcgtccccaccacgagagacaatgtcaagatagatacgtgcccctcaccttctatgacattgtcaatgtattgctttcaagtttgatttttaaagtctgcattgtacagaattctcctgcctccattggatccaaatgaggagtttattggtattttttcttgtatatgttaaaaaaaactctgtaaatcactctgcctgtgttctggtttatggttttattcattgatttcctctgctgtgtcatgtccattttcaaacgttcagactaataataggagtagatgacatcttgcagctgaaccacttcttccgcgttgctgaatggctccggccttttttttggtatatacaagaaccaaaacaaatcgtaacagaactaaaaaaatctcttatacagctagatcggttggtctcttgatcatagggtgctgtaaccaccacgggaataaaccagatggcttaaagtaatgttcataggctataacaacatcaatcagaatcaagggaatggagccacaacgagaatcacaccacacctaactttgcgctataaagaaatgaaggaaagaatgaccaccttgactaaactactccagcaatcccattagcctgctatatcccttcagcgcaccccaaaagaatacaaaattaagggagcgcaagtgaaaagggttcaaagttcaaactcgcattagcctattgttttgttagtggcagcttccaaaatgttttggtagccacaagtattttctcggtactgcctgattctggttcactgtcatgcacctgtgccttccaccgaatcgactgagcgatctgtgctgccttggctactacgtctggcgaggcccgtataacggcagttccttctgggcgcagtatgcgatccatctccaacatgacatcaaacaggtcacatctgaaaaagaaagtcatacaaaaccatgtgtaaggttagtcatgtaaaggtaaaactatgataacaatcttggctaatccatttacttgaattctaacaagacatgttcattgaattaagaatgctaaaggtcaaatggtcaatacagtagtacagcagcaacccgcaaagtacttcagtttcctttgttttatttgttcacctaagtcaactctaaccagatacttctttcctagaaaatacatcctccaatcaaaaataagttcattaggacatcaagtccaaaggttgtggcgggagaatagagaccaaagattttagactcaggccgtgtttctttcggagtataatctgtccagattatataatccagcataaataatctagcaggtaaataaacaattagattataggtccagattatataaatatataatctaaagcccagattatgataatctcataatctcctcaagagtagctaatttgagattatttttggcaaaagacccactattacaaatctgacatttttcttcttttcccaaatcacacgcacgcagggtattgttgtttttgtctttgtatctcaaaatcaataaccttcattcatataatctagttatccaaacagctccatatagattataatctcaacaaattataatctagattgtataatctataagttgaaacaaacatgccctcggtagaactaaaaccgaatatatgagattgatttcgatactactacatataaaggagatgttaatttggaagggcaggtagtgtacaggaagatacctttgtatttaggatcaatgttagatattcatgaagatgtttgccataatatcaaagcaaagtgaatgaagtgatgtcaattatctgacattctatataacaagagagtaccgtagaagctaaaaagcaagttttataagacgataattagacctgctatgttatatagtgcaaaatattggtctaaaaaagacaacatgttcatcaaataagtgttgcaaaatacgtatgttgcattagttttgtggccatacaagaaggaatcaagatcgtaataatgatatacgtggtagactagaagtagcactaattcaagaaaagctcgtccaacattggttgaaattgtttagatatgtccaacagagacctctaaagacaccaatgtatagtggtatcataaaacgaatagcaatgaaaagagagaaagaggaaaccaaaattaacataggaagaggcagtaaaaggagacctaaaatgataaaatatacacaaatatgagtgcatgaaaaataaccatacatgtgtccgaaccttgatttgtgggttttgttaggttttaactctagcctaccctaacttgcttgggactaaaagagactttgttttttttttgaacgaactttgttgttgttataggacatcgatgcggtctacaatatggtattttgggtaacaaaaaatatattgttattaaatgggtgattattgtagaagtatttttataaggaatttaataataccaatcttgtgttgtttcaggagtcaggtcaaacctaacctagatagagttatattccgatcaaaggaagcaattcaagttaaatcacgtttaggctgcaacccaaactcaagcttctgcaaaacacaaattgcaccgatcattgaaacaaataaatgatagaactttttttcctcgaacgcacaagagacatatgcatcatttcattaagaagggaggaaaaaaagatccaaaatggatcagtacatgctgcagaaaccattggaaacaaacaagatctacaaatttaaaattaaacagaaaacaagtcttaaggtatgtaacaagaacatagttgttactgtactaatttacatttggtgagattcacatgtcaaaggtcttttttactcattaagcagtacacattaacacctgcaccaacagtttattatggacatgtcttcaacttcaagataataacctaggcatagcaggaattgggacgctcaacatagtagtaacctataaatacatacaagtttcaggaaacatcactttctcaagcgaagtttgattcttatctcattagtgtaaagaaaagacagggagacaagttttaatgatgatatttttataaattattatggatttctgcagaatttaccaatcaagtgaaacgaactgtgaaatttaataataaagtacttatgtcaaacatcttaatggagatggagtacaagataaggttttctcatatcacactgatacaaggttaaataaatgaaatgagaataatataaaaatattagaaaatgggacaataactccaggtatatggctggtgtacctgctagtgcctgaaatcgggccacttatcaaggagtcaattgcatcagcatgaataagatcataggtacgaggatacgttgagaatggttcacacctgacaacaaaaacatataatcagtacaatttgggaacataactatctgtctactacttgagtatttcttcaaatctataaacctaaaatgacaagcagttcatttatatggagcattttatatttgatcaaaccatctg

SEQ ID NO: 14997 - DNA, 1712 bp, Zea Mays
gtctctgccgtcttcgcaggagcaggacagaggaaaagcagaagcaggccagcccaaaagaagcacgttcacggttcaccaagtcaagcaaacctctctcaaattccaaacccccacaatcaccgcacccccttcctccttccacattgcccatttgcccccccaagcaagagcaaccaagcacgccgcggtccgtgctccctccctccctccgatctagagtagagcgcgcgcccaagtctagaacggagaccaatgcgcaaggtgctcatcaacgccgtcctcttcccggctctcgcggcggcggtcgctctggccatcttctgcttcgtccgctgccgccgccgccgcggccggggtcgcggccgcgaccgctcggtactgccctcgcacggcggcggcgcgagggcggaccggttccaggcgggcggcgcctcgggcggatacgccgccggcgggggggaggaggcgctgatgcggttccccggcggcgaggcgctcacggtggccgcgatcctcgaggcgcccggggaggtggtggccaagtcctcgcacagcacgctgtaccgcgccgggctcagcgccggcgaggccgtcgcgctgctccggttcgtgcgcccggcctgcgccgcgggcgccgacgaggcccgcgcggccgcgcgggcgctcggcgccgcgcgccaccccaacctcgtgccgatccgcgcgctctacatcggcccccgcggggagaagctgctcgtccacccgttctacgccgccggctcgctgcgccgattgctgcaagaggtgggagataatctgcaagctgtcgatcgggatcgccaaaggactggaccacctccacacagcgtcgcacaaggcaaacgttcacggcaacctcaaaacaaacaacgtcatgctggacgccgatttccagcccaggatctcagacttcgggctctacctcctgctgaactccgccgcggcgcaggagatgctcgagacgtctgcggcgcagggctacaaggccccggagctgatgaagatgagggacgccacaagggagagcgacgtgtacagcctgggagtgatcatggtcgagatgctcgctcagaaggaggtcgcagacggccgtaataagccgccgccgaacgcgcgcgacatccacctgcccgcctccttcagagacctggtcctggagaggaagatctcagaagctttcggctccgagcttcttctgaagcggagcaaggactccgggatggagggccgcctggacgcctacttcgaactggcgacggcctgctgtaatccgtcgccgtcgttgagaccggatacgaagaaaatactgaaaaggcttgaggacatagcaagacaataatagtagaggcgtgcggtcgggtgcggcggtgaggctatccccggtcctgtttagaaagtaagtgtggtgttatagcagcaaccgcccaacagaggattacttgtaatgtttggttacttgttgcatacgacggcagagattgtactggcgcgggccggcgtttggagaatgatcgtaacgtaaacttaggagccacaagcgtgcatgtatagaaaaggtacacttttcaacgtaactacataggaactcatcccagaacataaaccgtgggtgctttctttcgacgtggaaactgtatcaggcaactagcatctgttgaactctctggtgactgaattttgtcgacaag

SEQ ID NO: 14998 - DNA, 964 bp, Zea Mays
gtcagcagttgatggcagaaggtgttggtccagctcttccagatcactgtctccaataaccgatgaagataccgaatccatatcatcatctaaggaagggagaaaataaagggcagcaaaaatgtgagcaaaatagaagataactagcaaatgaacaagaagatggcacagctcacaccatataaaaactatctactggtgtttgcaaatgtcagttagaatatggagtatagcttatagaaggttacactatattgagctgaagaaaatcaataatctgtggtgttgataactcaaccctatctaacttgctagctactagacattatcattgccccttttttactaggtatattatgagtcatgcataacataaccatcaagcaaatcagattaatgttccatgaaacgaaagtatgccaggtcaaaaggagagagaaaaagtttgatctcctggtggttattttgaatatgatcaaaaggctgccagattacttactagtaaagtattcaggatggtcaatcgctcattacaccaaggaataccagtcaaatggtggttccatatgttgatgagttgatcagttgatgtatataggacatttgaaaaatgcaaagtataataacaaggtctagacatttaggtagcagttcattaaaaaaaaactcaggccaactgcacaaatacatacaagaattgtcaggcacaaactcaccagaaaatgcaggatgagtagggacgtgtcttactgtggaaacttggatgctttctggtagaagacagttgaaaaatgaacctaaatataaggggggaatacaatcagatactctaaagtatgaagcacgtcaggacgaagacatatcaaactggtgataccaacccactcttgctagccgattcacccacccagagattgatttcctggtcaagtttttacagacatcatctgtaaaatggttgcag

SEQ ID NO: 14999 - DNA, 1584 bp, Zea Mays
gttggaaactcgtgtgctccatatccgtactccatgccgtggactgtttatttgagtaaaacatacagtggtgtttgagtttaaactcgtaaaaatcagttagccagcgcaatgcaagctcaaatgcaagtcaagaggtaatggcaactgctaatggtataactttttatgacagagaactaatggtacagccttacaaataaatagtgtaaggtacaacactcaaacaagagtaccacagaaaagtgaagtacatatccttcagttttagaacggaaaaaaatatgtgcatcccggatgcaaacaacctcttttacagcctctcgcatccaacacttggaggcccataaaaacagatcaaaatttgtaacttaattctttagtaatttatttttcttctatttatatggaccataagatggtggatgtgagtggctgtaaaagagattctttgcatcccagatgcaaattgtcttttactttagaacagcaaataggtcctaaaacacacgcctaccaagtaccaaccctcgcaaactattattccagccgttggcaatgcataacatgatacacatacacctattttgatttttgagacaatattcacccttactactcgaagcttttttaggccttgttcgtttgtgtcggattgcacccggaatcattccagctaatcaaagtttatataaattagagaagcaatccggttaggaatcgttccgacccaccaatccggcacaaacgaacaagaccttaagtgtccatccctatgccacagttcacctggcgtatttgagcacattacagccattgaagcttcaacaagacaacaactgctgcgtacctgtcagaaacaacggatgaaaaatttgaccccccctgatttagcagttttcttcgatgctcggaaggtactaatcgaatttcttttgttgcctacgaagagcagcagaagctcgtaatatcctggaaattcaaaacaaaaaaatatcgcaatttcggcctccttctcttcaactacaaactatcgttctcccctcttcaatcactagactacagtttcgggtaactactagtcacagctgaaactttatcccctccaaacaggtattgtacttgtacgagcacgagaatatgtacaacagtacaacttcaacagaacacccatgttttcggagtggaaaataaattccgaggcaagaggaagtgggaacataagcaccttcgattccggagtggaaaataccgaggccgaaccagtagaggtagttgttcatgggcgtaaggtcgtacacgttgagcaccacgggcgcccctacgccggagccgttctgcgcttccatgcccgccgcgccgccggtgaagccgagtggcgctacagatctcgcgatttgtgcgtcattagcttctcgattagtgccccattcgagatgattcgaatggaagcgaggcaagggatcgttttgctccgccgctccgaattgatttggttccaagcgaggaagggaaagagctcaactaacaagggaacgagaacaactagcatggttaccaccttgacctctcgagatatttttc

SEQ ID NO: 15000 - DNA, 740 bp, Zea Mays
ctcctgcctgcagtttccgtagaagaaaagtgcccctacactgctacagacagagagaactcacattgcggttgcggacctcagcttgcccactacagagctaaccaaaagagatgaaagggagcctttcccacgagctcgagacggggctcccagccgccgacgtgtgggaggtctacggaggcctccttgttggggacttgattccccagctgcttcctcaagttttctcaaaggttgaactcgtagagggagacggtggagttggaacggttctgctcgtcactctcccgccagaggctttcaaagagaagttcgtcaaggtcgatgacgaaaaccgcgtcaaggagtgcctggtaaccgagggaagcttttttgaccgtggcttcaagaaatacctggtgcgaatcgagatcataggagaagatcgggaggcatccaccataagatcaactatcgagtacgaagttgaccaggagcatgcaggcaacccccctgttgccagtagcagtggcttggctactatcgctaaggccatcgcagaatatatcatcaagcagaagaagaaaggtcctcctgagtcctgagtaattaagctcccatgtaatcaactccgggaagaaaggatattatattatatcgtgtatatgtttgatcagtgaacaactgaagttaatttgtgtctaccaatgaacaaatagaatacggtaacgagcgaatggttgccatttgaacccaaa

SEQ ID NO: 15001 - DNA, 1465 bp, Zea Mays
ctccctcctttcgtttctcctcaccgtaaccgtgttccgtgtgtattctctcgtctctcctggtgcttgcttggtgctaagaaaagataactccctttccgcagccccatatctcacatcctgcttcccctccacccggcctacctccttttttgtcccccacaaaagcaagaacaagcttgctggattgcttgctactagctagctaccctccaagcagatcgagcgaacctgacccttcaaaagatcgttgaagaaccaggcaaggaaggtggtgtgcatcccggcgccgacagcagcaggggggagaccaactggagaggtggttccttctgatctctgggcctggaggaagtacggccagaagcctatcaagggttctccttatccaaggcatgtgttaattcggcacgcatccactaattacctgggattacgtttcaagggaaatattaatcttaagctgaacaaacaaactgctggtgacaaattggagtttaagcaagacatatggggatgcttagggtactacagatgcagcagctcaaaaggatgctcagcgcggaagcaagtggagcgaagtcggaatgaccccaacatgctcgtcatcacctacacctccgagcacaaccatccatggccgactcagcgcaatgccctggctgggtcaactcggaaccaccacggcaagaacagcagcggcagctcaggttccaagggctcacagaacgagaagcaagagcaacagcaaccaagcaacgtcaaggaagagcccaaggatccggcggccacgacgacagccactagcacgattactacgttgacaactagtatttctccggcagcggttgtgaaagaggagacgttggcagctggatcatcagaagcattggggcaagtcatggatacagcagtagcagaccacaacattgaactcatggaccaggtgttcagtgagagctacaggccgatgataccggaggccggccaccctgacgacttcttctccgacctcgcggagctggagtcagatcccatgagcttaatcttctccaaagagtacatggaagcgaaaccaagtggtggtgatcgtggccatcacgagaaagcaatatccaaggacttggatccactgtttgacatgctagattggtctgctaattcttcatcagcagggagctcatttgagcaaggaaagagaggctaatccattggcatatgtgcagacatacatttgatcagagctaataataactagaaattaagattaccacaaggtcagcaagaaaattaagatgacagagttttccctttctttcactttcttttctctttggttcttttgcttcttattatcattgtgtgagaaagattgtaatttttttgttcaagttgctcatagatatgaaccttatttttttaaggtttgtgtcagatttggtgtacttatatgcatgagatgaat

SEQ ID NO: 15002 - DNA, 1819 bp, Zea Mays
caaccgcgtccctgcagaaactatagaggcagcagcgaccggcgagctagagcgagggatcggcaacggccgccctagctgccagccgcgctcggtacgtacagccatgtgcgacttcttccttccgcggatggagggcgaccaggccggcggtggcgaccttaccgacatcgtccggtccggcggggccgtccctagcagcgccgccgaggccacggcgagggatgagtggcagctccaccagggggagccgccgatgctcttcccgccgcttccctcgtcgacggcgacggcatcggaagcaggctgcgccgcagggagcaccggcgctaacgtcttcggcgccgacgaccctttctccggcctcgtggacccgttctgtaccgactactactcctcatgcgccgacttcttggacgccaccatgccggacgcgatgcccaaggtcggcttcgacgcggctatctgtggcggcagcggcagcggctgcggaggaggcggaggccagggccagctgatagacgtgaggcggaagcagcctctcttgccgcgtggggtgcagatgctgccggttggcgcgctggcgccgagggagatacaaccgtacccggcgtttgccagcgacatggtcaagctcggaatcacggccgggcaggtggccgggtgcgccatcgacgccgccgtcgtcggcatgcagatgccctcgcctcgcgccgcgggcgggatcaagcgcaggaagaaccaggcaaggaaggtggtgtgcatcccggcgccgacagcagcaggggggagaccaactggagaggtggttccttctgatctctgggcctggaggaagtacggccagaagcctatcaagggttctccttatccaagagggtactacagatgcagcagctcaaaaggatgctcagcgcggaagcaagtggagcgaagtcggaatgaccccaacatgctcgtcatcacctacacctccgagcacaaccatccatggccgactcagcgcaatgccctggctgggtcaactcggaaccaccacggcaagaacagcagcggcagctcaggttccaagggctcacagaacgagaagcaagagcaacagcaaccaagcaacgtcaaggaagagcccaaggatccggcggccacgacgacagccactagcacgattactacgttgacaactagtatttctccggcagcggttgtgaaagaggagacgttggcagctggatcatcagaagcattggggcaagtcatggatacagcagtagcagaccacaacattgaactcatggaccaggtgttcagtgagagctacaggccgatgataccggaggccggccaccctgacgacttcttctccgacctcgcggagctggagtcagatcccatgagcttaatcttctccaaagagtacatggaagcgaaaccaagtggtggtgatcgtggccatcacgagaaagcaatatccaaggacttggatccactgtttgacatgctagattggtctgctaattcttcatcagcagggagctcatttgagcaaggaaagagaggctaatccattggcatatgtgcagacatacatttgatcagagctaataataactagaaattaagattaccacaaggtcagcaagaaaattaagatgacagagttttccctttctttcactttcttttctctttggttcttttgcttcttattatcattgtgtgagaaagattgtaatttttttgttcaagttgctcatagatatgaaccttatttttttaaggtttgtgtcagatttggtgtacttatatgcatgagatgaat

SEQ ID NO: 15003 - DNA, 1650 bp, Zea Mays
cggctccctccatccgccgtgtcctgctgccgcacctccctgctccaggcgcacagggtcgacaccttcaccagtgccccaggctcaggccggttcctgcgtgggaggcgacgtgtcacggcggcggcacctgctcgtggcagggcggaagcacccaggagatggaggaacctccacgattcttcagcgatatttttgcagagaaccacgccgatctgtcatgggttctcgacgggtaatattcttgccattttcccctagagttaaggtaattgtaggcttgattttgcaaaggaaatcataccctagttcgtcctgttcatatttgtgccccctgtatgtgtagggtggatcctaattcgtcctacaggcttgctgttcaagcaggcgcttatgtcaaattaactgatgatgatggtcgtgaatattgtaaggcatgcaacattcttgcttgtttcagataaagaagatgccttttgaacacacttgtcaaagcacagggaaagttgagaagaactgcatggcaacaaatcattgggtcaaggatcgagttctagattggcttgcaaaggacaataaggttggagctaaagaattaaagaaaaggctagaggagcagtatcatctgaaattgtcatactgggtagtttgggatggaagaaagaaggctttggagcaactcaaagggaagtgggatgatagttttgagtgtattttcagtttcaagacagaggtggagaagaccaatccaggcagtttggtagacattgaatatgagaaagttgggaagaaagtgaggtttattagaatgtttgttgcgctaaagtcatgtgtggatggatttttaaatggttgcaggcctttccttggtgtggactctactcatttgactgggaaatggaagggtcaacttgcatctgctactgctattgatgggaacaattggatgtttccagtgtgtcatggtgtgtttggatcagagacaactgacaattgggaatggttttttagtaggcttcatcaagcaattggatcacctccaggcctagtgatctcaactgatgcaggcaaaggaattgattcagctgttactaaagtgttcaaaaatggggttgagcatagagagtgcatgagacacttagttgcaaacttccaagagcctatgaaaagtctgtaaaaccaatgacagataggaatcaatggcctaagatggaccctggattcaaattatgccccccaattttgaaaagggcagccggtagaccaagggagagaaggtacaaatcagttgcagaaggtggcactggaaagagatccacaagatgcaaaaggtgcaaacagcttggccacatggaaaaaacatgcaatgaatatgtttatgaatctgatgcaccaccacctgcccctccaaagccaaaaagaaagagagccaagaaaaatgtcacagtggtgccatctagtagtgctactaatccaatacaagaacagccttcactcgatgaaccatttgctacgccaacaagaactatcacttctgtttctacaccaagccctatgacaagaagtatgtcaaggaggttgctgcaacaaaatccatctacaccaaccagcgctatcactcctgtgcaaacacctagccctatgacaagg

SEQ ID NO: 15004 - DNA, 1322 bp, Zea Mays
cggctccctccatccgccgtgtcctgctgccgcacctccctgctccaggcgcacagggtcgacaccttcaccagtgccccaggctcaggccggttcctgcgtgggaggcgacgtgtcacggcggcggcacctgctcgtggcagggcggaagcacccaggagatggaggaacctccacgattcttcagcgatatttttgcagagaaccacgccgatctgtcatgggttctcgacggataaagaagatgccttttgaacacacttgtcaaagcacagggaaagttgagaagaactgcatggcaacaaatcattgggtcaaggatcgagttctagattggcttgcaaaggacaataaggttggagctaaagaattaaagaaaagtgtattttcagtttcaagacagaggtggagaagaccaatccaggcagtttggtagacattgaatatgagaaagttgggaagaaagtgaggtttattagaatgtttgttgcgctaaagtcatgtgtggatggatttttaaatggttgcaggcctttccttggtgtggactctactcatttgactgggaaatggaagggtcaacttgcatctgctactgctattgatgggaacaattggatgtttccagtgtgtcatggtgtgtttggatcagagacaactgacaattgggaatggttttttagtaggcttcatcaagcaattggatcacctccaggcctagtgatctcaactgatgcaggcaaaggaattgattcagctgttactaaagtgttcaaaaatggggttgagcatagagagtgcatgagacacttagttgcaaacttccaagagcctatgaaaagtctgtaaaaccaatgacagataggaatcaatggcctaagatggaccctggattcaaattatgccccccaattttgaaaagggcagccggtagaccaagggagagaaggtacaaatcagttgcagaaggtggcactggaaagagatccacaagatgcaaaaggtgcaaacagcttggccacatggaaaaaacatgcaatgaatatgtttatgaatctgatgcaccaccacctgcccctccaaagccaaaaagaaagagagccaagaaaaatgtcacagtggtgccatctagtagtgctactaatccaatacaagaacagccttcactcgatgaaccatttgctacgccaacaagaactatcacttctgtttctacaccaagccctatgacaagaagtatgtcaaggaggttgctgcaacaaaatccatctacaccaaccagcgctatcactcctgtgcaaacacctagccctatgacaagg

SEQ ID NO: 15005 - DNA, 6284 bp, Zea Mays
attattttacgaccccccagggcccaggcccccacgctccccgtcgttcgtattcgatgcgcacctcagtcctcagctgagccgagcggaaccagctcgcacgagaggaggcggccaaacggagaggaagtgagaccgaggtgagaaactgacaggacaggaggacaatcgccgccgcccgcagcaagaagagagcatggacttcctcacgcttccccgccgcgatctgcaggcgctgtgcaagcgcaacggcatccgcgccaacatgaccagtgccgccatggccgacgccctccgcgcgctccccaaggtcgaagggatcgaggagtacgttaaggttctgcagccggtctccgtgctgcaaacggcggttaagccggtgaatgaggagcagaagcaggagagtccgcttccgcgtggccgccgcgtcacggcccagtcatcggagcccattgaggcggaggaagacaaggaaaatgatgcaaagcgacagtcgaacaaagagggcgtgcaggtacctggcgtcgggcggcgtggtgccagccgtcgcgctaggcccgtgcctgccgtgcctcagacgctgggcaaggcagtggcggaggaggatggccagggagagcaaaatctgaagcaggaggccaaaagggatagcgcgcctgctcccgtcgtgggccggctcgctcggccctcgactgttgtaatcgcgcgggcagacgagtcggaggttgcaggtgtggaagaggagcagagcaaggaggtggtagatgatgcgctggcccttggcgtaggccgccgcggtgccagccgccgcgctcggccggcgccttctattgctgcgctagcaggcaatgtggtagaggatgaggagcagatagtccctatcccacgcggccgtcgtgtgaaggcccatggaaactcgtctgagcctatcaggttggacaccagttatgatgatgaaaaggaggaagcgaagcccgtggaggagcaagacgacgcgcaaatcgttggcgtgggtcgtcgcagaggtgccagccggcgcgctcaggcggcgtctgctatagctgcgccagaagccaagacagaggaggagcagaaggcccctatcactcgcggccgccgcgtcaaggccaagtcgaccgagcttatcaggctggacgacagcagcatggagaaaaaggaggacccgaagccggaggaggagacgggagatgcgccagcagttggtgcggagcggcgcgctccttctccttcaaaagctccggctacgaggagaagcggtgcagcaagcaaagccgaagcaggggatgtggccgtggaggtagtatcaagcttggccactcgccagcgcaagacgatgaaagcagcagcagctgctgctgaggcagaggagaaggcaccacgaagggccacgaggcgcggcgcggtgacgagtacccttatgcagcaggagctacaagagaaaccacaagaggctataggtgcaacagatgaggccgcgagggctctacccatccggcctactcgccagcgtaagccgacaatgaaagcagcagctgctgcaacagcacaggagaaggcaccaatagccacgaggaggggcgcgttgatgactctcttgcagcaagatgtacaagaggaaccaaaagaggctgtgggtgcaccggtttctcaccagcgatgtgatgctctggaagagacgaaagaggcttttgttcctcaaaaagaagaaataaacgagctggacgcaccgaaacaagatgaagatgaagacatggttatcattgatggtgagaagctgatggaagagactccagcagaagatccacctgtgaccgatcaggaacgcacgggtaaatcagaattccaagagcagcaagtggacgatgaggagaagtgtttagcaaccctggaggaaccgccgatcattggtcttgtttcaatggtaaccgagcagccatctgaggacgatggaggtgtcaattttcaggatggtggaggttccagtgcggctctgttggacaagaatgctggtgaagagatagaattggtggccggcgttcgggctctgcaggtaccattgacaggcaacggaagtgatgccagccatgaaagtgaaatgagaaagttcaatgaagtactaactgtcagagagaaaaacagtgaggttgatacacaagaagtcgatggtgatgttgacaaagtgctgcatgactctgtggatgacaccattcttattgattgctcaagtgagaatgttgaaatggagaaggcaggaaacgtcacacgtgagatgcctgagaaccaagctgcattggatgaggatgttggtaaaccgaatgaagtggttatcggtgacaagccccaagacacagtgacagataaagttgttcaggagggaagggaagtactgataactgatgagatgcagcaggggacagctggaatgcatgatgagatcgaggatgatcagtttgaatctgtttttgttcaagctgatcaagtagtcactgctgacaacctgctggaacaagtgacagatcgtgaaattactgtggaggagaacacagcactgatagttggtgagagacaacagagcacggttacaatggatgatgatgttgtagaggaccattctgatactgatggtgatcattccaatgaacacatagaagcggtaactactgtcaaagttccagaactcaagctgattgaagatatttttgttcaatctgatcatgcagttgctactgacaacctaccagaacaagtgagagattgtggaattaccatggagaccacatcactgatagttgatgagaagcaacagatcatggttacagtggatggagatcttgtcatggatggttctgaaaccgataatgttcatcctgatgaacagatggaagtggtaactgctgaagaagtgctagaggacacagggataactgttgaagatgttgaggagaagcaaaagagcacagttacagtggataaagatgtcgttgatgatcattttttcaaaactgatgatgttcatgccgatgaacagatggaagcgtcaactactgatgaagtaccagagctcacagaggcagattacgaagttgttgaggagaagcaacagagcacatatacaatgaatggaggcattgaggatgatcatttcaaaacccatgttgctcatgctgatgaaaagaaggaagttgttgctactgatgtgccagaagtcacagggacggtcggtgaaattgaggagaagacatcagttacaatggatggagatgttgtctttgatcatgcagatggacagaaggaagtgatagttactgaagtgccagatgaagtcacagtgactggcgatgaaggtgttgagagaaaagcagctgtgattactgaggccataccagatcacgggactgccccaagtatcgcacatacaatgaatgggtgtgtcaaggaaacccattttggtgatggcaatgagcagaagaaagtaatcactgctgacataatctcgataccacaagatgattgtgtccggaaggagaatgcatccagcatagatgtcgcagagtccctgtccagcaacaagtcatcagggtgcaagaacagcagtgagaagaacactactgaacccatggcggtgctaaaagataagggactaaaagcgaccaagaaacccgtggatttgttagcgcttagcctagggaagcttaaagccaagctcaaggataggctgaacgccgagaagaagaaagaagcgaagaggctggcgcttgccagggtggacgagaacgtttgccgatcgatcccacgcaaaggggcagggcagcagcggaacctgaatctgcaacaacactaacccagggaagaagctggctctgaagtgtgtgcgtgtgcgtccatctagcacctgtggtgaaaccatggtttctcctttacccgtcggctaggcatctaacttatgtgtgatttgcgtgttcgcttggagatgaggcctactaaaccgattcggctgtgttttatcaggtccaatcgtaggtcccagtacccagcattgttttggcctgtgtgtgaggcctgcttgtgtgtcggttgacttgtcttatttcgaactcgttgagaaaggctgcttgcttttttatatctcgtgcagtaacaaagtagtgtcagattgtatggaaatgcgcctcgcttgctcgttgtttatatctggtattagaatgcttagctgccagtatgtggtggagacgcaaattggtaattactacttggatacacagttgagcagggtgctgtcagttcagaaatcggtcggaagagagctactctgcttgatgatttcttgtactgctccgatagtagtagttgtttgaacgtactgcacactcatgtgggcgcctgagtggtgtgctatagggattgatttgagtcgcggtcacggaataaaggaagctagttctagtggttatcgatcatatgaaccgcaagtacttgtataacgctgataacgacaccggtacatcacaggcacacacatctcctgcttgttcttattacaggcacgagcatgacgttgccaggactctccctcccggccgccgcccttgtatcagcagtgtgggctggcagcgtcgcgtcgcgtgggcgtggcgcggttcaggcgacggggggcggcttctcgacgtcctcgagcgggcggaaccacaccttctggtccagcaccgtgcctcctgctgcagccgcattcgcggcggcagcgtcagcggcgacgcccagctggttggtgtccaccgccgccgggccgaacacgccggtcttggggtgggggctccagtacttgtcggggctccccgcgccgccgatcacatcgtccggcacgaacgccgggcgcacctgctcctccgggttcttgtcgtacgacgaggcgtgcacggccctcctgcgttacggaacgaaacacgcgatgcaatgcaatgaggggcggtgagcaaacgcaacaagagctggaagtgatgttccttcttttttctcaagaatcgataggacccaacaaaatcgttgctaggagtacacgtcaggatcaggttccgcgcacgggtacggctgcacatgggcgggcgcatgaaacccggattgctaataatgcctgggccaacctgcagcagaagaggacacgtgggtgggggccgaggataattgcgaggtcacagcccacaggccagccaggtggacctccgttccgtcgcactccatagcttaccgtaccacgcctggtcccgaccccaccgtcatcgagccatggcagttggcagagcagagggtggatggacgacaactgccgcgcaccagagtaccagacccatcaggccccggcgtggcttggctttgaggacgtgcacgtcctgcgtgcctccagtttgaggatgtgcacttcctctctctctctccgcggctaccatgcgagtcttgcagatttgacagtttgaagtgggcagaaaatcaaaatctactgtgtgtggtactcgcaaaacgcccgaaaagaactaggaaagtggattaaacaagctggtgatggtcccaaagcagacagttgccatgtctacgactctacgtagagtcgtagtcgtagaccatgggagagaagataatagtagctcctcctcctacagttggcaaattccagtagattttctgccgagcaaaatcttgccaccagcagcagcacacacattgagaatcagagtcatccacagagctaagaagcaagcaagcaaatcgctctgctctgctgcaactaccacaggaacttggattggaccaacttaacaagaacgcgcatcctaaaaaaaaacacagtagttctactagcacagacgagcaaaccgaaagagaatgaaccacggggcgaaaccgcgttcgtgttgccgtcgtcccagtacctcggggaggcggccttgccggccaggacgcggctgacgaagctcccagcgatcgcccgccccttggagctagccgctgctgccatgcaaaagatcgatcgttcgggggcggaggaaatccaccacacccaacagtggaagcgctgcgctgtgccgccggcgaggccgagggagagaggttgaaatgatgatagtagtcaccacacccaccggctgcccccattttatagcgcccgagctagccggtgccggcacaccgtcgtacagcgcctgctattgctattgctattgctattggctattggggagcagcactgacgggcaacctctgcggcttctgat

SEQ ID NO: 15006 - DNA, 6216 bp, Zea Mays
cccgtcgttcgtattcgatgcgcacctcagtcctcagctgagccgagcggaaccagctcgcacgagaggaggcggccaaacggagaggaagtgagaccgaggtgagaaactgacaggacaggaggacaatcgccgccgcccgcagcaagaagagagcatggacttcctcacgcttccccgccgcgatctgcaggcgctgtgcaagcgcaacggcatccgcgccaacatgaccagtgccgccatggccgacgccctccgcgcgctccccaaggtcgaagggatcgaggagtacgttaaggttctgcagccggtctccgtgctgcaaacggcggttaagccggtgaatgaggagcagaagcaggagagtccgcttccgcgtggccgccgcgtcacggcccagtcatcggagcccattgaggcggaggaagacaaggaaaatgatgcaaagcgacagtcgaacaaagagggcgtgcaggtacctggcgtcgggcggcgtggtgccagccgtcgcgctaggcccgtgcctgccgtgcctcagacgctgggcaaggcagtggcggaggaggatggccagggagagcaaaatctgaagcaggaggccaaaagggatagcgcgcctgctcccgtcgtgggccggctcgctcggccctcgactgttgtaatcgcgcgggcagacgagtcggaggttgcaggtgtggaagaggagcagagcaaggaggtggtagatgatgcgctggcccttggcgtaggccgccgcggtgccagccgccgcgctcggccggcgccttctattgctgcgctagcaggcaatgtggtagaggatgaggagcagatagtccctatcccacgcggccgtcgtgtgaaggcccatggaaactcgtctgagcctatcaggttggacaccagttatgatgatgaaaaggaggaagcgaagcccgtggaggagcaagacgacgcgcaaatcgttggcgtgggtcgtcgcagaggtgccagccggcgcgctcaggcggcgtctgctatagctgcgccagaagccaagacagaggaggagcagaaggcccctatcactcgcggccgccgcgtcaaggccaagtcgaccgagcttatcaggctggacgacagcagcatggagaaaaaggaggacccgaagccggaggaggagacgggagatgcgccagcagttggtgcggagcggcgcgctccttctccttcaaaagctccggctacgaggagaagcggtgcagcaagcaaagccgaagcaggggatgtggccgtggaggtagtatcaagcttggccactcgccagcgcaagacgatgaaagcagcagcagctgctgctgaggcagaggagaaggcaccacgaagggccacgaggcgcggcgcggtgacgagtacccttatgcagcaggagctacaagagaaaccacaagaggctataggtgcaacagatgaggccgcgagggctctacccatccggcctactcgccagcgtaagccgacaatgaaagcagcagctgctgcaacagcacaggagaaggcaccaatagccacgaggaggggcgcgttgatgactctcttgcagcaagatgtacaagaggaaccaaaagcgatgtgatgctctggaagagacgaaagaggcttttgttcctcaaaaagaagaaataaacgagctggacgcaccgaaacaagatgaagatgaagacatggttatcattgatggtgagaagctgatggaagagactccagcagaagatccacctgtgaccgatcaggaacgcacgggtaaatcagaattccaagagcagcaagtggacgatgaggagaagtgtttagcaaccctggaggaaccgccgatcattggtcttgtttcaatggtaaccgagcagccatctgaggacgatggaggtgtcaattttcaggatggtggaggttccagtgcggctctgttggacaagaatgctggtgaagagatagaattggtggccggcgttcgggctctgcaggtaccattgacaggcaacggaagtgatgccagccatgaaagtgaaatgagaaagttcaatgaagtactaactgtcagagagaaaaacagtgaggttgatacacaagaagtcgatggtgatgttgacaaagtgctgcatgactctgtggatgacaccattcttattgattgctcaagtgagaatgttgaaatggagaaggcaggaaacgtcacacgtgagatgcctgagaaccaagctgcattggatgaggatgttggtaaaccgaatgaagtggttatcggtgacaagccccaagacacagtgacagataaagttgttcaggagggaagggaagtactgataactgatgagatgcagcaggggacagctggaatgcatgatgagatcgaggatgatcagtttgaatctgtttttgttcaagctgatcaagtagtcactgctgacaacctgctggaacaagtgacagatcgtgaaattactgtggaggagaacacagcactgatagttggtgagagacaacagagcacggttacaatggatgatgatgttgtagaggaccattctgatactgatggtgatcattccaatgaacacatagaagcggtaactactgtcaaagttccagaactcaagctgattgaagatatttttgttcaatctgatcatgcagttgctactgacaacctaccagaacaagtgagagattgtggaattaccatggagaccacatcactgatagttgatgagaagcaacagatcatggttacagtggatggagatcttgtcatggatggttctgaaaccgataatgttcatcctgatgaacagatggaagtggtaactgctgaagaagtgctagaggacacagggataactgttgaagatgttgaggagaagcaaaagagcacagttacagtggataaagatgtcgttgatgatcattttttcaaaactgatgatgttcatgccgatgaacagatggaagcgtcaactactgatgaagtaccagagctcacagaggcagattacgaagttgttgaggagaagcaacagagcacatatacaatgaatggaggcattgaggatgatcatttcaaaacccatgttgctcatgctgatgaaaagaaggaagttgttgctactgatgtgccagaagtcacagggacggtcggtgaaattgaggagaagacatcagttacaatggatggagatgttgtctttgatcatgcagatggacagaaggaagtgatagttactgaagtgccagatgaagtcacagtgactggcgatgaaggtgttgagagaaaagcagctgtgattactgaggccataccagatcacgggactgccccaagtatcgcacatacaatgaatgggtgtgtcaaggaaacccattttggtgatggcaatgagcagaagaaagtaatcactgctgacataatctcgataccacaagatgattgtgtccggaaggagaatgcatccagcatagatgtcgcagagtccctgtccagcaacaagtcatcagggtgcaagaacagcagtgagaagaacactactgaacccatggcggtgctaaaagataagggactaaaagcgaccaagaaacccgtggatttgttagcgcttagcctagggaagcttaaagccaagctcaaggataggctgaacgccgagaagaagaaagaagcgaagaggctggcgcttgccagggtggacgagaacgtttgccgatcgatcccacgcaaaggggcagggcagcagcggaacctgaatctgcaacaacactaacccagggaagaagctggctctgaagtgtgtgcgtgtgcgtccatctagcacctgtggtgaaaccatggtttctcctttacccgtcggctaggcatctaacttatgtgtgatttgcgtgttcgcttggagatgaggcctactaaaccgattcggctgtgttttatcaggtccaatcgtaggtcccagtacccagcattgttttggcctgtgtgtgaggcctgcttgtgtgtcggttgacttgtcttatttcgaactcgttgagaaaggctgcttgcttttttatatctcgtgcagtaacaaagtagtgtcagattgtatggaaatgcgcctcgcttgctcgttgtttatatctggtattagaatgcttagctgccagtatgtggtggagacgcaaattggtaattactacttggatacacagttgagcagggtgctgtcagttcagaaatcggtcggaagagagctactctgcttgatgatttcttgtactgctccgatagtagtagttgtttgaacgtactgcacactcatgtgggcgcctgagtggtgtgctatagggattgatttgagtcgcggtcacggaataaaggaagctagttctagtggttatcgatcatatgaaccgcaagtacttgtataacgctgataacgacaccggtacatcacaggcacacacatctcctgcttgttcttattacaggcacgagcatgacgttgccaggactctccctcccggccgccgcccttgtatcagcagtgtgggctggcagcgtcgcgtcgcgtgggcgtggcgcggttcaggcgacggggggcggcttctcgacgtcctcgagcgggcggaaccacaccttctggtccagcaccgtgcctcctgctgcagccgcattcgcggcggcagcgtcagcggcgacgcccagctggttggtgtccaccgccgccgggccgaacacgccggtcttggggtgggggctccagtacttgtcggggctccccgcgccgccgatcacatcgtccggcacgaacgccgggcgcacctgctcctccgggttcttgtcgtacgacgaggcgtgcacggccctcctgcgttacggaacgaaacacgcgatgcaatgcaatgaggggcggtgagcaaacgcaacaagagctggaagtgatgttccttcttttttctcaagaatcgataggacccaacaaaatcgttgctaggagtacacgtcaggatcaggttccgcgcacgggtacggctgcacatgggcgggcgcatgaaacccggattgctaataatgcctgggccaacctgcagcagaagaggacacgtgggtgggggccgaggataattgcgaggtcacagcccacaggccagccaggtggacctccgttccgtcgcactccatagcttaccgtaccacgcctggtcccgaccccaccgtcatcgagccatggcagttggcagagcagagggtggatggacgacaactgccgcgcaccagagtaccagacccatcaggccccggcgtggcttggctttgaggacgtgcacgtcctgcgtgcctccagtttgaggatgtgcacttcctctctctctctccgcggctaccatgcgagtcttgcagatttgacagtttgaagtgggcagaaaatcaaaatctactgtgtgtggtactcgcaaaacgcccgaaaagaactaggaaagtggattaaacaagctggtgatggtcccaaagcagacagttgccatgtctacgactctacgtagagtcgtagtcgtagaccatgggagagaagataatagtagctcctcctcctacagttggcaaattccagtagattttctgccgagcaaaatcttgccaccagcagcagcacacacattgagaatcagagtcatccacagagctaagaagcaagcaagcaaatcgctctgctctgctgcaactaccacaggaacttggattggaccaacttaacaagaacgcgcatcctaaaaaaaaacacagtagttctactagcacagacgagcaaaccgaaagagaatgaaccacggggcgaaaccgcgttcgtgttgccgtcgtcccagtacctcggggaggcggccttgccggccaggacgcggctgacgaagctcccagcgatcgcccgccccttggagctagccgctgctgccatgcaaaagatcgatcgttcgggggcggaggaaatccaccacacccaacagtggaagcgctgcgctgtgccgccggcgaggccgagggagagaggttgaaatgatgatagtagtcaccacacccaccggctgcccccattttatagcgcccgagctagccggtgccggcacaccgtcgtacagcgcctgctattgctattgctattgctattggctattggggagcagcactgacgggcaacctctgcggcttctgat

SEQ ID NO: 15007 - DNA, 3026 bp, Zea Mays
tttatagttttttttactgttctggctgaaggagaataggagatgccggaacgaaaagaccagcaaagcgttgggccagccggcggcacgctgcatacacacacacaggcatagccggaggcctctcagtcagtccgtcggccgtcggcaacgtcactctctatctctatctgcaggagctagcactaccaatagccaaggcagaggcccggcccacctaccgaagtccgaaacctcgccaagcggcaccaaaaaaacgcagccaatcgaaaccctacgtccgccgccagcttcaagctcccagagaccaaaccttccctccctacacactaacccacaccagccgccggccagcagcagccatgccgcccaagttggacccctcgcaggtggtcgaggtattcgtccgcgtgacgggcggctaggtcggcgcggcgtcgtcgctggcgcccaagatcggcccgctcggcctctccccgaagaagatcggcgaggacatcgccaaggagaccgccagggactggaagggcctgcgcgtcaccgtgaagctcacggtgcagaaccggcaggccaaggtctccgtcgtcccctccgccgccgccctcgtcatcaaggcgctcaaggagcccgagcgggaccggaagaaggtcaagaacatccggcacagcggcaacgtcgccctcgacgacgtcgtcgagatcgccaggaccatgcgccccagatccatggccaaggagatggccggcaccgtcaaggagatcctcggcacctgcgtcagcgtcgggtgcaccgtccacggcaaggaccccaaggacctgcagcaggagatcgatgatggtgaggtcgagatcccctccgcttaaaggggtttcgcccggttcgacaacatcagggacgacagcggcgccatgccgctacacctcgccgccatgcaaggccgccccgcctacatgcaggtgctactagagaacgacgccattgtctccgttctcacaggctcatacagctgctgcaggtttaaaatctctcctgcgacagcaactgggcactaaactcaagcaatccctccagagcctcagctctctgctggttagtgccttactggtgtctaccactggctagggaccggtaatatctatgctgtctgacaagtcatctggccactcccttaaggaccaattaactcgcatggctgagaatgactatctacttagcggtggccttgaaggtattggttctactggaaagaagtgtgaagtcgctcgccgaagaaatggtttagataccaacaagccaaaaaaaggggcaacctgatacaacaggtggtgggccaacaggaagagagctgaatatcggacaagcatgtttccattcagaaccgagcaacgcttcaaaccagttcatcctagcccaattgatgcaggtgaattcattcttaagcaggacaacaactattactatacatcccttgtttagtctgcaaagctggtacaatggcaggtgcaacattttgagataattggattggacaagcttcttgataatagttctgtagaatcaatgaatgaggaacatacaattggtgattcattagacgaggctgagcaggaggaattgaaccatgagattgctctggagtctactgaagactgcactggctccttgtgcaaagccactgcttttctatttcccaagacagcttttgacttcctgacaaatgtggctgctagtttgtttggtattcatggttctccatctccaagctcagttttggtagatcctcgatatgaaattgtgaagatggcagaaatgcagccatgtgcagaagaaacgccaaaagaagaacagatagtgaagtttgtggcgcagattgacaagccaattctctcttcagaggatgccgtctcaaaaagattcgatgtagtcactgactgtttggatcatcattttgtgaaggaaaatggccatgaaagtgttacaagaggttggctgaagaaggtgcgactggaatggaacatcctgcaaaatgacctaccagatggtattcatgtgagagtttatgaggaaaggatggatcttctgagggcttgcatcgttggggcacctggaacaccttaccatgacaatctttttttcttcgatattttctttcctcctgattaccctcatgaaccaccttgactggagcggcaagtgactcgcggcgggcggcggggactcgcggatggcgcccgcgaatcgcggcgttgggcgggcgggcgggcggcggttgtttgcggctgcgggatcctcagcggttgtgcgcgcgggagccacgcgagctggcggcggcggctgcgagatcctcggcggttgtgcgcgcgggagccacgggagcgaggggagagcgggcggttgtgcgcgcgggagccacgcgagctggcggcggttgtttgcggctgcgggatcctcggcggttgtgcgcgcgggagccacgggagtgaggggagagcgggggcagtctacatgtgagtcttaatagttgtagaagactttggaaagtagtggaatgtcacattctaaaaaaatagcctattctaatagtaagattctaattcctcaaaatgaaaagaaacaaacggggcctaagtgttttggtgattaagtatccaacacaaatgttttgaactctttatgtgttaaacaggcaaaaagtatgtttctagacttggtaaattgttttatgtactaacatggttatcaaagtgttagaaacagtgactaaagaacaagagaagaaaagggagaagagttggctgtgtgcagccaacactagctcggtctgggtgcaccggactgtccggtggtgcaccgaacagcgtccggtgcgccaggctggtccgcgtgaactcgctgctctcgggactcgacgacggcgtacggttaaaaatcaacggactgtccggtgagtcatctgcgacgaactcgatgctctcgggaatgaagaaaggcgacatggctataattcaccggactgtctggtggtg

SEQ ID NO: 15008 - DNA, 3189 bp, Zea Mays
ccggcggcacgctgcatacacacacacaggcatagccggaggcctctcagtcagtccgtcggccgtcggcaacgtcactctctatctctatctgcaggagctagcactaccaatagccaaggcagaggcccggcccacctaccgaagtccgaaacctcgccaagcggcaccaaaaaaacgcagccaatcgaaaccctacgtccgccgccagcttcaagctcccagagaccaaaccttccctccctacacactaacccacaccagccgccggccagcagcagccatgccgcccaagttggacccctcgcaggtggtcgaggtattcgtccgcgtgacgggcggctaggtcggcgcggcgtcgtcgctggcgcccaagatcggcccgctcggcctctccccgaagaagatcggcgaggacatcgccaaggagaccgccagggactggaagggcctgcgcgtcaccgtgaagctcacggtgcagaaccggcaggccaaggtctccgtcgtcccctccgccgccgccctcgtcatcaaggcgctcaaggagcccgagcgggaccggaagaaggtcaagaacatccggcacagcggcaacgtcgccctcgacgacgtcgtcgagatcgccaggaccatgcgccccagatccatggccaaggagatggccggcaccgtcaaggagatcctcggcacctgcgtcagcgtcgggtgcaccgtccacggcaaggaccccaaggacctgcagcaggagatcgatgatggtgaggtcgagatcccctccgcttaaaggcaatcctcgcggcggcgcggactacgacggtggctgactcgtagcgagaccttctccctcctcccccgcctgacgcccggcgaccactactcactcgctgctctggaagtctggcaggggtttcgcccggttcgacaacatcagggacgacagcggcgccatgccgctacacctcgccgccatgcaaggccgccccgcctacatgcaggtgctactagagaacgacgccattgtctccgttctcacaggctcatacaggtttaaaatctctcctgcgacagcaactgggcactaaactcaagcaatccctccagagcctcagctctctgctggaccaattaactcgcatggctgagaatgactatctacttagcggtggccttgaaggtattggttctactggaaagaagtgtgaagtcgctcgccgaagaaatggtttagataccaacaagccaaaaaaaggggcaacctgatacaacaggtggtgggccaacaggaagagagctgaatatcggacaagcatgtttccattcagaaccgagcaacgcttcaaaccagttcatcctagcccaattgatgcaggtgaattcattcttaagcaggacaacaactattactatacatcccttgtttagtctgcaaagctggtacaatggcaggtgcaacattttgagataattggattggacaagcttcttgataatagttctgtagaatcaatgaatgaggaacatacaattggtgattcattagacgaggctgagcaggaggaattgaaccatgagattgctctggagtctactgaagactgcactggctccttgtgcaaagccactgcttttctatttcccaagacagcttttgacttcctgacaaatgtggctgctagtttgtttggtattcatggttctccatctccaagctcagttttggtagatcctcgatatgaaattgtgaagatggcagaaatgcagccatgtgcagaagaaacgccaaaagaagaacagatagtgaagtttgtggcgcagattgacaagccaattctctcttcagaggatgccgtctcaaaaagattcgatgtagtcactgactgtttggatcatcattttgtgaaggaaaatggccatgaaagtgttacaagaggttggctgaagaaggtgcgactggaatggaacatcctgcaaaatgacctaccagatggtattcatgtgagagtttatgaggaaaggatggatcttctgagggcttgcatcgttggggcacctggaacaccttaccatgacaatctttttttcttcgatattttctttcctcctgattaccctcatgaaccacctgtaagctcttccattccagtctctattgttcttgtagacaaaatcacgtgtttggagacggatttgatagcctaccaaccacgtcaccgtgcgtgcaggattaattattcagccttgcactgcaccactgtcaatctgtcaggccacgccacagcgtgattttgtctacatacagtacggttaatctctttttttctgattgatctctgtgatccagtgactggagcggcaagtgactcgcggcgggcggcggggactcgcggatggcgcccgcgaatcgcggcgttgggcgggcgggcgggcggcggttgtttgcggctgcgggatcctcagcggttgtgcgcgcgggagccacgcgagctggcggcggcggctgcgagatcctcggcggttgtgcgcgcgggagccacgggagcgaggggagagcgggcggttgtgcgcgcgggagccacgcgagctggcggcggttgtttgcggctgcgggatcctcggcggttgtgcgcgcgggagccacgggagtgaggggagagcgggggcagtctacatgtgagtcttaatagttgtagaagactttggaaagtagtggaatgtcacattctaaaaaaatagcctattctaatagtaagattctaattcctcaaaatgaaaagaaacaaacggggcctaagtgttttggtgattaagtatccaacacaaatgttttgaactctttatgtgttaaacaggcaaaaagtatgtttctagacttggtaaattgttttatgtactaacatggttatcaaagtgttagaaacagtgactaaagaacaagagaagaaaagggagaagagttggctgtgtgcagccaacactagctcggtctgggtgcaccggactgtccggtggtgcaccgaacagcgtccggtgcgccaggctggtccgcgtgaactcgctgctctcgggactcgacgacggcgtacggttaaaaatcaacggactgtccggtgagtcatctgcgacgaactcgatgctctcgggaatgaagaaaggcgacatggctataattcaccggactgtctggtggtg

SEQ ID NO: 15009 - DNA, 3195 bp, Zea Mays
gctgcatacacacacacaggcatagccggaggcctctcagtcagtccgtcggccgtcggcaacgtcactctctatctctatctgcaggagctagcactaccaatagccaaggcagaggcccggcccacctaccgaagtccgaaacctcgccaagcggcaccaaaaaaacgcagccaatcgaaaccctacgtccgccgccagcttcaagctcccagagaccaaaccttccctccctacacactaacccacaccagccgccggccagcagcagccatgccgcccaagttggacccctcgcaggtggtcgaggtattcgtccgcgtgacgggcggctaggtcggcgcggcgtcgtcgctggcgcccaagatcggcccgctcggcctctccccgaagaagatcggcgaggacatcgccaaggagaccgccagggactggaagggcctgcgcgtcaccgtgaagctcacggtgcagaaccggcaggccaaggtctccgtcgtcccctccgccgccgccctcgtcatcaaggcgctcaaggagcccgagcgggaccggaagaaggtcaagaacatccggcacagcggcaacgtcgccctcgacgacgtcgtcgagatcgccaggaccatgcgccccagatccatggccaaggagatggccggcaccgtcaaggagatcctcggcacctgcgtcagcgtcgggtgcaccgtccacggcaaggaccccaaggacctgcagcaggagatcgatgatggtgaggtcgagatcccctccgcttaaaggcaatcctcgcggcggcgcggactacgacggtggctgactcgtagcgagaccttctccctcctcccccgcctgacgcccggcgaccactactcactcgctgctctggaagtctggcaggggtttcgcccggttcgacaacatcagggacgacagcggcgccatgccgctacacctcgccgccatgcaaggccgccccgcctacatgcaggtgctactagagaacgacgccattgtctccgttctcacaggctcatacagctgctgcaggtttaaaatctctcctgcgacagcaactgggcactaaactcaagcaatccctccagagcctcagctctctgctggttagtgccttactggtgtctaccactggctagggaccggtaatatctatgctgtctgacaagtcatctggccactcccttaaggaccaattaactcgcatggctgagaatgactatctacttagcggtggccttgaaggtattggttctactggaaagaagtgtgaagtcgctcgccgaagaaatggtttagataccaacaagccaaaaaaaggggcaacctgatacaacaggtggtgggccaacaggaagagagctgaatatcggacaagcatgtttccattcagaaccgagcaacgcttcaaaccagttcatcctagcccaattgatgcaggtgcaacattttgagataattggattggacaagcttcttgataatagttctgtagaatcaatgaatgaggaacatacaattggtgattcattagacgaggctgagcaggaggaattgaaccatgagattgctctggagtctactgaagactgcactggctccttgtgcaaagccactgcttttctatttcccaagacagcttttgacttcctgacaaatgtggctgctagtttgtttggtattcatggttctccatctccaagctcagttttggtagatcctcgatatgaaattgtgaagatggcagaaatgcagccatgtgcagaagaaacgccaaaagaagaacagatagtgaagtttgtggcgcagattgacaagccaattctctcttcagaggatgccgtctcaaaaagattcgatgtagtcactgactgtttggatcatcattttgtgaaggaaaatggccatgaaagtgttacaagaggttggctgaagaaggtgcgactggaatggaacatcctgcaaaatgacctaccagatggtattcatgtgagagtttatgaggaaaggatggatcttctgagggcttgcatcgttggggcacctggaacaccttaccatgacaatctttttttcttcgatattttctttcctcctgattaccctcatgaaccacctgtaagctcttccattccagtctctattgttcttgtagacaaaatcacgtgtttggagacggatttgatagcctaccaaccacgtcaccgtgcgtgcaggattaattattcagccttgcactgcaccactgtcaatctgtcaggccacgccacagcgtgattttgtctacatacagtacggttaatctctttttttctgattgatctctgtgatccagtgactggagcggcaagtgactcgcggcgggcggcggggactcgcggatggcgcccgcgaatcgcggcgttgggcgggcgggcgggcggcggttgtttgcggctgcgggatcctcagcggttgtgcgcgcgggagccacgcgagctggcggcggcggctgcgagatcctcggcggttgtgcgcgcgggagccacgggagcgaggggagagcgggcggttgtgcgcgcgggagccacgcgagctggcggcggttgtttgcggctgcgggatcctcggcggttgtgcgcgcgggagccacgggagtgaggggagagcgggggcagtctacatgtgagtcttaatagttgtagaagactttggaaagtagtggaatgtcacattctaaaaaaatagcctattctaatagtaagattctaattcctcaaaatgaaaagaaacaaacggggcctaagtgttttggtgattaagtatccaacacaaatgttttgaactctttatgtgttaaacaggcaaaaagtatgtttctagacttggtaaattgttttatgtactaacatggttatcaaagtgttagaaacagtgactaaagaacaagagaagaaaagggagaagagttggctgtgtgcagccaacactagctcggtctgggtgcaccggactgtccggtggtgcaccgaacagcgtccggtgcgccaggctggtccgcgtgaactcgctgctctcgggactcgacgacggcgtacggttaaaaatcaacggactgtccggtgagtcatctgcgacgaactcgatgctctcgggaatgaagaaaggcgacatggctataattcaccggactgtctggtggtg

SEQ ID NO: 15010 - DNA, 2945 bp, Zea Mays
cacaggcatagccggaggcctctcagtcagtccgtcggccgtcggcaacgtcactctctatctctatctgcaggagctagcactaccaatagccaaggcagaggcccggcccacctaccgaagtccgaaacctcgccaagcggcaccaaaaaaacgcagccaatcgaaaccctacgtccgccgccagcttcaagctcccagagaccaaaccttccctccctacacactaacccacaccagccgccggccagcagcagccatgccgcccaagttggacccctcgcaggtggtcgaggtattcgtccgcgtgacgggcggctaggtcggcgcggcgtcgtcgctggcgcccaagatcggcccgctcggcctctccccgaagaagatcggcgaggacatcgccaaggagaccgccagggactggaagggcctgcgcgtcaccgtgaagctcacggtgcagaaccggcaggccaaggtctccgtcgtcccctccgccgccgccctcgtcatcaaggcgctcaaggagcccgagcgggaccggaagaaggtcaagaacatccggcacagcggcaacgtcgccctcgacgacgtcgtcgagatcgccaggaccatgcgccccagatccatggccaaggagatggccggcaccgtcaaggagatcctcggcacctgcgtcagcgtcgggtgcaccgtccacggcaaggaccccaaggacctgcagcaggagatcgatgatggtgaggtcgagatcccctccgcttaaaggcaatcctcgcggcggcgcggactacgacggtggctgactcgtagcgagaccttctccctcctcccccgcctgacgcccggcgaccactactcactcgctgctctggaagtctggcaggggtttcgcccggttcgacaacatcagggacgacagcggcgccatgccgctacacctcgccgccatgcaaggccgccccgcctacatgcaggtgctactagagaacgacgccattgtctccgttctcacaggctcatacagctgctgcaggtttaaaatctctcctgcgacagcaactgggcactaaactcaagcaatccctccagagcctcagctctctgctggttagtgccttactggtgtctaccactggctagggaccggtaatatctatgctgtctgacaagtcatctggccactcccttaaggaccaattaactcgcatggctgagaatgactatctacttagcggtggccttgaaggtattggttctactggaaagaagtgtgaagtcgctcgccgaagaaatggtttagataccaacaagccaaaaaaaggtggtgggccaacaggaagagagctgaatatcggacaagcatgtttccattcagaaccgagcaacgcttcaaaccagttcatcctagcccaattgatgcaggtgcaacattttgagataattggattggacaagcttcttgataatagttctgtagaatcaatgaatgaggaacatacaattggtgattcattagacgaggctgagcaggaggaattgaaccatgagattgctctggagtctactgaagactgcactggctccttgtgcaaagccactgcttttctatttcccaagacagcttttgacttcctgacaaatgtggctgctagtttgtttggtattcatggttctccatctccaagctcagttttggtagatcctcgatatgaaattgtgaagatggcagaaatgcagccatgtgcagaagaaacgccaaaagaagaacagatagtgaagtttgtggcgcagattgacaagccaattctctcttcagaggatgccgtctcaaaaagattcgatgtagtcactgactgtttggatcatcattttgtgaaggaaaatggccatgaaagtgttacaagaggttggctgaagaaggtgcgactggaatggaacatcctgcaaaatgacctaccagatggtattcatgtgagagtttatgaggaaaggatggatcttctgagggcttgcatcgttggggcacctggaacaccttaccatgacaatctttttttcttcgatattttctttcctcctgattaccctcatgaaccaccttgactggagcggcaagtgactcgcggcgggcggcggggactcgcggatggcgcccgcgaatcgcggcgttgggcgggcgggcgggcggcggttgtttgcggctgcgggatcctcagcggttgtgcgcgcgggagccacgcgagctggcggcggcggctgcgagatcctcggcggttgtgcgcgcgggagccacgggagcgaggggagagcgggcggttgtgcgcgcgggagccacgcgagctggcggcggttgtttgcggctgcgggatcctcggcggttgtgcgcgcgggagccacgggagtgaggggagagcgggggcagtctacatgtgagtcttaatagttgtagaagactttggaaagtagtggaatgtcacattctaaaaaaatagcctattctaatagtaagattctaattcctcaaaatgaaaagaaacaaacggggcctaagtgttttggtgattaagtatccaacacaaatgttttgaactctttatgtgttaaacaggcaaaaagtatgtttctagacttggtaaattgttttatgtactaacatggttatcaaagtgttagaaacagtgactaaagaacaagagaagaaaagggagaagagttggctgtgtgcagccaacactagctcggtctgggtgcaccggactgtccggtggtgcaccgaacagcgtccggtgcgccaggctggtccgcgtgaactcgctgctctcgggactcgacgacggcgtacggttaaaaatcaacggactgtccggtgagtcatctgcgacgaactcgatgctctcgggaatgaagaaaggcgacatggctataattcaccggactgtctggtggtg

SEQ ID NO: 15011 - DNA, 2905 bp, Zea Mays
agccggaggcctctcagtcagtccgtcggccgtcggcaacgtcactctctatctctatctgcaggagctagcactaccaatagccaaggcagaggcccggcccacctaccgaagtccgaaacctcgccaagcggcaccaaaaaaacgcagccaatcgaaaccctacgtccgccgccagcttcaagctcccagagaccaaaccttccctccctacacactaacccacaccagccgccggccagcagcagccatgccgcccaagttggacccctcgcaggtggtcgaggtattcgtccgcgtgacgggcggctaggtcggcgcggcgtcgtcgctggcgcccaagatcggcccgctcggcctctccccgaagaagatcggcgaggacatcgccaaggagaccgccagggactggaagggcctgcgcgtcaccgtgaagctcacggtgcagaaccggcaggccaaggtctccgtcgtcccctccgccgccgccctcgtcatcaaggcgctcaaggagcccgagcgggaccggaagaaggtcaagaacatccggcacagcggcaacgtcgccctcgacgacgtcgtcgagatcgccaggaccatgcgccccagatccatggccaaggagatggccggcaccgtcaaggagatcctcggcacctgcgtcagcgtcgggtgcaccgtccacggcaaggaccccaaggacctgcagcaggagatcgatgatggtgaggtcgagatcccctccgcttaaaggggtttcgcccggttcgacaacatcagggacgacagcggcgccatgccgctacacctcgccgccatgcaaggccgccccgcctacatgcaggtgctactagagaacgacgccattgtctccgttctcacaggctcatacaggtttaaaatctctcctgcgacagcaactgggcactaaactcaagcaatccctccagagcctcagctctctgctggttagtgccttactggtgtctaccactggctagggaccggtaatatctatgctgtctgacaagtcatctggccactcccttaaggaccaattaactcgcatggctgagaatgactatctacttagcggtggccttgaaggtattggttctactggaaagaagtgtgaagtcgctcgccgaagaaatggtttagataccaacaagccaaaaaaaggggcaacctgatacaacaggtggtgggccaacaggaagagagctgaatatcggacaagcatgtttccattcagaaccgagcaacgcttcaaaccagttcatcctagcccaattgatgcaggtgaattcattcttaagcaggacaacaactattactatacatcccttgtttagtctgcaaagctggtacaatggcaggtgcaacattttgagataattggattggacaagcttcttgataatagttctgtagaatcaatgaatgaggaacatacaattggtgattcattagacgaggctgagcaggaggaattgaaccatgagattgctctggagtctactgaagactgcactggctccttgtgcaaagccactgcttttctatttcccaagacagcttttgacttcctgacaaatgtggctgctagtttgtttggtattcatggttctccatctccaagctcagttttggtagatcctcgatatgaaattgtgaagatggcagaaatgcagccatgtgcagaagaaacgccaaaagaagaacagatagtgaagtttgtggcgcagattgacaagccaattctctcttcagaggatgccgtctcaaaaagattcgatgtagtcactgactgtttggatcatcattttgtgaaggaaaatggccatgaaagtgttacaagaggttggctgaagaaggtgcgactggaatggaacatcctgcaaaatgacctaccagatggtattcatgtgagagtttatgaggaaaggatggatcttctgagggcttgcatcgttggggcacctggaacaccttaccatgacaatctttttttcttcgatattttctttcctcctgattaccctcatgaaccaccttgactggagcggcaagtgactcgcggcgggcggcggggactcgcggatggcgcccgcgaatcgcggcgttgggcgggcgggcgggcggcggttgtttgcggctgcgggatcctcagcggttgtgcgcgcgggagccacgcgagctggcggcggcggctgcgagatcctcggcggttgtgcgcgcgggagccacgggagcgaggggagagcgggcggttgtgcgcgcgggagccacgcgagctggcggcggttgtttgcggctgcgggatcctcggcggttgtgcgcgcgggagccacgggagtgaggggagagcgggggcagtctacatgtgagtcttaatagttgtagaagactttggaaagtagtggaatgtcacattctaaaaaaatagcctattctaatagtaagattctaattcctcaaaatgaaaagaaacaaacggggcctaagtgttttggtgattaagtatccaacacaaatgttttgaactctttatgtgttaaacaggcaaaaagtatgtttctagacttggtaaattgttttatgtactaacatggttatcaaagtgttagaaacagtgactaaagaacaagagaagaaaagggagaagagttggctgtgtgcagccaacactagctcggtctgggtgcaccggactgtccggtggtgcaccgaacagcgtccggtgcgccaggctggtccgcgtgaactcgctgctctcgggactcgacgacggcgtacggttaaaaatcaacggactgtccggtgagtcatctgcgacgaactcgatgctctcgggaatgaagaaaggcgacatggctataattcaccggactgtctggtggtg

SEQ ID NO: 15012 - DNA, 3141 bp, Zea Mays
ctcagtcagtccgtcggccgtcggcaacgtcactctctatctctatctgcaggagctagcactaccaatagccaaggcagaggcccggcccacctaccgaagtccgaaacctcgccaagcggcaccaaaaaaacgcagccaatcgaaaccctacgtccgccgccagcttcaagctcccagagaccaaaccttccctccctacacactaacccacaccagccgccggccagcagcagccatgccgcccaagttggacccctcgcaggtggtcgaggtattcgtccgcgtgacgggcggctaggtcggcgcggcgtcgtcgctggcgcccaagatcggcccgctcggcctctccccgaagaagatcggcgaggacatcgccaaggagaccgccagggactggaagggcctgcgcgtcaccgtgaagctcacggtgcagaaccggcaggccaaggtctccgtcgtcccctccgccgccgccctcgtcatcaaggcgctcaaggagcccgagcgggaccggaagaaggtcaagaacatccggcacagcggcaacgtcgccctcgacgacgtcgtcgagatcgccaggaccatgcgccccagatccatggccaaggagatggccggcaccgtcaaggagatcctcggcacctgcgtcagcgtcgggtgcaccgtccacggcaaggaccccaaggacctgcagcaggagatcgatgatggtgaggtcgagatcccctccgcttaaaggcaatcctcgcggcggcgcggactacgacggtggctgactcgtagcgagaccttctccctcctcccccgcctgacgcccggcgaccactactcactcgctgctctggaagtctggcaggggtttcgcccggttcgacaacatcagggacgacagcggcgccatgccgctacacctcgccgccatgcaaggccgccccgcctacatgcaggtgctactagagaacgacgccattgtctccgttctcacaggctcatacagctgctgcaggtttaaaatctctcctgcgacagcaactgggcactaaactcaagcaatccctccagagcctcagctctctgctggttagtgccttactggtgtctaccactggctagggaccggtaatatctatgctgtctgacaagtcatctggccactcccttaaggaccaattaactcgcatggctgagaatgactatctacttagcggtggccttgaaggtattggttctactggaaagaagtgtgaagtcgctcgccgaagaaatggtttagataccaacaagccaaaaaaaggtggtgggccaacaggaagagagctgaatatcggacaagcatgtttccattcagaaccgagcaacgcttcaaaccagttcatcctagcccaattgatgcaggtgcaacattttgagataattggattggacaagcttcttgataatagttctgtagaatcaatgaatgaggaacatacaattggtgattcattagacgaggctgagcaggaggaattgaaccatgagattgctctggagtctactgaagactgcactggctccttgtgcaaagccactgcttttctatttcccaagacagcttttgacttcctgacaaatgtggctgctagtttgtttggtattcatggttctccatctccaagctcagttttggtagatcctcgatatgaaattgtgaagatggcagaaatgcagccatgtgcagaagaaacgccaaaagaagaacagatagtgaagtttgtggcgcagattgacaagccaattctctcttcagaggatgccgtctcaaaaagattcgatgtagtcactgactgtttggatcatcattttgtgaaggaaaatggccatgaaagtgttacaagaggttggctgaagaaggtgcgactggaatggaacatcctgcaaaatgacctaccagatggtattcatgtgagagtttatgaggaaaggatggatcttctgagggcttgcatcgttggggcacctggaacaccttaccatgacaatctttttttcttcgatattttctttcctcctgattaccctcatgaaccacctgtaagctcttccattccagtctctattgttcttgtagacaaaatcacgtgtttggagacggatttgatagcctaccaaccacgtcaccgtgcgtgcaggattaattattcagccttgcactgcaccactgtcaatctgtcaggccacgccacagcgtgattttgtctacatacagtacggttaatctctttttttctgattgatctctgtgatccagtgactggagcggcaagtgactcgcggcgggcggcggggactcgcggatggcgcccgcgaatcgcggcgttgggcgggcgggcgggcggcggttgtttgcggctgcgggatcctcagcggttgtgcgcgcgggagccacgcgagctggcggcggcggctgcgagatcctcggcggttgtgcgcgcgggagccacgggagcgaggggagagcgggcggttgtgcgcgcgggagccacgcgagctggcggcggttgtttgcggctgcgggatcctcggcggttgtgcgcgcgggagccacgggagtgaggggagagcgggggcagtctacatgtgagtcttaatagttgtagaagactttggaaagtagtggaatgtcacattctaaaaaaatagcctattctaatagtaagattctaattcctcaaaatgaaaagaaacaaacggggcctaagtgttttggtgattaagtatccaacacaaatgttttgaactctttatgtgttaaacaggcaaaaagtatgtttctagacttggtaaattgttttatgtactaacatggttatcaaagtgttagaaacagtgactaaagaacaagagaagaaaagggagaagagttggctgtgtgcagccaacactagctcggtctgggtgcaccggactgtccggtggtgcaccgaacagcgtccggtgcgccaggctggtccgcgtgaactcgctgctctcgggactcgacgacggcgtacggttaaaaatcaacggactgtccggtgagtcatctgcgacgaactcgatgctctcgggaatgaagaaaggcgacatggctataattcaccggactgtctggtggtg

SEQ ID NO: 15013 - DNA, 3088 bp, Zea Mays
cgtcggccgtcggcaacgtcactctctatctctatctgcaggagctagcactaccaatagccaaggcagaggcccggcccacctaccgaagtccgaaacctcgccaagcggcaccaaaaaaacgcagccaatcgaaaccctacgtccgccgccagcttcaagctcccagagaccaaaccttccctccctacacactaacccacaccagccgccggccagcagcagccatgccgcccaagttggacccctcgcaggtggtcgaggtattcgtccgcgtgacgggcggctaggtcggcgcggcgtcgtcgctggcgcccaagatcggcccgctcggcctctccccgaagaagatcggcgaggacatcgccaaggagaccgccagggactggaagggcctgcgcgtcaccgtgaagctcacggtgcagaaccggcaggccaaggtctccgtcgtcccctccgccgccgccctcgtcatcaaggcgctcaaggagcccgagcgggaccggaagaaggtcaagaacatccggcacagcggcaacgtcgccctcgacgacgtcgtcgagatcgccaggaccatgcgccccagatccatggccaaggagatggccggcaccgtcaaggagatcctcggcacctgcgtcagcgtcgggtgcaccgtccacggcaaggaccccaaggacctgcagcaggagatcgatgatggtgaggtcgagatcccctccgcttaaaggcaatcctcgcggcggcgcggactacgacggtggctgactcgtagcgagaccttctccctcctcccccgcctgacgcccggcgaccactactcactcgctgctctggaagtctggcaggggtttcgcccggttcgacaacatcagggacgacagcggcgccatgccgctacacctcgccgccatgcaaggccgccccgcctacatgcaggtgctactagagaacgacgccattgtctccgttctcacaggctcatacaggtttaaaatctctcctgcgacagcaactgggcactaaactcaagcaatccctccagagcctcagctctctgctgggaccggtaatatctatgctgtctgacaagtcatctggccactcccttaaggaccaattaactcgcatggctgagaatgactatctacttagcggtggccttgaaggtattggttctactggaaagaagtgtgaagtcgctcgccgaagaaatggtttagataccaacaagccaaaaaaaggtggtgggccaacaggaagagagctgaatatcggacaagcatgtttccattcagaaccgagcaacgcttcaaaccagttcatcctagcccaattgatgcaggtgcaacattttgagataattggattggacaagcttcttgataatagttctgtagaatcaatgaatgaggaacatacaattggtgattcattagacgaggctgagcaggaggaattgaaccatgagattgctctggagtctactgaagactgcactggctccttgtgcaaagccactgcttttctatttcccaagacagcttttgacttcctgacaaatgtggctgctagtttgtttggtattcatggttctccatctccaagctcagttttggtagatcctcgatatgaaattgtgaagatggcagaaatgcagccatgtgcagaagaaacgccaaaagaagaacagatagtgaagtttgtggcgcagattgacaagccaattctctcttcagaggatgccgtctcaaaaagattcgatgtagtcactgactgtttggatcatcattttgtgaaggaaaatggccatgaaagtgttacaagaggttggctgaagaaggtgcgactggaatggaacatcctgcaaaatgacctaccagatggtattcatgtgagagtttatgaggaaaggatggatcttctgagggcttgcatcgttggggcacctggaacaccttaccatgacaatctttttttcttcgatattttctttcctcctgattaccctcatgaaccacctgtaagctcttccattccagtctctattgttcttgtagacaaaatcacgtgtttggagacggatttgatagcctaccaaccacgtcaccgtgcgtgcaggattaattattcagccttgcactgcaccactgtcaatctgtcaggccacgccacagcgtgattttgtctacatacagtacggttaatctctttttttctgattgatctctgtgatccagtgactggagcggcaagtgactcgcggcgggcggcggggactcgcggatggcgcccgcgaatcgcggcgttgggcgggcgggcgggcggcggttgtttgcggctgcgggatcctcagcggttgtgcgcgcgggagccacgcgagctggcggcggcggctgcgagatcctcggcggttgtgcgcgcgggagccacgggagcgaggggagagcgggcggttgtgcgcgcgggagccacgcgagctggcggcggttgtttgcggctgcgggatcctcggcggttgtgcgcgcgggagccacgggagtgaggggagagcgggggcagtctacatgtgagtcttaatagttgtagaagactttggaaagtagtggaatgtcacattctaaaaaaatagcctattctaatagtaagattctaattcctcaaaatgaaaagaaacaaacggggcctaagtgttttggtgattaagtatccaacacaaatgttttgaactctttatgtgttaaacaggcaaaaagtatgtttctagacttggtaaattgttttatgtactaacatggttatcaaagtgttagaaacagtgactaaagaacaagagaagaaaagggagaagagttggctgtgtgcagccaacactagctcggtctgggtgcaccggactgtccggtggtgcaccgaacagcgtccggtgcgccaggctggtccgcgtgaactcgctgctctcgggactcgacgacggcgtacggttaaaaatcaacggactgtccggtgagtcatctgcgacgaactcgatgctctcgggaatgaagaaaggcgacatggctataattcaccggactgtctggtggtg

SEQ ID NO: 15014 - DNA, 2979 bp, Zea Mays
gtcggccgtcggcaacgtcactctctatctctatctgcaggagctagcactaccaatagccaaggcagaggcccggcccacctaccgaagtccgaaacctcgccaagcggcaccaaaaaaacgcagccaatcgaaaccctacgtccgccgccagcttcaagctcccagagaccaaaccttccctccctacacactaacccacaccagccgccggccagcagcagccatgccgcccaagttggacccctcgcaggtggtcgaggtattcgtccgcgtgacgggcggctaggtcggcgcggcgtcgtcgctggcgcccaagatcggcccgctcggcctctccccgaagaagatcggcgaggacatcgccaaggagaccgccagggactggaagggcctgcgcgtcaccgtgaagctcacggtgcagaaccggcaggccaaggtctccgtcgtcccctccgccgccgccctcgtcatcaaggcgctcaaggagcccgagcgggaccggaagaaggtcaagaacatccggcacagcggcaacgtcgccctcgacgacgtcgtcgagatcgccaggaccatgcgccccagatccatggccaaggagatggccggcaccgtcaaggagatcctcggcacctgcgtcagcgtcgggtgcaccgtccacggcaaggaccccaaggacctgcagcaggagatcgatgatggtgaggtcgagatcccctccgcttaaaggcaatcctcgcggcggcgcggactacgacggtggctgactcgtagcgagaccttctccctcctcccccgcctgacgcccggcgaccactactcactcgctgctctggaagtctggcaggggtttcgcccggttcgacaacatcagggacgacagcggcgccatgccgctacacctcgccgccatgcaaggccgccccgcctacatgcaggtgctactagagaacgacgccattgtctccgttctcacaggctcatacagctgctgcaggtttaaaatctctcctgcgacagcaactgggcactaaactcaagcaatccctccagagcctcagctctctgctggttagtgccttactggtgtctaccactggctagggaccggtaatatctatgctgtctgacaagtcatctggccactcccttaaggaccaattaactcgcatggctgagaatgactatctacttagcggtggccttgaaggtattggttctactggaaagaagtgtgaagtcgctcgccgaagaaatggtttagataccaacaagccaaaaaaaggggcaacctgatacaacaggtggtgggccaacaggaagagagctgaatatcggacaagcatgtttccattcagaaccgagcaacgcttcaaaccagttcatcctagcccaattgatgcaggtgaattcattcttaagcaggacaacaactattactatacatcccttgtttagtctgcaaagctggtacaatggcaggtgcaacattttgagataattggattggacaagcttcttgataatagttctgtagaatcaatgaatgaggaacatacaattggtgattcattagacgaggctgagcaggaggaattgaaccatgagattgctctggagtctactgaagactgcactggctccttgtgcaaagccactgcttttctatttcccaagacagcttttgacttcctgacaaatgtggctgctagtttgtttggttttggtagatcctcgatatgaaattgtgaagatggcagaaatgcagccatgtgcagaagaaacgccaaaagaagaacagatagtgaagtttgtggcgcagattgacaagccaattctctcttcagaggatgccgtctcaaaaagattcgatgtagtcactgactgtttggatcatcattttgtgaaggaaaatggccatgaaagtgttacaagaggttggctgaagaaggtgcgactggaatggaacatcctgcaaaatgacctaccagatggtattcatgtgagagtttatgaggaaaggatggatcttctgagggcttgcatcgttggggcacctggaacaccttaccatgacaatctttttttcttcgatattttctttcctcctgattaccctcatgaaccaccttgactggagcggcaagtgactcgcggcgggcggcggggactcgcggatggcgcccgcgaatcgcggcgttgggcgggcgggcgggcggcggttgtttgcggctgcgggatcctcagcggttgtgcgcgcgggagccacgcgagctggcggcggcggctgcgagatcctcggcggttgtgcgcgcgggagccacgggagcgaggggagagcgggcggttgtgcgcgcgggagccacgcgagctggcggcggttgtttgcggctgcgggatcctcggcggttgtgcgcgcgggagccacgggagtgaggggagagcgggggcagtctacatgtgagtcttaatagttgtagaagactttggaaagtagtggaatgtcacattctaaaaaaatagcctattctaatagtaagattctaattcctcaaaatgaaaagaaacaaacggggcctaagtgttttggtgattaagtatccaacacaaatgttttgaactctttatgtgttaaacaggcaaaaagtatgtttctagacttggtaaattgttttatgtactaacatggttatcaaagtgttagaaacagtgactaaagaacaagagaagaaaagggagaagagttggctgtgtgcagccaacactagctcggtctgggtgcaccggactgtccggtggtgcaccgaacagcgtccggtgcgccaggctggtccgcgtgaactcgctgctctcgggactcgacgacggcgtacggttaaaaatcaacggactgtccggtgagtcatctgcgacgaactcgatgctctcgggaatgaagaaaggcgacatggctataattcaccggactgtctggtggtg

SEQ ID NO: 15015 - DNA, 2986 bp, Zea Mays
actaccaatagccaaggcagaggcccggcccacctaccgaagtccgaaacctcgccaagcggcaccaaaaaaacgcagccaatcgaaaccctacgtccgccgccagcttcaagctcccagagaccaaaccttccctccctacacactaacccacaccagccgccggccagcagcagccatgccgcccaagttggacccctcgcaggtggtcgaggtattcgtccgcgtgacgggcggctaggtcggcgcggcgtcgtcgctggcgcccaagatcggcccgctcggcctctccccgaagaagatcggcgaggacatcgccaaggagaccgccagggactggaagggcctgcgcgtcaccgtgaagctcacggtgcagaaccggcaggccaaggtctccgtcgtcccctccgccgccgccctcgtcatcaaggcgctcaaggagcccgagcgggaccggaagaaggtcaagaacatccggcacagcggcaacgtcgccctcgacgacgtcgtcgagatcgccaggaccatgcgccccagatccatggccaaggagatggccggcaccgtcaaggagatcctcggcacctgcgtcagcgtcgggtgcaccgtccacggcaaggaccccaaggacctgcagcaggagatcgatgatggtgaggtcgagatcccctccgcttaaaggcaatcctcgcggcggcgcggactacgacggtggctgactcgtagcgagaccttctccctcctcccccgcctgacgcccggcgaccactactcactcgctgctctggaagtctggcaggggtttcgcccggttcgacaacatcagggacgacagcggcgccatgccgctacacctcgccgccatgcaaggccgccccgcctacatgcaggtgctactagagaacgacgccattgtctccgttctcacaggctcatacaggtttaaaatctctcctgcgacagcaactgggcactaaactcaagcaatccctccagagcctcagctctctgctggttagtgccttactggtgtctaccactggctagggaccgcggtggccttgaaggtattggttctactggaaagaagtgtgaagtcgctcgccgaagaaatggtttagataccaacaagccaaaaaaaggtggtgggccaacaggaagagagctgaatatcggacaagcatgtttccattcagaaccgagcaacgcttcaaaccagttcatcctagcccaattgatgcaggtgcaacattttgagataattggattggacaagcttcttgataatagttctgtagaatcaatgaatgaggaacatacaattggtgattcattagacgaggctgagcaggaggaattgaaccatgagattgctctggagtctactgaagactgcactggctccttgtgcaaagccactgcttttctatttcccaagacagcttttgacttcctgacaaatgtggctgctagtttgtttggtattcatggttctccatctccaagctcagttttggtagatcctcgatatgaaattgtgaagatggcagaaatgcagccatgtgcagaagaaacgccaaaagaagaacagatagtgaagtttgtggcgcagattgacaagccaattctctcttcagaggatgccgtctcaaaaagattcgatgtagtcactgactgtttggatcatcattttgtgaaggaaaatggccatgaaagtgttacaagaggttggctgaagaaggtgcgactggaatggaacatcctgcaaaatgacctaccagatggtattcatgtgagagtttatgaggaaaggatggatcttctgagggcttgcatcgttggggcacctggaacaccttaccatgacaatctttttttcttcgatattttctttcctcctgattaccctcatgaaccacctgtaagctcttccattccagtctctattgttcttgtagacaaaatcacgtgtttggagacggatttgatagcctaccaaccacgtcaccgtgcgtgcaggattaattattcagccttgcactgcaccactgtcaatctgtcaggccacgccacagcgtgattttgtctacatacagtacggttaatctctttttttctgattgatctctgtgatccagtgactggagcggcaagtgactcgcggcgggcggcggggactcgcggatggcgcccgcgaatcgcggcgttgggcgggcgggcgggcggcggttgtttgcggctgcgggatcctcagcggttgtgcgcgcgggagccacgcgagctggcggcggcggctgcgagatcctcggcggttgtgcgcgcgggagccacgggagcgaggggagagcgggcggttgtgcgcgcgggagccacgcgagctggcggcggttgtttgcggctgcgggatcctcggcggttgtgcgcgcgggagccacgggagtgaggggagagcgggggcagtctacatgtgagtcttaatagttgtagaagactttggaaagtagtggaatgtcacattctaaaaaaatagcctattctaatagtaagattctaattcctcaaaatgaaaagaaacaaacggggcctaagtgttttggtgattaagtatccaacacaaatgttttgaactctttatgtgttaaacaggcaaaaagtatgtttctagacttggtaaattgttttatgtactaacatggttatcaaagtgttagaaacagtgactaaagaacaagagaagaaaagggagaagagttggctgtgtgcagccaacactagctcggtctgggtgcaccggactgtccggtggtgcaccgaacagcgtccggtgcgccaggctggtccgcgtgaactcgctgctctcgggactcgacgacggcgtacggttaaaaatcaacggactgtccggtgagtcatctgcgacgaactcgatgctctcgggaatgaagaaaggcgacatggctataattcaccggactgtctggtggtg

SEQ ID NO: 15016 - DNA, 3064 bp, Zea Mays
accaatagccaaggcagaggcccggcccacctaccgaagtccgaaacctcgccaagcggcaccaaaaaaacgcagccaatcgaaaccctacgtccgccgccagcttcaagctcccagagaccaaaccttccctccctacacactaacccacaccagccgccggccagcagcagccatgccgcccaagttggacccctcgcaggtggtcgaggtattcgtccgcgtgacgggcggctaggtcggcgcggcgtcgtcgctggcgcccaagatcggcccgctcggcctctccccgaagaagatcggcgaggacatcgccaaggagaccgccagggactggaagggcctgcgcgtcaccgtgaagctcacggtgcagaaccggcaggccaaggtctccgtcgtcccctccgccgccgccctcgtcatcaaggcgctcaaggagcccgagcgggaccggaagaaggtcaagaacatccggcacagcggcaacgtcgccctcgacgacgtcgtcgagatcgccaggaccatgcgccccagatccatggccaaggagatggccggcaccgtcaaggagatcctcggcacctgcgtcagcgtcgggtgcaccgtccacggcaaggaccccaaggacctgcagcaggagatcgatgatggtgaggtcgagatcccctccgcttaaaggcaatcctcgcggcggcgcggactacgacggtggctgactcgtagcgagaccttctccctcctcccccgcctgacgcccggcgaccactactcactcgctgctctggaagtctggcaggggtttcgcccggttcgacaacatcagggacgacagcggcgccatgccgctacacctcgccgccatgcaaggccgccccgcctacatgcaggtgctactagagaacgacgccattgtctccgttctcacaggctcatacagctgctgcaggtttaaaatctctcctgcgacagcaactgggcactaaactcaagcaatccctccagagcctcagctctctgctgggaccggtaatatctatgctgtctgacaagtcatctggccactcccttaaggaccaattaactcgcatggctgagaatgactatctacttagcggtggccttgaaggtattggttctactggaaagaagtgtgaagtcgctcgccgaagaaatggtttagataccaacaagccaaaaaaaggggcaacctgatacaacaggtggtgggccaacaggaagagagctgaatatcggacaagcatgtttccattcagaaccgagcaacgcttcaaaccagttcatcctagcccaattgatgcaggtgcaacattttgagataattggattggacaagcttcttgataatagttctgtagaatcaatgaatgaggaacatacaattggtgattcattagacgaggctgagcaggaggaattgaaccatgagattgctctggagtctactgaagactgcactggctccttgtgcaaagccactgcttttctatttcccaagacagcttttgacttcctgacaaatgtggctgctagtttgtttggtattcatggttctccatctccaagctcagttttggtagatcctcgatatgaaattgtgaagatggcagaaatgcagccatgtgcagaagaaacgccaaaagaagaacagatagtgaagtttgtggcgcagattgacaagccaattctctcttcagaggatgccgtctcaaaaagattcgatgtagtcactgactgtttggatcatcattttgtgaaggaaaatggccatgaaagtgttacaagaggttggctgaagaaggtgcgactggaatggaacatcctgcaaaatgacctaccagatggtattcatgtgagagtttatgaggaaaggatggatcttctgagggcttgcatcgttggggcacctggaacaccttaccatgacaatctttttttcttcgatattttctttcctcctgattaccctcatgaaccacctgtaagctcttccattccagtctctattgttcttgtagacaaaatcacgtgtttggagacggatttgatagcctaccaaccacgtcaccgtgcgtgcaggattaattattcagccttgcactgcaccactgtcaatctgtcaggccacgccacagcgtgattttgtctacatacagtacggttaatctctttttttctgattgatctctgtgatccagtgactggagcggcaagtgactcgcggcgggcggcggggactcgcggatggcgcccgcgaatcgcggcgttgggcgggcgggcgggcggcggttgtttgcggctgcgggatcctcagcggttgtgcgcgcgggagccacgcgagctggcggcggcggctgcgagatcctcggcggttgtgcgcgcgggagccacgggagcgaggggagagcgggcggttgtgcgcgcgggagccacgcgagctggcggcggttgtttgcggctgcgggatcctcggcggttgtgcgcgcgggagccacgggagtgaggggagagcgggggcagtctacatgtgagtcttaatagttgtagaagactttggaaagtagtggaatgtcacattctaaaaaaatagcctattctaatagtaagattctaattcctcaaaatgaaaagaaacaaacggggcctaagtgttttggtgattaagtatccaacacaaatgttttgaactctttatgtgttaaacaggcaaaaagtatgtttctagacttggtaaattgttttatgtactaacatggttatcaaagtgttagaaacagtgactaaagaacaagagaagaaaagggagaagagttggctgtgtgcagccaacactagctcggtctgggtgcaccggactgtccggtggtgcaccgaacagcgtccggtgcgccaggctggtccgcgtgaactcgctgctctcgggactcgacgacggcgtacggttaaaaatcaacggactgtccggtgagtcatctgcgacgaactcgatgctctcgggaatgaagaaaggcgacatggctataattcaccggactgtctggtggtg

SEQ ID NO: 15017 - DNA, 2702 bp, Zea Mays
cgaaacctcgccaagcggcaccaaaaaaacgcagccaatcgaaaccctacgtccgccgccagcttcaagctcccagagaccaaaccttccctccctacacactaacccacaccagccgccggccagcagcagccatgccgcccaagttggacccctcgcaggtggtcgaggtattcgtccgcgtgacgggcggctaggtcggcgcggcgtcgtcgctggcgcccaagatcggcccgctcggcctctccccgaagaagatcggcgaggacatcgccaaggagaccgccagggactggaagggcctgcgcgtcaccgtgaagctcacggtgcagaaccggcaggccaaggtctccgtcgtcccctccgccgccgccctcgtcatcaaggcgctcaaggagcccgagcgggaccggaagaaggtcaagaacatccggcacagcggcaacgtcgccctcgacgacgtcgtcgagatcgccaggaccatgcgccccagatccatggccaaggagatggccggcaccgtcaaggagatcctcggcacctgcgtcagcgtcgggtgcaccgtccacggcaaggaccccaaggacctgcagcaggagatcgatgatggtgaggtcgagatcccctccgcttaaaggggtttcgcccggttcgacaacatcagggacgacagcggcgccatgccgctacacctcgccgccatgcaaggccgccccgcctacatgcaggtgctactagagaacgacgccattgtctccgttctcacaggctcatacagctgctgcaggtttaaaatctctcctgcgacagcaactgggcactaaactcaagcaatccctccagagcctcagctctctgctggttagtgccttactggtgtctaccactggctagggaccggtaatatctatgctgtctgacaagtcatctggccactcccttaaggaccaattaactcgcatggctgagaatgactatctacttagcggtggccttgaaggtattggttctactggaaagaagtgtgaagtcgctcgccgaagaaatggtttagataccaacaagccaaaaaaaggtggtgggccaacaggaagagagctgaatatcggacaagcatgtttccattcagaaccgagcaacgcttcaaaccagttcatcctagcccaattgatgcaggtgcaacattttgagataattggattggacaagcttcttgataatagttctgtagaatcaatgaatgaggaacatacaattggtgattcattagacgaggctgagcaggaggaattgaaccatgagattgctctggagtctactgaagactgcactggctccttgtgcaaagccactgcttttctatttcccaagacagcttttgacttcctgacaaatgtggctgctagtttgtttggtattcatggttctccatctccaagctcagttttggtagatcctcgatatgaaattgtgaagatggcagaaatgcagccatgtgcagaagaaacgccaaaagaagaacagatagtgaagtttgtggcgcagattgacaagccaattctctcttcagaggatgccgtctcaaaaagattcgatgtagtcactgactgtttggatcatcattttgtgaaggaaaatggccatgaaagtgttacaagaggttggctgaagaaggtgcgactggaatggaacatcctgcaaaatgacctaccagatggtattcatgtgagagtttatgaggaaaggatggatcttctgagggcttgcatcgttggggcacctggaacaccttaccatgacaatctttttttcttcgatattttctttcctcctgattaccctcatgaaccaccttgactggagcggcaagtgactcgcggcgggcggcggggactcgcggatggcgcccgcgaatcgcggcgttgggcgggcgggcgggcggcggttgtttgcggctgcgggatcctcagcggttgtgcgcgcgggagccacgcgagctggcggcggcggctgcgagatcctcggcggttgtgcgcgcgggagccacgggagcgaggggagagcgggcggttgtgcgcgcgggagccacgcgagctggcggcggttgtttgcggctgcgggatcctcggcggttgtgcgcgcgggagccacgggagtgaggggagagcgggggcagtctacatgtgagtcttaatagttgtagaagactttggaaagtagtggaatgtcacattctaaaaaaatagcctattctaatagtaagattctaattcctcaaaatgaaaagaaacaaacggggcctaagtgttttggtgattaagtatccaacacaaatgttttgaactctttatgtgttaaacaggcaaaaagtatgtttctagacttggtaaattgttttatgtactaacatggttatcaaagtgttagaaacagtgactaaagaacaagagaagaaaagggagaagagttggctgtgtgcagccaacactagctcggtctgggtgcaccggactgtccggtggtgcaccgaacagcgtccggtgcgccaggctggtccgcgtgaactcgctgctctcgggactcgacgacggcgtacggttaaaaatcaacggactgtccggtgagtcatctgcgacgaactcgatgctctcgggaatgaagaaaggcgacatggctataattcaccggactgtctggtggtg

SEQ ID NO: 15018 - DNA, 2911 bp, Zea Mays
caagcggcaccaaaaaaacgcagccaatcgaaaccctacgtccgccgccagcttcaagctcccagagaccaaaccttccctccctacacactaacccacaccagccgccggccagcagcagccatgccgcccaagttggacccctcgcaggtggtcgaggtattcgtccgcgtgacgggcggctaggtcggcgcggcgtcgtcgctggcgcccaagatcggcccgctcggcctctccccgaagaagatcggcgaggacatcgccaaggagaccgccagggactggaagggcctgcgcgtcaccgtgaagctcacggtgcagaaccggcaggccaaggtctccgtcgtcccctccgccgccgccctcgtcatcaaggcgctcaaggagcccgagcgggaccggaagaaggtcaagaacatccggcacagcggcaacgtcgccctcgacgacgtcgtcgagatcgccaggaccatgcgccccagatccatggccaaggagatggccggcaccgtcaaggagatcctcggcacctgcgtcagcgtcgggtgcaccgtccacggcaaggaccccaaggacctgcagcaggagatcgatgatggtgaggtcgagatcccctccgcttaaaggggtttcgcccggttcgacaacatcagggacgacagcggcgccatgccgctacacctcgccgccatgcaaggccgccccgcctacatgcaggtgctactagagaacgacgccattgtctccgttctcacaggctcatacaggtttaaaatctctcctgcgacagcaactgggcactaaactcaagcaatccctccagagcctcagctctctgctggaccaattaactcgcatggctgagaatgactatctacttagcggtggccttgaaggtattggttctactggaaagaagtgtgaagtcgctcgccgaagaaatggtttagataccaacaagccaaaaaaaggggcaacctgatacaacaggtggtgggccaacaggaagagagctgaatatcggacaagcatgtttccattcagaaccgagcaacgcttcaaaccagttcatcctagcccaattgatgcaggtgaattcattcttaagcaggacaacaactattactatacatcccttgtttagtctgcaaagctggtacaatggcaggtgcaacattttgagataattggattggacaagcttcttgataatagttctgtagaatcaatgaatgaggaacatacaattggtgattcattagacgaggctgagcaggaggaattgaaccatgagattgctctggagtctactgaagactgcactggctccttgtgcaaagccactgcttttctatttcccaagacagcttttgacttcctgacaaatgtggctgctagtttgtttggtattcatggttctccatctccaagctcagttttggtagatcctcgatatgaaattgtgaagatggcagaaatgcagccatgtgcagaagaaacgccaaaagaagaacagatagtgaagtttgtggcgcagattgacaagccaattctctcttcagaggatgccgtctcaaaaagattcgatgtagtcactgactgtttggatcatcattttgtgaaggaaaatggccatgaaagtgttacaagaggttggctgaagaaggtgcgactggaatggaacatcctgcaaaatgacctaccagatggtattcatgtgagagtttatgaggaaaggatggatcttctgagggcttgcatcgttggggcacctggaacaccttaccatgacaatctttttttcttcgatattttctttcctcctgattaccctcatgaaccacctgtaagctcttccattccagtctctattgttcttgtagacaaaatcacgtgtttggagacggatttgatagcctaccaaccacgtcaccgtgcgtgcaggattaattattcagccttgcactgcaccactgtcaatctgtcaggccacgccacagcgtgattttgtctacatacagtacggttaatctctttttttctgattgatctctgtgatccagtgactggagcggcaagtgactcgcggcgggcggcggggactcgcggatggcgcccgcgaatcgcggcgttgggcgggcgggcgggcggcggttgtttgcggctgcgggatcctcagcggttgtgcgcgcgggagccacgcgagctggcggcggcggctgcgagatcctcggcggttgtgcgcgcgggagccacgggagcgaggggagagcgggcggttgtgcgcgcgggagccacgcgagctggcggcggttgtttgcggctgcgggatcctcggcggttgtgcgcgcgggagccacgggagtgaggggagagcgggggcagtctacatgtgagtcttaatagttgtagaagactttggaaagtagtggaatgtcacattctaaaaaaatagcctattctaatagtaagattctaattcctcaaaatgaaaagaaacaaacggggcctaagtgttttggtgattaagtatccaacacaaatgttttgaactctttatgtgttaaacaggcaaaaagtatgtttctagacttggtaaattgttttatgtactaacatggttatcaaagtgttagaaacagtgactaaagaacaagagaagaaaagggagaagagttggctgtgtgcagccaacactagctcggtctgggtgcaccggactgtccggtggtgcaccgaacagcgtccggtgcgccaggctggtccgcgtgaactcgctgctctcgggactcgacgacggcgtacggttaaaaatcaacggactgtccggtgagtcatctgcgacgaactcgatgctctcgggaatgaagaaaggcgacatggctataattcaccggactgtctggtggtg

SEQ ID NO: 15019 - DNA, 2843 bp, Zea Mays
cctacgtccgccgccagcttcaagctcccagagaccaaaccttccctccctacacactaacccacaccagccgccggccagcagcagccatgccgcccaagttggacccctcgcaggtggtcgaggtattcgtccgcgtgacgggcggctaggtcggcgcggcgtcgtcgctggcgcccaagatcggcccgctcggcctctccccgaagaagatcggcgaggacatcgccaaggagaccgccagggactggaagggcctgcgcgtcaccgtgaagctcacggtgcagaaccggcaggccaaggtctccgtcgtcccctccgccgccgccctcgtcatcaaggcgctcaaggagcccgagcgggaccggaagaaggtcaagaacatccggcacagcggcaacgtcgccctcgacgacgtcgtcgagatcgccaggaccatgcgccccagatccatggccaaggagatggccggcaccgtcaaggagatcctcggcacctgcgtcagcgtcgggtgcaccgtccacggcaaggaccccaaggacctgcagcaggagatcgatgatggtgaggtcgagatcccctccgcttaaaggcaatcctcgcggcggcgcggactacgacggtggctgactcgtagcgagaccttctccctcctcccccgcctgacgcccggcgaccactactcactcgctgctctggaagtctggcaggggtttcgcccggttcgacaacatcagggacgacagcggcgccatgccgctacacctcgccgccatgcaaggccgccccgcctacatgcaggtgctactagagaacgacgccattgtctccgttctcacaggctcatacaggtttaaaatctctcctgcgacagcaactgggcactaaactcaagcaatccctccagagcctcagctctctgctggttagtgccttactggtgtctaccactggctagggaccggtaatatctatgctgtctgacaagtcatctggccactcccttaaggaccaattaactcgcatggctgagaatgactatctacttagcggtggccttgaaggtattggttctactggaaagaagtgtgaagtcgctcgccgaagaaatggtttagataccaacaagccaaaaaaaggtggtgggccaacaggaagagagctgaatatcggacaagcatgtttccattcagaaccgagcaacgcttcaaaccagttcatcctagcccaattgatgcaggtgaattcattcttaagcaggacaacaactattactatacatcccttgtttagtctgcaaagctggtacaatggcaggtgcaacattttgagataattggattggacaagcttcttgataatagttctgtagaatcaatgaatgaggaacatacaattggtgattcattagacgaggctgagcaggaggaattgaaccatgagattgctctggagtctactgaagactgcactggctccttgtgcaaagccactgcttttctatttcccaagacagcttttgacttcctgacaaatgtggctgctagtttgtttggtattcatggttctccatctccaagctcagttttggtagatcctcgatatgaaattgtgaagatggcagaaatgcagccatgtgcagaagaaacgccaaaagaagaacagatagtgaagtttgtggcgcagattgacaagccaattctctcttcagaggatgccgtctcaaaaagattcgatgtagtcactgactgtttggatcatcattttgtgaaggaaaatggccatgaaagtgttacaagaggttggctgaagaaggtgcgactggaatggaacatcctgcaaaatgacctaccagatggtattcatgtgagagtttatgaggaaaggatggatcttctgagggcttgcatcgttggggcacctggaacaccttaccatgacaatctttttttcttcgatattttctttcctcctgattaccctcatgaaccaccttgactggagcggcaagtgactcgcggcgggcggcggggactcgcggatggcgcccgcgaatcgcggcgttgggcgggcgggcgggcggcggttgtttgcggctgcgggatcctcagcggttgtgcgcgcgggagccacgcgagctggcggcggcggctgcgagatcctcggcggttgtgcgcgcgggagccacgggagcgaggggagagcgggcggttgtgcgcgcgggagccacgcgagctggcggcggttgtttgcggctgcgggatcctcggcggttgtgcgcgcgggagccacgggagtgaggggagagcgggggcagtctacatgtgagtcttaatagttgtagaagactttggaaagtagtggaatgtcacattctaaaaaaatagcctattctaatagtaagattctaattcctcaaaatgaaaagaaacaaacggggcctaagtgttttggtgattaagtatccaacacaaatgttttgaactctttatgtgttaaacaggcaaaaagtatgtttctagacttggtaaattgttttatgtactaacatggttatcaaagtgttagaaacagtgactaaagaacaagagaagaaaagggagaagagttggctgtgtgcagccaacactagctcggtctgggtgcaccggactgtccggtggtgcaccgaacagcgtccggtgcgccaggctggtccgcgtgaactcgctgctctcgggactcgacgacggcgtacggttaaaaatcaacggactgtccggtgagtcatctgcgacgaactcgatgctctcgggaatgaagaaaggcgacatggctataattcaccggactgtctggtggtg

SEQ ID NO: 15020 - DNA, 2459 bp, Zea Mays
tgaccctttgagactaacctggttgtttgagtattcttcatgtagtctcaaaggtgcattgaaagcgaaaaataaacttggacgatgaaaagtcttccactacactccggcaatcctcgcggcggcgcggactacgacggtggctgactcgtagcgagaccttctccctcctcccccgcctgacgcccggcgaccactactcactcgctgctctggaagtctggcaggggtttcgcccggttcgacaacatcagggacgacagcggcgccatgccgctacacctcgccgccatgcaaggccgccccgcctacatgcaggtgctactagagaacgacgccattgtctccgttctcacaggctcatacagctgctgcaggtttaaaatctctcctgcgacagcaactgggcactaaactcaagcaatccctccagagcctcagctctctgctggttagtgccttactggtgtctaccactggctagggaccggtaatatctatgctgtctgacaagtcatctggccactcccttaaggaccaattaactcgcatggctgagaatgactatctacttagcggtggccttgaaggtattggttctactggaaagaagtgtgaagtcgctcgccgaagaaatggtttagataccaacaagccaaaaaaaggggcaacctgatacaacaggtggtgggccaacaggaagagagctgaatatcggacaagcatgtttccattcagaaccgagcaacgcttcaaaccagttcatcctagcccaattgatgcaggtgaattcattcttaagcaggacaacaactattactatacatcccttgtttagtctgcaaagctggtacaatggcaggtgcaacattttgagataattggattggacaagcttcttgataatagttctgtagaatcaatgaatgaggaacatacaattggtgattcattagacgaggctgagcaggaggaattgaaccatgagattgctctggagtctactgaagactgcactggctccttgtgcaaagccactgcttttctatttcccaagacagcttttgacttcctgacaaatgtggctgctagtttgtttggtattcatggttctccatctccaagctcagtaagttatttgttgaacaaattcagccaagctcattttttccagagttcttaagtgaatatgttatccaggttttggtagatcctcgatatgaaattgtgaagatggcagaaatgcagccatgtgcagaagaaacgccaaaagaagaacagatagtgaagtttgtggcgcagattgacaagccaattctctcttcagaggatgccgtctcaaaaagattcgatgtagtcactgactgtttggatcatcattttgtgaaggaaaatggccatgaaagtgttacaagaggttggctgaagaaggtgcgactggaatggaacatcctgcaaaatgacctaccagatggtattcatgtgagagtttatgaggaaaggatggatcttctgagggcttgcatcgttggggcacctggaacaccttaccatgacaatctttttttcttcgatattttctttcctcctgattaccctcatgaaccaccttgactggagcggcaagtgactcgcggcgggcggcggggactcgcggatggcgcccgcgaatcgcggcgttgggcgggcgggcgggcggcggttgtttgcggctgcgggatcctcagcggttgtgcgcgcgggagccacgcgagctggcggcggcggctgcgagatcctcggcggttgtgcgcgcgggagccacgggagcgaggggagagcgggcggttgtgcgcgcgggagccacgcgagctggcggcggttgtttgcggctgcgggatcctcggcggttgtgcgcgcgggagccacgggagtgaggggagagcgggggcagtctacatgtgagtcttaatagttgtagaagactttggaaagtagtggaatgtcacattctaaaaaaatagcctattctaatagtaagattctaattcctcaaaatgaaaagaaacaaacggggcctaagtgttttggtgattaagtatccaacacaaatgttttgaactctttatgtgttaaacaggcaaaaagtatgtttctagacttggtaaattgttttatgtactaacatggttatcaaagtgttagaaacagtgactaaagaacaagagaagaaaagggagaagagttggctgtgtgcagccaacactagctcggtctgggtgcaccggactgtccggtggtgcaccgaacagcgtccggtgcgccaggctggtccgcgtgaactcgctgctctcgggactcgacgacggcgtacggttaaaaatcaacggactgtccggtgagtcatctgcgacgaactcgatgctctcgggaatgaagaaaggcgacatggctataattcaccggactgtctggtggtg

SEQ ID NO: 15021 - DNA, 1077 bp, Zea Mays
aaggacgtgggcatcctcaccatgatcatctacttcctgtccaattgcgtcatccaggaaaggctgccaagccaggaggccaaactggctccgcttcttgcaagagctaacctcgtcattgccagggatattgagtgggcaaacatcatgtttgcttttgagcaggagagcaggtatatcataatggacccactctttccacaatctccagtaggttttattcgagagaaaagcaacatcatctttagacagctactcagaacaagacggccatttgttgcagaaataactgatgctatgggtaacgagatatttaaggttcgccggccattttggtggatcaacagctcaatttatgtagaagtgaatgataaggagataggtgtagtccacaggcgttggcacctttggcggagaatttatgacttgtacttagggaatatgcaatttgcagttgttgagaatccaggattctggaactggacctttaacctggtggatgaagatgataaaatgttggctcagattgatcgtaattggaggggcctcggctttgagctcttcacggatgctggccagtatgctatccggtttggtgatgaggggcaaagccacaagtttgctcccgcagaagatgtcgaagaactgcatgttgttcgccagctgactttgcctgaaagggcagtggctcttgctctcgcgatttccttggacagtgattacttctctagaagaggtggctggggacttccgtttctgatagccacagagtagacaaatgaaccaccctcgcccacactcaaggaaaaaactttttttggggctctcaatttcccaagagtgcaagtgtatgatatgagtggcttttagaattgctaaaactcaatcattactacgccattgtcacattagttggtaaacaggatgttgttgatgaaagggatgacttttgcttcatcggtgcccagtcggtgtcccagtcttgatcagcttgaacggatgtgttgcctttgcctcagcggtgcccagcaacgacgtgtccgatctcgtttacacaaaacgtgtcgttggaataat

SEQ ID NO: 15022 - DNA, 1202 bp, Zea Mays
gactaacactggacctttggttacaaaaatcatgaaatgttgttgctgcaacattgtgtatgctattaggcccaccgacatgttttgaaaataccgtataaacatttctccactgtgagaagctaacttttgtaaatgcatcttgtcaaaatttatcatccattcgatcatgcttaaaaaggtaacaatagaagcaataagccttattctactccacactatattccaaacaactatgttgtctaaaccaatgtttttgaaagctccttttatcatgtgacaagaaaattatgaccaattgttgagtcggacctttagctatgaaagcccttctaacttcatctctaatattaggagcaaaggaattaattggaatatgaagtcccagattagaaataatgtgatccaggtttaaatgatttataccatcaacatcttcaccattggcatctggaatatgtgcattctcttcttgaacaattggaatttcttcactattattctcttgaacttgaacttgtatttcgggttcattgcaaactccactagcacgagtgtttggtccacttccactagaaccttgaccgaaataactcttcaaattttttggacaatcttcttttcctttttccatccaaatatgaactaaattaccaaaataaatctgcacattgacaaataaattagattaaatatatttatcgcagcagatcctagttaaatcctcacagtctcacccaacacatgaactgatattattgatgaacacaaattcagagttcagaaaacttcaccacacctcaagcagaccagcggagtgcggagccgcggagcacgctgctgcttgctactacctcctagtctcctacagtcctactcagggtctcaggcgggcacgcagcgctacgggcatcaggccagaccagacgaccagaactgcgcgaccgcgcgggactgctgcggcggccggcggcgcggcgctgcagcctgcgggcggtccggcggggcctgtgaccggagccgaaggcgctaggtgcggcggacgacgggctctatggcctgcggtggaggcgatggagggcggatggaggcgtagggcgcaggatgattatttaatagagtttgaagaactcgcccttgatggcatcaagtatcatgcttggacatcatttggcaaatttaaaaggaagtatcataattaa

SEQ ID NO: 15023 - DNA, 1333 bp, Zea Mays
caaatacttgctcatgtatttcattgtccatcctcgttagacttctgacagagacactgtagctggactgtacattgataaattgctaagccacatcagcggccatcacacacacggtcgacgccatctcctgattcgtcttcgtctagaacgtcagaattcaccaaatcagccctcgcgtttctcccttcccccggctcccggcgtctctgcgctgcggccgtacggcgatgcggtggctatcgaggctgctctctcaagccgtcgccgccaggagggcctccgcggcggcgaggtccaacactagtctcgtcaagggaggatcccacgggttcgctagtggcggcagggatgggtcaccggaggtgcctcgggagtggttgcggaagctgtgggtagacgagctgaagaagcagaaggaagccgcgaggagatggggcgtcggctcatcattagaggttgcaggagcgaccgaggaggcaccgtcaaggagctatcagtacgaatacagcggctctaaccccgtggaggccaaactggctccgcttcttgcaagagctaacctcgtcattgccagggatattgagtgggcaaacatcatgtttgcttttgagcaggagagcaggtatatcataatggacccactctttccacaatctccagtaggttttattcgagagaaaagcaacatcatctttagacagctactcagaacaagacggccatttgttgcagaaataactgatgctatgggtaacgagatatttaaggttcgccggccattttggtggatcaacagctcaatttatgtagaagtgaatgataaggagataggtgtagtccacaggcgttggcacctttggcggagaatttatgacttgtacttagggaatatgcaatttgcagttgttgagaatccaggattctggaactggacctttaacctggtggatgaagatgataaaatgttggctcagattgatcgtaattggaggggcctcggctttgagggtctccaaagcgtcgctcaaccactgggaactcgtcctagtgccacccaaccgctcgtgaaccgagagccttgaaggtccttcactccttgccccttcaccctgcaccatccaacggtgaaagctacctgggggcatgatcaccaaggttcccattttgacggtcatctctaaccggaggtggcaaaggcccaactcctgtcgacgccgagacgaccggagaagcagcgagctgaacgcagcaggagagtcctcgcgactcaaaaggaccgtcaggcacagaaggctccataatgatgaggtctatgacctgaggcaaccgc

SEQ ID NO: 15024 - DNA, 1414 bp, Zea Mays
acacggtcgacgccatctcctgattcgtcttcgtctagaacgtcagaattcaccaaatcagccctcgcgtttctcccttcccccggctcccggcgtctctgcgctgcggccgtacggcgatgcggtggctatcgaggctgctctctcaagccgtcgccgccaggagggcctccgcggcggcgaggtccaacactagtctcgtcaagggaggatcccacgggttcgctagtggcggcagggatgggtcaccggaggtgcctcgggagtggttgcggaagctgtgggtagacgagctgaagaagcagaaggaagccgcgaggagatggggcgtcggctcatcattagaggttgcaggagcgaccgaggaggcaccgtcaaggagctatcagtacgaatacagcggctctaaccccgtggaggccaaactggctccgcttcttgcaagagctaacctcgtcattgccagggatattgagtgggcaaacatcatgtttgcttttgagcaggagagcaggtatatcataatggacccactctttccacaatcttaggttttattcgagagaaaagcaacatcatctttagacagctactcagaacaagacggccatttgttgcagaaataactgatgctatgggtaacgagatatttaaggttcgccggccattttggtggatcaacagctcaatttatgtagaagtgaatgataaggagataggtgtagtccacaggcgttggcacctttggcggagaatttatgacttgtacttagggaatatgcaatttgcagttgttgagaatccaggattctggaactggacctttaacctggtggatgaagatgataaaatgttggctcagattgatcgtaattggaggggcctcggctttgagctcttcacggatgctggccagtatgctatccggtttggtgatgaggggcaaagccacaagtttgctcccgcagaagatgtcgaagaactgcatgttgttcgccagctgactttgcctgaaagggcagtggctcttgctctcgcgatttccttggacagtgattacttctctagaagaggtggctggggacttccgtttctgatagccacagagtagacaaatgaaccaccctcgcccacactcaaggaaaaaactttttttggggctctcaatttcccaagagtgcaagtgtatgatatgagtggcttttagaattgctaaaactcaatcattactacgccattgtcacattagttggtaaacaggatgttgttgatgaaagggatgacttttgcttcatcggtgcccagtcggtgtcccagtcttgatcagcttgaacggatgtgttgcctttgcctcagcggtgcccagcaacgacgtgtccgatctcgtttacacaaaacgtgtcgttggaataat

SEQ ID NO: 15025 - DNA, 1287 bp, Zea Mays
cgccatctcctgattcgtcttcgtctagaacgtcagaattcaccaaatcagccctcgcgtttctcccttcccccggctcccggcgtctctgcgctgcggccgtacggcgatgcggtggctatcgaggctgctctctcaagccgtcgccgccaggagggcctccgcggcggcgaggtccaacactagtctcgtcaagggaggatcccacgggttcgctagtggcggcagggatgggtcaccggaggtgcctcgggagtggttgcggaagctgtgggtagacgagctgaagaagcagaaggaagccgcgaggagatggggcgtcggctcatcattagaggttgcaggagcgaccgaggaggcaccgtcaaggagctatcagtacgaatacagcggctctaaccccgtggaggccaaactggctccgcttcttgcaagagctaacctcgtcattgccagggatattgagtgggcaaacatcatgtttgcttttgagcaggagagcaggtatatcataatggacccactctttccacaatctccagtaggttttattcgagagaaaagcaacatcatctttagacagctactcagaacaagacggccatttgttgcagaaataactgatgctatgggtaacgagatatttaaggttcgccggccattttggtggatcaacagctcaatttatgtagaagtgaatgataaggagataggtgtagtccacaggcgttggcacctttggcggagaatttatgacttgtacttaggctcttcacggatgctggccagtatgctatccggtttggtgatgaggggcaaagccacaagtttgctcccgcagaagatgtcgaagaactgcatgttgttcgccagctgactttgcctgaaagggcagtggctcttgctctcgcgatttccttggacagtgattacttctctagaagaggtggctggggacttccgtttctgatagccacagagtagacaaatgaaccaccctcgcccacactcaaggaaaaaactttttttggggctctcaatttcccaagagtgcaagtgtatgatatgagtggcttttagaattgctaaaactcaatcattactacgccattgtcacattagttggtaaacaggatgttgttgatgaaagggatgacttttgcttcatcggtgcccagtcggtgtcccagtcttgatcagcttgaacggatgtgttgcctttgcctcagcggtgcccagcaacgacgtgtccgatctcgtttacacaaaacgtgtcgttggaataat

SEQ ID NO: 15026 - DNA, 645 bp, Zea Mays
gttaaatgttaaggttcaagaaagccacttcaactgcacctaagaaaaagccagaacagcagaatgacagcactttattgaaaaatatacattagtaagtgaacagtgttccacaaaaaaatgaccaagaagcttttactaagtcacaaatacttgacacatttgactctctatacatcttctattcaacttctataatgtgttctaaaaatcctccaaatttatgagaattttgtaatcattttccaatacaaatctacacatatatgtctccagtggcggacactggccctgagctggccgtgctgcagcccgggtcttggccaaataaatcaatagtaaatcacttgaacaatgaaggattaggctctagtaatttagctgtagcaatttcattcatatcttggcctaggccctagcttgatcttggatctgtatgtctccaaactaaaagatttagaagttgctgttgatgcttgtaactcttaaggtttgactaaatcttgtcttaaacgtcatgtttttgtgaccgtagtgaatgaaatgataaacatttccagtagctatacaggatacggatagccaaggagaacctctggagacctgtaatagcggctctatcaaaatataagggaagaatcaata

SEQ ID NO: 15027 - DNA, 1449 bp, Zea Mays
cgacgattgtaccttttggccgtttcactttcgttcatcgtacataggtacattatagtagtattgcataattagattattgtgttccttagctattgatatcactcgattatccttggggtggcaactgataagggaaatgccctgacctctttatgtttgcttgattattataatttccactaatgtcttagttattgagatagccactatttaaccatatttctgtgtatgctaattgtttgtgctattaccattttggtgtggttttgttaatgactaattaatagaattaagagcacaatgcttgagttagatagaattgtttgctttggctgtagtattgttatcttataatgcaaatttgtgattcagtatccctggtattgttgctaattgtgctgcagtcatggattgcaagaggtttttgtgattgttctaaactattattgttgttttttgtttatgacagtagtattgattttctttcgtgatctcagtatgccacctaatgacctaataatattttgcttgttctagctgtaatattgcttagtcattattttgttattgtgctgcagtcattgtctcagatataatgattgcttagccaaatcattttgactacaaattacagtactatcattggtttatcttagaggttttagtacaattcttcatattcagcgtgttcaattttgatctcttaccaaagcaaaatgcaaaaaatgcttcggcttttgcggatatgctaattgaaactatgtagactgtctaagtagggttttttccttagctcataacattagtctacacaaggtgcaatttagtttgcagaattcggttttttcaacgcccgtgaagtttgacatgagatttttactaatcatcacatcaacgtgttatgtaactatggcatacctttttttgactaattcggagtttctgtagcaaaaatgagtgataacctgatggacaaggttagcgcctttggtgagcgcctgaagatcaccgggacataagtcagcaaaaagatgactgccggaatgagctccatgagtttcaagatgaagttgttcaagggacagactctagctgacaagattgttgtggatgccacctcagagaatctggatgggcctgactggaactcaaacttggagatttgttacttgatgaacacaaagaaggttgacagtgtggaactcatccgtggggtcaagggtccagtacctctccttggtcctgcttgagaccattgtcaagaactgcgatcaaggccttctcggaagttgcggccgagtgggttcttgatgagatggtcagattgattgatgatcctcaaactgtgattaatagcagaacaaggcccttgcactgactgaagcatgtgggagtccggtgataaactctgttatctgccagtctatgaggaaacatacaagctta

SEQ ID NO: 15028 - DNA, 1794 bp, Zea Mays
ctccctctgtggcttgcttcttcttggccatgcgtatataacaactcccaccactcgtgatctcctcttatcgctccctcccaattcctcccctcgattctccgggtcgatccggtcgctgtccggcccggttccagtggaggagaatcgcccggtttgaaggaaaggcttggaaaggaaggataggaataatttcagacaggaaggggaaaaggttgctagtacagcaaattcgtttgggcgctttggttgtgctatgagcaggcacatatatatctagactgattataataggcagttatctgacatggaggagcacatgggaagacgaacagtcggcggcctgctattaaccaagggaggatcaattcttctcttcagagaggacggttcgcgccccagggccaagaactgctgctcgcgccatggctgcagtggtcatcattctgttggcaaagccaaaggcaaggaggtgcacagggcagcggtggccaatgaatcaacaccggctaccccacggagaccaaagatttgtaggaatcccgacagaatgccaccacatggaaccagtgctccaggcagcatcagcaaggatgcaggaggctcttgtagcgaaaccggcaacaggtcaagagacactcccggtcccgggcgtgatctactggctcggctcaaggagagggtcaacacatcaaggaaacggtcattgaacagggagaacagcccacagtcaccgagtggattcactgctagttccccgagcaacagtcgatcagtctcgctctcaaggccgtcgcaccgggcagcttcgagggtaagaagagctgatgaaggtgcaaatgcaggagctgacagtgtgcacagaaatggtgctgggggtgctaggaggagttcacagaggggtgacgcaggcttgctgctagttgagcagcaggtagcaagaaaccatgtgccttctgaagggtttctttctgggttcatggcgagatacagaagcgggcttcaggaagggctttcgtccctggacgacagcgtggaggattcaaatgggtacttgcgctttgatacgggtggaattgaagagctccagaactatttaatattcagcgatcggcacagaggaatgaggatggatatcgacggcatgtcctacgaagtatgtctgacggacgccattttcccatttccttctcgcttcatcctattctctgtcttgtcttcagtcagagttgcttgctttgggagagcggattggtactgtaaaaacaggtctttcagacgatgcattgtccacgtgcctaaataggagcctctacatgcccacagctccagggtctcatgaagattgtgaaacaaaatgcagcatatgccaggaggagtatttatcgggtgaggatgtgggcaagatggcgtgtaaacactactaccacctttcctgcatagagcactggcttcggcagaagaaccggtgtcctatatgcaaatctgttgccctgaaaaccaagtagcaacgtgtttcatgtttctttatagattcttcatatcctttatcccctccgcacctctcacattttcccttttggaattcttttccttcctttttcttactcaaagcactcatttttgtatcaatttaaatcagaaaaggaaatcttgtgttgtgttagcaacttgctgcgagcctggaccctgttggcccaaggcctagtaagaacaacccaatttattacgggagaagtccactgtctgctcaactgttgaaagtacagaaatggatatcgtgcactccaacaa

SEQ ID NO: 15029 - DNA, 1785 bp, Zea Mays
ctccctctgtggcttgcttcttcttggccatgcgtatataacaactcccaccactcgtgatctcctcttatcgctccctcccaattcctcccctcgattctccgggtcgatccggtcgctgtccggcccggttccagtggaggagaatcgcccggtttgaaggaaaggcttggaaaggaaggaataatttcagacaggaaggggaaaaggttgctagtacagcaaattcgtttgggcgctttggttgtgctatgagcaggcacatatatatctagactgattataataggcagttatctgacatggaggagcacatgggaagacgaacagtcggcggcctgctattaaccaagggaggatcaattcttctcttcagagaggacggttcgcgccccagggccaagaactgctgctcgcgccatggctgcagtggtcatcattctgttggcaaagccaaaggcaaggaggtgcacagggcagcggtggccaatgaatcaacaccggctaccccacggagaccaaagatttgtaggaatcccgacagaatgccaccacatggaaccagtgctccaggcagcatcagcaaggatgcaggaggctcttgtagcgaaaccggcaacaggtcaagagacactcccggtcccgggcgtgatctactggctcggctcaaggagagggtcaacacatcaaggaaacggtcattgaacagggagaacagcccacagtcaccgagtggattcactgctagttccccgagcaacagtcgatcagtctcgctctcaaggccgtcgcaccgggcagcttcgagggtaagaagagctgatgaaggtgcaaatgcaggagctgacagtgtgcacagaaatggtgctgggggtgctaggaggagttcacagaggggtgacgcaggcttgctgctagttgagcagcaggtagcaagaaaccatgtgccttctgaagggtttctttctgggttcatggcgagatacagaagcgggcttcaggaagggctttcgtccctggacgacagcgtggaggattcaaatgggtacttgcgctttgatacgggtggaattgaagagctccagaactatttaatattcagcgatcggcacagaggaatgaggatggatatcgacggcatgtcctacgaagtatgtctgacggacgccattttcccatttccttctcgcttcatcctattctctgtcttgtcttcagagttgcttgctttgggagagcggattggtactgtaaaaacaggtctttcagacgatgcattgtccacgtgcctaaataggagcctctacatgcccacagctccagggtctcatgaagattgtgaaacaaaatgcagcatatgccaggaggagtatttatcgggtgaggatgtgggcaagatggcgtgtaaacactactaccacctttcctgcatagagcactggcttcggcagaagaaccggtgtcctatatgcaaatctgttgccctgaaaaccaagtagcaacgtgtttcatgtttctttatagattcttcatatcctttatcccctccgcacctctcacattttcccttttggaattcttttccttcctttttcttactcaaagcactcatttttgtatcaatttaaatcagaaaaggaaatcttgtgttgtgttagcaacttgctgcgagcctggaccctgttggcccaaggcctagtaagaacaacccaatttattacgggagaagtccactgtctgctcaactgttgaaagtacagaaatggatatcgtgcactccaacaa

SEQ ID NO: 15030 - DNA, 1584 bp, Zea Mays
aaactggcctacgagtttgcagttcacctttgaaattcagggataggaataatttcagacaggaaggggaaaaggttgctagtacagcaaattcgtttgggcgctttggttgtgctatgagcaggcacatatatatctagactgattataataggcagttatctgacatggaggagcacatgggaagacgaacagtcggcggcctgctattaaccaagggaggatcaattcttctcttcagagaggacggttcgcgccccagggccaagaactgctgctcgcgccatggctgcagtggtcatcattctgttggcaaagccaaaggcaaggaggtgcacagggcagcggtggccaatgaatcaacaccggctaccccacggagaccaaagatttgtaggaatcccgacagaatgccaccacatggaaccagtgctccaggcagcatcagcaaggatgcaggaggctcttgtagcgaaaccggcaacaggtcaagagacactcccggtcccgggcgtgatctactggctcggctcaaggagagggtcaacacatcaaggaaacggtcattgaacagggagaacagcccacagtcaccgagtggattcactgctagttccccgagcaacagtcgatcagtctcgctctcaaggccgtcgcaccgggcagcttcgagggtaagaagagctgatgaaggtgcaaatgcaggagctgacagtgtgcacagaaatggtgctgggggtgctaggaggagttcacagaggggtgacgcaggcttgctgctagttgagcagcaggtagcaagaaaccatgtgccttctgaagggtttctttctgggttcatggcgagatacagaagcgggcttcaggaagggctttcgtccctggacgacagcgtggaggattcaaatgggtacttgcgctttgatacgggtggaattgaagagctccagaactatttaatattcagcgatcggcacagaggaatgaggatggatatcgacggcatgtcctacgaagagttgcttgctttgggagagcggattggtactgtaaaaacaggtctttcagacgatgcattgtccacgtgcctaaataggagcctctacatgcccacagctccagggtctcatgaagattgtgaaacaaaatgcagcatatgccaggaggagtatttatcgggtgaggatgtgggcaagatggcgtgtaaacactactaccacctttcctgcatagagcactggcttcggcagaagaaccggtgtcctatatgcaaatctgttgccctgaaaaccaagtagcaacgtgtttcatgtttctttatagattcttcatatcctttatcccctccgcacctctcacattttcccttttggaattcttttccttcctttttcttactcaaagcactcatttttgtatcaatttaaatcagaaaaggaaatcttgtgttgtgttagcaacttgctgcgagcctggaccctgttggcccaaggcctagtaagaacaacccaatttattacgggagaagtccactgtctgctcaactgttgaaagtacagaaatggatatcgtgcactccaacaa

SEQ ID NO: 15031 - DNA, 1140 bp, Zea Mays
tccaccagcccaccaacacacgccacgccgtgggcccaaacaatccccatccgtcggatcacctccacaaaccctagccaccgaacccctcctacataaaccgctcttcccatttccctcgccctgcgccgcctgcgtccacctccgctcgccgctctccccgcgtatccctctcatacgcagctcgcccaggtaagatgtcgtccgtggcgtcgaaggtggcggtgccggagtctgtgctccgcaagcggaagcgcgaggaacagtgggccaccgagaagaaggagaaggccctagtcgagaagaagaagtccatcgagagccgcaagctcatcttcacccgcgcaaagcagtacgccgaggaatacgatgcccaggagaaggaactggtgcagcttaagcgtgaggcccgtttgaagggtggtttctatgtcagtcctgaagcaaagctgctctttgtggtccgcatccggggtattaacgccatgcaccctaagaccaggaagatcttgcagcttctgcgattgagatcttcaatggtgtgttcctcaaagtcaacaaggcgactattaacatgctacgcagggttgagccatatgttgcatatgggtacccaaacttgaagagtgtcagggagttgatctacaagaggggctatggaaagctgaacaagcagaggatccctctgtccaacaaccaagtcatcgaggagggcttgggcaagcacaacatcatctgcattgaggatcttgttcacgagatcatgactgttggcccacacttcaaggaggccaacaacttcctgtggccattcaagttgaaggcgccgctgggaggcctgaagaagaagaggaaccactatgtggagggcggtgatgccggtaaccgcgagaactacatcaatgagctcatcaaaaggatgaattaggttcacgatcaagctcattgatagtaccctgtgctctaagtgacttcttgtgctatccttattttatattagaaagttggatcgtggatgaatattcatgcagttttgatgtttcgaactagacgtgtatggaagaaatctgatcttctttccggaggtttgggattaattatttaaagcgttttggaaatataataataaaaaaaagaaac

SEQ ID NO: 15032 - DNA, 588 bp, Zea Mays
ctgtactcatacaagctagtagaagtgtatacacatctcgggaccctttggaacgaggattcaagggggaaatttccacaggtaacaacctgtgaattcaaacacttatcattgcaattctaaattataggagaaagtgttgcttggaagtgaagcatgctttgagggtatctaaattataggagaaagtgtcttttgtaagtgaatatattctcctaaatcagaaagaataatgttgttgaattgtggttattaaaagcttttcgtataccatgttcatttgacctggaaaaataaatcaaaatgcaacagtctggtgacatagtgttgtaaagagaacaaaaggtaactatttgacagagacaacatgcaacacatgtcaagtgaaaatggaaagtcaaataatcatgtttcagggtagtgtaatttatgacagtgaaataaaactgacatacaagatgaataaagacaacagattgaagaaaataagaacagatcaaacaattttgtcgccattatacatacccctgtaacctttacatattgtccatctttagcagttctgagatcagcatcaggatagcgatt

SEQ ID NO: 15033 - DNA, 1113 bp, Zea Mays
cgagaacccaaacactaacttgagatgtctgcgccgaacggtccagcggcttgtccgatggtgtaccctgtctaccttaccggggcattcccccagcaagcaggggatgaccaggctcaaggtccggggatatatgccatacaacagaaccagttagcggctgcgatgggaatggggtgctatgctccaaccacactcattccactcgcttacaatatcccaacggaaagcgtcggagcttctgctggtgaagagaatgtacaggatgctaggcagcaaaatggacctcaaagacaagttgttgtgaggaggtttcactttgcttttcagcttgacttggccctgatcatcaaactagccgctgttgtgtttctctttagccaggaaggctcaaaacaaaggctgtttcttctgatactgtttgcctcatttatttacttatatcaaaccggagctattacaccttttctaagacggcttcagcgggcaggaggtgcagctgctcatccaccacaggctcctgctcgggtcgagaaccgtgctcctctgcctgcccagaatgatggcaatgagcagcccaatggccctgcaaaccctgaccaagctgcggagaaccacgaacaagatgctgcagctggtaacgagaatccgcaagaggcagaggtagaaggcaatcggcgcaactggcttggaggtgtcttgaaagaggtccagctggttgttgtagggtttgtcgcatcgcttcttcctggttttcagcacaatgactagccctcgtgtcgtcaccgtggaataagctaccagcagtgaaatagttatggtgacatactgacataggggaaataattatatgaagcagctgaaaggtttctattatgcatctttgctgttaatattgttttgtttcatgttcaaatactttttgaaccaatcctgtccttcttccagcaatacttgcagctcacatgtaaatgtaaagactagcctgacacccccatcaattgaactattgtttcgttgcagaaatatttgatgcttgcacctgaatacagtatcagtattcagaacctgttgtaaaatgtctgaaatgtgatgtgaaagtttttcagggct

SEQ ID NO: 15034 - DNA, 245 bp, Zea Mays
ctcacaataaaacatagcccatgtgtacacaaatatagtctcagtacatcataataaaacatagtctcataaaaaaacatagtctcagtgcatcataataaaacatagtctcataataaaacatagtctcagtgcataataataaaacatatagtttcaacatacacgacctaaaagcaaacgccatcttgatgtttcagttcttctggcgaccacttgttgatgaaaatcccttgtgtatcacc

SEQ ID NO: 15035 - DNA, 726 bp, Zea Mays
gtgaatctcgtccctaagccacaacaatcggacacattgttggtaactaaatagcagtcctcgcagctacctgcttgtagaaatttctctaattttttgtgcaccactacgacaagaagtgtgtactggcctcttttcagaataaagggaagcatatatagctggaactaacacaaaaaataactcatcatcatcatcctcctcctgtttcaaatgtttccttatcaactcaattttagaacctatttgttagtatccctaaaacaagagaacatgtctgagaaatataacaagaagtgtgtacgtttctacaagaaatatgacaagaaatatgtccttttttcctacaaaaacataattattttttagagccgtgtatgtttctacataaattaacctttgctttgttgcaccaatctactgcttccgtataattattaaaaatccacagtgaaccgcagtgtgcacaatcaattattaaaaatttgaatacaatgaaccgcagtgtgcacaatcaaatattaaaaatctgaatagtacattctccatctactgcttccgtactagaataattatcgctacaatacttatatcagcccaatctctagatgattcactccctggtcagcgatgtttacctggtcggcgatgtagcagcggctggtccacgcacggtgctgcgtccacggaagccacgggcggcgtctggtccacggaagccacggg

SEQ ID NO: 15036 - DNA, 4104 bp, Zea Mays
agaaaaggacacgtcgttcgcctctagataattccagtagatacttctccatcggctgcatctcactttctttctctctgcgttcgccatgctctcgctttccttctctctgctttgcttttgtgtcgtcgatgtcgaaaactccttccagaccaagcttcgtctgctgtcggcttgcaccagtcctcacggcccacgtcgagggagacgaagggataggaggcggaggcggaggttgcaaaaaatggccgggagcatgcaggcggtggacccagcgggccggataagcgcgttgctcgcattgcgccagctcctcgccatgctctagccgctggccctgctccgccctttcattggcgcgcgtggccggggcgtccgatgttgcggcctccgtgttggggctagcgggaaaaggggaaggcggcggcgtcagcggttctacgggtgccggccgtctcgcccatggtcgccacacgaaggaagatagccacgcgccggacgcaggaggccaggcgggtgtacgatctgatccccaggccccctactccttttgctacgtaggatgcagacctggacatgccatgcgcccatgccttcttggtggttggtttgttcttcagatgtagaaagctacccgaaatccattgaactttggcagtctttttcatggtttcctgctcctatttctatggcggcctcgtcttgtttgtcagtcaagcaacaaccatgtggcacagattaataattcaattcaaggaaatataagtactgttgtatgccattctccagtcaattctatagcacggagggtgcttggttcgtttatccgaaatttgtcaggctcagctcaggctccgctcgaagcactgatgacctacatgatgattggtgccacacgccatgccacaacctttgtgtttgtccttcctgcttccttatttgttacatttggatctttgttattgttgtttacagatgatccaatattttaaaacattgcacggattgttggatttttgtttcaggtctccacggattgttggattggtcttggcctcttcagtattcttgcagcatgcatgtgggtagtatcatggaactgctgttgacgccagagtccgatcttggttatatggtcactcacatatcacttaacactgatggttcatcactgctgcttgttggatcacataacttaaatatcatgtatgtacatgagaggatatctgaagatggggatacaatcatatgcaggactgcaccgattgcttctcagatcctacccagtgacagtgatggcataaaagttctccaggcatcttggcatccctttagcaataaccattttgcagttttgacatcagatgctgttttcaggttatttgatctttcatccgatttagaacagccagagcagggattttatttgcagccaattgtacctgggaaatgtcaaaatgcttcagcgatttgtccagtgggtttctcttatgggagcgatcatctatgggatagattttcggttttcatcttattcagtgatggttcaatttttgtcctctgcccagttgttccatttggaagtgactatagcaagaagcatattcaggaaatatatgaagatgttaatgcatttggattgaaatcttcaaatccaaatgttgtcactaattcacatttggccatagcttggttggaggcaacatttcctgacctgttacatcaatcaacagataccagttttctgatgtcaaaagctcatgcatatgcgccattagatgattctctaacattacaggggcctctttgtacagtttgtgaggaaagtaatgaatctgaaagcaagagcagcagttgtgaaggaaaagctgtaggttttatgtacagttctgctggcaaagattcagttcttgtgactgcctggggtagtgggctgcttcaggttgatgctcttgcagatgaaattcaaccgcggtggaacattggggttccttcgcgtcttaatgtcgattcacatggacaaataaataatgttgccatgatatgtgactccaattcgcaagatccattggcgttgagatcgcatcgaccatctagtacaggatcaaacgtgaagagcaacatagaagctgtttggatgggacactctcctcctttgctaaggctcgcaattgtggatttggcattaccaaaaactcctaatgataactctctgtcattgtttgctgatccccttgttccagagagattttattgtgcgcatggtggggggcttgacatggtcacactgcacttcctaccattttcataccctgaaatgtcttcgacaccaccctctgtgcatcctgtcctcactacagggaacagcgaaacaagctcaccttttctttctggatttgttaccatagctgatgcatatggtcatgtacagttagctggcatcacatgcttgggtgagtgctttgtggtggagatgaagggttggaaggaaccggcacctcttcagcttgacttagaaagcaaaatcgtcaaggatgtggagcctcctgcaactggaatgatcagcaaagaacttattgctggtccagacccacccatacttccatcatcttcaagcctgaaatcgttgaccccagactctattgaaggaaaatctacacttcaccactatattaaggtcttccatgagtactatgtggagtacggacacaaggtgttcattgaactcaaggagcatgcggactatttgaagacagaaatggaagataaacagaaacgcttggaagcagtgaagaaatcacttatatccgtagaagccaaagatggagacatcaacaagaggatagatcgggccttcaaggtgtatgaactgttggagaagcgaatagatagcttcaagatgcttcctgctgcaaacaagaaaccattaacccaggcagagcaggagttcaaatcacagcttgatcggttcgcagatgtggagctggatgctttgcgttcctccattgccgccctgagtgctaggatgaaacgttttgctcagcaatccacgggcagtgcggctagcacaggaatggtgccatggcaggcacaaagggctggacggagccatatctcagaatcccagatgtcacttctgaaatcttcgcttgagaagctctccctcctcaacgaagagaacagtctgaagctccggcttattgatcatgaactcaagaaccaggaacgataggttggcaggtccatgtgcgacttattgccatattggtattttgttgttcggacactaagtacaggatccataggagcctgtttgctgtcactttctgtggggggctcgcgaactgcatttgcatgtcagcgtgttgtaagttgtaactagcaatacagaaccaagtgcaaaccgctacaccttttcctcctgcagatcgggaccggtagggaaggtttaaggcgtgtttggtgtgtggcgtatggcgccacgccacgcctaagttgcggcggccgaattggccgccacaactgcggcacgaaaagtgcggcggatggcggtggcgtaggcaaggtaccaaacacgcctttagtgctctgtgttttgtactgcatggtctgaagctgcagagtgcagactaccattggagggtaacgagtagtcccagcaagtggtacagccatacaggcgagatggcatgtgcctgggaaatgagaatagagtgatcgaacctgcttcgaattatttaggggactgactgctcttatttcattgttttgctttttcttttgcgtgtactagggtttagtggccacgcttttgtttattttaccatcaggaatacatctttaatcagttaccctatcgtatctattatcttatctcaaagtttactctatagttagtgtaatctataatgcaaaattttcatacattttatatgatgtgctgcagacagccttaggccgtgtttgtttcggattataatatctccagattatataatccagcacaaataattcagcaggtaaataaatacctatattatgggttcaaattatataatctaaagttcatattatgattaatctctcaagagtagcttatttaag

SEQ ID NO: 15037 - DNA, 3916 bp, Zea Mays
cgtcgatgtcgaaaactccttccagaccaagcttcgtctgctgtcggcttgcaccagtcctcacggcccacgtcgagggagacgaagggataggaggcggaggcggaggttgcaaaaaatggccgggagcatgcaggcggtggacccagcgggccggataagcgcgttgctcgcattgcgccagctcctcgccatgctctagccgctggccctgctccgccctttcattggcgcgcgtggccggggcgtccgatgttgcggcctccgtgttggggctagcgggaaaaggggaaggcggcggcgtcagcggttctacgggtgccggccgtctcgcccatggtcgccacacgaaggaagatagccacgcgccggacgcaggaggccaggcgggtgtacgatctgatccccaggatgcagacctggacatgccatgcgcccatgccttcttggtggttggtttgttcttcagatgtagaaagctacccgaaatccattgaactttggcagtctttttcatggtttcctgctcctatttctatggcggcctcgtcttgtttgtcagtcaagcaacaaccatgtggcacagattaataattcaattcaaggaaatataagtactgttgtatgccattctccagtcaattctatagcacggagggtgcttggttcgtttatccgaaatttgtcaggctcagctcaggctccgctcgaagcactgatgacctacatgatgattggtgccacacgccatgccacaacctttgtgtctccacggattgttggattggtcttggcctcttcagtattcttgcagcatgcatgtgggtagtatcatggaactgctgttgacgccagagtccgatcttggttatatggtcactcacatatcacttaacactgatggttcatcactgctgcttgttggatcacataacttaaatatcatgtatgtacatgagaggatatctgaagatggggatacaatcatatgcagaactaaaatcaatggaaaacttgtgtcccctgcatttcattggccatgcactagattattaattatttgaaggactgcaccgattgcttctcagatcctacccagtgacagtgatggcataaaagttctccaggcatcttggcatccctttagcaataaccattttgcagttttgacatcagatgctgttttcaggttatttgatctttcatccgatttagaacagccagagcagggattttatttgcagccaattgtacctgggaaatgtcaaaatgcttcagcgatttgtccagtgggtttctcttatgggagcgatcatctatgggatagattttcggttttcatcttattcagtgatggttcaatttttgtcctctgcccagttgttccatttggaagtgactatagcaagaagcatattcaggaaatatatgaagatgttaatgcatttggattgaaatcttcaaatccaaatgttgtcactaattcacatttggccatagcttggttggaggcaacatttcctgacctgttacatcaatcaacagataccagttttctgatgtcaaaagctcatgcatatgcgccattagatgattctctaacattacaggggcctctttgtacagtttgtgaggaaagtaatgaatctgaaagcaagagcagcagttgtgaaggaaaagctgtaggttttatgtacagttctgctggcaaagattcagttcttgtgactgcctggggtagtgggctgcttcaggttgatgctcttgcagatgaaattcaaccgcggtggaacattggggttccttcgcgtcttaatgtcgattcacatggacaaataaataatgttgccatgatatgtgactccaattcgcaagatccattggcgttgagatcgcatcgaccatctagtacaggatcaaacgtgaagagcaacatagaagctgtttggatgggacactctcctcctttgctaaggctcgcaattgtggatttggcattaccaaaaactcctaatgataactctctgtcattgtttgctgatccccttgttccagagagattttattgtgcgcatggtggggggcttgacatggtcacactgcacttcctaccattttcataccctgaaatgtcttcgacaccaccctctgtgcatcctgtcctcactacagggaacagcgaaacaagctcaccttttctttctggatttgttaccatagctgatgcatatggtcatgtacagttagctggcatcacatgcttgggtgagtgctttgtggtggagatgaagggttggaaggaaccggcacctcttcagcttgacttagaaagcaaaatcgtcaaggatgtggagcctcctgcaactggaatgatcagcaaagaacttattgctggtccagacccacccatacttccatcatcttcaagcctgaaatcgttgaccccagactctattgaaggaaaatctacacttcaccactatattaaggtcttccatgagtactatgtggagtacggacacaaggtgttcattgaactcaaggagcatgcggactatttgaagacagaaatggaagataaacagaaacgcttggaagcagtgaagaaatcacttatatccgtagaagccaaagatggagacatcaacaagaggatagatcgggccttcaaggtgtatgaactgttggagaagcgaatagatagcttcaagatgcttcctgctgcaaacaagaaaccattaacccaggcagagcaggagttcaaatcacagcttgatcggttcgcagatgtggagctggatgctttgcgttcctccattgccgccctgagtgctaggatgaaacgttttgctcagcaatccacgggcagtgcggctagcacaggaatggtgccatggcaggcacaaagggctggacggagccatatctcagaatcccagatgtcacttctgaaatcttcgcttgagaagctctccctcctcaacgaagagaacagtctgaagctccggcttattgatcatgaactcaagaaccaggaacgataggttggcaggtccatgtgcgacttattgccatattggtattttgttgttcggacactaagtacaggatccataggagcctgtttgctgtcactttctgtggggggctcgcgaactgcatttgcatgtcagcgtgttgtaagttgtaactagcaatacagaaccaagtgcaaaccgctacaccttttcctcctgcagatcgggaccggtagggaaggtttaaggcgtgtttggtgtgtggcgtatggcgccacgccacgcctaagttgcggcggccgaattggccgccacaactgcggcacgaaaagtgcggcggatggcggtggcgtaggcaaggtaccaaacacgcctttagtgctctgtgttttgtactgcatggtctgaagctgcagagtgcagactaccattggagggtaacgagtagtcccagcaagtggtacagccatacaggcgagatggcatgtgcctgggaaatgagaatagagtgatcgaacctgcttcgaattatttaggggactgactgctcttatttcattgttttgctttttcttttgcgtgtactagggtttagtggccacgcttttgtttattttaccatcaggaatacatctttaatcagttaccctatcgtatctattatcttatctcaaagtttactctatagttagtgtaatctataatgcaaaattttcatacattttatatgatgtgctgcagacagccttaggccgtgtttgtttcggattataatatctccagattatataatccagcacaaataattcagcaggtaaataaatacctatattatgggttcaaattatataatctaaagttcatattatgattaatctctcaagagtagcttatttaag

SEQ ID NO: 15038 - DNA, 3489 bp, Zea Mays
cgtcgatgtcgaaaactccttccagaccaagcttcgtctgctgtcggcttgcaccagtcctcacggcccacgtcgagggagacgaagggataggaggcggaggcggaggttgcaaaaaatggccgggagcatgcaggcggtggacccagcgggccggataagcgcgttgctcgcattgcgccagctcctcgccatgctctagccgctggccctgctccgccctttcattggcgcgcgtggccggggcgtccgatgttgcggcctccgtgttggggctagcgggaaaaggggaaggcggcggcgtcagcggttctacgggtgccggccgtctcgcccatggtcgccacacgaaggaagatagccacgcgccggacgcaggaggccaggcgggtgtacgatctgatccccaggtctccacggattgttggattggtcttggcctcttcagtattcttgcagcatgcatgtgggtagtatcatggaactgctgttgacgccagagtccgatcttggttatatggtcactcacatatcacttaacactgatggttcatcactgctgcttgttggatcacataacttaaatatcatgtatgtacatgagaggatatctgaagatggggatacaatcatatgcaggactgcaccgattgcttctcagatcctacccagtgacagtgatggcataaaagttctccaggcatcttggcatccctttagcaataaccattttgcagttttgacatcagatgctgttttcaggttatttgatctttcatccgatttagaacagccagagcagggattttatttgcagccaattgtacctgggaaatgtcaaaatgcttcagcgatttgtccagtgggtttctcttatgggagcgatcatctatgggatagattttcggttttcatcttattcagtgatggttcaatttttgtcctctgcccagttgttccatttggaagtgactatagcaagaagcatattcaggaaatatatgaagatgttaatgcatttggattgaaatcttcaaatccaaatgttgtcactaattcacatttggccatagcttggttggaggcaacatttcctgacctgttacatcaatcaacagataccagttttctgatgtcaaaagctcatgcatatgcgccattagatgattctctaacattacaggggcctctttgtacagtttgtgaggaaagtaatgaatctgaaagcaagagcagcagttgtgaaggaaaagctgtaggttttatgtacagttctgctggcaaagattcagttcttgtgactgcctggggtagtgggctgcttcaggttgatgctcttgcagatgaaattcaaccgcggtggaacattggggttccttcgcgtcttaatgtcgattcacatggacaaataaataatgttgccatgatatgtgactccaattcgcaagatccattggcgttgagatcgcatcgaccatctagtacaggatcaaacgtgaagagcaacatagaagctgtttggatgggacactctcctcctttgctaaggctcgcaattgtggatttggcattaccaaaaactcctaatgataactctctgtcattgtttgctgatccccttgttccagagagattttattgtgcgcatggtggggggcttgacatggtcacactgcacttcctaccattttcataccctgaaatgtcttcgacaccaccctctgtgcatcctgtcctcactacagggaacagcgaaacaagctcaccttttctttctggatttgttaccatagctgatgcatatggtcatgtacagttagctggcatcacatgcttgggtgagtgctttgtggtggagatgaagggttggaaggaaccggcacctcttcagcttgacttagaaagcaaaatcgtcaaggatgtggagcctcctgcaactggaatgatcagcaaagaacttattgctggtccagacccacccatacttccatcatcttcaagcctgaaatcgttgaccccagactctattgaaggaaaatctacacttcaccactatattaaggtcttccatgagtactatgtggagtacggacacaaggtgttcattgaactcaaggagcatgcggactatttgaagacagaaatggaagataaacagaaacgcttggaagcagtgaagaaatcacttatatccgtagaagccaaagatggagacatcaacaagaggatagatcgggccttcaaggtgtatgaactgttggagaagcgaatagatagcttcaagatgcttcctgctgcaaacaagaaaccattaacccaggcagagcaggagttcaaatcacagcttgatcggttcgcagatgtggagctggatgctttgcgttcctccattgccgccctgagtgctaggatgaaacgttttgctcagcaatccacgggcagtgcggctagcacaggaatggtgccatggcaggcacaaagggctggacggagccatatctcagaatcccagatgtcacttctgaaatcttcgcttgagaagctctccctcctcaacgaagagaacagtctgaagctccggcttattgatcatgaactcaagaaccaggaacgataggttggcaggtccatgtgcgacttattgccatattggtattttgttgttcggacactaagtacaggatccataggagcctgtttgctgtcactttctgtggggggctcgcgaactgcatttgcatgtcagcgtgttgtaagttgtaactagcaatacagaaccaagtgcaaaccgctacaccttttcctcctgcagatcgggaccggtagggaaggtttaaggcgtgtttggtgtgtggcgtatggcgccacgccacgcctaagttgcggcggccgaattggccgccacaactgcggcacgaaaagtgcggcggatggcggtggcgtaggcaaggtaccaaacacgcctttagtgctctgtgttttgtactgcatggtctgaagctgcagagtgcagactaccattggagggtaacgagtagtcccagcaagtggtacagccatacaggcgagatggcatgtgcctgggaaatgagaatagagtgatcgaacctgcttcgaattatttaggggactgactgctcttatttcattgttttgctttttcttttgcgtgtactagggtttagtggccacgcttttgtttattttaccatcaggaatacatctttaatcagttaccctatcgtatctattatcttatctcaaagtttactctatagttagtgtaatctataatgcaaaattttcatacattttatatgatgtgctgcagacagccttaggccgtgtttgtttcggattataatatctccagattatataatccagcacaaataattcagcaggtaaataaatacctatattatgggttcaaattatataatctaaagttcatattatgattaatctctcaagagtagcttatttaag

SEQ ID NO: 15039 - DNA, 3817 bp, Zea Mays
cgtcgatgtcgaaaactccttccagaccaagcttcgtctgctgtcggcttgcaccagtcctcacggcccacgtcgagggagacgaagggataggaggcggaggcggaggttgcaaaaaatggccgggagcatgcaggcggtggacccagcgggccggataagcgcgttgctcgcattgcgccagctcctcgccatgctctagccgctggccctgctccgccctttcattggcgcgcgtggccggggcgtccgatgttgcggcctccgtgttggggctagcgggaaaaggggaaggcggcggcgtcagcggttctacgggtgccggccgtctcgcccatggtcgccacacgaaggaagatagccacgcgccggacgcaggaggccaggcgggtgtacgatctgatccccaggatgcagacctggacatgccatgcgcccatgccttcttggtggttggtttgttcttcagatgtagaaagctacccgaaatccattgaactttggcagtctttttcatggtttcctgctcctatttctatggcggcctcgtcttgtttgtcagtcaagcaacaaccatgtggcacagattaataattcaattcaaggaaatataagtactgttgtatgccattctccagtcaattctatagcacggagggtgcttggttcgtttatccgaaatttgtcaggctcagctcaggctccgctcgaagcactgatgacctacatgatgattgggtctccacggattgttggattggtcttggcctcttcagtattcttgcagcatgcatgtgggtagtatcatggaactgctgttgacgccagagtccgatcttggttatatggtcactcacatatcacttaacactgatggttcatcactgctgcttgttggatcacataacttaaatatcatgtatgtacatgagaggatatctgaagatggggatacaatcatatgcaggactgcaccgattgcttctcagatcctacccagtgacagtgatggcataaaagttctccaggcatcttggcatccctttagcaataaccattttgcagttttgacatcagatgctgttttcaggttatttgatctttcatccgatttagaacagccagagcagggattttatttgcagccaattgtacctgggaaatgtcaaaatgcttcagcgatttgtccagtgggtttctcttatgggagcgatcatctatgggatagattttcggttttcatcttattcagtgatggttcaatttttgtcctctgcccagttgttccatttggaagtgactatagcaagaagcatattcaggaaatatatgaagatgttaatgcatttggattgaaatcttcaaatccaaatgttgtcactaattcacatttggccatagcttggttggaggcaacatttcctgacctgttacatcaatcaacagataccagttttctgatgtcaaaagctcatgcatatgcgccattagatgattctctaacattacaggggcctctttgtacagtttgtgaggaaagtaatgaatctgaaagcaagagcagcagttgtgaaggaaaagctgtaggttttatgtacagttctgctggcaaagattcagttcttgtgactgcctggggtagtgggctgcttcaggttgatgctcttgcagatgaaattcaaccgcggtggaacattggggttccttcgcgtcttaatgtcgattcacatggacaaataaataatgttgccatgatatgtgactccaattcgcaagatccattggcgttgagatcgcatcgaccatctagtacaggatcaaacgtgaagagcaacatagaagctgtttggatgggacactctcctcctttgctaaggctcgcaattgtggatttggcattaccaaaaactcctaatgataactctctgtcattgtttgctgatccccttgttccagagagattttattgtgcgcatggtggggggcttgacatggtcacactgcacttcctaccattttcataccctgaaatgtcttcgacaccaccctctgtgcatcctgtcctcactacagggaacagcgaaacaagctcaccttttctttctggatttgttaccatagctgatgcatatggtcatgtacagttagctggcatcacatgcttgggtgagtgctttgtggtggagatgaagggttggaaggaaccggcacctcttcagcttgacttagaaagcaaaatcgtcaaggatgtggagcctcctgcaactggaatgatcagcaaagaacttattgctggtccagacccacccatacttccatcatcttcaagcctgaaatcgttgaccccagactctattgaaggaaaatctacacttcaccactatattaaggtcttccatgagtactatgtggagtacggacacaaggtgttcattgaactcaaggagcatgcggactatttgaagacagaaatggaagataaacagaaacgcttggaagcagtgaagaaatcacttatatccgtagaagccaaagatggagacatcaacaagaggatagatcgggccttcaaggtgtatgaactgttggagaagcgaatagatagcttcaagatgcttcctgctgcaaacaagaaaccattaacccaggcagagcaggagttcaaatcacagcttgatcggttcgcagatgtggagctggatgctttgcgttcctccattgccgccctgagtgctaggatgaaacgttttgctcagcaatccacgggcagtgcggctagcacaggaatggtgccatggcaggcacaaagggctggacggagccatatctcagaatcccagatgtcacttctgaaatcttcgcttgagaagctctccctcctcaacgaagagaacagtctgaagctccggcttattgatcatgaactcaagaaccaggaacgataggttggcaggtccatgtgcgacttattgccatattggtattttgttgttcggacactaagtacaggatccataggagcctgtttgctgtcactttctgtggggggctcgcgaactgcatttgcatgtcagcgtgttgtaagttgtaactagcaatacagaaccaagtgcaaaccgctacaccttttcctcctgcagatcgggaccggtagggaaggtttaaggcgtgtttggtgtgtggcgtatggcgccacgccacgcctaagttgcggcggccgaattggccgccacaactgcggcacgaaaagtgcggcggatggcggtggcgtaggcaaggtaccaaacacgcctttagtgctctgtgttttgtactgcatggtctgaagctgcagagtgcagactaccattggagggtaacgagtagtcccagcaagtggtacagccatacaggcgagatggcatgtgcctgggaaatgagaatagagtgatcgaacctgcttcgaattatttaggggactgactgctcttatttcattgttttgctttttcttttgcgtgtactagggtttagtggccacgcttttgtttattttaccatcaggaatacatctttaatcagttaccctatcgtatctattatcttatctcaaagtttactctatagttagtgtaatctataatgcaaaattttcatacattttatatgatgtgctgcagacagccttaggccgtgtttgtttcggattataatatctccagattatataatccagcacaaataattcagcaggtaaataaatacctatattatgggttcaaattatataatctaaagttcatattatgattaatctctcaagagtagcttatttaag

SEQ ID NO: 15040 - DNA, 3844 bp, Zea Mays
cgtcgatgtcgaaaactccttccagaccaagcttcgtctgctgtcggcttgcaccagtcctcacggcccacgtcgagggagacgaagggataggaggcggaggcggaggttgcaaaaaatggccgggagcatgcaggcggtggacccagcgggccggataagcgcgttgctcgcattgcgccagctcctcgccatgctctagccgctggccctgctccgccctttcattggcgcgcgtggccggggcgtccgatgttgcggcctccgtgttggggctagcgggaaaaggggaaggcggcggcgtcagcggttctacgggtgccggccgtctcgcccatggtcgccacacgaaggaagatagccacgcgccggacgcaggaggccaggcgggtgtacgatctgatccccaggatgcagacctggacatgccatgcgcccatgccttcttggtggttggtttgttcttcagatgtagaaagctacccgaaatccattgaactttggcagtctttttcatggtttcctgctcctatttctatggcggcctcgtcttgtttgtcagtcaagcaacaaccatgtggcacagattaataattcaattcaaggaaatataagtactgttgtatgccattctccagtcaattctatagcacggagggtgcttggttcgtttatccgaaatttgtcaggctcagctcaggctccgctcgaagcactgatgacctacatgatgattggtgccacacgccatgccacaacctttgtgtctccacggattgttggattggtcttggcctcttcagtattcttgcagcatgcatgtgggtagtatcatggaactgctgttgacgccagagtccgatcttggttatatggtcactcacatatcacttaacactgatggttcatcactgctgcttgttggatcacataacttaaatatcatgtatgtacatgagaggatatctgaagatggggatacaatcatatgcaggactgcaccgattgcttctcagatcctacccagtgacagtgatggcataaaagttctccaggcatcttggcatccctttagcaataaccattttgcagttttgacatcagatgctgttttcaggttatttgatctttcatccgatttagaacagccagagcagggattttatttgcagccaattgtacctgggaaatgtcaaaatgcttcagcgatttgtccagtgggtttctcttatgggagcgatcatctatgggatagattttcggttttcatcttattcagtgatggttcaatttttgtcctctgcccagttgttccatttggaagtgactatagcaagaagcatattcaggaaatatatgaagatgttaatgcatttggattgaaatcttcaaatccaaatgttgtcactaattcacatttggccatagcttggttggaggcaacatttcctgacctgttacatcaatcaacagataccagttttctgatgtcaaaagctcatgcatatgcgccattagatgattctctaacattacaggggcctctttgtacagtttgtgaggaaagtaatgaatctgaaagcaagagcagcagttgtgaaggaaaagctgtaggttttatgtacagttctgctggcaaagattcagttcttgtgactgcctggggtagtgggctgcttcaggttgatgctcttgcagatgaaattcaaccgcggtggaacattggggttccttcgcgtcttaatgtcgattcacatggacaaataaataatgttgccatgatatgtgactccaattcgcaagatccattggcgttgagatcgcatcgaccatctagtacaggatcaaacgtgaagagcaacatagaagctgtttggatgggacactctcctcctttgctaaggctcgcaattgtggatttggcattaccaaaaactcctaatgataactctctgtcattgtttgctgatccccttgttccagagagattttattgtgcgcatggtggggggcttgacatggtcacactgcacttcctaccattttcataccctgaaatgtcttcgacaccaccctctgtgcatcctgtcctcactacagggaacagcgaaacaagctcaccttttctttctggatttgttaccatagctgatgcatatggtcatgtacagttagctggcatcacatgcttgggtgagtgctttgtggtggagatgaagggttggaaggaaccggcacctcttcagcttgacttagaaagcaaaatcgtcaaggatgtggagcctcctgcaactggaatgatcagcaaagaacttattgctggtccagacccacccatacttccatcatcttcaagcctgaaatcgttgaccccagactctattgaaggaaaatctacacttcaccactatattaaggtcttccatgagtactatgtggagtacggacacaaggtgttcattgaactcaaggagcatgcggactatttgaagacagaaatggaagataaacagaaacgcttggaagcagtgaagaaatcacttatatccgtagaagccaaagatggagacatcaacaagaggatagatcgggccttcaaggtgtatgaactgttggagaagcgaatagatagcttcaagatgcttcctgctgcaaacaagaaaccattaacccaggcagagcaggagttcaaatcacagcttgatcggttcgcagatgtggagctggatgctttgcgttcctccattgccgccctgagtgctaggatgaaacgttttgctcagcaatccacgggcagtgcggctagcacaggaatggtgccatggcaggcacaaagggctggacggagccatatctcagaatcccagatgtcacttctgaaatcttcgcttgagaagctctccctcctcaacgaagagaacagtctgaagctccggcttattgatcatgaactcaagaaccaggaacgataggttggcaggtccatgtgcgacttattgccatattggtattttgttgttcggacactaagtacaggatccataggagcctgtttgctgtcactttctgtggggggctcgcgaactgcatttgcatgtcagcgtgttgtaagttgtaactagcaatacagaaccaagtgcaaaccgctacaccttttcctcctgcagatcgggaccggtagggaaggtttaaggcgtgtttggtgtgtggcgtatggcgccacgccacgcctaagttgcggcggccgaattggccgccacaactgcggcacgaaaagtgcggcggatggcggtggcgtaggcaaggtaccaaacacgcctttagtgctctgtgttttgtactgcatggtctgaagctgcagagtgcagactaccattggagggtaacgagtagtcccagcaagtggtacagccatacaggcgagatggcatgtgcctgggaaatgagaatagagtgatcgaacctgcttcgaattatttaggggactgactgctcttatttcattgttttgctttttcttttgcgtgtactagggtttagtggccacgcttttgtttattttaccatcaggaatacatctttaatcagttaccctatcgtatctattatcttatctcaaagtttactctatagttagtgtaatctataatgcaaaattttcatacattttatatgatgtgctgcagacagccttaggccgtgtttgtttcggattataatatctccagattatataatccagcacaaataattcagcaggtaaataaatacctatattatgggttcaaattatataatctaaagttcatattatgattaatctctcaagagtagcttatttaag

SEQ ID NO: 15041 - DNA, 3816 bp, Zea Mays
cgtcgatgtcgaaaactccttccagaccaagcttcgtctgctgtcggcttgcaccagtcctcacggcccacgtcgagggagacgaagggataggaggcggaggcggaggttgcaaaaaatggccgggagcatgcaggcggtggacccagcgggccggataagcgcgttgctcgcattgcgccagctcctcgccatgctctagccgctggccctgctccgccctttcattggcgcgcgtggccggggcgtccgatgttgcggcctccgtgttggggctagcgggaaaaggggaaggcggcggcgtcagcggttctacgggtgccggccgtctcgcccatggtcgccacacgaaggaagatagccacgcgccggacgcaggaggccaggcgggtgtacgatctgatccccaggatgcagacctggacatgccatgcgcccatgccttcttggtggttggtttgttcttcagatgtagaaagctacccgaaatccattgaactttggcagtctttttcatggtttcctgctcctatttctatggcggcctcgtcttgtttgtcagtcaagcaacaaccatgtggcacagattaataattcaattcaaggaaatataagtactgttgtatgccattctccagtcaattctatagcacggagggtgcttggttcgtttatccgaaatttgtcaggctcagctcaggctccgctcgaagcactgatgacctacatgatgattggtctccacggattgttggattggtcttggcctcttcagtattcttgcagcatgcatgtgggtagtatcatggaactgctgttgacgccagagtccgatcttggttatatggtcactcacatatcacttaacactgatggttcatcactgctgcttgttggatcacataacttaaatatcatgtatgtacatgagaggatatctgaagatggggatacaatcatatgcaggactgcaccgattgcttctcagatcctacccagtgacagtgatggcataaaagttctccaggcatcttggcatccctttagcaataaccattttgcagttttgacatcagatgctgttttcaggttatttgatctttcatccgatttagaacagccagagcagggattttatttgcagccaattgtacctgggaaatgtcaaaatgcttcagcgatttgtccagtgggtttctcttatgggagcgatcatctatgggatagattttcggttttcatcttattcagtgatggttcaatttttgtcctctgcccagttgttccatttggaagtgactatagcaagaagcatattcaggaaatatatgaagatgttaatgcatttggattgaaatcttcaaatccaaatgttgtcactaattcacatttggccatagcttggttggaggcaacatttcctgacctgttacatcaatcaacagataccagttttctgatgtcaaaagctcatgcatatgcgccattagatgattctctaacattacaggggcctctttgtacagtttgtgaggaaagtaatgaatctgaaagcaagagcagcagttgtgaaggaaaagctgtaggttttatgtacagttctgctggcaaagattcagttcttgtgactgcctggggtagtgggctgcttcaggttgatgctcttgcagatgaaattcaaccgcggtggaacattggggttccttcgcgtcttaatgtcgattcacatggacaaataaataatgttgccatgatatgtgactccaattcgcaagatccattggcgttgagatcgcatcgaccatctagtacaggatcaaacgtgaagagcaacatagaagctgtttggatgggacactctcctcctttgctaaggctcgcaattgtggatttggcattaccaaaaactcctaatgataactctctgtcattgtttgctgatccccttgttccagagagattttattgtgcgcatggtggggggcttgacatggtcacactgcacttcctaccattttcataccctgaaatgtcttcgacaccaccctctgtgcatcctgtcctcactacagggaacagcgaaacaagctcaccttttctttctggatttgttaccatagctgatgcatatggtcatgtacagttagctggcatcacatgcttgggtgagtgctttgtggtggagatgaagggttggaaggaaccggcacctcttcagcttgacttagaaagcaaaatcgtcaaggatgtggagcctcctgcaactggaatgatcagcaaagaacttattgctggtccagacccacccatacttccatcatcttcaagcctgaaatcgttgaccccagactctattgaaggaaaatctacacttcaccactatattaaggtcttccatgagtactatgtggagtacggacacaaggtgttcattgaactcaaggagcatgcggactatttgaagacagaaatggaagataaacagaaacgcttggaagcagtgaagaaatcacttatatccgtagaagccaaagatggagacatcaacaagaggatagatcgggccttcaaggtgtatgaactgttggagaagcgaatagatagcttcaagatgcttcctgctgcaaacaagaaaccattaacccaggcagagcaggagttcaaatcacagcttgatcggttcgcagatgtggagctggatgctttgcgttcctccattgccgccctgagtgctaggatgaaacgttttgctcagcaatccacgggcagtgcggctagcacaggaatggtgccatggcaggcacaaagggctggacggagccatatctcagaatcccagatgtcacttctgaaatcttcgcttgagaagctctccctcctcaacgaagagaacagtctgaagctccggcttattgatcatgaactcaagaaccaggaacgataggttggcaggtccatgtgcgacttattgccatattggtattttgttgttcggacactaagtacaggatccataggagcctgtttgctgtcactttctgtggggggctcgcgaactgcatttgcatgtcagcgtgttgtaagttgtaactagcaatacagaaccaagtgcaaaccgctacaccttttcctcctgcagatcgggaccggtagggaaggtttaaggcgtgtttggtgtgtggcgtatggcgccacgccacgcctaagttgcggcggccgaattggccgccacaactgcggcacgaaaagtgcggcggatggcggtggcgtaggcaaggtaccaaacacgcctttagtgctctgtgttttgtactgcatggtctgaagctgcagagtgcagactaccattggagggtaacgagtagtcccagcaagtggtacagccatacaggcgagatggcatgtgcctgggaaatgagaatagagtgatcgaacctgcttcgaattatttaggggactgactgctcttatttcattgttttgctttttcttttgcgtgtactagggtttagtggccacgcttttgtttattttaccatcaggaatacatctttaatcagttaccctatcgtatctattatcttatctcaaagtttactctatagttagtgtaatctataatgcaaaattttcatacattttatatgatgtgctgcagacagccttaggccgtgtttgtttcggattataatatctccagattatataatccagcacaaataattcagcaggtaaataaatacctatattatgggttcaaattatataatctaaagttcatattatgattaatctctcaagagtagcttatttaag

SEQ ID NO: 15042 - DNA, 5610 bp, Zea Mays
gttagcaattcctaaactatctagacacattggttattttcatgcttttatgtctaatcaaaactacaacggtgacctttcattggttcttaactatgtttacttgcccaaagaaaaacaaaaactcttgtgttgtgtggtattagccggtagctttagaaagtcattgtgaactttcttcgaatgtatcattattttatggtcattaaaaccaatattttattactttggtaaatgtgtatatccacttagttctatatatatatataatgttcctatgtctataataacaatcttttaaatgtgtagccacaatggtcaaaaactcgcacaaggcgtgagtaatctatttacacgtaaaaaaattcaaaccattatagcttttttactgtaactacgtcatttatttatatgccaaaaaaaacttcaacccaggcacacttcacgtttcatttggtgtgtgcttttgctgctttttccttacacataaaagtgttcttctctgatatctgtagttgtagatagattattgttttataactttctgttagttattgttctatcacgacctgttacctatctaatgtcctgccacaacatcgccattaatgtgtttttcagacttaagttatgaggtgtttgttctttttatatgtaaatcctaaaaattttgactccaaagtcatccattacattattttactaaatctatatctttaacttttgtgtcactctgcattttttaagattcaaaaaacatgttctgttttacagtttcatttcttgttaataatatggtattgtatttccttctatagtgctcaaacgtaatgatgtttatccttctttgataaatatagacgatcataagtaccaatccatgatgctttatccttaaactcctccacaaactcatcttttctaataaaaagttggaaaggacgagttagaatttcatgtacagtcccagtgcagcagtaaaactctccggatcgtaagtatagtttgtagtaacctctacaatttctttacattcggattttgatccataacctttgtaatcaatttgactgaatcatttatccctaagatcctatgattaaacaaccttcatcgattatagaatcccaaggagcatgccaaatttgtaggcaaattttaaatcaacagtgttggcaaggaatgataatttatagttcatttgaaatactacattaaatcttattaattgcggttacaacaaactaaagccctactcctaatctttgcatgtaacaaaaactacatgtattctatgtaatataagagcacccctacaatgcggctacttcaatgaacaatttgtaaatgcatttaaatgtactcactcaaatagtcttattttcaaaattgagttttccatttttcatagtcctatttgagttgtgattccaaatctgatataaatggttgtttatgtccccgtgcaaagtaacccatctacaaaaaaagactggtgcgtgtttatggaaacatcaataccgaggagttttcgcaaaaaaacaaggagtgtttcatgatgtaattaattagatgataagaaagaggtcttctccttggtcattgtaccaaggtgaaatagaactataagtgaatggagggagtatgtaacattctgaattcaccatgtaatatttgaacaaaataaaaaacaacagaacccaatcaattagtaacttagtactaacagctacttttttattctttgtcaaatctaatttatctcagcctcatatatggatagatcatattatggatcactaaatcaagaatggctgcattgtcatgccatattctggtacgaagagagagttcgtagcaaccatcatgtcagatccattgtttagaacaaatgttgcaaaggcttctacctagtgcatgcttgtatattagtcttcgccgtaactatattacagagatatagacatcacaaggctgctgtcgtagagatgggccgaatttctcaatgggcacacgacgtgtcgccatgagttttacacatgggcctatgacagttgggtttgttgtactgttgacgtgtgtcccaattcgggtaatctcaatcaaaactgctacatctagcccaaataacctgcccacgaccgctccactgcactcctcgtcctcgccgtcgccgccaccgccaccgccgatgacgcgcatcaccgcgccgccgccaccttcctcgccgccggggtccccgccacccatccgccactccccagcgccggcaacgccgccctctcgccgccgcggacgccactcgccgtccccgtctctcgcgctcaccccttcctccgcctccacctcctcgaggccgaagccgcggcccgctccgaagcgggcctactctccggcgcagtgggtgcctctgaactcccaccccgtgttctcccgacgcgacggcgacggcggcggcggggacgccgcgtgggacgccgcggcgtcgcggctgtacgcgtgggacccttcagcgtgcagcgtccaccgcattggcgtgcggactagggacccggacgcggagaatggtgaggtggatgtgaccgtggaatctgccgtgccttccgagctgttgacgccagagtccgatcttggttatatggtcactcacatatcacttaacactgatggttcatcactgctgcttgttggatcacataacttaaatatcatgtatgtacatgagaggatatctgaagatggggatacaatcatatgcaggactgcaccgattgcttctcagatcctacccagtgacagtgatggcataaaagttctccaggcatcttggcatccctttagcaataaccattttgcagttttgacatcagatgctgttttcaggttatttgatctttcatccgatttagaacagccagagcagggattttatttgcagccaattgtacctgggaaatgtcaaaatgcttcagcgatttgtccagtgggtttctcttatgggagcgatcatctatgggatagattttcggttttcatcttattcagtgatggttcaatttttgtcctctgcccagttgttccatttggaagtgactatagcaagaagcatattcaggaaatatatgaagatgttaatgcatttggattgaaatcttcaaatccaaatgttgtcactaattcacatttggccatagcttggttggaggcaacatttcctgacctgttacatcaatcaacagataccagttttctgatgtcaaaagctcatgcatatgcgccattagatgattctctaacattacaggggcctctttgtacagtttgtgaggaaagtaatgaatctgaaagcaagagcagcagttgtgaaggaaaagctgtaggttttatgtacagttctgctggcaaagattcagttcttgtgactgcctggggtagtgggctgcttcaggttgatgctcttgcagatgaaattcaaccgcggtggaacattggggttccttcgcgtcttaatgtcgattcacatggacaaataaataatgttgccatgatatgtgactccaattcgcaagatccattggcgttgagatcgcatcgaccatctagtacaggatcaaacgtgaagagcaacatagaagctgtttggatgggacactctcctcctttgctaaggctcgcaattgtggatttggcattaccaaaaactcctaatgataactctctgtcattgtttgctgatccccttgttccagagagattttattgtgcgcatggtggggggcttgacatggtcacactgcacttcctaccattttcataccctgaaatgtcttcgacaccaccctctgtgcatcctgtcctcactacagggaacagcgaaacaagctcaccttttctttctggatttgttaccatagctgatgcatatggtcatgtacagttagctggcatcacatgcttgggtgagtgctttgtggtggagatgaagggttggaaggaaccggcacctcttcagcttgacttagaaagcaaaatcgtcaaggatgtggagcctcctgcaactggaatgatcagcaaagaacttattgctggtccagacccacccatacttccatcatcttcaagcctgaaatcgttgaccccagactctattgaaggaaaatctacacttcaccactatattaaggtcttccatgagtactatgtggagtacggacacaaggtgttcattgaactcaaggagcatgcggactatttgaagacagaaatggaagataaacagaaacgcttggaagcagtgaagaaatcacttatatccgtagaagccaaagatggagacatcaacaagaggatagatcgggccttcaaggtgtatgaactgttggagaagcgaatagatagcttcaagatgcttcctgctgcaaacaagaaaccattaacccaggcagagcaggagttcaaatcacagcttgatcggttcgcagatgtggagctggatgctttgcgttcctccattgccgccctgagtgctaggatgaaacgttttgctcagcaatccacgggcagtgcggctagcacaggaatggtgccatggcaggcacaaagggctggacggagccatatctcagaatcccagatgtcacttctgaaatcttcgcttgagaagctctccctcctcaacgaagagaacagtctgaagctccggcttattgatcatgaactcaagaaccaggaacgataggttggcaggtccatgtgcgacttattgccatattggtattttgttgttcggacactaagtacaggatccataggagcctgtttgctgtcactttctgtggggggctcgcgaactgcatttgcatgtcagcgtgttgtaagttgtaactagcaatacagaaccaagtgcaaaccgctacaccttttcctcctgcagatcgggaccggtagggaaggtttaaggcgtgtttggtgtgtggcgtatggcgccacgccacgcctaagttgcggcggccgaattggccgccacaactgcggcacgaaaagtgcggcggatggcggtggcgtaggcaaggtaccaaacacgcctttagtgctctgtgttttgtactgcatggtctgaagctgcagagtgcagactaccattggagggtaacgagtagtcccagcaagtggtacagccatacaggcgagatggcatgtgcctgggaaatgagaatagagtgatcgaacctgcttcgaattatttaggggactgactgctcttatttcattgttttgctttttcttttgcgtgtactagggtttagtggccacgcttttgtttattttaccatcaggaatacatctttaatcagttaccctatcgtatctattatcttatctcaaagtttactctatagttagtgtaatctataatgcaaaattttcatacattttatatgatgtgctgcagacagccttaggccgtgtttgtttcggattataatatctccagattatataatccagcacaaataattcagcaggtaaataaatacctatattatgggttcaaattatataatctaaagttcatattatgattaatctctcaagagtagcttatttaag

SEQ ID NO: 15043 - DNA, 4651 bp, Zea Mays
gtcattgtgaactttcttcgaatgtatcattattttatggtcattaaaaccaatattttattactttggtaaatgtgtatatccacttagttctatatatatatataatgttcctatgtctataataacaatcttttaaatgtgtagccacaatggtcaaaaactcgcacaaggcgtgagtaatctatttacacgtaaaaaaattcaaaccattatagcttttttactgtaactacgtcatttatttatatgccaaaaaaaacttcaacccaggcacacttcacgtttcatttggtgtgtgcttttgctgctttttccttacacataaaagtgttcttctctgatatctgtagttgtagatagattattgttttataactttctgttagttattgttctatcacgacctgttacctatctaatgtcctgccacaacatcgccattaatgtgtttttcagacttaagttatgaggtgtttgttctttttatatgtaaatcctaaaaattttgactccaaagtcatccattacattattttactaaatctatatctttaacttttgtgtcactctgcattttttaagattcaaaaaacatgttctgttttacagtttcatttcttgttaataatatggtattgtatttccttctatagtgctcaaacgtaatgatgtttatccttctttgataaatatagacgatcataagtaccaatccatgatgctttatccttaaactcctccacaaactcatcttttctaataaaaagttggaaaggacgagttagaatttcatgtacagtcccagtgcagcagtaaaactctccggatcgtaagtatagtttgtagtaacctctacaatttctttacattcggattttgatccataacctttgtaatcaatttgactgaatcatttatccctaagatcctatgattaaacaaccttcatcgattatagaatcccaaggagcatgccaaatttgtaggcaaattttaaatcaacagtgttggcaaggaatgataatttatagttcatttgaaatactacattaaatcttattaattgcggttacaacaaactaaagccctactcctaatctttgcatgtaacaaaaactacatgtattctatgtaatataagagcacccctacaatgcggctacttcaatgaacaatttgtaaatgcatttaaatgtactcactcaaatagtcttattttcaaaattgagttttccatttttcatagtcctatttgagttgtgattccaaatctgatataaatggttgtttatgtccccgtgcaaagtaacccatctacaaaaaaagactggtgcgtgtttatggaaacatcaataccgaggagttttcgcaaaaaaacaaggagtgtttcatgatgtaattaattagatgataagaaagaggtcttctccttggtcattgtaccaaggtgaaatagaactataagtgaatggagggagtatgtaacattctgaattcaccatgtaatatttgaacaaaataaaaaacaacagaacccaatcaattagtaacttagtactaacagctacttttttattctttgtcaaatctaatttatctcagcctcatatatggatagatcatattatggatcactaaatcaagaatggctgcattgtcatgccatattctggtacgaagagagagttcgtagcaaccatcatgtcagatccattgtttagaacaaatgttgcaaagctgttgacgccagagtccgatcttggttatatggtcactcacatatcacttaacactgatggactgcaccgattgcttctcagatcctacccagtgacagtgatggcataaaagttctccaggcatcttggcatccctttagcaataaccattttgcagttttgacatcagatgctgttttcaggttatttgatctttcatccgatttagaacagccagagcagggattttatttgcagccaattgtacctgggaaatgtcaaaatgcttcagcgatttgtccagtgggtttctcttatgggagcgatcatctatgggatagattttcggttttcatcttattcagtgatggttcaatttttgtcctctgcccagttgttccatttggaagtgactatagcaagaagcatattcaggaaatatatgaagatgttaatgcatttggattgaaatcttcaaatccaaatgttgtcactaattcacatttggccatagcttggttggaggcaacatttcctgacctgttacatcaatcaacagataccagttttctgatgtcaaaagctcatgcatatgcgccattagatgattctctaacattacaggggcctctttgtacagtttgtgaggaaagtaatgaatctgaaagcaagagcagcagttgtgaaggaaaagctgtaggttttatgtacagttctgctggcaaagattcagttcttgtgactgcctggggtagtgggctgcttcaggttgatgctcttgcagatgaaattcaaccgcggtggaacattggggttccttcgcgtcttaatgtcgattcacatggacaaataaataatgttgccatgatatgtgactccaattcgcaagatccattggcgttgagatcgcatcgaccatctagtacaggatcaaacgtgaagagcaacatagaagctgtttggatgggacactctcctcctttgctaaggctcgcaattgtggatttggcattaccaaaaactcctaatgataactctctgtcattgtttgctgatccccttgttccagagagattttattgtgcgcatggtggggggcttgacatggtcacactgcacttcctaccattttcataccctgaaatgtcttcgacaccaccctctgtgcatcctgtcctcactacagggaacagcgaaacaagctcaccttttctttctggatttgttaccatagctgatgcatatggtcatgtacagttagctggcatcacatgcttgggtgagtgctttgtggtggagatgaagggttggaaggaaccggcacctcttcagcttgacttagaaagcaaaatcgtcaaggatgtggagcctcctgcaactggaatgatcagcaaagaacttattgctggtccagacccacccatacttccatcatcttcaagcctgaaatcgttgaccccagactctattgaaggaaaatctacacttcaccactatattaaggtcttccatgagtactatgtggagtacggacacaaggtgttcattgaactcaaggagcatgcggactatttgaagacagaaatggaagataaacagaaacgcttggaagcagtgaagaaatcacttatatccgtagaagccaaagatggagacatcaacaagaggatagatcgggccttcaaggtgtatgaactgttggagaagcgaatagatagcttcaagatgcttcctgctgcaaacaagaaaccattaacccaggcagagcaggagttcaaatcacagcttgatcggttcgcagatgtggagctggatgctttgcgttcctccattgccgccctgagtgctaggatgaaacgttttgctcagcaatccacgggcagtgcggctagcacaggaatggtgccatggcaggcacaaagggctggacggagccatatctcagaatcccagatgtcacttctgaaatcttcgcttgagaagctctccctcctcaacgaagagaacagtctgaagctccggcttattgatcatgaactcaagaaccaggaacgataggttggcaggtccatgtgcgacttattgccatattggtattttgttgttcggacactaagtacaggatccataggagcctgtttgctgtcactttctgtggggggctcgcgaactgcatttgcatgtcagcgtgttgtaagttgtaactagcaatacagaaccaagtgcaaaccgctacaccttttcctcctgcagatcgggaccggtagggaaggtttaaggcgtgtttggtgtgtggcgtatggcgccacgccacgcctaagttgcggcggccgaattggccgccacaactgcggcacgaaaagtgcggcggatggcggtggcgtaggcaaggtaccaaacacgcctttagtgctctgtgttttgtactgcatggtctgaagctgcagagtgcagactaccattggagggtaacgagtagtcccagcaagtggtacagccatacaggcgagatggcatgtgcctgggaaatgagaatagagtgatcgaacctgcttcgaattatttaggggactgactgctcttatttcattgttttgctttttcttttgcgtgtactagggtttagtggccacgcttttgtttattttaccatcaggaatacatctttaatcagttaccctatcgtatctattatcttatctcaaagtttactctatagttagtgtaatctataatgcaaaattttcatacattttatatgatgtgctgcagacagccttaggccgtgtttgtttcggattataatatctccagattatataatccagcacaaataattcagcaggtaaataaatacctatattatgggttcaaattatataatctaaagttcatattatgattaatctctcaagagtagcttatttaag

SEQ ID NO: 15044 - DNA, 4619 bp, Zea Mays
aataacaatcttttaaatgtgtagccacaatggtcaaaaactcgcacaaggcgtgagtaatctatttacacgtaaaaaaattcaaaccattatagcttttttactgtaactacgtcatttatttatatgccaaaaaaaacttcaacccaggcacacttcacgtttcatttggtgtgtgcttttgctgctttttccttacacataaaagtgttcttctctgatatctgtagttgtagatagattattgttttataactttctgttagttattgttctatcacgacctgttacctatctaatgtcctgccacaacatcgccattaatgtgtttttcagacttaagttatgaggtgtttgttctttttatatgtaaatcctaaaaattttgactccaaagtcatccattacattattttactaaatctatatctttaacttttgtgtcactctgcattttttaagattcaaaaaacatgttctgttttacagtttcatttcttgttaataatatggtattgtatttccttctatagtgctcaaacgtaatgatgtttatccttctttgataaatatagacgatcataagtaccaatccatgatgctttatccttaaactcctccacaaactcatcttttctaataaaaagttggaaaggacgagttagaatttcatgtacagtcccagtgcagcagtaaaactctccggatcgtaagtatagtttgtagtaacctctacaatttctttacattcggattttgatccataacctttgtaatcaatttgactgaatcatttatccctaagatcctatgattaaacaaccttcatcgattatagaatcccaaggagcatgccaaatttgtaggcaaattttaaatcaacagtgttggcaaggaatgataatttatagttcatttgaaatactacattaaatcttattaattgcggttacaacaaactaaagccctactcctaatctttgcatgtaacaaaaactacatgtattctatgtaatataagagcacccctacaatgcggctacttcaatgaacaatttgtaaatgcatttaaatgtactcactcaaatagtcttattttcaaaattgagttttccatttttcatagtcctatttgagttgtgattccaaatctgatataaatggttgtttatgtccccgtgcaaagtaacccatctacaaaaaaagactggtgcgtgtttatggaaacatcaataccgaggagttttcgcaaaaaaacaaggagtgtttcatgatgtaattaattagatgataagaaagaggtcttctccttggtcattgtaccaaggtgaaatagaactataagtgaatggagggagtatgtaacattctgaattcaccatgtaatatttgaacaaaataaaaaacaacagaacccaatcaattagtaacttagtactaacagctacttttttattctttgtcaaatctaatttatctcagcctcatatatggatagatcatattatggatcactaaatcaagaatggctgcattgtcatgccatattctggtacgaagagagagttcgtagcaaccatcatgtcagatccattgtttagaacaaatgttgcaaagctgttgacgccagagtccgatcttggttatatggtcactcacatatcacttaacactgatggttcatcactgctgcttgttggatcacataacttaaatatcatgtatgtacatgagaggatatctgaagatggggatacaatcatatgcaggactgcaccgattgcttctcagatcctacccagtgacagtgatggcataaaagttctccaggcatcttggcatccctttagcaataaccattttgcagttttgacatcagatgctgttttcaggttatttgatctttcatccgatttagaacagccagagcagggattttatttgcagccaattgtacctgggaaatgtcaaaatgcttcagcgatttgtccagtgggtttctcttatgggagcgatcatctatgggatagattttcggttttcatcttattcagtgatggttcaatttttgtcctctgcccagttgttccatttggaagtgactatagcaagaagcatattcaggaaatatatgaagatgttaatgcatttggattgaaatcttcaaatccaaatgttgtcactaattcacatttggccatagcttggttggaggcaacatttcctgacctgttacatcaatcaacagataccagttttctgatgtcaaaagctcatgcatatgcgccattagatgattctctaacattacaggggcctctttgtacagtttgtgaggaaagtaatgaatctgaaagcaagagcagcagttgtgaaggaaaagctgtaggttttatgtacagttctgctggcaaagattcagttcttgtgactgcctggggtagtgggctgcttcaggttgatgctcttgcagatgaaattcaaccgcggtggaacattggggttccttcgcgtcttaatgtcgattcacatggacaaataaataatgttgccatgatatgtgactccaattcgcaagatccattggcgttgagatcgcatcgaccatctagtacaggatcaaacgtgaagagcaacatagaagctgtttggatgggacactctcctcctttgctaaggctcgcaattgtggatttggcattaccaaaaactcctaatgataactctctgtcattgtttgctgatccccttgttccagagagattttattgtgcgcatggtggggggcttgacatggtcacactgcacttcctaccattttcataccctgaaatgtcttcgacaccaccctctgtgcatcctgtcctcactacagggaacagcgaaacaagctcaccttttctttctggatttgttaccatagctgatgcatatggtcatgtacagttagctggcatcacatgcttgggtgagtgctttgtggtggagatgaagggttggaaggaaccggcacctcttcagcttgacttagaaagcaaaatcgtcaaggatgtggagcctcctgcaactggaatgatcagcaaagaacttattgctggtccagacccacccatacttccatcatcttcaagcctgaaatcgttgaccccagactctattgaaggaaaatctacacttcaccactatattaaggtcttccatgagtactatgtggagtacggacacaaggtgttcattgaactcaaggagcatgcggactatttgaagacagaaatggaagataaacagaaacgcttggaagcagtgaagaaatcacttatatccgtagaagccaaagatggagacatcaacaagaggatagatcgggccttcaaggtgtatgaactgttggagaagcgaatagatagcttcaagatgcttcctgctgcaaacaagaaaccattaacccaggcagagcaggagttcaaatcacagcttgatcggttcgcagatgtggagctggatgctttgcgttcctccattgccgccctgagtgctaggatgaaacgttttgctcagcaatccacgggcagtgcggctagcacaggaatggtgccatggcaggcacaaagggctggacggagccatatctcagaatcccagatgtcacttctgaaatcttcgcttgagaagctctccctcctcaacgaagagaacagtctgaagctccggcttattgatcatgaactcaagaaccaggaacgataggttggcaggtccatgtgcgacttattgccatattggtattttgttgttcggacactaagtacaggatccataggagcctgtttgctgtcactttctgtggggggctcgcgaactgcatttgcatgtcagcgtgttgtaagttgtaactagcaatacagaaccaagtgcaaaccgctacaccttttcctcctgcagatcgggaccggtagggaaggtttaaggcgtgtttggtgtgtggcgtatggcgccacgccacgcctaagttgcggcggccgaattggccgccacaactgcggcacgaaaagtgcggcggatggcggtggcgtaggcaaggtaccaaacacgcctttagtgctctgtgttttgtactgcatggtctgaagctgcagagtgcagactaccattggagggtaacgagtagtcccagcaagtggtacagccatacaggcgagatggcatgtgcctgggaaatgagaatagagtgatcgaacctgcttcgaattatttaggggactgactgctcttatttcattgttttgctttttcttttgcgtgtactagggtttagtggccacgcttttgtttattttaccatcaggaatacatctttaatcagttaccctatcgtatctattatcttatctcaaagtttactctatagttagtgtaatctataatgcaaaattttcatacattttatatgatgtgctgcagacagccttaggccgtgtttgtttcggattataatatctccagattatataatccagcacaaataattcagcaggtaaataaatacctatattatgggttcaaattatataatctaaagttcatattatgattaatctctcaagagtagcttatttaag

SEQ ID NO: 15045 - DNA, 4474 bp, Zea Mays
aataacaatcttttaaatgtgtagccacaatggtcaaaaactcgcacaaggcgtgagtaatctatttacacgtaaaaaaattcaaaccattatagcttttttactgtaactacgtcatttatttatatgccaaaaaaaacttcaacccaggcacacttcacgtttcatttggtgtgtgcttttgctgctttttccttacacataaaagtgttcttctctgatatctgtagttgtagatagattattgttttataactttctgttagttattgttctatcacgacctgttacctatctaatgtcctgccacaacatcgccattaatgtgtttttcagacttaagttatgaggtgtttgttctttttatatgtaaatcctaaaaattttgactccaaagtcatccattacattattttactaaatctatatctttaacttttgtgtcactctgcattttttaagattcaaaaaacatgttctgttttacagtttcatttcttgttaataatatggtattgtatttccttctatagtgctcaaacgtaatgatgtttatccttctttgataaatatagacgatcataagtaccaatccatgatgctttatccttaaactcctccacaaactcatcttttctaataaaaagttggaaaggacgagttagaatttcatgtacagtcccagtgcagcagtaaaactctccggatcgtaagtatagtttgtagtaacctctacaatttctttacattcggattttgatccataacctttgtaatcaatttgactgaatcatttatccctaagatcctatgattaaacaaccttcatcgattatagaatcccaaggagcatgccaaatttgtaggcaaattttaaatcaacagtgttggcaaggaatgataatttatagttcatttgaaatactacattaaatcttattaattgcggttacaacaaactaaagccctactcctaatctttgcatgtaacaaaaactacatgtattctatgtaatataagagcacccctacaatgcggctacttcaatgaacaatttgtaaatgcatttaaatgtactcactcaaatagtcttattttcaaaattgagttttccatttttcatagtcctatttgagttgtgattccaaatctgatataaatggttgtttatgtccccgtgcaaagtaacccatctacaaaaaaagactggtgcgtgtttatggaaacatcaataccgaggagttttcgcaaaaaaacaaggagtgtttcatgatgtaattaattagatgataagaaagaggtcttctccttggtcattgtaccaaggtgaaatagaactataagtgaatggagggagtatgtaacattctgaattcaccatgtaatatttgaacaaaataaaaaacaacagaacccaatcaattagtaacttagtactaacagctacttttttattctttgtcaaatctaatttatctcagcctcatatatggatagatcatattatggatcactaaatcaagaatggctgcattgtcatgccatattctggtacgaagagagagttcgtagcaaccatcatgtcagatccattgtttagaacaaatgttgcaaagctgttgacgccagagtccgatcttggttatatggtcactcacatatcacttaacactgatggttcatcactgctgcttgttggatcacataacttaaatatcatgtatgtacatgagaggatatctgaagatggggatacaatcatatgcaggactgcaccgattgcttctcagatcctacccagtgacagtgatggcataaaagttctccaggcatcttggcatccctttagcaataaccattttgcagttttgacatcagatgctgttttcaggttttcatcttattcagtgatggttcaatttttgtcctctgcccagttgttccatttggaagtgactatagcaagaagcatattcaggaaatatatgaagatgttaatgcatttggattgaaatcttcaaatccaaatgttgtcactaattcacatttggccatagcttggttggaggcaacatttcctgacctgttacatcaatcaacagataccagttttctgatgtcaaaagctcatgcatatgcgccattagatgattctctaacattacaggggcctctttgtacagtttgtgaggaaagtaatgaatctgaaagcaagagcagcagttgtgaaggaaaagctgtaggttttatgtacagttctgctggcaaagattcagttcttgtgactgcctggggtagtgggctgcttcaggttgatgctcttgcagatgaaattcaaccgcggtggaacattggggttccttcgcgtcttaatgtcgattcacatggacaaataaataatgttgccatgatatgtgactccaattcgcaagatccattggcgttgagatcgcatcgaccatctagtacaggatcaaacgtgaagagcaacatagaagctgtttggatgggacactctcctcctttgctaaggctcgcaattgtggatttggcattaccaaaaactcctaatgataactctctgtcattgtttgctgatccccttgttccagagagattttattgtgcgcatggtggggggcttgacatggtcacactgcacttcctaccattttcataccctgaaatgtcttcgacaccaccctctgtgcatcctgtcctcactacagggaacagcgaaacaagctcaccttttctttctggatttgttaccatagctgatgcatatggtcatgtacagttagctggcatcacatgcttgggtgagtgctttgtggtggagatgaagggttggaaggaaccggcacctcttcagcttgacttagaaagcaaaatcgtcaaggatgtggagcctcctgcaactggaatgatcagcaaagaacttattgctggtccagacccacccatacttccatcatcttcaagcctgaaatcgttgaccccagactctattgaaggaaaatctacacttcaccactatattaaggtcttccatgagtactatgtggagtacggacacaaggtgttcattgaactcaaggagcatgcggactatttgaagacagaaatggaagataaacagaaacgcttggaagcagtgaagaaatcacttatatccgtagaagccaaagatggagacatcaacaagaggatagatcgggccttcaaggtgtatgaactgttggagaagcgaatagatagcttcaagatgcttcctgctgcaaacaagaaaccattaacccaggcagagcaggagttcaaatcacagcttgatcggttcgcagatgtggagctggatgctttgcgttcctccattgccgccctgagtgctaggatgaaacgttttgctcagcaatccacgggcagtgcggctagcacaggaatggtgccatggcaggcacaaagggctggacggagccatatctcagaatcccagatgtcacttctgaaatcttcgcttgagaagctctccctcctcaacgaagagaacagtctgaagctccggcttattgatcatgaactcaagaaccaggaacgataggttggcaggtccatgtgcgacttattgccatattggtattttgttgttcggacactaagtacaggatccataggagcctgtttgctgtcactttctgtggggggctcgcgaactgcatttgcatgtcagcgtgttgtaagttgtaactagcaatacagaaccaagtgcaaaccgctacaccttttcctcctgcagatcgggaccggtagggaaggtttaaggcgtgtttggtgtgtggcgtatggcgccacgccacgcctaagttgcggcggccgaattggccgccacaactgcggcacgaaaagtgcggcggatggcggtggcgtaggcaaggtaccaaacacgcctttagtgctctgtgttttgtactgcatggtctgaagctgcagagtgcagactaccattggagggtaacgagtagtcccagcaagtggtacagccatacaggcgagatggcatgtgcctgggaaatgagaatagagtgatcgaacctgcttcgaattatttaggggactgactgctcttatttcattgttttgctttttcttttgcgtgtactagggtttagtggccacgcttttgtttattttaccatcaggaatacatctttaatcagttaccctatcgtatctattatcttatctcaaagtttactctatagttagtgtaatctataatgcaaaattttcatacattttatatgatgtgctgcagacagccttaggccgtgtttgtttcggattataatatctccagattatataatccagcacaaataattcagcaggtaaataaatacctatattatgggttcaaattatataatctaaagttcatattatgattaatctctcaagagtagcttatttaag

SEQ ID NO: 15046 - DNA, 2651 bp, Zea Mays
aaacaccatcacaagctttagtcaaagagaatctcagcgtacctggcaacaattccagataaggaggacgttttcatcttattcagtgatggttcaatttttgtcctctgcccagttgttccatttggaagtgactatagcaagaagcatattcaggaaatatatgaagatgttaatgcatttggattgaaatcttcaaatccaaatgttgtcactaattcacatttggccatagcttggttggaggcaacatttcctgacctgttacatcaatcaacagataccagttttctgatgtcaaaagctcatgcatatgcgccattagatgattctctaacattacaggggcctctttgtacagtttgtgaggaaagtaatgaatctgaaagcaagagcagcagttgtgaaggaaaagctgtaggttttatgtacagttctgctggcaaagattcagttcttgtgactgcctggggtagtgggctgcttcaggttgatgctcttgcagatgaaattcaaccgcggtggaacattggggttccttcgcgtcttaatgtcgattcacatggacaaataaataatgttgccatgatatgtgactccaattcgcaagatccattggcgttgagatcgcatcgaccatctagtacaggatcaaacgtgaagagcaacatagaagctgtttggatgggacactctcctcctttgctaaggctcgcaattgtggatttggcattaccaaaaactcctaatgataactctctgtcattgtttgctgatccccttgttccagagagattttattgtgcgcatggtggggggcttgacatggtcacactgcacttcctaccattttcataccctgaaatgtcttcgacaccaccctctgtgcatcctgtcctcactacagggaacagcgaaacaagctcaccttttctttctggatttgttaccatagctgatgcatatggtcatgtacagttagctggcatcacatgcttgggtgagtgctttgtggtggagatgaagggttggaaggaaccggcacctcttcagcttgacttagaaagcaaaatcgtcaaggatgtggagcctcctgcaactggaatgatcagcaaagaacttattgctggtccagacccacccatacttccatcatcttcaagcctgaaatcgttgaccccagactctattgaaggaaaatctacacttcaccactatattaaggtcttccatgagtactatgtggagtacggacacaaggtgttcattgaactcaaggagcatgcggactatttgaagacagaaatggaagataaacagaaacgcttggaagcagtgaagaaatcacttatatccgtagaagccaaagatggagacatcaacaagaggatagatcgggccttcaaggtgtatgaactgttggagaagcgaatagatagcttcaagatgcttcctgctgcaaacaagaaaccattaacccaggcagagcaggagttcaaatcacagcttgatcggttcgcagatgtggagctggatgctttgcgttcctccattgccgccctgagtgctaggatgaaacgttttgctcagcaatccacgggcagtgcggctagcacaggaatggtgccatggcaggcacaaagggctggacggagccatatctcagaatcccagatgtcacttctgaaatcttcgcttgagaagctctccctcctcaacgaagagaacagtctgaagctccggcttattgatcatgaactcaagaaccaggaacgataggttggcaggtccatgtgcgacttattgccatattggtattttgttgttcggacactaagtacaggatccataggagcctgtttgctgtcactttctgtggggggctcgcgaactgcatttgcatgtcagcgtgttgtaagttgtaactagcaatacagaaccaagtgcaaaccgctacaccttttcctcctgcagatcgggaccggtagggaaggtttaaggcgtgtttggtgtgtggcgtatggcgccacgccacgcctaagttgcggcggccgaattggccgccacaactgcggcacgaaaagtgcggcggatggcggtggcgtaggcaaggtaccaaacacgcctttagtgctctgtgttttgtactgcatggtctgaagctgcagagtgcagactaccattggagggtaacgagtagtcccagcaagtggtacagccatacaggcgagatggcatgtgcctgggaaatgagaatagagtgatcgaacctgcttcgaattatttaggggactgactgctcttatttcattgttttgctttttcttttgcgtgtactagggtttagtggccacgcttttgtttattttaccatcaggaatacatctttaatcagttaccctatcgtatctattatcttatctcaaagtttactctatagttagtgtaatctataatgcaaaattttcatacattttatatgatgtgctgcagacagccttaggccgtgtttgtttcggattataatatctccagattatataatccagcacaaataattcagcaggtaaataaatacctatattatgggttcaaattatataatctaaagttcatattatgattaatctctcaagagtagcttatttaag

SEQ ID NO: 15047 - DNA, 2588 bp, Zea Mays
aacaattccagataaggaggacgttttcatcttattcagtgatggttcaatttttgtcctctgcccagttgttccatttggaagtgactatagcaagaagcatattcaggaaatatatgaagatgttaatgcatttggattgaaatcttcaaatccaaatgttgtcactaattcacatttggccatagcttggttggaggcaacatttcctgacctgttacatcaatcaacagataccagttttctgatgtcaaaagctcatgcatatgcgccattagatgattctctaacattacagtttgtgaggaaagtaatgaatctgaaagcaagagcagcagttgtgaaggaaaagctgtaggttttatgtacagttctgctggcaaagattcagttcttgtgactgcctggggtagtgggctgcttcaggttgatgctcttgcagatgaaattcaaccgcggtggaacattggggttccttcgcgtcttaatgtcgattcacatggacaaataaataatgttgccatgatatgtgactccaattcgcaagatccattggcgttgagatcgcatcgaccatctagtacaggatcaaacgtgaagagcaacatagaagctgtttggatgggacactctcctcctttgctaaggctcgcaattgtggatttggcattaccaaaaactcctaatgataactctctgtcattgtttgctgatccccttgttccagagagattttattgtgcgcatggtggggggcttgacatggtcacactgcacttcctaccattttcataccctgaaatgtcttcgacaccaccctctgtgcatcctgtcctcactacagggaacagcgaaacaagctcaccttttctttctggatttgttaccatagctgatgcatatggtcatgtacagttagctggcatcacatgcttgggtgagtgctttgtggtggagatgaagggttggaaggaaccggcacctcttcagcttgacttagaaagcaaaatcgtcaaggatgtggagcctcctgcaactggaatgatcagcaaagaacttattgctggtccagacccacccatacttccatcatcttcaagcctgaaatcgttgaccccagactctattgaaggaaaatctacacttcaccactatattaaggtcttccatgagtactatgtggagtacggacacaaggtgttcattgaactcaaggagcatgcggactatttgaagacagaaatggaagataaacagaaacgcttggaagcagtgaagaaatcacttatatccgtagaagccaaagatggagacatcaacaagaggatagatcgggccttcaaggtgtatgaactgttggagaagcgaatagatagcttcaagatgcttcctgctgcaaacaagaaaccattaacccaggcagagcaggagttcaaatcacagcttgatcggttcgcagatgtggagctggatgctttgcgttcctccattgccgccctgagtgctaggatgaaacgttttgctcagcaatccacgggcagtgcggctagcacaggaatggtgccatggcaggcacaaagggctggacggagccatatctcagaatcccagatgtcacttctgaaatcttcgcttgagaagctctccctcctcaacgaagagaacagtctgaagctccggcttattgatcatgaactcaagaaccaggaacgataggttggcaggtccatgtgcgacttattgccatattggtattttgttgttcggacactaagtacaggatccataggagcctgtttgctgtcactttctgtggggggctcgcgaactgcatttgcatgtcagcgtgttgtaagttgtaactagcaatacagaaccaagtgcaaaccgctacaccttttcctcctgcagatcgggaccggtagggaaggtttaaggcgtgtttggtgtgtggcgtatggcgccacgccacgcctaagttgcggcggccgaattggccgccacaactgcggcacgaaaagtgcggcggatggcggtggcgtaggcaaggtaccaaacacgcctttagtgctctgtgttttgtactgcatggtctgaagctgcagagtgcagactaccattggagggtaacgagtagtcccagcaagtggtacagccatacaggcgagatggcatgtgcctgggaaatgagaatagagtgatcgaacctgcttcgaattatttaggggactgactgctcttatttcattgttttgctttttcttttgcgtgtactagggtttagtggccacgcttttgtttattttaccatcaggaatacatctttaatcagttaccctatcgtatctattatcttatctcaaagtttactctatagttagtgtaatctataatgcaaaattttcatacattttatatgatgtgctgcagacagccttaggccgtgtttgtttcggattataatatctccagattatataatccagcacaaataattcagcaggtaaataaatacctatattatgggttcaaattatataatctaaagttcatattatgattaatctctcaagagtagcttatttaag

SEQ ID NO: 15048 - DNA, 2543 bp, Zea Mays
ggcaaatatggtgcatctcttagtgactatagcaagaagcatattcaggaaatatatgaagatgttaatgcatttggattgaaatcttcaaatccaaatgttgtcactaattcacatttggccatagcttggttggaggcaacatttcctgacctgttacatcaatcaacagataccagttttctgatgtcaaaagctcatgcatatgcgccattagatgattctctaacattacaggggcctctttgtacagtttgtgaggaaagtaatgaatctgaaagcaagagcagcagttgtgaaggaaaagctgtaggttttatgtacagttctgctggcaaagattcagttcttgtgactgcctggggtagtgggctgcttcaggttgatgctcttgcagatgaaattcaaccgcggtggaacattggggttccttcgcgtcttaatgtcgattcacatggacaaataaataatgttgccatgatatgtgactccaattcgcaagatccattggcgttgagatcgcatcgaccatctagtacaggatcaaacgtgaagagcaacatagaagctgtttggatgggacactctcctcctttgctaaggctcgcaattgtggatttggcattaccaaaaactcctaatgataactctctgtcattgtttgctgatccccttgttccagagagattttattgtgcgcatggtggggggcttgacatggtcacactgcacttcctaccattttcataccctgaaatgtcttcgacaccaccctctgtgcatcctgtcctcactacagggaacagcgaaacaagctcaccttttctttctggatttgttaccatagctgatgcatatggtcatgtacagttagctggcatcacatgcttgggtgagtgctttgtggtggagatgaagggttggaaggaaccggcacctcttcagcttgacttagaaagcaaaatcgtcaaggatgtggagcctcctgcaactggaatgatcagcaaagaacttattgctggtccagacccacccatacttccatcatcttcaagcctgaaatcgttgaccccagactctattgaaggaaaatctacacttcaccactatattaaggtcttccatgagtactatgtggagtacggacacaaggtgttcattgaactcaaggagcatgcggactatttgaagacagaaatggaagataaacagaaacgcttggaagcagtgaagaaatcacttatatccgtagaagccaaagatggagacatcaacaagaggatagatcgggccttcaaggtgtatgaactgttggagaagcgaatagatagcttcaagatgcttcctgctgcaaacaagaaaccattaacccaggcagagcaggagttcaaatcacagcttgatcggttcgcagatgtggagctggatgctttgcgttcctccattgccgccctgagtgctaggatgaaacgttttgctcagcaatccacgggcagtgcggctagcacaggaatggtgccatggcaggcacaaagggctggacggagccatatctcagaatcccagatgtcacttctgaaatcttcgcttgagaagctctccctcctcaacgaagagaacagtctgaagctccggcttattgatcatgaactcaagaaccaggaacgataggttggcaggtccatgtgcgacttattgccatattggtattttgttgttcggacactaagtacaggatccataggagcctgtttgctgtcactttctgtggggggctcgcgaactgcatttgcatgtcagcgtgttgtaagttgtaactagcaatacagaaccaagtgcaaaccgctacaccttttcctcctgcagatcgggaccggtagggaaggtttaaggcgtgtttggtgtgtggcgtatggcgccacgccacgcctaagttgcggcggccgaattggccgccacaactgcggcacgaaaagtgcggcggatggcggtggcgtaggcaaggtaccaaacacgcctttagtgctctgtgttttgtactgcatggtctgaagctgcagagtgcagactaccattggagggtaacgagtagtcccagcaagtggtacagccatacaggcgagatggcatgtgcctgggaaatgagaatagagtgatcgaacctgcttcgaattatttaggggactgactgctcttatttcattgttttgctttttcttttgcgtgtactagggtttagtggccacgcttttgtttattttaccatcaggaatacatctttaatcagttaccctatcgtatctattatcttatctcaaagtttactctatagttagtgtaatctataatgcaaaattttcatacattttatatgatgtgctgcagacagccttaggccgtgtttgtttcggattataatatctccagattatataatccagcacaaataattcagcaggtaaataaatacctatattatgggttcaaattatataatctaaagttcatattatgattaatctctcaagagtagcttatttaag

SEQ ID NO: 15049 - DNA, 1555 bp, Zea Mays
gggggttagatggtgttggaaggcagttgagattaacgattttgtctctcgaacgaatccaccattttctatgcacatgttatgtattagtaatatataatgatagagagccgaccgtctgtcttttccacacactagattttagggttttcctgttaggctgtcaaaaaaccctttatgtgagaaaaaaatatttcatgagtaagcatgtcatgtcaactaaatcgagtggatattgtgaattgtgaactttgagtatgtgaacttgtgatctttatgaacttgttataatgtcaacttgttatattatgaacttgtgatctttgtaaactttttatattataaatttgtgatccttgtgaacttgttatattgtgaacttgttatatcatgaattgtgaacttgtggtatttgtgatgttttatcaattttgctttattgtgaagtttgatatgtttaccgatcgtattttagatttcgaccgttaccggtgtattttccgcaccgaactttcgtttccgatgtttccgaaataccgatatcgtttccgtttccggaattaccgttttcgattttgtttccgataaaaaaaaaatgaaaacggtaatggttttggtgtttaccgaccgttttcatccctactgcctcctcctcacctcccgcctcccctattaataccgcgcacccacctccctttcctccccgcactcaagccctgcccatcagcacaaccaccaccaccaccgcctggccgtaacgtcacacgctcgcctccttccatggcgcccaggaacgctctccccgccgccagcgccgtggccaacggcatggtgatggagccgaggttccgcggcgtccggaagcgcccgtggggcaggttcgcggcggagatccgggacccggccaggaaggcgcgcgtgtggctcggcaccttcgacaccgccgaggccgcggcgcgcgcctacgacgccgccgcgctccacttccgcgggcccaaggccaagaccaacttccccgtcgcgttcgccgcgcttccgccgccgccgccgcccaagaagccggccgccgtgaccgtgagccccagcagcagcagcaccgtggagtcctcctcctcctcctcccgggactcgcccgccacgccgcccaggcccgcgtctccgtcccagcagagcgacaccgggtcgtcgtcatccgtggtggacgcctccccagcggtcggcgtggggttcgacctcaacatgccgccgccggccgaggtggcgtaggtggaccgaccgccgcagcgcccggtgacacgagacgagacggctccgagaggtcgcgtagatgattagaaacaagctgtattagtacgaggttgggttcaatttgccgcgatgggttactgctagccaggtgtacatagacctttttgcatcggcagctaatacctatttgccgatgttacaaaaaaaaaagagcgaaacgttttgtagttcgttgtaatatgtaacatattaaccgctaattaaccagagatcgactgtcttgtgcttatagcaaccttatttgact

SEQ ID NO: 15050 - DNA, 3029 bp, Zea Mays
cgagaggcggcagcacaactactcccaccgccgaggcaacacaagacggccggtgtcgtgttgcccgcaccgcacggccggtgccatgccgctctgctcccctccactccacgcagggcggcaggcggtggaccatgttagatatattaggtgtagtagatgagctatgggttatgtgggcttgaggagatataaatataggctgagtcagctgtaaaaggcatcaaacaacgaaatacaaaataccaatttacttagaccccgtctagctctcgtcttccttccgtcttcctagctctaatctctgatctcctttcttctaccttctgtggtgctaacatttggtatcagaggaggaatccatggatactgtgctgcaacgacttctggacgaactgacgcacatggaggcgcgcttgacatgtgtgttggctggccgttgtggcgagcagtctgcacgcgcgcgcactccctcctccgacgatggatccacaccgtcctacctcgcccccaccagcgaggccgtcgacaagctccgtcaggacctcaacccttgctgcgtctaccgagacagcatccagcaccaccgagtcgaagatccctctgcagaggaggacctgcaaccgcaagcggaggtggtggagtcgttcgagtcggagtccgctcctcctcccatcgtctacgactgctacgacgagccgaaccacgacgagattgccgaggtgctcgcgctactagagtacaacgaggggacttcgtcggccacagtcctcgtcgactataccaccaccagcatgtcgcctaccaagtgttcgacgatggatttctccgacgccgacagcgccaggacttgcgatgtcaccgacgtccccatcgtgcactccgcactcaaggcgttcgtcaaaatgctcaacggcgggagtgagcatccgcaggaggtgacgcaaacctccatcgcgcgcctgatggacagctcacggagctggatcttcaccgagctcggccaaccaacatactgcccagagactttcccggaggtgccatttgagagaccaactccacccataattttcttcgacgaggaacatatcttcgaggaagagtcgtcttcttccaccacggcgacaccaagaaatccgtccgatccgaagcaggcgggtggcgacctcgattccatcgctactgcggcgctgtcggcgtcggaggagatcccccagtccctgctcgtcatcgacctcgagcgcgccacctccaagtgcatcaggacccacgctgtcaacgatgtcccagctgtgcactccattatcaagggcctgcaactggagcggatcggtctggcggggagcgcgcccgacctggacaccctcaccaccgcccgccattgtggcagtgagctcagctgccagctcggcagcaacaagcgggatgtcagcctccgagttgggtgcgaccaaagctatgagtgggtcgacccggagaccctggacaggagcttcgtcgtgctagataatgcttgtgctacccatgaggtgttcgagggtcttgtggcagagacgcacctccacttcatcggcacctacaggggcgtcgtcagcaccgccttctgtactgagattgttgagtctgcagatgcctatatctttgcaggctccattttcaaggactacagctccgtcggttactcattcctcctcaagaaggccaaggccatcattgtccagcctgagcgtgtgggagtgggaaatgggttgtcattcagatgtttgatgatgaaggagtactggactgaaattgctaagaaggttaaaaagaacaccactacgtatgagaactacaagaggaactttgtacctgaagggcaggcgctggagagcgagccgaatgagccactgcgagtcaatgtgctcttcaaatacatccagaagatgatgacagttaatagtgtcgtgatggctgagaccgatgattcttggttcaactgccataagctcaagctgccagaaagctgtggatatcaattccaaatgcagtatggtttaattggatggtcaatgggtgcactgcttggctatgctcaggttgctatgaccatgatattataatggatgctgccggttttggtgatgagctggtggtcatcagcttgggtgctgactgccaaattattgcatcctaccacaggtggcctttcggacagactggaactggtcatttctccccaattggtggctaccaggttagacaagatatggtgctcatcttggatgttgctcgtttcattccattacaatttttttgggaagccatgaatacaactaatgactcaactctgagagggtccatgcttatatcaagaaaggttgcagagtcttcattgttgtacacagtgagttgcagagatgaaaactggaaaatcatgccaaagttttgtgttgaagatttaccaagtcttctgaaggcagggattggtgcttgcgtgggcttggttacctctggtctgagtgttgtcagcagtggccaaggcaatttttcagtatttgtttgggatcctggtgatagcggcttggttacctctagtctgagtgccgtcagcagtgaccaaggcaaattttcagtctttgtttgggatcctggtgatcgtggcttggttacctatggtctgagagttgtcagtattgcaagagttactgctattatgtcaggcacatatgcaagaggtgctgctacaacttcctctccgaagatgcgccagacccagttcagatggagggccgaggagaggcatgatgcattcaacaatgatgctaatccacagataaagttgatcctacaccgtcagcggcttgggggcaagccgtatttcaaggagtggggaatgttagatatattaggtgtagtagatgagctatgggttatgtgggcttgaggagatataaatataggctgagtcagctgtaaaaggcatcaaacaacgaaatacaaaataccaatttacttagaccccgtctagctctcgtcttccttccgtc

SEQ ID NO: 15051 - DNA, 1669 bp, Zea Mays
ctgctcccctccactccacgcagggcggcaggcggtggaccatgttagatatattaggtgtagtagatgagctatgggttatgtgggcttgaggagatataaatataggctgagtcagctgtaaaaggcatcaaacaacgaaatacaaaataccaatttacttagaccccgtctagctctcgtcttccttccgtcttcctagctctaatctctgatctcctttcttctaccttctgtggtgctaacatttggtatcagaggaggaatccatggatactgtgctgcaacgacttctggacgaactgacgcacatggaggcgcgcttgacatgtgtgttggctggccgttgtggcgagcagtctgcacgcgcgcgcactccctcctccgacgatggatccacaccgtcctacctcgcccccaccagcgaggccgtcgacaagctccgtcaggacctcaacccttgctgcgtctaccgagacagcatccagcaccaccgagtcgaagatccctctgcagaggaggacctgcaaccgcaagcggaggtggtggagtcgttcgagtcggagtccgctcctcctcccatcgtctacgactgctacgacgagccgaaccacgacgagattgccgaggtgctcgcgctactagagtacaacgaggggacttcgtcggccacagtcctcgtcgactataccaccaccagcatgtcgcctaccaagtgttcgacgatggatttctccgacgccgacagcgccaggacttgcgatgtcaccgacgtccccatcgtgcactccgcactcaaggcgttcgtcaaaatgctcaacggcgggagtgagcatccgcaggaggtgacgcaaacctccatcgcgcggtgcgccaggatctccgcctgtgacacccaccagccgaccacctccatgtcgtggctgcacacacgcgtccatcgctccgtgcagacgccgtccttgcggggcgtcatcggaatcgcctagacgagcggcggacctgacgcacacagcctgatggacagctcacggagctggatcttcaccgagctcggccaaccaacatactgcccagagactttcccggaggtgccatttgagagaccaactccacccataattttcttcgacgaggaacatatcttcgaggaagagtcgtcttcttccaccacggcgacaccaagaaatccgtccgatccgaagcaggcgggtggcgacctcgattccatcgctactgcggcgctgtcggcgtcggaggagatcccccagtccctgctcgtcatcgacctcgagcgcgccacctccaagtgcatcaggacccacgctgtcaacgatgtcccagctgtgcactccattatcaagggcctgcaactggagcggatcggtctggcggggagcgcgcccgacctggacaccctcaccaccgcccgccattgtggcagtgagctcagctgccagctcggcagcaacaagcgggatgtcagcctccgagttgggtgcgaccaaagctatgagtgggtcgacccggagaccctggacaggagcttcgtcgtgctagataatgcttgtgctacccatgaggtgttcgagaccaactggcggaacgagaacgggccgagccgaatggacccgcccgaccacgggacatcgagaagcgaagggaacgc

SEQ ID NO: 15052 - DNA, 3186 bp, Zea Mays
atgagctatgggttatgtgggcttgaggagatataaatataggctgagtcagctgtaaaaggcatcaaacaacgaaatacaaaataccaatttacttagaccccgtctagctctcgtcttccttccgtcttcctagctctaatctctgatctcctttcttctaccttctgtggtgctaacatttggtatcagaggaggaatccatggatactgtgctgcaacgacttctggacgaactgacgcacatggaggcgcgcttgacatgtgtgttggctggccgttgtggcgagcagtctgcacgcgcgcgcactccctcctccgacgatggatccacaccgtcctacctcgcccccaccagcgaggccgtcgacaagctccgtcaggacctcaacccttgctgcgtctaccgagacagcatccagcaccaccgagtcgaagatccctctgcagaggaggacctgcaaccgcaagcggaggtggtggagtcgttcgagtcggagtccgctcctcctcccatcgtctacgactgctacgacgagccgaaccacgacgagattgccgaggtgctcgcgctactagagtacaacgaggggacttcgtcggccacagtcctcgtcgactataccaccaccagcatgtcgcctaccaagtgttcgacgatggatttctccgacgccgacagcgccaggacttgcgatgtcaccgacgtccccatcgtgcactccgcactcaaggcgttcgtcaaaatgctcaacggcgggagtgagcatccgcaggaggtgacgcaaacctccatcgcgcgcctgatggacagctcacggagctggatcttcaccgagctcggccaaccaacatactgcccagagactttcccggaggtgccatttgagagaccaactccacccataattttcttcgacgaggaacatatcttcgaggaagagtcgtcttcttccaccacggcgacaccaagaaatccgtccgatccgaagcaggcgggtggcgacctcgattccatcgctactgcggcgctgtcggcgtcggaggagatcccccagtccctgctcgtcatcgacctcgagcgcgccacctccaagtgcatcaggacccacgctgtcaacgatgtcccagctgtgcactccattatcaagggcctgcaactggagcggatcggtctggcggggagcgcgcccgacctggacaccctcaccaccgcccgccattgtggcagtgagctcagctgccagctcggcagcaacaagcgggatgtcagcctccgagttgggtgcgaccaaagctatgagtgggtcgacccggagaccctggacaggagcttcgtcgtgctagataatgcttgtgctacccatgaggtgttcgaggtattgcctctaagcttccctgctgcttgggttaatgttggcaagctcccaaccactttatgttggaaaattccatggccacctcccgttttgtgggtgaatttgcatgctggcggtcgttatataacttcattgttggaagaatgtcagctagtgttcaccatattcttcggtggtgtttgctcacttgccaagattcagtggccttatatggtgttggaataccttgctaatttgcatgtgattcatgggaaaattcatatgcatccggtacaagtttgtgtcaggtcctatgcagtgatgccatctgctaagggtcttgtggcagagacgcacctccacttcatcggcacctacaggggcgtcgtcagcaccgccttctgtactgagattgttgagtctgcagatgcctatatctttgcaggctccattttcaaggactacagctccgtcggttactcattcctcctcaagaaggccaaggccatcattgtccagcctgagcgtgtgggagtgggaaatgggttgtcattcagatgtttgatgatgaaggagtactggactgaaattgctaagaaggttaaaaagaacaccactacgtatgagaactacaagaggaactttgtacctgaagggcaggcgctggagagcgagccgaatgagccactgcgagtcaatgtgctcttcaaatacatccagaagatgatgacagttaatagtgtcgtgatggctgagaccgatgattcttggttcaactgccataagctcaagctgccagaaagctgtggatatcaattccaaatgcagtatggtttaattggatggtcaatgggtgcactgcttggctatgctcaggtttgctatgaccatgatattataatggatgctgccggttttggtgatgagctggtggtcatcagcttgggtgctgactgccaaattattgcatcctaccacaggtggcctttcggacagactggaactggtcatttctccccaattggtggctaccaggttagacaagatatggtgctcatcttggatgttgctcgtttcattccattacaatttttttgggaagccatgaatacaactaatgactcaactctgagagggtccatgcttatatcaagaaaggttgcagagtcttcattgttgtacacagtgagttgcagagatgaaaactggaaaatcatgccaaagttttgtgttgaagatttaccaagtcttctgaaggcagggattggtgcttgcgtgggcttggttacctctggtctgagtgttgtcagcagtggccaaggcaatttttcagtatttgtttgggatcctggtgatagcggcttggttacctctagtctgagtgccgtcagcagtgaccaaggcaaattttcagtctttgtttgggatcctggtgatcgtggcttggttacctatggtctgagagttgtcagtattgcaagagttactgctattatgtcaggcacatatgcaagaggtgctgctacaacttcctctccgaagatgcgccagacccagttcagatggagggccgaggagaggcatgatgcattcaacaatgatgctaatccacagataaagttgatcctacaccgtcagcggcttgggggcaagccgtatttcaaggagtggggaatgttagatatattaggtgtagtagatgagctatgggttatgtgggcttgaggagatataaatataggctgagtcagctgtaaaaggcatcaaacaacgaaatacaaaataccaatttacttagaccccgtctagctctcgtcttccttccgtc

SEQ ID NO: 15053 - DNA, 2193 bp, Zea Mays
ccgggagctcgctctcgctccctccacctccctccccccttgaccctcccagccgcaaaaccgcaggccgcatcccgcccgccgcccgccgcccacctgtggcaaccgccgcctacataaacgaccaatcgaccactcgccgaaccaagccacccacccaaaacccaatggcgtccaacctcctatccgcggtggcaatcgagaaggagacgccggagagcgagctgcccccgacgttcctccgcgaggacgggcgcggcgccgggtccgtgcgggcgcggttcgagtccatgatacggcgggtgcagggggaggtctgcgccgcgctcgaggaggcagatggcggtggggcgcgcttcgtcgaggacgtctggtcgcgccccggcggcggcggcggcatcagccgggtcctgcaggacggccgcgtcttcgagaaggccggggtcaacgtctccgtcgtctacggggtcatgccacccgacgcctaccgcgccgccaagggggaggccggcaagaacgaggtcgccgcggatggccacaagcctggccccgtgccattcttcgctgcgggtattagctcggtgcttcaccccaaaaatccatttgctccaacattgcattttaactaccgttactttgagacagatgcacccaaagatgcacctggtgcaccaagacagtggtggtttggcggtggtactgacttgactccctcatacatcattgaagaggacgtgaagcattttcattctgttcaaaagcaagcatgtgataaatttgatccaagttttcacccaagattcaaaaaatggtgtgatgattatttctatattaagcaccgtaacgagcggcgtgggcttggtggaatattttttgatgaccttaatgattacgatcaagaaatgcttctcaacttcgctacaagtgaaaccatttgctagaatgattggatggaattatttgtattcagatgtggagatgtctgatgcagggaacaacaggtctaagaccttcttgaggccacttggcagcattagcaagaagaaggtgcagcttcatttgaagatcaagaaagacaagagaaaagctaggaagaagggaaagttttcttttaagaagtagaggagtgtatgataaatcatgcagttttgttcccagtttgtaaaacaaacgcactgcagtcatgtcatgtggtgcacctacctaagtccattcgtgggtgacctactattaaatatgttgaaatgggtacgaaaaaaggatagtgctgacctatcagctgtttctgttctgcgggtataaatgtcaagtactcaaattgctgagatttggtttcattttcacattgtatcgtggtgaaccatgtttggaaacaatggccttgtttggcacagctgctgcttgttgaaaaactggtaaaaagcagcttctgtttgttggctgtttttagtgtattttgagaagcagctgaactgataagctgctgcaaaagctagctgtttggtagaacttctgcttaaattatgaagaagctgaaaataagctgtgccaaacagggcctgatgtcgagcacttagggagcatatgaactgtcatttgttgtcactcataggcctgctaatggcaaaaaatccaatccactcccacccatacctaaatctaattactttgatatccatcccacacccaaccaaaaatactagaggaaagttaaactcaacccaaaccgacccgtaattgggtggaaacccatggaaaacccgtgggtttagcttattgtctcacatcaagccaactgcatacatattttaaaaatcacattttaaagcagtaaattaatttaaataaaaaagttttcaactacaaatttgtataactcatcatgatgtacattttatatttcgaacatttcttcatatgataaactaaaaataaatttgttcatacgacctatatctctctcatagtttatggaactacgagatatatgtatagaatttgtgcatattgttagaactatcatgtgagatgaataaatgatcaaacaaccaaaataaactttgtagatcttgaaaagttataaaagtttgtagttgacaactttttcatttgaagtcatattgtcaacgaaaattatgcctgaatttaaaaaatttaaaatttgaattttgaaaacaacctcgaaagaaaaaa

SEQ ID NO: 15054 - DNA, 1666 bp, Zea Mays
ctcgctctcgctccctccacctccctccccccttgaccctcccagccgcaaaaccgcaggccgcatcccgcccgccgcccgccgcccacctgtggcaaccgccgcctacataaacgaccaatcgaccactcgccgaaccaagccacccacccaaaacccaatggcgtccaacctcctatccgcggtggcaatcgagaaggagacgccggagagcgagctgcccccgacgttcctccgcgaggacgggcgcggcgccgggtccgtgcgggcgcggttcgagtccatgatacggcgggtgcagggggaggtctgcgccgcgctcgaggaggcagatggcggtggggcgcgcttcgtcgaggacgtctggtcgcgccccggcggcggcggcggcatcagccgggtcctgcaggacggccgcgtcttcgagaaggccggggtcaacgtctccgtcgtctacggggtcatgccacccgacgcctaccgcgccgccaagggggaggccggcaagaacgaggtcgccgcggatggccacaagcctggccccgtgccattcttcgctgcgggtattagctcggtgcttcaccccaaaaatccatttgctccaacattgcattttaactaccgttactttgagacagatgcacccaaagatgcacctggtgcaccaagacagtggtggtttggcggtggtactgacttgactccctcatacatcattgaagaggacgtgaagcattttcattctgttcaaaagcaagcatgtgataaatttgatccaagttttcacccaagattcaaaaaatggtgtgatgattatttctatattaagcaccgtaacgagcggcgtgggcttggtggaatattttttgatgaccttaatgattacgatcaagaaatgcttctcaacttcgctacaagtgaaaccatttgctagaatgattggatggaattatttgtattcagaatgtgcggactctgtacttcctgcctacataccgatcatagaacggcggaaggacaccccattcaatgaggagcacaaggaatggcagcagttgaggagaggtcgttatgtggagttcaaccttgtctacgaccgtggtacaacattcggcctaaagactggaggaagaatcgagagcatactcgtgtcccttccactcacagcacggtggcagtatgatcataaaccggaagaagggactgaagaatggaaacttctggacgcgtgcataaatccgaaggattggatctgattagccgaagtttctttattcttgagatcttttgttagttttcccttgtgtagcgctaagatatcagaccacgtgtagtttctttatttcttttgtatatctgtaggatcgtgaacaaatctgatataattctgcagctgtttgtatctaatctgctgctcccccccttccccccccccccatgtgaatgagagaatcattgccttgtgtatctacaaaggcttcaggtgtatcatttacctcctgcctattggaaatactcactgatgcaggcaggtctgtatatacccatagtgcttgatgttgtgcatcaacagcaacaaatagtttaaattgtttagggccacaaaacatttacagtttcaacaattgagccttatcatattattaggaaataaatcatgttattt

SEQ ID NO: 15055 - DNA, 1616 bp, Zea Mays
ctctcgctccctccacctccctccccccttgaccctcccagccgcaaaaccgcaggccgcatcccgcccgccgcccgccgcccacctgtggcaaccgccgcctacataaacgaccaatcgaccactcgccgaaccaagccacccacccaaaacccaatggcgtccaacctcctatccgcggtggcaatcgagaaggagacgccggagagcgagctgcccccgacgttcctccgcgaggacgggcgcggcgccgggtccgtgcgggcgcggttcgagtccatgatacggcgggtgcagggggaggtctgcgccgcgctcgaggaggcagatggcggtggggcgcgcttcgtcgaggacgtctggtcgcgccccggcggcggcggcggcatcagccgggtcctgcaggacggccgcgtcttcgagaaggccggggtcaacgtctccgtcgtctacggggtcatgccacccgacgcctaccgcgccgccaagggggaggccggcaagaacgaggtcgccgcggatggccacaagcctggccccgtgccattcttcgctgcgggtattagctcggtgcttcaccccaaaaatccatttgctccaacattgcattttaactaccgttactttgagacagatgcacccaaagatgcacctggtgcaccaagacagtggtggtttggcggtggtactgacttgactccctcatacatcattgaagaggacgtgaagcattttcattctgttcaaaagcaagcatgtgataaatttgatccaagttttcacccaagattcaaaaaatggtgtgatgattatttctatattaagcaccgtaacgagcggcgtgggcttggtggaatattttttgatgaccttaatgattacgatcaagaaatgcttctcaacttcgctacaaaatgtgcggactctgtacttcctgcctacataccgatcatagaacggcggaaggacaccccattcaatgaggagcacaaggaatggcagcagttgaggagaggtcgttatgtggagttcaaccttgtctacgaccgtggtacaacattcggcctaaagactggaggaagaatcgagagcatactcgtgtcccttccactcacagcacggtggcagtatgatcataaaccggaagaagggactgaagaatggaaacttctggacgcgtgcataaatccgaaggattggatctgattagccgaagtttctttattcttgagatcttttgttagttttcccttgtgtagcgctaagatatcagaccacgtgtagtttctttatttcttttgtatatctgtaggatcgtgaacaaatctgatataattctgcagctgtttgtatctaatctgctgctcccccccttccccccccccccatgtgaatgagagaatcattgccttgtgtatctacaaaggcttcaggtgtatcatttacctcctgcctattggaaatactcactgatgcaggcaggtctgtatatacccatagtgcttgatgttgtgcatcaacagcaacaaatagtttaaattgtttagggccacaaaacatttacagtttcaacaattgagccttatcatattattaggaaataaatcatgttattt

SEQ ID NO: 15056 - DNA, 1500 bp, Zea Mays
ccagccgcaaaaccgcaggccgcatcccgcccgccgcccgccgcccacctgtggcaaccgccgcctacataaacgaccaatcgaccactcgccgaaccaagccacccacccaaaacccaatggcgtccaacctcctatccgcggtggcaatcgagaaggagacgccggagagcgagctgcccccgacgttcctccgcgaggacgggcgcggcgccgggtccgtgcgggcgcggttcgagtccatgatacggcgggtgcagggggaggtctgcgccgcgctcgaggaggcagatggcggtggggcgcgcttcgtcgaggacgtctggtcgcgccccggcggcggcggcggcatcagccgggtcctgcaggacggccgcgtcttcgagaaggccggggtcaacgtctccgtcgtctacggggtcatgccacccgacgcctaccgcgccgccaagggggaggccggcaagaacgaggtcgccgcggatggccacaagcctggccccgtgccattcttcgctgcgggtattagctcggtgcttcaccccaaaaatccatttgctccaacattgcattttaactaccgttactttgagacagatgcacccaaagatgcacctggtgcaccaagacagtggtggtttggcggtggtactgacttgactccctcatacatcattgaagaggacgtgaagcattttcattctgttcaaaagcaagcatgtgataaatttgatccaagttttcacccaagattcaaaaaatggtgtgatgattatttctatattaagcaccgtaacgagcggcgtgggcttggtggaatattttttgatgaccttaatgattacgatcaagaaatgcttctcaacttcgctacaagtgaaaccatttgctagaatgattggatggaattatttgtattcaggtctacgaccgtggtacaacattcggcctaaagactggaggaagaatcgagagcatactcgtgtcccttccactcacagcacggtggcagtatgatcataaaccggaagaagggactgaagaatggaaacttctggacgcgtgcataaatccgaaggattggatctgattagccgaagtttctttattcttgagatcttttgttagttttcccttgtgtagcgctaagatatcagaccacgtgtagtttctttatttcttttgtatatctgtaggatcgtgaacaaatctgatataattctgcagctgtttgtatctaatctgctgctcccccccttccccccccccccatgtgaatgagagaatcattgccttgtgtatctacaaaggcttcaggtgtatcatttacctcctgcctattggaaatactcactgatgcaggcaggtctgtatatacccatagtgcttgatgttgtgcatcaacagcaacaaatagtttaaattgtttagggccacaaaacatttacagtttcaacaattgagccttatcatattattaggaaataaatcatgttattt

SEQ ID NO: 15057 - DNA, 1900 bp, Zea Mays
tgccacccgacgcctaccgcgccgccaagggggaggccggcaagaacgaggtcgccgcggatggccacaagcctggccccgtgccattcttcgctgcgggtattagctcggtgcttcaccccaaaaatccatttgctccaacattgcattttaactaccgttactttgagacagatgcacccaaagatgcacctggtgcaccaagacagtggtggtttggcggtggtactgacttgactccctcatacatcattgaagaggacgtgaagcattttcattctgttcaaaagcaagcatgtgataaatttgatccaagttttcacccaagattcaaaaaatggtgtgatgattatttctatattaagcaccgtaacgagcggcgtgggcttggtggaatattttttgatgaccttaatgattacgatcaagaaatgcttctcaacttcgctacaaaatgtgcggactctgtacttcctgcctacataccgatcatagaacggcggaaggacaccccattcaatgaggagcacaaggaatggcagcagttgaggagaggtcgttatgtggagttcaaccttgtctacgaccgtggtacaacattcggcctaaagactggaggaagaatcgagagcatactcgtgtcccttccactcacagcacggtggcagtatgatcatatgtggagatgtctgatgcagggaacaacaggtctaagaccttcttgaggccacttggcagcattagcaagaagaaggtgcagcttcatttgaagatcaagaaagacaagagaaaagctaggaagaagggaaagttttcttttaagaagtagaggagtgtatgataaatcatgcagttttgttcccagtttgtaaaacaaacgcactgcagtcatgtcatgtggtgcacctacctaagtccattcgtgggtgacctactattaaatatgttgaaatgggtacgaaaaaaggatagtgctgacctatcagctgtttctgttctgcgggtataaatgtcaagtactcaaattgctgagatttggtttcattttcacattgtatcgtggtgaaccatgtttggaaacaatggccttgtttggcacagctgctgcttgttgaaaaactggtaaaaagcagcttctgtttgttggctgtttttagtgtattttgagaagcagctgaactgataagctgctgcaaaagctagctgtttggtagaacttctgcttaaattatgaagaagctgaaaataagctgtgccaaacagggcctgatgtcgagcacttagggagcatatgaactgtcatttgttgtcactcataggcctgctaatggcaaaaaatccaatccactcccacccatacctaaatctaattactttgatatccatcccacacccaaccaaaaatactagaggaaagttaaactcaacccaaaccgacccgtaattgggtggaaacccatggaaaacccgtgggtttagcttattgtctcacatcaagccaactgcatacatattttaaaaatcacattttaaagcagtaaattaatttaaataaaaaagttttcaactacaaatttgtataactcatcatgatgtacattttatatttcgaacatttcttcatatgataaactaaaaataaatttgttcatacgacctatatctctctcatagtttatggaactacgagatatatgtatagaatttgtgcatattgttagaactatcatgtgagatgaataaatgatcaaacaaccaaaataaactttgtagatcttgaaaagttataaaagtttgtagttgacaactttttcatttgaagtcatattgtcaacgaaaattatgcctgaatttaaaaaatttaaaatttgaattttgaaaacaacctcgaaagaaaaaa

SEQ ID NO: 15058 - DNA, 1569 bp, Zea Mays
cgccgccaagggggaggccggcaagaacgaggtcgccgcggatggccacaagcctggccccgtgccattcttcgctgcgggtattagctcggtgcttcaccccaaaaatccatttgctccaacattgcattttaactaccgttactttgagacagatgcacccaaagatgcacctggtgcaccaagacagtggtggtttggcggtggtactgacttgactccctcatacatcattgaagaggacgtgaagcattttcattctgttcaaaagcaagcatgtgataaatttgatccaagttttcacccaagattcaaaaaatggtgtgatgattatttctatattaagatgtggagatgtctgatgcagggaacaacaggtctaagaccttcttgaggccacttggcagcattagcaagaagaaggtgcagcttcatttgaagatcaagaaagacaagagaaaagctaggaagaagggaaagttttcttttaagaagtagaggagtgtatgataaatcatgcagttttgttcccagtttgtaaaacaaacgcactgcagtcatgtcatgtggtgcacctacctaagtccattcgtgggtgacctactattaaatatgttgaaatgggtacgaaaaaaggatagtgctgacctatcagctgtttctgttctgcgggtataaatgtcaagtactcaaattgctgagatttggtttcattttcacattgtatcgtggtgaaccatgtttggaaacaatggccttgtttggcacagctgctgcttgttgaaaaactggtaaaaagcagcttctgtttgttggctgtttttagtgtattttgagaagcagctgaactgataagctgctgcaaaagctagctgtttggtagaacttctgcttaaattatgaagaagctgaaaataagctgtgccaaacagggcctgatgtcgagcacttagggagcatatgaactgtcatttgttgtcactcataggcctgctaatggcaaaaaatccaatccactcccacccatacctaaatctaattactttgatatccatcccacacccaaccaaaaatactagaggaaagttaaactcaacccaaaccgacccgtaattgggtggaaacccatggaaaacccgtgggtttagcttattgtctcacatcaagccaactgcatacatattttaaaaatcacattttaaagcagtaaattaatttaaataaaaaagttttcaactacaaatttgtataactcatcatgatgtacattttatatttcgaacatttcttcatatgataaactaaaaataaatttgttcatacgacctatatctctctcatagtttatggaactacgagatatatgtatagaatttgtgcatattgttagaactatcatgtgagatgaataaatgatcaaacaaccaaaataaactttgtagatcttgaaaagttataaaagtttgtagttgacaactttttcatttgaagtcatattgtcaacgaaaattatgcctgaatttaaaaaatttaaaatttgaattttgaaaacaacctcgaaagaaaaaa

SEQ ID NO: 15059 - DNA, 1207 bp, Zea Mays
gccaagggggaggccggcaagaacgaggtcgccgcggatggccacaagcctggccccgtgccattcttcgctgcgggtattagctcggtgcttcaccccaaaaatccatttgctccaacattgcattttaactaccgttactttgagacagatgcacccaaaggcttaaaatagatgaagtttcctagatattggtgagagaactgggttcatcttatttttatttactttaacaagatgcacctggtgcaccaagacagtggtggtttggcggtggtactgacttgactccctcatacatcattgaagaggacgtgaagcattttcattctgttcaaaagcaagcatgtgataaatttgatccaagttttcacccaagattcaaaaaatggtgtgatgattatttctatattaagcaccgtaacgagcggcgtgggcttggtggaatattttttgatgaccttaatgattacgatcaagaaatgcttctcaacttcgctacaaaatgtgcggactctgtacttcctgcctacataccgatcatagaacggcggaaggacaccccattcaatgaggagcacaaggaatggcagcagttgaggagaggtcgttatgtggagttcaaccttgtctacgaccgtggtacaacattcggcctaaagactggaggaagaatcgagagcatactcgtgtcccttccactcacagcacggtggcagtatgatcataaaccggaagaagggactgaagaatggaaacttctggacgcgtgcataaatccgaaggattggatctgattagccgaagtttctttattcttgagatcttttgttagttttcccttgtgtagcgctaagatatcagaccacgtgtagtttctttatttcttttgtatatctgtaggatcgtgaacaaatctgatataattctgcagctgtttgtatctaatctgctgctcccccccttccccccccccccatgtgaatgagagaatcattgccttgtgtatctacaaaggcttcaggtgtatcatttacctcctgcctattggaaatactcactgatgcaggcaggtctgtatatacccatagtgcttgatgttgtgcatcaacagcaacaaatagtttaaattgtttagggccacaaaacatttacagtttcaacaattgagccttatcatattattaggaaataaatcatgttattt

SEQ ID NO: 15060 - DNA, 1103 bp, Zea Mays
cacatgggcactccaaaggctgaagtagtcgcgtgcgttttaggccaggaatccaacgtgcttcaccccaaaaatccatttgctccaacattgcattttaactaccgttactttgagacagatgcacccaaagatgcacctggtgcaccaagacagtggtggtttggcggtggtactgacttgactccctcatacatcattgaagaggacgtgaagcattttcattctgttcaaaagcaagcatgtgataaatttgatccaagttttcacccaagattcaaaaaatggtgtgatgattatttctatattaagcaccgtaacgagcggcgtgggcttggtggaatattttttgatgaccttaatgattacgatcaagaaatgcttctcaacttcgctacaaaatgtgcggactctgtacttcctgcctacataccgatcatagaacggcggaaggacaccccattcaatgaggagcacaaggaatggcagcagttgaggagaggtcgttatgtggagttcaaccttgtctacgaccgtggtacaacattcggcctaaagactggaggaagaatcgagagcatactcgtgtcccttccactcacagcacggtggcagtatgatcataaaccggaagaagggactgaagaatggaaacttctggacgcgtgcataaatccgaaggattggatctgattagccgaagtttctttattcttgagatcttttgttagttttcccttgtgtagcgctaagatatcagaccacgtgtagtttctttatttcttttgtatatctgtaggatcgtgaacaaatctgatataattctgcagctgtttgtatctaatctgctgctcccccccttccccccccccccatgtgaatgagagaatcattgccttgtgtatctacaaaggcttcaggtgtatcatttacctcctgcctattggaaatactcactgatgcaggcaggtctgtatatacccatagtgcttgatgttgtgcatcaacagcaacaaatagtttaaattgtttagggccacaaaacatttacagtttcaacaattgagccttatcatattattaggaaataaatcatgttattt

SEQ ID NO: 15061 - DNA, 1149 bp, Zea Mays
cacatgggcactccaaaggctgaagtagtcgcgtgcgttttaggccaggaatccaacgtgcttcaccccaaaaatccatttgctccaacattgcattttaactaccgttactttgagacagatgcacccaaagatgcacctggtgcaccaagacagtggtggtttggcggtggtactgacttgactccctcatacatcattgaagaggacgtgaagcattttcattctgttcaaaagcaagcatgtgataaatttgatccaagttttcacccaagattcaaaaaatggtgtgatgattatttctatattaagcaccgtaacgagcggcgtgggcttggtggaatattttttgatgaccttaatgattacgatcaagaaatgcttctcaacttcgctacaagtgaaaccatttgctagaatgattggatggaattatttgtattcagaatgtgcggactctgtacttcctgcctacataccgatcatagaacggcggaaggacaccccattcaatgaggagcacaaggaatggcagcagttgaggagaggtcgttatgtggagttcaaccttgtctacgaccgtggtacaacattcggcctaaagactggaggaagaatcgagagcatactcgtgtcccttccactcacagcacggtggcagtatgatcataaaccggaagaagggactgaagaatggaaacttctggacgcgtgcataaatccgaaggattggatctgattagccgaagtttctttattcttgagatcttttgttagttttcccttgtgtagcgctaagatatcagaccacgtgtagtttctttatttcttttgtatatctgtaggatcgtgaacaaatctgatataattctgcagctgtttgtatctaatctgctgctcccccccttccccccccccccatgtgaatgagagaatcattgccttgtgtatctacaaaggcttcaggtgtatcatttacctcctgcctattggaaatactcactgatgcaggcaggtctgtatatacccatagtgcttgatgttgtgcatcaacagcaacaaatagtttaaattgtttagggccacaaaacatttacagtttcaacaattgagccttatcatattattaggaaataaatcatgttattt

SEQ ID NO: 15062 - DNA, 1847 bp, Zea Mays
cacatgggcactccaaaggctgaagtagtcgcgtgcgttttaggccaggaatccaacgtgcttcaccccaaaaatccatttgctccaacattgcattttaactaccgttactttgagacagatgcacccaaagatgcacctggtgcaccaagacagtggtggtttggcggtggtactgacttgactccctcatacatcattgaagaggacgtgaagcattttcattctgttcaaaagcaagcatgtgataaatttgatccaagttttcacccaagattcaaaaaatggtgtgatgattatttctatattaagcaccgtaacgagcggcgtgggcttggtggaatattttttgatgaccttaatgattacgatcaagaaatgcttctcaacttcgctacaaaatgtgcggactctgtacttcctgcctacataccgatcatagaacggcggaaggacaccccattcaatgaggagcacaaggaatggcagcagttgaggagaggtcgttatgtggagttcaaccttgtctacgaccgtggtacaacattcggcctaaagactggaggaagaatcgagagcatactcgtgtcccttccactcacagcacggtggcagtatgatcatatgtggagatgtctgatgcagggaacaacaggtctaagaccttcttgaggccacttggcagcattagcaagaagaaggtgcagcttcatttgaagatcaagaaagacaagagaaaagctaggaagaagggaaagttttcttttaagaagtagaggagtgtatgataaatcatgcagttttgttcccagtttgtaaaacaaacgcactgcagtcatgtcatgtggtgcacctacctaagtccattcgtgggtgacctactattaaatatgttgaaatgggtacgaaaaaaggatagtgctgacctatcagctgtttctgttctgcgggtataaatgtcaagtactcaaattgctgagatttggtttcattttcacattgtatcgtggtgaaccatgtttggaaacaatggccttgtttggcacagctgctgcttgttgaaaaactggtaaaaagcagcttctgtttgttggctgtttttagtgtattttgagaagcagctgaactgataagctgctgcaaaagctagctgtttggtagaacttctgcttaaattatgaagaagctgaaaataagctgtgccaaacagggcctgatgtcgagcacttagggagcatatgaactgtcatttgttgtcactcataggcctgctaatggcaaaaaatccaatccactcccacccatacctaaatctaattactttgatatccatcccacacccaaccaaaaatactagaggaaagttaaactcaacccaaaccgacccgtaattgggtggaaacccatggaaaacccgtgggtttagcttattgtctcacatcaagccaactgcatacatattttaaaaatcacattttaaagcagtaaattaatttaaataaaaaagttttcaactacaaatttgtataactcatcatgatgtacattttatatttcgaacatttcttcatatgataaactaaaaataaatttgttcatacgacctatatctctctcatagtttatggaactacgagatatatgtatagaatttgtgcatattgttagaactatcatgtgagatgaataaatgatcaaacaaccaaaataaactttgtagatcttgaaaagttataaaagtttgtagttgacaactttttcatttgaagtcatattgtcaacgaaaattatgcctgaatttaaaaaatttaaaatttgaattttgaaaacaacctcgaaagaaaaaa

SEQ ID NO: 15063 - DNA, 1768 bp, Zea Mays
cacatgggcactccaaaggctgaagtagtcgcgtgcgttttaggccaggaatccaacgtgcttcaccccaaaaatccatttgctccaacattgcattttaactaccgttactttgagacagatgcacccaaagatgcacctggtgcaccaagacagtggtggtttggcggtggtactgacttgactccctcatacatcattgaagaggacgtgaagcattttcattctgttcaaaagcaagcatgtgataaatttgatccaagttttcacccaagattcaaaaaatggtgtgatgattatttctatattaagcaccgtaacgagcggcgtgggcttggtggaatattttttgatgaccttaatgattacgatcaagaaatgcttctcaacttcgctacaagtgaaaccatttgctagaatgattggatggaattatttgtattcaggtctacgaccgtggtacaacattcggcctaaagactggaggaagaatcgagagcatactcgtgtcccttccactcacagcacggtggcagtatgatcatatgtggagatgtctgatgcagggaacaacaggtctaagaccttcttgaggccacttggcagcattagcaagaagaaggtgcagcttcatttgaagatcaagaaagacaagagaaaagctaggaagaagggaaagttttcttttaagaagtagaggagtgtatgataaatcatgcagttttgttcccagtttgtaaaacaaacgcactgcagtcatgtcatgtggtgcacctacctaagtccattcgtgggtgacctactattaaatatgttgaaatgggtacgaaaaaaggatagtgctgacctatcagctgtttctgttctgcgggtataaatgtcaagtactcaaattgctgagatttggtttcattttcacattgtatcgtggtgaaccatgtttggaaacaatggccttgtttggcacagctgctgcttgttgaaaaactggtaaaaagcagcttctgtttgttggctgtttttagtgtattttgagaagcagctgaactgataagctgctgcaaaagctagctgtttggtagaacttctgcttaaattatgaagaagctgaaaataagctgtgccaaacagggcctgatgtcgagcacttagggagcatatgaactgtcatttgttgtcactcataggcctgctaatggcaaaaaatccaatccactcccacccatacctaaatctaattactttgatatccatcccacacccaaccaaaaatactagaggaaagttaaactcaacccaaaccgacccgtaattgggtggaaacccatggaaaacccgtgggtttagcttattgtctcacatcaagccaactgcatacatattttaaaaatcacattttaaagcagtaaattaatttaaataaaaaagttttcaactacaaatttgtataactcatcatgatgtacattttatatttcgaacatttcttcatatgataaactaaaaataaatttgttcatacgacctatatctctctcatagtttatggaactacgagatatatgtatagaatttgtgcatattgttagaactatcatgtgagatgaataaatgatcaaacaaccaaaataaactttgtagatcttgaaaagttataaaagtttgtagttgacaactttttcatttgaagtcatattgtcaacgaaaattatgcctgaatttaaaaaatttaaaatttgaattttgaaaacaacctcgaaagaaaaaa

SEQ ID NO: 15064 - DNA, 1893 bp, Zea Mays
cacatgggcactccaaaggctgaagtagtcgcgtgcgttttaggccaggaatccaacgtgcttcaccccaaaaatccatttgctccaacattgcattttaactaccgttactttgagacagatgcacccaaagatgcacctggtgcaccaagacagtggtggtttggcggtggtactgacttgactccctcatacatcattgaagaggacgtgaagcattttcattctgttcaaaagcaagcatgtgataaatttgatccaagttttcacccaagattcaaaaaatggtgtgatgattatttctatattaagcaccgtaacgagcggcgtgggcttggtggaatattttttgatgaccttaatgattacgatcaagaaatgcttctcaacttcgctacaagtgaaaccatttgctagaatgattggatggaattatttgtattcagaatgtgcggactctgtacttcctgcctacataccgatcatagaacggcggaaggacaccccattcaatgaggagcacaaggaatggcagcagttgaggagaggtcgttatgtggagttcaaccttgtctacgaccgtggtacaacattcggcctaaagactggaggaagaatcgagagcatactcgtgtcccttccactcacagcacggtggcagtatgatcatatgtggagatgtctgatgcagggaacaacaggtctaagaccttcttgaggccacttggcagcattagcaagaagaaggtgcagcttcatttgaagatcaagaaagacaagagaaaagctaggaagaagggaaagttttcttttaagaagtagaggagtgtatgataaatcatgcagttttgttcccagtttgtaaaacaaacgcactgcagtcatgtcatgtggtgcacctacctaagtccattcgtgggtgacctactattaaatatgttgaaatgggtacgaaaaaaggatagtgctgacctatcagctgtttctgttctgcgggtataaatgtcaagtactcaaattgctgagatttggtttcattttcacattgtatcgtggtgaaccatgtttggaaacaatggccttgtttggcacagctgctgcttgttgaaaaactggtaaaaagcagcttctgtttgttggctgtttttagtgtattttgagaagcagctgaactgataagctgctgcaaaagctagctgtttggtagaacttctgcttaaattatgaagaagctgaaaataagctgtgccaaacagggcctgatgtcgagcacttagggagcatatgaactgtcatttgttgtcactcataggcctgctaatggcaaaaaatccaatccactcccacccatacctaaatctaattactttgatatccatcccacacccaaccaaaaatactagaggaaagttaaactcaacccaaaccgacccgtaattgggtggaaacccatggaaaacccgtgggtttagcttattgtctcacatcaagccaactgcatacatattttaaaaatcacattttaaagcagtaaattaatttaaataaaaaagttttcaactacaaatttgtataactcatcatgatgtacattttatatttcgaacatttcttcatatgataaactaaaaataaatttgttcatacgacctatatctctctcatagtttatggaactacgagatatatgtatagaatttgtgcatattgttagaactatcatgtgagatgaataaatgatcaaacaaccaaaataaactttgtagatcttgaaaagttataaaagtttgtagttgacaactttttcatttgaagtcatattgtcaacgaaaattatgcctgaatttaaaaaatttaaaatttgaattttgaaaacaacctcgaaagaaaaaa

SEQ ID NO: 15065 - DNA, 1475 bp, Zea Mays
cttaaaatagatgaagtttcctagatattggtgagagaactgggttcatcttatttttatttactttaacaagatgcacctggtgcaccaagacagtggtggtttggcggtggtactgacttgactccctcatacatcattgaagaggacgtgaagcattttcattctgttcaaaagcaagcatgtgataaatttgatccaagttttcacccaagattcaaaaaatggtgtgatgattatttctatattaagatgtggagatgtctgatgcagggaacaacaggtctaagaccttcttgaggccacttggcagcattagcaagaagaaggtgcagcttcatttgaagatcaagaaagacaagagaaaagctaggaagaagggaaagttttcttttaagaagtagaggagtgtatgataaatcatgcagttttgttcccagtttgtaaaacaaacgcactgcagtcatgtcatgtggtgcacctacctaagtccattcgtgggtgacctactattaaatatgttgaaatgggtacgaaaaaaggatagtgctgacctatcagctgtttctgttctgcgggtataaatgtcaagtactcaaattgctgagatttggtttcattttcacattgtatcgtggtgaaccatgtttggaaacaatggccttgtttggcacagctgctgcttgttgaaaaactggtaaaaagcagcttctgtttgttggctgtttttagtgtattttgagaagcagctgaactgataagctgctgcaaaagctagctgtttggtagaacttctgcttaaattatgaagaagctgaaaataagctgtgccaaacagggcctgatgtcgagcacttagggagcatatgaactgtcatttgttgtcactcataggcctgctaatggcaaaaaatccaatccactcccacccatacctaaatctaattactttgatatccatcccacacccaaccaaaaatactagaggaaagttaaactcaacccaaaccgacccgtaattgggtggaaacccatggaaaacccgtgggtttagcttattgtctcacatcaagccaactgcatacatattttaaaaatcacattttaaagcagtaaattaatttaaataaaaaagttttcaactacaaatttgtataactcatcatgatgtacattttatatttcgaacatttcttcatatgataaactaaaaataaatttgttcatacgacctatatctctctcatagtttatggaactacgagatatatgtatagaatttgtgcatattgttagaactatcatgtgagatgaataaatgatcaaacaaccaaaataaactttgtagatcttgaaaagttataaaagtttgtagttgacaactttttcatttgaagtcatattgtcaacgaaaattatgcctgaatttaaaaaatttaaaatttgaattttgaaaacaacctcgaaagaaaaaa

SEQ ID NO: 15066 - DNA, 1063 bp, Zea Mays
attggtgagagaactgggttcatcttatttttatttactttaacaagatgcacctggtgcaccaagacagtggtggtttggcggtggtactgacttgactccctcatacatcattgaagaggacgtgaagcattttcattctgttcaaaagcaagcatgtgataaatttgatccaagttttcacccaagattcaaaaaatggtgtgatgattatttctatattaagcaccgtaacgagcggcgtgggcttggtggaatattttttgatgaccttaatgattacgatcaagaaatgcttctcaacttcgctacaagtgaaaccatttgctagaatgattggatggaattatttgtattcagaatgtgcggactctgtacttcctgcctacataccgatcatagaacggcggaaggacaccccattcaatgaggagcacaaggaatggcagcagttgaggagaggtcgttatgtggagttcaaccttgtctacgaccgtggtacaacattcggcctaaagactggaggaagaatcgagagcatactcgtgtcccttccactcacagcacggtggcagtatgatcataaaccggaagaagggactgaagaatggaaacttctggacgcgtgcataaatccgaaggattggatctgattagccgaagtttctttattcttgagatcttttgttagttttcccttgtgtagcgctaagatatcagaccacgtgtagtttctttatttcttttgtatatctgtaggatcgtgaacaaatctgatataattctgcagctgtttgtatctaatctgctgctcccccccttccccccccccccatgtgaatgagagaatcattgccttgtgtatctacaaaggcttcaggtgtatcatttacctcctgcctattggaaatactcactgatgcaggcaggtctgtatatacccatagtgcttgatgttgtgcatcaacagcaacaaatagtttaaattgtttagggccacaaaacatttacagtttcaacaattgagccttatcatattattaggaaataaatcatgttattt

SEQ ID NO: 15067 - DNA, 915 bp, Zea Mays
cttatttttatttactttaacaagatgcacctggtgcaccaagacagtggtggtttggcggtggtactgacttgactccctcatacatcattgaagaggacgtgaagcattttcattctgttcaaaagcaagcatgtgataaatttgatccaagttttcacccaagattcaaaaaatggtgtgatgattatttctatattaagcaccgtaacgagcggcgtgggcttggtggaatattttttgatgaccttaatgattacgatcaagaaatgcttctcaacttcgctacaagtgaaaccatttgctagaatgattggatggaattatttgtattcaggtctacgaccgtggtacaacattcggcctaaagactggaggaagaatcgagagcatactcgtgtcccttccactcacagcacggtggcagtatgatcataaaccggaagaagggactgaagaatggaaacttctggacgcgtgcataaatccgaaggattggatctgattagccgaagtttctttattcttgagatcttttgttagttttcccttgtgtagcgctaagatatcagaccacgtgtagtttctttatttcttttgtatatctgtaggatcgtgaacaaatctgatataattctgcagctgtttgtatctaatctgctgctcccccccttccccccccccccatgtgaatgagagaatcattgccttgtgtatctacaaaggcttcaggtgtatcatttacctcctgcctattggaaatactcactgatgcaggcaggtctgtatatacccatagtgcttgatgttgtgcatcaacagcaacaaatagtttaaattgtttagggccacaaaacatttacagtttcaacaattgagccttatcatattattaggaaataaatcatgttattt

SEQ ID NO: 15068 - DNA, 692 bp, Zea Mays
cttttccgtcgtgtcgtggtaggctgtaggcaggcacctccgctcctgtcctcttctctcgtggataagccatgccaggagtgatcacaaagttcgcggttacatccatggtgatgtggatggccccggttgcgatcgtttatgggttctactaccaggcgtttccaggtgtgagtcggatgtcatcctcggcgcagacactcgccagcgggttcctggctgtcatatcggttaatctggtgatcggcttgtacatattcatggcgatgaaggagactcgacaccaggagccacagccagacccgaccttcctggcaaacgccaaagcgagtatcaaccagccaacatcctctcaaccgagtgatgattccaaggggaagggaaaggttgagtaagccgtagcatgtcatgttgatttttggtcttgtgtatgttaagtgcgtgctgtttaggaggaatagttgtgcgtgcacgccataacacaacatcgcaatctttaaagttcatgattttgctgtaattcttgacagttatggtcatggagcaatgtgaagttgaaacttttgtccgtattcgatttggaaactctgttcattgttattttagttaggatgctcatcggaagcacgtctggttgtatttaggtctttttggtcttggggtttgattctatataagtatgtgccttgaac

SEQ ID NO: 15069 - DNA, 748 bp, Zea Mays
ggcctctgcttagccgctcgccgtcgctagctcagcccagtttgactgagaaggctttcctcaagcagcctaaggtgttcctcagctcaaagaaatctggcaagggtaagaagccaggcaagggtggcaatcgattttggaagagcattggccttggtttcaagactcccagggaagcaattgaagggacctacattgacaagaaatgtccattcactggaaccgtttctatcagaggcagaattattgctggaacatgccacagtgctaagatgaacagaaccatcattgttcgcaggaactatctccactttgttaagaaataccagaggtatgaaaagaggcactccaacattccagctcacatctccccatgcttccgtgtgaaggaaggcgaccatgtcatcattggccagtgcaggcccctatcaaaaactgtgaggttcaatgtcgtcaaagtcattccagctggatctgctgctgccggcaagaaggctttcaccgcagcctgagtttaagactatgttccatgagtagtttatatagtgatgtctttttttgttaaaaaaactgccttctaggcttgtgcctttcgactatggtttggagattgttcccatcttaatgaagtccaatcatctgaacatgttactgtttattgtaccttgtcgtgcaaagttttgcaagatctgtattgtttcctccctgcggtgaatgtggtctggcaagcatactttggtttctatca

SEQ ID NO: 15070 - DNA, 1326 bp, Zea Mays
gttttagtttgagttgtaataattgaacagccacatacatctattggtgcagaagccggaatatttcaatatattctctattcttaaaaaaaactttagtcccaagctaacatgtacatatcctacccaaaaaagactagggatttatatgagaacagaagaagaagtacaagcccctcactatctcccatcagatagacattcagatgtagtatatctgcccgacattgagcaggctctcatgaggcacgttgaagatgacgctgttctccctgcacatcctcctcatgaaggcgtacatgtagtcgacggcgagcttcttcacgacgcccgagtcccgccgcgcgcgtacgatggtgttcccgaggatgtgcaccacgccggcgtccttgcaccggttcaggaactcgagctcgtcgcccaccgtgccgcagctgcccgcctgccccgccgacgccgacgccgacgccgagcactgcagcagccgtagccccctcggcgccggcgactgcgcggcgggcacgatcgagtcctgcgacgagaagctcagctcgccgttggagcacatggtcgagcacgtccgctcgccgccctgcaggaacgccgccgccgggccgccgcggccggagccggagccagagccaggcggcgcctgctccggcacgctgaactcgtccgagtcggagtagccctccatcatgctctccagccggacgaagaagaggacgcagtcgaacagcatcctctcgaagtcctcgtccctcttgtgcaggtccttgtacccgtacctcgccacgcaccggaacatgtggaagtccctgggcccgatcctccgcaccaggaaccgctcctccgtcggcaccgtgtacacggggaggtacttgacgcacacgaacaccaccaccgagtggatcgcgggcaggttggtgatgaagtgggagaagatgtgcggcacgccgctcgccagctccgtgtacacgaacccgatcccggggaccctcaccaggcccaggctcgggcccaggcccaggatccacgccatggacaccttgctgtgcatctcgaactcgtaccgcttcaccgtgcagaaatgccacacgtacatgatgaggaagaaggccgtcgccaccaccagcggcacccagccgccctggtcgatcttcagtatgcaggccacgaagtagggaacctccaccatcagcgacagcacgatgaaggtcaccacgaggatccagtggctcttccataccagcagcattattggcaccatgaggaatgtcgtgactagcatgactataaccaccgcagtaccgtatgcgtttccta

SEQ ID NO: 15071 - DNA, 1690 bp, Zea Mays
aaggtaagaatgacgttttccgcagaaaacaatttggtccactcgtaggctttctttccttgaatgactcatgtgtgtcaaagacaaggccacgcaaactagcaaccggtgccacgcaaactgccaactgccatcttcttccccagccgctgtgcccgtccccctgccaccaaggtccaaggtctccggagcgcgacctggctgcaacgcaggcaatggagtcgccgttccgcgcggacctgctgagggggaaggcggcgctggtcacgggcgggggctccggcatcggcttcgagatcgccgcgcagctcgcgcgccacggcgcgcacgtcgcactcatgggccgccgccgcgaggtcctcgacaaggccgtcgccgcgctccggtccgagggcctcagggctgttggttttgacggggatgtccgaaagcaagaggatgctgccagagtgatcgcagcaacggttgagcattttggcaaactggacattcttgtcaatggtgctgccggcaacttccttgcctccccggaggatttgaagcccaagggattccggactggtactccgtcatgacttttttgattcattcttgacattgacactgtgggtacatacacaatgtgttatgaagccctcaagtatctcaaaaagggtggaccagggagaggtccttcctctggtggcctcatcattaacataagcgcaacgctgcaatacactgccgcttggtaccaaattcatgtctctgctgccaaggctggcgttgacggtatcacaagatcattggctctggaatggggaacagattacgacattagagtaaatggaattgcacctggaccaattcaagacactccaggaatgaggaaacttgcacctgaagaaatgggcaataaggggaaacgagaaacgatgccattatttaagcttggggagaaatgggacatagcaatggccgcactctatctagcttctgatgcaggaaaatatgtaaatggggctataattattgttgacggaggtctttggttgagtcgccctcgccatattcccaaggaggaagtgaaggcactctctaaagttgtcgagaagaaggttagggcatctggtgttggggtgccatccagcaaattgtgatgacatctttgactacgtagctcttcgatgtgttctgtacaacatatgtctatattgttgtcccactaatgttgtcagtttggctatgccaccagtccatgcagatgacttgttagggcttgttcgcttatttttaatccatatggattggaggggattgatatggattgggggagattttcacttactagggattaaaaccctctcaatccatatggattggggtagaaccgaacatggccttaagcggctgagcagtccatttagttgaagaaattcaaatatttattactgttgtcgtccaatttgtattagaaatagttgagatcggtatgggatcccaaccaagaggtgcgtattgccaaatatttacatgctgtctattcaggttgtcgattaaaagggtcatattaaagatttaacagtttgcgtctccccactgttgcaactctatgcaaatggttcacctcaacatgtgtgcaaatcatgacaaattggatgccggcagttgcaactagcctgaagttcagagaaataagagaaactgcatg

SEQ ID NO: 15072 - DNA, 1840 bp, Zea Mays
aaggtaagaatgacgttttccgcagaaaacaatttggtccactcgtaggctttctttccttgaatgactcatgtgtgtcaaagacaaggccacgcaaactagcaaccggtgccacgcaaactgccaactgccatcttcttccccagccgctgtgcccgtccccctgccaccaaggtccaaggtctccggagcgcgacctggctgcaacgcaggcaatggagtcgccgttccgcgcggacctgctgagggggaaggcggcgctggtcacgggcgggggctccggcatcggcttcgagatcgccgcgcagctcgcgcgccacggcgcgcacgtcgcactcatgggccgccgccgcgaggtcctcgacaaggccgtcgccgcgctccggtccgagggcctcaggggctgcaggcaggcgaacactttgtagttgtaactttggagtttaatattgccaatgcctctacttatcaaatgaaattcacaatgctccataccatgcttcaggctagtaaacaattcagcaacccaagattgttgtgacttgcaggctgttggttttgacggggatgtccgaaagcaagaggatgctgccagagtgatcgcagcaacggttgagcattttggcaaactggacattcttgtcaatggtgctgccggcaacttccttgcctccccggaggatttgaagcccaagggattccggactggtactccgtcatgacttttttgattcagtgttcttgacattgacactgtgggtacatacacaatgtgttatgaagccctcaagtatctcaaaaagggtggaccagggagaggtccttcctctggtggcctcatcattaacataagcgcaacgctgcaatacactgccgcttggtaccaaattcatgtctctgctgccaaggctggcgttgacggtatcacaagatcattggctctggaatggggaacagattacgacattagagtaaatggaattgcacctggaccaattcaagacactccaggaatgaggaaacttgcacctgaagaaatgggcaataaggggaaacgagaaacgatgccattatttaagcttggggagaaatgggacatagcaatggccgcactctatctagcttctgatgcaggaaaatatgtaaatggggctataattattgttgacggaggtctttggttgagtcgccctcgccatattcccaaggaggaagtgaaggcactctctaaagttgtcgagaagaaggttagggcatctggtgttggggtgccatccagcaaattgtgatgacatctttgactacgtagctcttcgatgtgttctgtacaacatatgtctatattgttgtcccactaatgttgtcagtttggctatgccaccagtccatgcagatgacttgttagggcttgttcgcttatttttaatccatatggattggaggggattgatatggattgggggagattttcacttactagggattaaaaccctctcaatccatatggattggggtagaaccgaacatggccttaagcggctgagcagtccatttagttgaagaaattcaaatatttattactgttgtcgtccaatttgtattagaaatagttgagatcggtatgggatcccaaccaagaggtgcgtattgccaaatatttacatgctgtctattcaggttgtcgattaaaagggtcatattaaagatttaacagtttgcgtctccccactgttgcaactctatgcaaatggttcacctcaacatgtgtgcaaatcatgacaaattggatgccggcagttgcaactagcctgaagttcagagaaataagagaaactgcatg

SEQ ID NO: 15073 - DNA, 2186 bp, Zea Mays
gtggtcacgtgccgattttccgttatcggattcagtgcggagcacgggagagattccctggtggacacgtcttcctccgcgaactgcgcccacctccgatctccccggcttgcctacaagtctccctgccccctcacttctcgcgctcttcctcttctccagcctccctctgccaacaactctcgcgagggcgccgtccgcctccgcctccgtctcggggagcgatgacgatcgcgcgacgcctgctccgatccaatgcctccgcccaggcaatcagcttactgaagcatgtaactggcactgcaagtttgcaaggccatgcacatagtccgttggatgcgtcagtcagacattttagttcagctccatctgcccagtctgacacaactgaagaaaatgggttcaagggccatggcatgttggcaccttttacagctggctggcagagcaatgatttgcatcctctaattattgagagatctgagggttcctatgtttatgacattaatgggaacaagtacctggattcttatgcagggttcctatgtttatgacatcaatgggaataaatacctggattctcttgcagggttatggtgcacagctttaggtggtagcgagcctcgattagtcaaggcagcaactgagcaattaaacaatttgcccttctaccattccttttggaaccgcacaaccaaaccttcattggaccttgcacaggagatccttagcatgttcactgcaagggaaatgggaaaagttttcttcacaaacagtggttcagaagcaaatgactctcaggtcaaactagtatggtattataacaacgcattggggaggccagacaagaagaaatttattgcacgatcaaaagcataccatggatctacactgatatcagcgagcctaactggtcttcctgccctgcaccagaagtttgatctaccagcaccttttgttctgcacactgactgccctcactactggcgatatcatcttcctggtgagacggaagaagaatttgcgactagacttgccaccaatttagagaatcttattctcaaagaaggaccagaaacaatcgctgctttcattgctgaacctgtgatgggtgccggtggtgtcatccctcctccaaagacctattttgacaaggtcatcactgcatttggaaggttgggaactatgtttggatgcgattattataacatcaagccagatctagtttccttggccaaggctctttcaaatgcctatgtacccatcggggcaactcttgttagcccagagatatcagaggtgattcactcccagagcaataagctcggctcatttgctcatgggtttacatactctggtcatccagttgcctgtgcagtggcaatagaagctttgaaactttaccgcgaaagggatattcctggtcatgtcaagcaaatcgctccaaagttccaggacggaattagggcgttggcagacagcccaatcatcggggagatacgtggcttagggatgattatgggaaccgaattcaccaacaacaaatcaccggctgatctattccctgccgaatggggggttggtgccatctttggagaggagtgccagaagcgcggcatgctggtcagggttgctggcgacgccatcatgatgtcgcccacgctgatcatgacgcccggcgaggtcgacgagctggtgagcatctacggggaagccctcagggccacggaggagagggtgtcagacctgaagatgaaatccgagaagaactaaccaaaagggcgaggacgacgacgataacgcctggcggcaacggtagcagctgatgtacaggtgaataaaatggtcgtgactgcgagatggcaataatgcgcgggaatggtcgacggtcgtctctgatcttggagtgcaaggtcaagctgctcggtcgctaaacaacggtggctgaacttttaaacgggacatagatgtttttttccctaagcaatggcagtatctcaaatgtttgctgccctgtagtttctgaacataaagggttagcagacgttataaaatttaaattttatcgtaaaacagttgttattctcattttctagtgtatcttcctctcccccctcccccaaaaaaacaattgcatgtcttgttgaacttttatgcgattgggcttagggatagcaacacaaaat

SEQ ID NO: 15074 - DNA, 2018 bp, Zea Mays
cggagcacgggagagattccctggtggacacgtcttcctccgcgaactgcgcccacctccgatctccccggcttgcctacaagtctccctgccccctcacttctcgcgctcttcctcttctccagcctccctctgccaacaactctcgcgagggcgccgtccgcctccgcctccgtctcggggagcgatgacgatcgcgcgacgcctgctccgatccaatgcctccgcccaggcaatcagcttactgaagcatgtaactggcactgcaagtttgcaaggccatgcacatagtccgttggatgcgtcagtcagacattttagttcagctccatctgcccagtctgacacaactgaagaaaatgggttcaagggccatggcatgttggcaccttttacagctggctggcagagcaatgatttgcatcctctaattattgagagatctgagggttcctatgtttatgacatcaatgggaataaatacctggattctcttgcagggttatggtgcacagctttaggtggtagcgagcctcgattagtcaaggcagcaactgagcaattaaacaatttgcccttctaccattccttttggaaccgcacaaccaaaccttcattggaccttgcacaggagatccttagcatgttcactgcaagggaaatgggaaaagttttcttcacaaacagtggttcagaagcaaatgactctcaggtcaaactagtatggtattataacaacgcattggggaggccagacaagaagaaatttattgcacgatcaaaagcataccatggatctacactgatatcagcgagcctaactggtcttcctgccctgcaccagaagtttgatctaccagcaccttttgttctgcacactgactgccctcactactggcgatatcatcttcctggtgagacggaagaagaatttgcgactagacttgccaccaatttagagaatcttattctcaaagaaggaccagaaacaatcgctgctttcattgctgaacctgtgatgggtgccggtggtgtcatccctcctccaaagacctattttgacaaggtcatcactgcatttggaaggttgggaactatgtttggatgcgattattataacatcaagccagatctagtttccttggccaaggctctttcaaatgcctatgtacccatcggggcaactcttgttagcccagagatatcagaggtgattcactcccagagcaataagctcggctcatttgctcatgggtttacatactctggtcatccagttgcctgtgcagtggcaatagaagctttgaaactttaccgcgaaagggatattcctggtcatgtcaagcaaatcgctccaaagttccaggacggaattagggcgttggcagacagcccaatcatcggggaggggttggtgccatctttggagaggagtgccagaagcgcggcatgctggtcagggttgctggcgacgccatcatgatgtcgcccacgctgatcatgacgcccggcgaggtcgacgagctggtgagcatctacggggaagccctcagggccacggaggagagggtgtcagacctgaagatgaaatccgagaagaactaaccaaaagggcgaggacgacgacgataacgcctggcggcaacggtagcagctgatgtacaggtgaataaaatggtcgtgactgcgagatggcaataatgcgcgggaatggtcgacggtcgtctctgatcttggagtgcaaggtcaagctgctcggtcgctaaacaacggtggctgaacttttaaacgggacatagatgtttttttccctaagcaatggcagtatctcaaatgtttgctgccctgtagtttctgaacataaagggttagcagacgttataaaatttaaattttatcgtaaaacagttgttattctcattttctagtgtatcttcctctcccccctcccccaaaaaaacaattgcatgtcttgttgaacttttatgcgattgggcttagggatagcaacacaaaat

SEQ ID NO: 15075 - DNA, 2146 bp, Zea Mays
attccctggtggacacgtcttcctccgcgaactgcgcccacctccgatctccccggcttgcctacaagtctccctgccccctcacttctcgcgctcttcctcttctccagcctccctctgccaacaactctcgcgagggcgccgtccgcctccgcctccgtctcggggagcgatgacgatcgcgcgacgcctgctccgatccaatgcctccgcccaggcaatcagcttactgaagcatgtaactggcactgcaagtttgcaaggccatgcacatagtccgttggatgcgtcagtcagacattttagttcagctccatctgcccagtctgacacaactgaagaaaatgggttcaagggccatggcatgttggcaccttttacagctggctggcagagcaatgatttgcatcctctaattattgagagatctgagggttcctatgtttatgacatcaatgggaataaatacctggattctcttgcagggttatggtgcacagctttaggtggtagcgagcctcgattagtcaaggcagcaactgagcaattaaacaatttgcccttctaccattccttttggaaccgcacaaccaaaccttcattggaccttgcacaggagatccttagcatgttcactgcaagggaaatgggaaaagttttcttcacaaacagtggttcagaagcaaatgactctcaggtcaaactagtatggtattataacaacgcattggggaggccagacaagaagaaatttattgcacgatcaaaagcataccatggatctacactgatatcagcgagcctaactggtcttcctgccctgcaccagaagtttgatctaccagcaccttttgttctgcacactgactgccctcactactggcgatatcatcttcctggtgagacggaagaagaatttgcgactagacttgccaccaatttagagaatcttattctcaaagaaggaccagaaacaatcgctgctttcattgctgaacctgtgatgggtgccggtggtgtcatccctcctccaaagacctattttgacaaggttcaagcagtggtcaagaagtatgacattcttttcatagcagatgaggtcatcactgcatttggaaggttgggaactatgtttggatgcgattattataacatcaagccagatctagtttccttggccaaggctctttcaaatgcctatgtacccatcggggcaactcttgttagcccagagatatcagaggtgattcactcccagagcaataagctcggctcatttgctcatgggtttacatactctggtcatccagttgcctgtgcagtggcaatagaagctttgaaactttaccgcgaaagggatattcctggtcatgtcaagcaaatcgctccaaagttccaggacggaattagggcgttggcagacagcccaatcatcggggagtgctcccgaacttcagatacgtggcttagggatgattatgggaaccgaattcaccaacaacaaatcaccggctgatctattccctgccgaatggggggttggtgccatctttggagaggagtgccagaagcgcggcatgctggtcagggttgctggcgacgccatcatgatgtcgcccacgctgatcatgacgcccggcgaggtcgacgagctggtgagcatctacggggaagccctcagggccacggaggagagggtgtcagacctgaagatgaaatccgagaagaactaaccaaaagggcgaggacgacgacgataacgcctggcggcaacggtagcagctgatgtacaggtgaataaaatggtcgtgactgcgagatggcaataatgcgcgggaatggtcgacggtcgtctctgatcttggagtgcaaggtcaagctgctcggtcgctaaacaacggtggctgaacttttaaacgggacatagatgtttttttccctaagcaatggcagtatctcaaatgtttgctgccctgtagtttctgaacataaagggttagcagacgttataaaatttaaattttatcgtaaaacagttgttattctcattttctagtgtatcttcctctcccccctcccccaaaaaaacaattgcatgtcttgttgaacttttatgcgattgggcttagggatagcaacacaaaat

SEQ ID NO: 15076 - DNA, 1998 bp, Zea Mays
attccctggtggacacgtcttcctccgcgaactgcgcccacctccgatctccccggcttgcctacaagtctccctgccccctcacttctcgcgctcttcctcttctccagcctccctctgccaacaactctcgcgagggcgccgtccgcctccgcctccgtctcggggagcgatgacgatcgcgcgacgcctgctccgatccaatgcctccgcccaggcaatcagcttactgaagcatgtaactggcactgcaagtttgcaaggccatgcacatagtccgttggatgcgtcagtcagacattttagttcagctccatctgcccagtctgacacaactgaagaaaatgggttcaagggccatggcatgttggcaccttttacagctggctggcagagcaatgatttgcatcctctaattattgagagatctgagggttcctatgtttatgacatcaatgggaataaatacctggattctcttgcagggttatggtgcacagctttaggtggtagcgagcctcgattagtcaaggcagcaactgagcaattaaacaatttgcccttctaccattccttttggaaccgcacaaccaaaccttcattggaccttgcacaggagatccttagcatgttcactgcaagggaaatgggaaaagttttcttcacaaacagtggttcagaagcaaatgactctcaggtcaaactagtatggtattataacaacgcattggggaggccagacaagaagaaatttattgcacgatcaaaagcataccatggatctacactgatatcagcgagcctaactggtcttcctgccctgcaccagaagtttgatctaccagcaccttttgttctgcacactgactgccctcactactggcgatatcatcttcctggtgagacggaagaagaatttgcgactagacttgccaccaatttagagaatcttattctcaaagaaggaccagaaacaatcgctgctttcattgctgaacctgtgatgggtgccggtggtgtcatccctcctccaaagacctattttgacaaggctctttcaaatgcctatgtacccatcggggcaactcttgttagcccagagatatcagaggtgattcactcccagagcaataagctcggctcatttgctcatgggtttacatactctggtcatccagttgcctgtgcagtggcaatagaagctttgaaactttaccgcgaaagggatattcctggtcatgtcaagcaaatcgctccaaagttccaggacggaattagggcgttggcagacagcccaatcatcggggagatacgtggcttagggatgattatgggaaccgaattcaccaacaacaaatcaccggctgatctattccctgccgaatggggggttggtgccatctttggagaggagtgccagaagcgcggcatgctggtcagggttgctggcgacgccatcatgatgtcgcccacgctgatcatgacgcccggcgaggtcgacgagctggtgagcatctacggggaagccctcagggccacggaggagagggtgtcagacctgaagatgaaatccgagaagaactaaccaaaagggcgaggacgacgacgataacgcctggcggcaacggtagcagctgatgtacaggtgaataaaatggtcgtgactgcgagatggcaataatgcgcgggaatggtcgacggtcgtctctgatcttggagtgcaaggtcaagctgctcggtcgctaaacaacggtggctgaacttttaaacgggacatagatgtttttttccctaagcaatggcagtatctcaaatgtttgctgccctgtagtttctgaacataaagggttagcagacgttataaaatttaaattttatcgtaaaacagttgttattctcattttctagtgtatcttcctctcccccctcccccaaaaaaacaattgcatgtcttgttgaacttttatgcgattgggcttagggatagcaacacaaaat

SEQ ID NO: 15077 - DNA, 2564 bp, Zea Mays
gacacgtcttcctccgcgaactgcgcccacctccgatctccccggcttgcctacaagtctccctgccccctcacttctcgcgctcttcctcttctccagcctccctctgccaacaactctcgcgagggcgccgtccgcctccgcctccgtctcggggagcgatgacgatcgcgcgacgcctgctccgatccaatgcctccgcccaggcaatcagcttactgaagcatgtaactggcactgcaagtttgcaaggccatgcacatagtccgttggatgcgtcagtcagacattttagttcagctccatctgcccagtctgacacaactgaagaaaatgggttcaagggccatggcatgttggcaccttttacagctggctggcagagcaatgatttgcatcctctaattattgagagatctgagggttcctatgtttatgacatcaatgggaataaatacctggattctcttgcagggttatggtgcacagctttaggtggtagcgagcctcgattagtcaaggcagcaactgagcaattaaacaatttgcccttctaccattccttttggaaccgcacaaccaaaccttcattggaccttgcacaggagatccttagcatgttcactgcaagggaaatgggaaaagttttcttcacaaacagtggttcagaagcaaatgactctcaggtcaaactagtatggtattataacaacgcattggggaggccagacaagaagaaatttattgcacgatcaaaagcataccatggatctacactgatatcagcgagcctaactggtcttcctgccctgcaccagaagtttgatctaccagcaccttttgttctgcacactgactgccctcactactggcgatatcatcttcctggtgagacggaagaagaatttgcgactagacttgccaccaatttagagaatcttattctcaaagaaggaccagaaacaatcgctgctttcattgctgaacctgtgatgggtgccggtggtgtcatccctcctccaaagacctattttgacaaggttatacactatgggttccaaaaattattgactcttctatgagcaaactgcacttctctggaagtatagatgctttcattcacctgtccctctttgtctcttccctttatcttcgttcatctcattgtagctgttccacaaaaataattgtttttcatgaactggtagagttggtatattatgcaaaggactctaattattgttctgaatgcttgttgtgtgttattttatttcctatgaacaggttcaagcagtggtcaagaagtatgacattcttttcatagcagatgagatgttgtcgactgataattcattctaggtcatcactgcatttggaaggttgggaactatgtttggatgcgattattataacatcaagccagatctagtttccttggccaaggctctttcaaatgcctatgtacccatcggggcaactcttgttagcccagagatatcagaggtgattcactcccagagcaataagctcggctcatttgctcatgggtttacatactctggtcatccagttgcctgtgcagtggcaatagaagctttgaaactttaccggtatgctgcacttcttgtagcatgacagtatccctgctcatatgtcagtatttatctcttgttcctgattaatgctctgcggaaattggcatcagcgaaagggatattcctggtcatgtcaagcaaatcgctccaaagttccaggacggaattagggcgttggcagacagcccaatcatcggggaggtacgcatctgatctgaatttctgaatcgcgaaacctgccactcggtccaaacacgactacagtgctcccgaacttcagatacgtggcttagggatgattatgggaaccgaattcaccaacaacaaatcaccggctgatctattccctgccgaatggggggttggtgccatctttggagaggagtgccagaagcgcggcatgctggtcagggttgctggcgacgccatcatgatgtcgcccacgctgatcatgacgcccggcgaggtcgacgagctggtgagcatctacggggaagccctcagggccacggaggagagggtgtcagacctgaagatgaaatccgagaagaactaaccaaaagggcgaggacgacgacgataacgcctggcggcaacggtagcagctgatgtacaggtgaataaaatggtcgtgactgcgagatggcaataatgcgcgggaatggtcgacggtcgtctctgatcttggagtgcaaggtcaagctgctcggtcgctaaacaacggtggctgaacttttaaacgggacatagatgtttttttccctaagcaatggcagtatctcaaatgtttgctgccctgtagtttctgaacataaagggttagcagacgttataaaatttaaattttatcgtaaaacagttgttattctcattttctagtgtatcttcctctcccccctcccccaaaaaaacaattgcatgtcttgttgaacttttatgcgattgggcttagggatagcaacacaaaat

SEQ ID NO: 15078 - DNA, 1907 bp, Zea Mays
acacgtcttcctccgcgaactgcgcccacctccgatctccccggcttgcctacaagtctccctgccccctcacttctcgcgctcttcctcttctccagcctccctctgccaacaactctcgcgagggcgccgtccgcctccgcctccgtctcggggagcgatgacgatcgcgcgacgcctgctccgatccaatgcctccgcccaggcaatcagcttactgaagcatgtaactggcactgcaagtttgcaaggccatgcacatagtccgttggatgcgtcagtcagacattttagttcagctccatctgcccagtctgacacaactgaagaaaatgggttcaagggccatggcatgttggcaccttttacagctggctggcagagcaatgatttgcatcctctaattattgagagatctgagggttcctatgtttatgacatcaatgggaataaatacctggattctcttgcagggttatggtgcacagctttaggtggtagcgagcctcgattagtcaaggcagcaactgagcaattaaacaatttgcccttctaccattccttttggaaccgcacaaccaaaccttcattggaccttgcacaggagatccttagcatgttcactgcaagggaaatgggaaaagttttcttcacaaacagtggttcagaagcaaatgactctcaggtcaaactagtatggtattataacaacgcattggggaggccagacaagaagaaatttattgcacgatcaaaagcataccatggatctacactgatatcagcgagcctaactggtcttcctgccctgcaccagaagtttgatctaccagcaccttttgttctgcacactgactgccctcactactggcgatatcatcttcctggtgagacggaagaagaatttgcgactagacttgccaccaatttagagaatcttattctcaaagaaggaccagaaacaatcgctgctttcattgctgaacctgtgatgggtgccggtggtgtcatccctcctccaaagacctattttgacaaggctctttcaaatgcctatgtacccatcggggcaactcttgttagcccagagatatcagaggtgattcactcccagagcaataagctcggctcatttgctcatgggtttacatactctggtcatccagttgcctgtgcagtggcaatagaagctttgaaactttaccgcgaaagggatattcctggtcatgtcaagcaaatcgctccaaagttccaggacggaattagggcgttggcagacagcccaatcatcggggaggggttggtgccatctttggagaggagtgccagaagcgcggcatgctggtcagggttgctggcgacgccatcatgatgtcgcccacgctgatcatgacgcccggcgaggtcgacgagctggtgagcatctacggggaagccctcagggccacggaggagagggtgtcagacctgaagatgaaatccgagaagaactaaccaaaagggcgaggacgacgacgataacgcctggcggcaacggtagcagctgatgtacaggtgaataaaatggtcgtgactgcgagatggcaataatgcgcgggaatggtcgacggtcgtctctgatcttggagtgcaaggtcaagctgctcggtcgctaaacaacggtggctgaacttttaaacgggacatagatgtttttttccctaagcaatggcagtatctcaaatgtttgctgccctgtagtttctgaacataaagggttagcagacgttataaaatttaaattttatcgtaaaacagttgttattctcattttctagtgtatcttcctctcccccctcccccaaaaaaacaattgcatgtcttgttgaacttttatgcgattgggcttagggatagcaacacaaaat

SEQ ID NO: 15079 - DNA, 2145 bp, Zea Mays
acacgtcttcctccgcgaactgcgcccacctccgatctccccggcttgcctacaagtctccctgccccctcacttctcgcgctcttcctcttctccagcctccctctgccaacaactctcgcgagggcgccgtccgcctccgcctccgtctcggggagcgatgacgatcgcgcgacgcctgctccgatccaatgcctccgcccaggcaatcagcttactgaagcatgtaactggcactgcaagtttgcaaggccatgcacatagtccgttggatgcgtcagtcagacattttagttcagctccatctgcccagtctgacacaactgaagaaaatgggttcaagggccatggcatgttggcaccttttacagctggctggcagagcaatgatttgcatcctctaattattgagagatctgagggttcctatgtttatgacatcaatgggaataaatacctggattctcttgcagggttatggtgcacagctttaggtggtagcgagcctcgattagtcaaggcagcaactgagcaattaaacaatttgcccttctaccattccttttggaaccgcacaaccaaaccttcattggaccttgcacaggagatccttagcatgttcactgcaagggaaatgggaaaagttttcttcacaaacagtggttcagaagcaaatgactctcaggtcaaactagtatggtattataacaacgcattggggaggccagacaagaagaaatttattgcacgatcaaaagcataccatggatctacactgatatcagcgagcctaactggtcttcctgccctgcaccagaagtttgatctaccagcaccttttgttctgcacactgactgccctcactactggcgatatcatcttcctggtgagacggaagaagaatttgcgactagacttgccaccaatttagagaatcttattctcaaagaaggaccagaaacaatcgctgctttcattgctgaacctgtgatgggtgccggtggtgtcatccctcctccaaagacctattttgacaaggttcaagcagtggtcaagaagtatgacattcttttcatagcagatgagatgttgtcgactgataattcattctaggtcatcactgcatttggaaggttgggaactatgtttggatgcgattattataacatcaagccagatctagtttccttggccaaggctctttcaaatgcctatgtacccatcggggcaactcttgttagcccagagatatcagaggtgattcactcccagagcaataagctcggctcatttgctcatgggtttacatactctggtcatccagttgcctgtgcagtggcaatagaagctttgaaactttaccgcgaaagggatattcctggtcatgtcaagcaaatcgctccaaagttccaggacggaattagggcgttggcagacagcccaatcatcggggagatacgtggcttagggatgattatgggaaccgaattcaccaacaacaaatcaccggctgatctattccctgccgaatggggggttggtgccatctttggagaggagtgccagaagcgcggcatgctggtcagggttgctggcgacgccatcatgatgtcgcccacgctgatcatgacgcccggcgaggtcgacgagctggtgagcatctacggggaagccctcagggccacggaggagagggtgtcagacctgaagatgaaatccgagaagaactaaccaaaagggcgaggacgacgacgataacgcctggcggcaacggtagcagctgatgtacaggtgaataaaatggtcgtgactgcgagatggcaataatgcgcgggaatggtcgacggtcgtctctgatcttggagtgcaaggtcaagctgctcggtcgctaaacaacggtggctgaacttttaaacgggacatagatgtttttttccctaagcaatggcagtatctcaaatgtttgctgccctgtagtttctgaacataaagggttagcagacgttataaaatttaaattttatcgtaaaacagttgttattctcattttctagtgtatcttcctctcccccctcccccaaaaaaacaattgcatgtcttgttgaacttttatgcgattgggcttagggatagcaacacaaaat

SEQ ID NO: 15080 - DNA, 2362 bp, Zea Mays
acacgtcttcctccgcgaactgcgcccacctccgatctccccggcttgcctacaagtctccctgccccctcacttctcgcgctcttcctcttctccagcctccctctgccaacaactctcgcgagggcgccgtccgcctccgcctccgtctcggggagcgatgacgatcgcgcgacgcctgctccgatccaatgcctccgcccaggcaatcagcttactgaagcatgtaactggcactgcaagtttgcaaggccatgcacatagtccgttggatgcgtcagtcagacattttagttcagctccatctgcccagtctgacacaactgaagaaaatgggttcaagggccatggcatgttggcaccttttacagctggctggcagagcaatgatttgcatcctctaattattgagagatctgagggttcctatgtttatgacatcaatgggaataaatacctggattctcttgcagggttatggtgcacagctttaggtggtagcgagcctcgattagtcaaggcagcaactgagcaattaaacaatttgcccttctaccattccttttggaaccgcacaaccaaaccttcattggaccttgcacaggagatccttagcatgttcactgcaagggaaatgggaaaagttttcttcacaaacagtggttcagaagcaaatgactctcaggtcaaactagtatggtattataacaacgcattggggaggccagacaagaagaaatttattgcacgatcaaaagcataccatggatctacactgatatcagcgagcctaactggtcttcctgccctgcaccagaagtttgatctaccagcaccttttgttctgcacactgactgccctcactactggcgatatcatcttcctggtgagacggaagaagaatttgcgactagacttgccaccaatttagagaatcttattctcaaagaaggaccagaaacaatcgctgctttcattgctgaacctgtgatgggtgccggtggtgtcatccctcctccaaagacctattttgacaaggttatacactatgggttccaaaaattattgactcttctatgagcaaactgcacttctctggaagtatagatgctttcattcacctgtccctctttgtctcttccctttatcttcgttcatctcattgtagctgttccacaaaaataattgtttttcatgaactggtagagttggtatattatgcaaaggactctaattattgttctgaatgcttgttgtgtgttattttatttcctatgaacaggttcaagcagtggtcaagaagtatgacattcttttcatagcagatgaggtcatcactgcatttggaaggttgggaactatgtttggatgcgattattataacatcaagccagatctagtttccttggccaaggctctttcaaatgcctatgtacccatcggggcaactcttgttagcccagagatatcagaggtgattcactcccagagcaataagctcggctcatttgctcatgggtttacatactctggtcatccagttgcctgtgcagtggcaatagaagctttgaaactttaccgcgaaagggatattcctggtcatgtcaagcaaatcgctccaaagttccaggacggaattagggcgttggcagacagcccaatcatcggggagatacgtggcttagggatgattatgggaaccgaattcaccaacaacaaatcaccggctgatctattccctgccgaatggggggttggtgccatctttggagaggagtgccagaagcgcggcatgctggtcagggttgctggcgacgccatcatgatgtcgcccacgctgatcatgacgcccggcgaggtcgacgagctggtgagcatctacggggaagccctcagggccacggaggagagggtgtcagacctgaagatgaaatccgagaagaactaaccaaaagggcgaggacgacgacgataacgcctggcggcaacggtagcagctgatgtacaggtgaataaaatggtcgtgactgcgagatggcaataatgcgcgggaatggtcgacggtcgtctctgatcttggagtgcaaggtcaagctgctcggtcgctaaacaacggtggctgaacttttaaacgggacatagatgtttttttccctaagcaatggcagtatctcaaatgtttgctgccctgtagtttctgaacataaagggttagcagacgttataaaatttaaattttatcgtaaaacagttgttattctcattttctagtgtatcttcctctcccccctcccccaaaaaaacaattgcatgtcttgttgaacttttatgcgattgggcttagggatagcaacacaaaat

SEQ ID NO: 15081 - DNA, 2034 bp, Zea Mays
acacgtcttcctccgcgaactgcgcccacctccgatctccccggcttgcctacaagtctccctgccccctcacttctcgcgctcttcctcttctccagcctccctctgccaacaactctcgcgagggcgccgtccgcctccgcctccgtctcggggagcgatgacgatcgcgcgacgcctgctccgatccaatgcctccgcccaggcaatcagcttactgaagcatgtaactggcactgcaagtttgcaaggccatgcacatagtccgttggatgcgtcagtcagacattttagttcagctccatctgcccagtctgacacaactgaagaaaatgggttcaagggccatggcatgttggcaccttttacagctggctggcagagcaatgatttgcatcctctaattattgagagatctgagggttcctatgtttatgacatcaatgggaataaatacctggattctcttgcagggttatggtgcacagctttaggtggtagcgagcctcgattagtcaaggcagcaactgagcaattaaacaatttgcccttctaccattccttttggaaccgcacaaccaaaccttcattggaccttgcacaggagatccttagcatgttcactgcaagggaaatgggaaaagttttcttcacaaacagtggttcagaagcaaatgactctcaggtcaaactagtatggtattataacaacgcattggggaggccagacaagaagaaatttattgcacgatcaaaagcataccatggatctacactgatatcagcgagcctaactggtcttcctgccctgcaccagaagtttgatctaccagcaccttttgttctgcacactgactgccctcactactggcgatatcatcttcctggtgagacggaagaagaatttgcgactagacttgccaccaatttagagaatcttattctcaaagaaggaccagaaacaatcgctgctttcattgctgaacctgtgatgggtgccggtggtgtcatccctcctccaaagacctattttgacaaggttcaagcagtggtcaagaagtatgacattcttttcatagcagatgaggctctttcaaatgcctatgtacccatcggggcaactcttgttagcccagagatatcagaggtgattcactcccagagcaataagctcggctcatttgctcatgggtttacatactctggtcatccagttgcctgtgcagtggcaatagaagctttgaaactttaccgcgaaagggatattcctggtcatgtcaagcaaatcgctccaaagttccaggacggaattagggcgttggcagacagcccaatcatcggggagatacgtggcttagggatgattatgggaaccgaattcaccaacaacaaatcaccggctgatctattccctgccgaatggggggttggtgccatctttggagaggagtgccagaagcgcggcatgctggtcagggttgctggcgacgccatcatgatgtcgcccacgctgatcatgacgcccggcgaggtcgacgagctggtgagcatctacggggaagccctcagggccacggaggagagggtgtcagacctgaagatgaaatccgagaagaactaaccaaaagggcgaggacgacgacgataacgcctggcggcaacggtagcagctgatgtacaggtgaataaaatggtcgtgactgcgagatggcaataatgcgcgggaatggtcgacggtcgtctctgatcttggagtgcaaggtcaagctgctcggtcgctaaacaacggtggctgaacttttaaacgggacatagatgtttttttccctaagcaatggcagtatctcaaatgtttgctgccctgtagtttctgaacataaagggttagcagacgttataaaatttaaattttatcgtaaaacagttgttattctcattttctagtgtatcttcctctcccccctcccccaaaaaaacaattgcatgtcttgttgaacttttatgcgattgggcttagggatagcaacacaaaat

SEQ ID NO: 15082 - DNA, 1895 bp, Zea Mays
gggatatttcgtcaaactctcatgcgcaaagcaatcagcttactgaagcatgtaactggcactgcaagtttgcaaggccatgcacatagtccgttggatgcgtcagtcagacattttagttcagctccatctgcccagtctgacacaactgaagaaaatgggttcaagggccatggcatgttggcaccttttacagctggctggcagagcaatgatttgcatcctctaattattgagagatctgagggttcctatgtttatgacatcaatgggaataaatacctggattctcttgcagggttatggtgcacagctttaggtggtagcgagcctcgattagtcaaggcagcaactgagcaattaaacaatttgcccttctaccattccttttggaaccgcacaaccaaaccttcattggaccttgcacaggagatccttagcatgttcactgcaagggaaatgggaaaagttttcttcacaaacagtggttcagaagcaaatgactctcaggtcaaactagtatggtattataacaacgcattggggaggccagacaagaagaaatttattgcacgatcaaaagcataccatggatctacactgatatcagcgagcctaactggtcttcctgccctgcaccagaagtttgatctaccagcaccttttgttctgcacactgactgccctcactactggcgatatcatcttcctggtgagacggaagaagaatttgcgactagacttgccaccaatttagagaatcttattctcaaagaaggaccagaaacaatcgctgctttcattgctgaacctgtgatgggtgccggtggtgtcatccctcctccaaagacctattttgacaaggtcatcactgcatttggaaggttgggaactatgtttggatgcgattattataacatcaagccagatctagtttccttggccaaggctctttcaaatgcctatgtacccatcggggcaactcttgttagcccagagatatcagaggtgattcactcccagagcaataagctcggctcatttgctcatgggtttacatactctggtcatccagttgcctgtgcagtggcaatagaagctttgaaactttaccgcgaaagggatattcctggtcatgtcaagcaaatcgctccaaagttccaggacggaattagggcgttggcagacagcccaatcatcggggagatacgtggcttagggatgattatgggaaccgaattcaccaacaacaaatcaccggctgatctattccctgccgaatggggggttggtgccatctttggagaggagtgccagaagcgcggcatgctggtcagggttgctggcgacgccatcatgatgtcgcccacgctgatcatgacgcccggcgaggtcgacgagctggtgagcatctacggggaagccctcagggccacggaggagagggtgtcagacctgaagatgaaatccgagaagaactaaccaaaagggcgaggacgacgacgataacgcctggcggcaacggtagcagctgatgtacaggtgaataaaatggtcgtgactgcgagatggcaataatgcgcgggaatggtcgacggtcgtctctgatcttggagtgcaaggtcaagctgctcggtcgctaaacaacggtggctgaacttttaaacgggacatagatgtttttttccctaagcaatggcagtatctcaaatgtttgctgccctgtagtttctgaacataaagggttagcagacgttataaaatttaaattttatcgtaaaacagttgttattctcattttctagtgtatcttcctctcccccctcccccaaaaaaacaattgcatgtcttgttgaacttttatgcgattgggcttagggatagcaacacaaaat

SEQ ID NO: 15083 - DNA, 4809 bp, Zea Mays
ataaaccctccctcgcacgacgaaaaccccccaacgaaataaaaaagattctctcttcttttaccctctccgcccgcttctctctctttgatctcttttcttgcccggcttctgatctctgctcgcctgccgcctgcaaccgccgagggaggaggggaggcaagaaggatcacgccgccggagcgtcatctcttccaacccaagggacggacagctaaagtagctgtggttgtgggatatggaagccgaagtaagcgctccagccgatcttaaggcgcctgataagacgacggtacacggtgatgacaaagaaaatataccgaatggtaatgcaaatttgcaagtgaaggaagccgacaatgatgaagacgatggaacaagatctgatgggtttgagctgatagatgtgaagcaaaacttcgattcagcaagagtggaggaagagatggccgctccaagaagtactacagtcgatacatctcctgttacagaagaaagtgaaacacaagaagacaaaacaacagcacatgaagaacaatcagttgcaacaaacacaagacatctagagtcctcaatgttgaaccaacaaacagaacaattggaaaagctgacaatgcgtattgaggagcttgaatctgaaaatgacaaactggtaaaggacttgacagaagcagaaaataagcagagcctgcactacagttgtctacaagaagctcaatgctctcttgcaatgaaagataaggagctggctgaagtaacagagtcgctgaaagatctgggttctgagcttggaacctcaaaaaagaggattcaagaaattgaagctgaattggattcatcagcagataagctttgtaaacttgaagagttgaaggatgaaagaagcttgcatgctgcacaggaggcgaagagggcctcagaacttgataagatgctagaactggcacaatcaaacatgaaagaaatggaaaaacatattggcagtcttcaagaagaagtgaagggttatcaagacaaggccgctgaccatcagcaaatagaagaatcactgagaaacacaatctcagaactcaaggtggtacaagaggcattggagctgtcaaagtcacaagtggaaaatttgaaacagaagcttgcctcacaggacactgatttcagtaaactaactgaagagttgaatctccattgttcatctgaagaatcccttaaagagaagtctcttaaactagagactgaacttactactgtacttgaagaactacaagcaaagggtgggcttgacaaattgaaggatgaaaataaaactctccaagggtcacttgttgatcttaactcaaaactttctgagaaagattcaatactgcatcaggctgaagatgagctttcaaaagcacagttggtcctcttagaagcattgtcacaaaaagaagagttggagctgaatctgaactctctcagtgagcagcatggcaaatccaaagcttttggagaaaatgcaaaccagaagattctcgatcttgaagcacaaatacaggcaatgcatgcagctgaacaggcactcaagtttgagctaaaagaagccgaggcaagtgtccaagctgctgagaagaaaggctcagaccttgagcaacaactcagtgagattgagaataaatttgttaaatcaagtgaagaaatagagttgctgaaagagcgtattcaacaagaagctgctgtatcagcagaaagaggaatgcagcttcaagaaactgtgaccagtgtagagggatacaaagaaaaaattattgagctacaatcctccctaggttcctcagtgtctaaaaatcagctacttgaacaagaagtcatggagctgactgataaatgttcagagcatcaagaacaagcgcattcagttcggcaaagaagtctggagctggaagatttgcttcacacatcaaagactcatgctgaaggtgtatactcacggacacaggagctggagcaggagctgaataacacatatgaaatgttcaagggggttgaagaagaactcgagcagtacagaagcaaggcttcacagctctctgatgatctggaagcttatcagacaaaagcagctagtcttgaagccgtggtggaagcagcaagcgagaaagaaaaggaatttatggagtcattgagccaaataactgaagaaaagaagaaaactgaatcaaggaatgcggaaattgaagctcaattgcaggaagctcttgaggcagtaggacagaaagaggctgagtcgagaaacttgaatgaaaagctggttgcacttgagtccgaaattgaaagttcgatgcatgtaaatgaagcgttgaaacaggaaatcaatgctaagctggtaatggtggatgagctgcaggagaagtgtagttttataagttctgagaaagaagaagttgcagagaagctgtctattcatgaggagaagttagaacatttgacagaagaacactcaagaggcttggagctcctttctgtagctgaatctcggaataaagaaactgagagtcaactgcgtgaagttcttgaaaagctagcacaaaaagaagctgaagttacagacttgacagagaagctggctttgctcgaagctgagaatgaaaagatgacttgtttgaacgaggcgttaaaagaagtggatgctaagctggtcatgtttgatgagctacaggaacggtttagttctactcttgctgagaaggaagaagctgcagagaagctagctgttcatgagaggacaatctcacaactgacagaggtacacacaagaaccttggagctccattctgtagctgaatcaaagaatgaagaaattggagctcagttccttgaggctcttgaaacaatatcacagaaagaaggtgaagttaaagaatcgtcttcacagaagataaagatattggaggaacaacttgcagagacacatagcaaggtcgagcatttccttacagagaaggaaagcttggttcaagaaactagtagtctgaataaggagtttgaggtacatcagaacaagttgaacgacttacaacttgcacttgctgctgcactagcagaaaaggaggcggcatttgaagagattcattcactgtgtaaaacactcgatggaatgatcgagcacaaagcagaactagaaatacaggtatcttctactatacaagagcacgaagaactgaagagcaagtaccaaaatacaatggaagagaagcagatgttgagtgataaatatgaaacagcaaagaaagagcttgaggatgcaatagccaagttggaggaggaaatgaatgtagacaagtcagaaaaagagtctcacatctcaaagctggagcgacagattacattatcagagataaaatacatggaggagataaagactatgcaagtggaaacaactgaaaagaatgaagcactaacagccaagatgcaggaacacacagacttacaacatgagaaacacgaattggaacaacagttgctggaagttaggaaggaactggatggtgcttaccataccatagtaaatcaggaagaacaagcttctttgagagagataaagtgggacacttttaggatttattcagaggatcgtctggaagctgagcagcagcgtgctgaggagctggaactacaagtagcagctcttaaacaacagctccaagaagctgaggtccattataagcaaaaggaagaacaagtttctttaagggaggttcaatgggaaggggatcaaaatcattcactgaatgagctgaaatctcagcgtcagtatgccacggacttggagaaacaaatcgaagatcttactcagaagttaagatcagccgatgcacactacaaacagaaggccacagaagagagagataaacttgccgagatcaccacagagttcagcaagttgacacataaagtaagcaagagtgtcgaattggagaagaaggtgcaggaccttgagcagaagctgcagctagcttattccaagtctgacgaacaggcaacggatgtcttggagtcgagatcccgtgagtttagcctggactcgttatcaagtttggtcaaacagcaggacagaactcaggctgccgacaaggcctcgccgagcccgaccctgcaagaagtacaagaaccttctggcaccatggctttcaagttcatcctgggagtcgccctgctgtccgtactcgccggcgtgtttctcgggaagcggtactagcgctcagtctgtggaactctgttggcgcccatcatcagctcatggaaaacccccgctgttaatattgctcccagcgaaattcggttatcagtttgtagctggaaggggggcgtagccagcagaagtttgagaggattgttggccttgatggtgatggttcgacgactttctgggaggaagttggagaccttggaagcccttttgttctcttgttgttgattttcgtcttcattttcagtttttgggtaaagtggggcaaggaatttgatttttgttcattcctaccctttgcgtgcaaaaggccaagtgcacgcaactggttctgcggacagctagttttccgtgtacatttcttctctgtaaagaccaggagtccatggacgcaaaacatgaagcctctgcttgctgtatatgctcgtgtggagagtgcatgtttcgttacctgtgccttttgatgtacacctgaattgcttgaacgagaaatgtcatattattatcagatggtttgaaggacgtgtacacagtggttggattcagatcctctaattttgcagcaagtgtttgttgttttggtc

SEQ ID NO: 15084 - DNA, 4694 bp, Zea Mays
taaaccctccctcgcacgacgaaaaccccccaacgaaataaaaaagattctctcttcttttaccctctccgcccgcttctctctctttgatctcttttcttgcccggcttctgatctctgctcgcctgccgcctgcaaccgccgagggaggaggggaggcaagaaggatcacgccgccggagcgtcatctcttccaacccaagggacggacagctaaagtagctgtggttgtgggatatggaagccgaagtaagcgctccagccgatcttaaggcgcctgataagacgacggtacacggtgatgacaaagaaaatataccgaatggtaatgcaaatttgcaagtgaaggaagccgacaatgatgaagacgatggaacaagatctgatgggtttgagctgatagatgtgaagcaaaacttcgattcagcaagagtggaggaagagatggccgctccaagaagtactacagtcgatacatctcctgttacagaagaaagtgaaacacaagaagacaaaacaacagcacatgaagaacaatcagttgcaacaaacacaagacatctagagtcctcaatgttgaaccaacaaacagaacaattggaaaagctgacaatgcgtattgaggagcttgaatctgaaaatgacaaactggtaaaggacttgacagaagcagaaaataagcagagcctgcactacagttgtctacaagaagctcaatgctctcttgcaatgaaagataaggagctggctgaagtaacagagtcgctgaaagatctgggttctgagcttggaacctcaaaaaagaggattcaagaaattgaagctgaattggattcatcagcagataagctttgtaaacttgaagagttgaaggatgaaagaagcttgcatgctgcacaggaggcgaagagggcctcagaacttgataagatgctagaactggcacaatcaaacatgaaagaaatggaaaaacatattggcagtcttcaagaagaagtgaagggttatcaagacaaggccgctgaccatcagcaaatagaagaatcactgagaaacacaatctcagaactcaaggtggtacaagaggcattggagctgtcaaagtcacaagtggaaaatttgaaacagaagcttgcctcacaggacactgatttcagtaaactaactgaagagttgaatctccattgttcatctgaagaatcccttaaagagaagtctcttaaactagagactgaacttactactgtacttgaagaactacaagcaaagggtgggcttgacaaattgaaggatgaaaataaaactctccaagggtcacttgttgatcttaactcaaaactttctgagaaagattcaatactgcatcaggctgaagatgagctttcaaaagcacagttggtcctcttagaagcattgtcacaaaaagaagagttggagctgaatctgaactctctcagtgagcagcatggcaaatccaaagcttttggagaaaatgcaaaccagaagattctcgatcttgaagcacaaatacaggcaatgcatgcagctgaacaggcactcaagtttgagctaaaagaagccgaggcaagtgtccaagctgctgagaagaaaggctcagaccttgagcaacaactcagtgagattgagaataaatttgttaaatcaagtgaagaaatagagttgctgaaagagcgtattcaacaagaagctgctgtatcagcagaaagaggaatgcagcttcaagaaactgtgaccagtgtagagggatacaaagaaaaaattattgagctacaatcctccctaggttcctcagtgtctaaaaatcagctacttgaacaagaagtcatggagctgactgataaatgttcagagcatcaagaacaagcgcattcagttcggcaaagaagtctggagctggaagatttgcttcacacatcaaagactcatgctgaaggtgtatactcacggacacaggagctggagcaggagctgaataacacatatgaaatgttcaagggggttgaagaagaactcgagcagtacagaagcaaggcttcacagctctctgatgatctggaagcttatcagacaaaagcagctagtcttgaagccgtggtggaagcagcaagcgagaaagaaaaggaatttatggagtcattgagccaaataactgaagaaaagaagaaaactgaatcaaggaatgcggaaattgaagctcaattgcaggaagctcttgaggcagtaggacagaaagaggctgagtcgagaaacttgaatgaaaagctggttgcacttgagtccgaaattgaaagttcgatgcatgtaaatgaagcgttgaaacaggaaatcaatgctaagctggtaatggtggatgagctgcaggagaagtgtagttttataagttctgagaaagaagaagttgcagagaagctgtctattcatgaggagaagttagaacatttgacagaagaacactcaagaggcttggagctcctttctgtagctgaatctcggaataaagaaactgagagtcaactgcgtgaagttcttgaaaagctagcacaaaaagaagctgaagttacagacttgacagagaagctggctttgctcgaagctgagaatgaaaagatgacttgtttgaacgaggcgttaaaagaagtggatgctaagctggtcatgtttgatgagctacaggaacggtttagttctactcttgctgagaaggaagaagctgcagagaagctagctgttcatgagaggacaatctcacaactgacagagaaagaaggtgaagttaaagaatcgtcttcacagaagataaagatattggaggaacaacttgcagagacacatagcaaggtcgagcatttccttacagagaaggaaagcttggttcaagaaactagtagtctgaataaggagtttgaggtacatcagaacaagttgaacgacttacaacttgcacttgctgctgcactagcagaaaaggaggcggcatttgaagagattcattcactgtgtaaaacactcgatggaatgatcgagcacaaagcagaactagaaatacaggtatcttctactatacaagagcacgaagaactgaagagcaagtaccaaaatacaatggaagagaagcagatgttgagtgataaatatgaaacagcaaagaaagagcttgaggatgcaatagccaagttggaggaggaaatgaatgtagacaagtcagaaaaagagtctcacatctcaaagctggagcgacagattacattatcagagataaaatacatggaggagataaagactatgcaagtggaaacaactgaaaagaatgaagcactaacagccaagatgcaggaacacacagacttacaacatgagaaacacgaattggaacaacagttgctggaagttaggaaggaactggatggtgcttaccataccatagtaaatcaggaagaacaagcttctttgagagagataaagtgggacacttttaggatttattcagaggatcgtctggaagctgagcagcagcgtgctgaggagctggaactacaagtagcagctcttaaacaacagctccaagaagctgaggaagaacaagtttctttaagggaggttcaatgggaaggggatcaaaatcattcactgaatgagctgaaatctcagcgtcagtatgccacggacttggagaaacaaatcgaagatcttactcagaagttaagatcagccgatgcacactacaaacagaaggccacagaagagagagataaacttgccgagatcaccacagagttcagcaagttgacacataaagtaagcaagagtgtcgaattggagaagaaggtgcaggaccttgagcagaagctgcagctagcttattccaagtctgacgaacaggcaacggatgtcttggagtcgagatcccgtgagtttagcctggactcgttatcaagtttggtcaaacagcaggacagaactcaggctgccgacaaggcctcgccgagcccgaccctgcaagaagtacaagaaccttctggcaccatggctttcaagttcatcctgggagtcgccctgctgtccgtactcgccggcgtgtttctcgggaagcggtactagcgctcagtctgtggaactctgttggcgcccatcatcagctcatggaaaacccccgctgttaatattgctcccagcgaaattcggttatcagtttgtagctggaaggggggcgtagccagcagaagtttgagaggattgttggccttgatggtgatggttcgacgactttctgggaggaagttggagaccttggaagcccttttgttctcttgttgttgattttcgtcttcattttcagtttttgggtaaagtggggcaaggaatttgatttttgttcattcctaccctttgcgtgcaaaaggccaagtgcacgcaactggttctgcggacagctagttttccgtgtacatttcttctctgtaaagaccaggagtccatggacgcaaaacatgaagcctctgcttgctgtatatgctcgtgtggagagtgcatgtttcgttacctgtgccttttgatgtacacctgaattgcttgaacgagaaatgtcatattattatcagatggtttgaaggacgtgtacacagtggttggattcagatcctctaattttgcagcaagtgtttgttgttttggtc

SEQ ID NO: 15085 - DNA, 4763 bp, Zea Mays
ggcttctgatctctgctcgcctgccgcctgcaaccgccgagggaggaggggaggcaagaaggatcacgccgccggagcgtcatctcttccaacccaagggacggacagctaaagtagctgtggttgtgggatatggaagccgaagtaagcgctccagccgatcttaaggcgcctgataagacgacggtacacggtgatgacaaagaaaatataccgaatggtaatgcaaatttgcaagtgaaggaagccgacaatgatgaagacgatggaacaagatctgatgggtttgagctgatagatgtgaagcaaaacttcgattcagcaagagtggaggaagagatggccgctccaagaagtactacagtcgatacatctcctgttacagaagaaagtgaaacacaagaagacaaaacaacagcacatgaagaacaatcagttgcaacaaacacaagacatctagagtcctcaatgttgaaccaacaaacagaacaattggaaaagctgacaatgcgtattgaggagcttgaatctgaaaatgacaaactggtaaaggacttgacagaagcagaaaataagcagagcctgcactacagttgtctacaagaagctcaatgctctcttgcaatgaaagataaggagctggctgaagtaacagagtcgctgaaagatctgggttctgagcttggaacctcaaaaaagaggattcaagaaattgaagctgaattggattcatcagcagataagctttgtaaacttgaagagttgaaggatgaaagaagcttgcatgctgcacaggaggcgaagagggcctcagaacttgataagatgctagaactggcacaatcaaacatgaaagaaatggaaaaacatattggcagtcttcaagaagaagtgaagggttatcaagacaaggccgctgaccatcagcaaatagaagaatcactgagaaacacaatctcagaactcaaggtggtacaagaggcattggagctgtcaaagtcacaagtggaaaatttgaaacagaagcttgcctcacaggacactgatttcagtaaactaactgaagagttgaatctccattgttcatctgaagaatcccttaaagagaagtctcttaaactagagactgaacttactactgtacttgaagaactacaagcaaagggtgggcttgacaaattgaaggatgaaaataaaactctccaagggtcacttgttgatcttaactcaaaactttctgagaaagattcaatactgcatcaggctgaagatgagctttcaaaagcacagttggtcctcttagaagcattgtcacaaaaagaagagttggagctgaatctgaactctctcagtgagcagcatggcaaatccaaagcttttggagaaaatgcaaaccagaagattctcgatcttgaagcacaaatacaggcaatgcatgcagctgaacaggcactcaagtttgagctaaaagaagccgaggcaagtgtccaagctgctgagaagaaaggctcagaccttgagcaacaactcagtgagattgagaataaatttgttaaatcaagtgaagaaatagagttgctgaaagagcgtattcaacaagaagctgctgtatcagcagaaagaggaatgcagcttcaagaaactgtgaccagtgtagagggatacaaagaaaaaattattgagctacaatcctccctaggttcctcagtgtctaaaaatcagctacttgaacaagaagtcatggagctgactgataaatgttcagagcatcaagaacaagcgcattcagttcggcaaagaagtctggagctggaagatttgcttcacacatcaaagactcatgctgaaggtgtatactcacggacacaggagctggagcaggagctgaataacacatatgaaatgttcaagggggttgaagaagaactcgagcagtacagaagcaaggcttcacagctctctgatgatctggaagcttatcagacaaaagcagctagtcttgaagccgtggtggaagcagcaagcgagaaagaaaaggaatttatggagtcattgagccaaataactgaagaaaagaagaaaagtgaagagctagctgcaaaatatgactgaggtgcacagtagaggtatagaactccaatccgcagctgaatcaaggaatgcggaaattgaagctcaattgcaggaagctcttgaggcagtaggacagaaagaggctgagtcgagaaacttgaatgaaaagctggttgcacttgagtccgaaattgaaagttcgatgcatgtaaatgaagcgttgaaacaggaaatcaatgctaagctggtaatggtggatgagctgcaggagaagtgtagttttataagttctgagaaagaagaagttgcagagaagctgtctattcatgaggagaagttagaacatttgacagaagaacactcaagaggcttggagctcctttctgtagctgaatctcggaataaagaaactgagagtcaactgcgtgaagttcttgaaaagctagcacaaaaagaagctgaagttacagacttgacagagaagctggctttgctcgaagctgagaatgaaaagatgacttgtttgaacgaggcgttaaaagaagtggatgctaagctggtcatgtttgatgagctacaggaacggtttagttctactcttgctgagaaggaagaagctgcagagaagctagctgttcatgagaggacaatctcacaactgacagaggtacacacaagaaccttggagctccattctgtagctgaatcaaagaatgaagaaattggagctcagttccttgaggctcttgaaacaatatcacagaaagaaggtgaagttaaagaatcgtcttcacagaagataaagatattggaggaacaacttgcagagacacatagcaaggtcgagcatttccttacagagaaggaaagcttggttcaagaaactagtagtctgaataaggagtttgaggtacatcagaacaagttgaacgacttacaacttgcacttgctgctgcactagcagaaaaggaggcggcatttgaagagattcattcactgtgtaaaacactcgatggaatgatcgagcacaaagcagaactagaaatacaggtatcttctactatacaagagcacgaagaactgaagagcaagtaccaaaatacaatggaagagaagcagatgttgagtgataaatatgaaacagcaaagaaagagcttgaggatgcaatagccaagttggaggaggaaatgaatgtagacaagtcagaaaaagagtctcacatctcaaagctggagcgacagattacattatcagagataaaatacatggaggagataaagactatgcaagtggaaacaactgaaaagaatgaagcactaacagccaagatgcaggaacacacagacttacaacatgagaaacacgaattggaacaacagttgctggaagttaggaaggaactggatggtgcttaccataccatagtaaatcaggaagaacaagcttctttgagagagataaagtgggacacttttaggatttattcagaggatcgtctggaagctgagcagcagcgtgctgaggagctggaactacaagtagcagctcttaaacaacagctccaagaagctgaggtccattataagcaaaagaacaagtttctttaagggaggttcaatgggaaggggatcaaaatcattcactgaatgagctgaaatctcagcgtcagtatgccacggacttggagaaacaaatcgaagatcttactcagaagttaagatcagccgatgcacactacaaacagaaggccacagaagagagagataaacttgccgagatcaccacagagttcagcaagttgacacataaagtaagcaagagtgtcgaattggagaagaaggtgcaggaccttgagcagaagctgcagctagcttattccaagtctgacgaacaggcaacggatgtcttggagtcgagatcccgtgagtttagcctggactcgttatcaagtttggtcaaacagcaggacagaactcaggctgccgacaaggcctcgccgagcccgaccctgcaagaagtacaagaaccttctggcaccatggctttcaagttcatcctgggagtcgccctgctgtccgtactcgccggcgtgtttctcgggaagcggtactagcgctcagtctgtggaactctgttggcgcccatcatcagctcatggaaaacccccgctgttaatattgctcccagcgaaattcggttatcagtttgtagctggaaggggggcgtagccagcagaagtttgagaggattgttggccttgatggtgatggttcgacgactttctgggaggaagttggagaccttggaagcccttttgttctcttgttgttgattttcgtcttcattttcagtttttgggtaaagtggggcaaggaatttgatttttgttcattcctaccctttgcgtgcaaaaggccaagtgcacgcaactggttctgcggacagctagttttccgtgtacatttcttctctgtaaagaccaggagtccatggacgcaaaacatgaagcctctgcttgctgtatatgctcgtgtggagagtgcatgtttcgttacctgtgccttttgatgtacacctgaattgcttgaacgagaaatgtcatattattatcagatggtttgaaggacgtgtacacagtggttggattcagatcctctaattttgcagcaagtgtttgttgttttggtc

SEQ ID NO: 15086 - DNA, 4986 bp, Zea Mays
gtaaatttctcgtgaaagaagcccgtttcgagtgttttgagctcttcctacactcgatttttttccacatcttttgcctcctcccgatcccgacacgccgccgccgcccaccgtcccgccgtggcgcggtagaatctcgccggagctccgacgataccttaccgccccaatggcagcctccctcttccccttcccccaccattgtcatggccgtgctcgcccccgacctaacctggcccggccacctccgcccgctctggcggcaccgccgcctccgcctcgccgccgtctccaccgcctggcctgtttgtccccccaaaatttattctaagccagccagagatggagaagaaaggagagagagtagaaaataatcgagacggacggacagctaaagtagctgtggttgtgggatatggaagccgaagtaagcgctccagccgatcttaaggcgcctgataagacgacggtacacggtgatgacaaagaaaatataccgaatggtaatgcaaatttgcaagtgaaggaagccgacaatgatgaagacgatggaacaagatctgatgggtttgagctgatagatgtgaagcaaaacttcgattcagcaagagtggaggaagagatggccgctccaagaagtactacagtcgatacatctcctgttacagaagaaagtgaaacacaagaagacaaaacaacagcacatgaagaacaatcagttgcaacaaacacaagacatctagagtcctcaatgttgaaccaacaaacagaacaattggaaaagctgacaatgcgtattgaggagcttgaatctgaaaatgacaaactggtaaaggacttgacagaagcagaaaataagcagagcctgcactacagttgtctacaagaagctcaatgctctcttgcaatgaaagataaggagctggctgaagtaacagagtcgctgaaagatctgggttctgagcttggaacctcaaaaaagaggattcaagaaattgaagctgaattggattcatcagcagataagctttgtaaacttgaagagttgaaggatgaaagaagcttgcatgctgcacaggaggcgaagagggcctcagaacttgataagatgctagaactggcacaatcaaacatgaaagaaatggaaaaacatattggcagtcttcaagaagaagtgaagggttatcaagacaaggccgctgaccatcagcaaatagaagaatcactgagaaacacaatctcagaactcaaggtggtacaagaggcattggagctgtcaaagtcacaagtggaaaatttgaaacagaagcttgcctcacaggacactgatttcagtaaactaactgaagagttgaatctccattgttcatctgaagaatcccttaaagagaagtctcttaaactagagactgaacttactactgtacttgaagaactacaagcaaagggtgggcttgacaaattgaaggatgaaaataaaactctccaagggtcacttgttgatcttaactcaaaactttctgagaaagattcaatactgcatcaggctgaagatgagctttcaaaagcacagttggtcctcttagaagcattgtcacaaaaagaagagttggagctgaatctgaactctctcagtgagcagcatggcaaatccaaagcttttggagaaaatgcaaaccagaagattctcgatcttgaagcacaaatacaggcaatgcatgcagctgaacaggcactcaagtttgagctaaaagaagccgaggcaagtgtccaagctgctgagaagaaaggctcagaccttgagcaacaactcagtgagattgagaataaatttgttaaatcaagtgaagaaatagagttgctgaaagagcgtattcaacaagaagctgctgtatcagcagaaagaggaatgcagcttcaagaaactgtgaccagtgtagagggatacaaagaaaaaattattgagctacaatcctccctaggttcctcagtgtctaaaaatcagctacttgaacaagaagtcatggagctgactgataaatgttcagagcatcaagaacaagcgcattcagttcggcaaagaagtctggagctggaagatttgcttcacacatcaaagactcatgctgaaggtgtatactcacggacacaggagctggagcaggagctgaataacacatatgaaatgttcaagggggttgaagaagaactcgagcagtacagaagcaaggcttcacagctctctgatgatctggaagcttatcagacaaaagcagctagtcttgaagccgtggtggaagcagcaagcgagaaagaaaaggaatttatggagtcattgagccaaataactgaagaaaagaagaaaactgaatcaaggaatgcggaaattgaagctcaattgcaggaagctcttgaggcagtaggacagaaagaggctgagtcgagaaacttgaatgaaaagctggttgcacttgagtccgaaattgaaagttcgatgcatgtaaatgaagcgttgaaacaggaaatcaatgctaagctggtaatggtggatgagctgcaggagaagtgtagttttataagttctgagaaagaagaagttgcagagaagctgtctattcatgaggagaagttagaacatttgacagaagaacactcaagaggcttggagctcctttctgtagctgaatctcggaataaagaaactgagagtcaactgcgtgaagttcttgaaaagctagcacaaaaagaagctgaagttacagacttgacagagaagctggctttgctcgaagctgagaatgaaaagatgacttgtttgaacgaggcgttaaaagaagtggatgctaagctggtcatgtttgatgagctacaggaacggtttagttctactcttgctgagaaggaagaagctgcagagaagctagctgttcatgagaggacaatctcacaactgacagaggtacacacaagaaccttggagctccattctgtagctgaatcaaagaatgaagaaattggagctcagttccttgaggctcttgaaacaatatcacagaaagaaggtgaagttaaagaatcgtcttcacagaagataaagatattggaggaacaacttgcagagacacatagcaaggtcgagcatttccttacagagaaggaaagcttggttcaagaaactagtagtctgaataaggagtttgaggtacatcagaacaagttgaacgacttacaacttgcacttgctgctgcactagcagaaaaggaggcggcatttgaagagattcattcactgtgtaaaacactcgatggaatgatcgagcacaaagcagaactagaaatacaggtatcttctactatacaagagcacgaagaactgaagagcaagtaccaaaatacaatggaagagaagcagatgttgagtgataaatatgaaacagcaaagaaagagcttgaggatgcaatagccaagttggaggaggaaatgaatgtagacaagtcagaaaaagagtctcacatctcaaagctggagcgacagattacattatcagagataaaatacatggaggagataaagactatgcaagtggaaacaactgaaaagaatgaagcactaacagccaagatgcaggaacacacagacttacaacatgagaaacacgaattggaacaacagttgctggaagttaggaaggaactggatggtgcttaccataccatagtaaatcaggaagaacaagcttctttgagagagataaagtgggacacttttaggatttattcagaggatcgtctggaagctgagcagcagcgtgctgaggagctggaactacaagtagcagctcttaaacaacagctccaagaagctgaggtccattataagcaaaaggaagaacaagtttctttaagggaggttcaatgggaaggggatcaaaatcattcactgaatgagctgaaatctcagcgtcagtatgccacggacttggagaaacaaatcgaagatcttactcagaagttaagatcagccgatgcacactacaaacagaaggccacagaagagagagataaacttgccgagatcaccacagagttcagcaagttgacacataaagtaagcaagagtgtcgaattggagaagaaggtgcaggaccttgagcagaagctgcagctagcttattccaagtctgacgaacaggcaacggatgtcttggagtcgagatcccgtgagtttagcctggactcgttatcaagtttggtcaaacagcaggacagaactcaggctgccgacaaggcctcgccgagcccgaccctgcaagaagtacaagaaccttctggcaccatggctttcaagttcatcctgggagtcgccctgctgtccgtactcgccggcgtgtttctcgggaagcggtactagcgctcagtctgtggaactctgttggcgcccatcatcagctcatggaaaacccccgctgttaatattgctcccagcgaaattcggttatcagtttgtagctggaaggggggcgtagccagcagaagtttgagaggattgttggccttgatggtgatggttcgacgactttctgggaggaagttggagaccttggaagcccttttgttctcttgttgttgattttcgtcttcattttcagtttttgggtaaagtggggcaaggaatttgatttttgttcattcctaccctttgcgtgcaaaaggccaagtgcacgcaactggttctgcggacagctagttttccgtgtacatttcttctctgtaaagaccaggagtccatggacgcaaaacatgaagcctctgcttgctgtatatgctcgtgtggagagtgcatgtttcgttacctgtgccttttgatgtacacctgaattgcttgaacgagaaatgtcatattattatcagatggtttgaaggacgtgtacacagtggttggattcagatcctctaattttgcagcaagtgtttgttgttttggtc

SEQ ID NO: 15087 - DNA, 2268 bp, Zea Mays
gatgtccctccatctttgaccgaaactcaaccgatgcatgacctccatcatatagccccatggtcacagattatcctacatattgtagctccgcaacctgttcagcaaaatgaggccttcagatgacagggcacagctttcaggctttgcacaatcagatgaatcgacacttgatgtggaggggcattgctgccatcagccgtcattcccttgttcgccgtcaatgcaaccgattgtttctgggtgcacacacacagagaacagcgcggcatacttcttatggccaacatcaaacctacagcactgtgcagccgaggggcgtgcaaactactttgccaacctttcaaagggacttctgccaaagattggccgtcggctgcccaagggccagcaagcaaacagcttgcttgacttgatgactataagggctttccatagcaaggtactgcgttgctttggccttggaacggcagtgggcttccgcatcaggaaaggggttctaaccgatatccctgcaattctttgcttcgttgctcgcaaagttcacaagaagtggcttgatccggcccattgccttcctgccattcttgcgggtccaggaggtatttggtgtgatgttgatgttgttgagttttcgtactacggtgctccagctcaaactccaaaagtgcaaatattcacagagctcgtggataagttgtgtggcagtgatgaatgtattggctccggctctcaggttgcaagtcaggacacttttggaactttgggcgccattgtaaaacggagaactggcaacaagctggtaggtttcgtcaccaaccgacatgttgctgttgacttggactacccaaaccagaagatgtatcacccattgccacccaaccttgggcctggtgtttatcttggagctgtcgaaagggcaacatcttttatcacggatgatgtttggtatggaatctatgctggaacaaacccagagacatttgtacgtgctgatggggcattcatcccatttgctcatgactttgacatctccacagtcacaactacagttaggggtgttggtgatattggggatgttaaggttatagatctgcagtgtccacttaatagattaatagggaggcgagtatgcaaaatcggcagaagttctggccacacgactggaactgtgatggcttatgcccttgagtacaacgacgagaaaggaataagctttttcactgacctccttgtcgtcggtgagaaccgccaaacatttgatctagaaggtgacagtggaagcctcattatcctgactggccaggacagcgagaagccgcgtcccatcgggataatatggggtggcacagcaaaccgtgggaggctaaagcttaggtgtgaccatggccctcaaaattggaccagtggagttgatcttggccgccttctggatcgtcttgaacttgatcttatcataaccagcgaatcactcaaagatgccgtgcagcagcaaaggcgcgcgttggcggctgcagctaattctgctgctggggagtcgtcgacagcagcagctcccgtcctagaagagaaagtggaggagatcttcgagcctctggggatcaagattgagcagctgcgtcggcacgacgtttcggcctctgaagcggaggaggcagctgggatcaatgtggaagagcgccagttcatctcaaactttgtgggcaggtcccctgtgcgtgatgaccagggtgctccaaggcaaattgcgaacctgaacaatccgtcagaggaagagctcgccatgttgctgcacctaggcgaccagtagcccaagcggcttcgcagacagaatccgacctcgacgggaaacggcgaagcgctcatttcagtgtctctacatcgaagagtcgcaagtagtccgaagaaggtcacctggagttcagcaaactgaacctgcatcagtagcttagaccagcagcttcctggcacaaacattataatgaactatgctgaaacttgattcagcacttacatgatttgggtggtattcccttcagttttgctgtgctcgtgaagactttaatatgtacaatgctgagtccctgtatcaaaacaatgcaggtagtgataaaatcgtattgatcaccttctcttttctaccattatcggtggagttgtctcaagatgactagatcagcttctggcaggcctgtctagtgcccaatgcaactagggcgatggtacaggcccccaattttttgagttttctgaaatagataatataag

SEQ ID NO: 15088 - DNA, 2115 bp, Zea Mays
gtccctccatctttgaccgaaactcaaccgatgcatgacctccatcatatagccccatggtcacagattatcctacatattgtagctccgcaacctgttcagcaaaatgaggccttcagatgacagggcacagctttcaggctttgcacaatcagatgaatcgacacttgatgtggaggggcattgctgccatcagccgtcattcccttgttcgccgtcaatgcaaccgattgtttctgggtgcacacacacagagaacagcgcggcatacttcttatggccaacatcaaacctacagcactgtgcagccgaggggcgtgcaaactactttgccaacctttcaaagggacttctgccaaagattggccgtcggctgcccaagggccagcaagcaaacagcttgcttgacttgatgactataagggctttccatagcaagggtccaggaggtatttggtgtgatgttgatgttgttgagttttcgtactacggtgctccagctcaaactccaaaagtgcaaatattcacagagctcgtggataagttgtgtggcagtgatgaatgtattggctccggctctcaggttgcaagtcaggacacttttggaactttgggcgccattgtaaaacggagaactggcaacaagctggtaggtttcgtcaccaaccgacatgttgctgttgacttggactacccaaaccagaagatgtatcacccattgccacccaaccttgggcctggtgtttatcttggagctgtcgaaagggcaacatcttttatcacggatgatgtttggtatggaatctatgctggaacaaacccagagacatttgtacgtgctgatggggcattcatcccatttgctcatgactttgacatctccacagtcacaactacagttaggggtgttggtgatattggggatgttaaggttatagatctgcagtgtccacttaatagattaatagggaggcgagtatgcaaaatcggcagaagttctggccacacgactggaactgtgatggcttatgcccttgagtacaacgacgagaaaggaataagctttttcactgacctccttgtcgtcggtgagaaccgccaaacatttgatctagaaggtgacagtggaagcctcattatcctgactggccaggacagcgagaagccgcgtcccatcgggataatatggggtggcacagcaaaccgtgggaggctaaagcttaggtgtgaccatggccctcaaaattggaccagtggagttgatcttggccgccttctggatcgtcttgaacttgatcttatcataaccagcgaatcactcaaagatgccgtgcagcagcaaaggcgcgcgttggcggctgcagctaattctgctgctggggagtcgtcgacagcagcagctcccgtcctagaagagaaagtggaggagatcttcgagcctctggggatcaagattgagcagctgcgtcggcacgacgtttcggcctctgaagcggaggaggcagctgggatcaatgtggaagagcgccagttcatctcaaactttgtgggcaggtcccctgtgcgtgatgaccagggtgctccaaggcaaattgcgaacctgaacaatccgtcagaggaagagctcgccatgttgctgcacctaggcgaccagtagcccaagcggcttcgcagacagaatccgacctcgacgggaaacggcgaagcgctcatttcagtgtctctacatcgaagagtcgcaagtagtccgaagaaggtcacctggagttcagcaaactgaacctgcatcagtagcttagaccagcagcttcctggcacaaacattataatgaactatgctgaaacttgattcagcacttacatgatttgggtggtattcccttcagttttgctgtgctcgtgaagactttaatatgtacaatgctgagtccctgtatcaaaacaatgcaggtagtgataaaatcgtattgatcaccttctcttttctaccattatcggtggagttgtctcaagatgactagatcagcttctggcaggcctgtctagtgcccaatgcaactagggcgatggtacaggcccccaattttttgagttttctgaaatagataatataag

SEQ ID NO: 15089 - DNA, 2257 bp, Zea Mays
gtccctccatctttgaccgaaactcaaccgatgcatgacctccatcatatagccccatattatcctacatattgtagctccgcaacctgttcagcaaaatgaggccttcagatgacagggcacagctttcaggctttgcacaatcagatgaatcgacacttgatgtggaggggcattgctgccatcagccgtcattcccttgttcgccgtcaatgcaaccgattgtttctgggtgcacacacacagagaacagcgcggcatacttcttatggccaacatcaaacctacagcactgtgcagccgaggggcgtgcaaactactttgccaacctttcaaagggacttctgccaaagattggccgtcggctgcccaagggccagcaagcaaacagcttgcttgacttgatgactataagggctttccatagcaaggtactgcgttgctttggccttggaacggcagtgggcttccgcatcaggaaaggggttctaaccgatatccctgcaattctttgcttcgttgctcgcaaagttcacaagaagtggcttgatccggcccattgccttcctgccattcttgcgggtccaggaggtatttggtgtgatgttgatgttgttgagttttcgtactacggtgctccagctcaaactccaaaagtgcaaatattcacagagctcgtggataagttgtgtggcagtgatgaatgtattggctccggctctcaggttgcaagtcaggacacttttggaactttgggcgccattgtaaaacggagaactggcaacaagctggtaggtttcgtcaccaaccgacatgttgctgttgacttggactacccaaaccagaagatgtatcacccattgccacccaaccttgggcctggtgtttatcttggagctgtcgaaagggcaacatcttttatcacggatgatgtttggtatggaatctatgctggaacaaacccagagacatttgtacgtgctgatggggcattcatcccatttgctcatgactttgacatctccacagtcacaactacagttaggggtgttggtgatattggggatgttaaggttatagatctgcagtgtccacttaatagattaatagggaggcgagtatgcaaaatcggcagaagttctggccacacgactggaactgtgatggcttatgcccttgagtacaacgacgagaaaggaataagctttttcactgacctccttgtcgtcggtgagaaccgccaaacatttgatctagaaggtgacagtggaagcctcattatcctgactggccaggacagcgagaagccgcgtcccatcgggataatatggggtggcacagcaaaccgtgggaggctaaagcttaggtgtgaccatggccctcaaaattggaccagtggagttgatcttggccgccttctggatcgtcttgaacttgatcttatcataaccagcgaatcactcaaagatgccgtgcagcagcaaaggcgcgcgttggcggctgcagctaattctgctgctggggagtcgtcgacagcagcagctcccgtcctagaagagaaagtggaggagatcttcgagcctctggggatcaagattgagcagctgcgtcggcacgacgtttcggcctctgaagcggaggaggcagctgggatcaatgtggaagagcgccagttcatctcaaactttgtgggcaggtcccctgtgcgtgatgaccagggtgctccaaggcaaattgcgaacctgaacaatccgtcagaggaagagctcgccatgttgctgcacctaggcgaccagtagcccaagcggcttcgcagacagaatccgacctcgacgggaaacggcgaagcgctcatttcagtgtctctacatcgaagagtcgcaagtagtccgaagaaggtcacctggagttcagcaaactgaacctgcatcagtagcttagaccagcagcttcctggcacaaacattataatgaactatgctgaaacttgattcagcacttacatgatttgggtggtattcccttcagttttgctgtgctcgtgaagactttaatatgtacaatgctgagtccctgtatcaaaacaatgcaggtagtgataaaatcgtattgatcaccttctcttttctaccattatcggtggagttgtctcaagatgactagatcagcttctggcaggcctgtctagtgcccaatgcaactagggcgatggtacaggcccccaattttttgagttttctgaaatagataatataag

SEQ ID NO: 15090 - DNA, 2768 bp, Zea Mays
actcccacaaaagcctaacccgtcgcgagatgagaggacaccggaaggccatgtgccggcatcttccccgccgcccgatccgggtcgtccgtttgtcgaggggacatggacgactatgcagcccgagctccagaccaacacacggcggccgacacatgacacgggcgcaacagtattgactgctgttcgtctcatccctgacgcagtgaccatgatcacctatgacctagccgagctccgtgcctccgtccctccatctcccttttgcattccgcccccagattcccgaatcctccggctcgccccctctccgagactccgactgcctcccctgaagctagctagcctcctagcccctggtctggtcctcccgctgtgcctgtgaggcgctgctctaccaaggaggccgctggctgctccgctgcgctgcagtgaggctgcaaaagctggcggcttcttctcactgggcgtcgccataaacagtggagattcccatccccattttcccaattatggatagccagcggcaaccgggggagcaccgctgaggccgctcgcccgccatcccgcccgccattgctcccgtcgagggtcacagattatcctacatattgtagctccgcaacctgttcagcaaaatgaggccttcagatgacagggcacagctttcaggctttgcacaatcagatgaatcgacacttgatgtggaggggcattgctgccatcagccgtcattcccttgttcgccgtcaatgcaaccgattgtttctgggtgcacacacacagagaacagcgcggcatacttcttatggccaacatcaaacctacagcactgtgcagccgaggggcgtgcaaactactttgccaacctttcaaagggacttctgccaaagattggccgtcggctgcccaagggccagcaagcaaacagcttgcttgacttgatgactataagggctttccatagcaaggtactgcgttgctttggccttggaacggcagtgggcttccgcatcaggaaaggggttctaaccgatatccctgcaattctttgcttcgttgctcgcaaagttcacaagaagtggcttgatccggcccattgccttcctgccattcttgcgggtccaggaggtatttggtgtgatgttgatgttgttgagttttcgtactacggtgctccagctcaaactccaaaagtgcaaatattcacagagctcgtggataagttgtgtggcagtgatgaatgtattggctccggctctcaggttgcaagtcaggacacttttggaactttgggcgccattgtaaaacggagaactggcaacaagctggtaggtttcgtcaccaaccgacatgttgctgttgacttggactacccaaaccagaagatgtatcacccattgccacccaaccttgggcctggtgtttatcttggagctgtcgaaagggcaacatcttttatcacggatgatgtttgagacatttgtacgtgctgatggggcattcatcccatttgctcatgactttgacatctccacagtcacaactacagttaggggtgttggtgatattggggatgttaaggttatagatctgcagtgtccacttaatagattaatagggaggcgagtatgcaaaatcggcagaagttctggccacacgactggaactgtgatggcttatgcccttgagtacaacgacgagaaaggaataagctttttcactgacctccttgtcgtcggtgagaaccgccaaacatttgatctagaaggtgacagtggaagcctcattatcctgactggccaggacagcgagaagccgcgtcccatcgggataatatggggtggcacagcaaaccgtgggaggctaaagcttaggtgtgaccatggccctcaaaattggaccagtggagttgatcttggccgccttctggatcgtcttgaacttgatcttatcataaccagcgaatcactcaaagatgccgtgcagcagcaaaggcgcgcgttggcggctgcagctaattctgctgctggggagtcgtcgacagcagcagctcccgtcctagaagagaaagtggaggagatcttcgagcctctggggatcaagattgagcagctgcgtcggcacgacgtttcggcctctgaagcggaggaggcagctgggatcaatgtggaagagcgccagttcatctcaaactttgtgggcaggtcccctgtgcgtgatgaccagggtgctccaaggcaaattgcgaacctgaacaatccgtcagaggaagagctcgccatgttgctgcacctaggcgaccagtagcccaagcggcttcgcagacagaatccgacctcgacgggaaacggcgaagcgctcatttcagtgtctctacatcgaagagtcgcaagtagtccgaagaaggtcacctggagttcagcaaactgaacctgcatcagtagcttagaccagcagcttcctggcacaaacattataatgaactatgctgaaacttgattcagcacttacatgatttgggtggtattcccttcagttttgctgtgctcgtgaagactttaatatgtacaatgctgagtccctgtatcaaaacaatgcaggtagtgataaaatcgtattgatcaccttctcttttctaccattatcggtggagttgtctcaagatgactagatcagcttctggcaggcctgtctagtgcccaatgcaactagggcgatggtacaggcccccaattttttgagttttctgaaatagataatataag

SEQ ID NO: 15091 - DNA, 2296 bp, Zea Mays
actcccacaaaagcctaacccgtcgcgagatgagaggacaccggaaggccatgtgccggcatcttccccgccgcccgatccgggtcgtccgtttgtcgaggggacatggacgactatgcagcccgagctccagaccaacacacggcggccgacacatgacacgggcgcaacagtattgactgctgttcgtctcatccctgacgcagtgaccatgatcacctatgacctagccgagctccgtgcctccgtccctccatctcccttttgcattccgcccccagattcccgaatcctccggctcgccccctctccgagactccgactgcctcccctgaagctagctagcctcctagcccctggtctggtcctcccgctgtgcctgtgaggcgctgctctaccaaggaggccgctggctgctccgctgcgctgcagtgaggctgcaaaagctggcggcttcttctcactgggcgtcgccataaacagtggagattcccatccccattttcccaattatggatagccagcggcaaccgggggagcaccgctgaggccgctcgcccgccatcccgcccgccattgctcccgtcgagggtcacagattatcctacatattgtagctccgcaacctgttcagcaaaatgaggccttcagatgacagggcacagctttcaggctttgcacaatcagatgaatcgacacttgatgtggaggggcattgctgccatcagccgtcattcccttgttcgccgtcaatgcaaccgattgtttctgggtgcacacacacagagaacagcgcggcatacttcttatggccaacatcaaacctacagcactgtgcagccgaggggcgtgcaaactactttgccaacctttcaaagggacttctgccaaagattggccgtcggctgcccaagggccagcaagcaaacagcttgcttgacttgatgactataagggctttccatagcaaggtactgcgttgctttggccttggaacggcagtgggcttccgcatcaggaaaggggttctaaccgatatccctgcaattctttgcttcgttgctcgcaaagttcacaagaagtggcttgatccggcccattgccttcctgccattcttgcgggtccaggaggtatttggtgtgatgttgatgttgttgagttttcgtactacggtgctccagctcaaactccaaaagtgcaaatattcacagagctcgtggataagttgtgtggcagtgatgaatgtattggctccggctctcaggttgcaagtcaggacacttttggaactttgggcgccattgtaaaacggagaactggcaacaagctggtaggtttcgtcaccaaccgacatgttgctgttgacttggactacccaaaccagaagatgtatcacccattgccacccaaccttgggcctggtgtttatcttggagctgtcgaaagggcaacatcttttatcacggatgatgtttggtatggaatctatgctggaacaaacccagatgccgtgcagcagcaaaggcgcgcgttggcggctgcagctaattctgctgctggggagtcgtcgacagcagcagctcccgtcctagaagagaaagtggaggagatcttcgagcctctggggatcaagattgagcagctgcgtcggcacgacgtttcggcctctgaagcggaggaggcagctgggatcaatgtggaagagcgccagttcatctcaaactttgtgggcaggtcccctgtgcgtgatgaccagggtgctccaaggcaaattgcgaacctgaacaatccgtcagaggaagagctcgccatgttgctgcacctaggcgaccagtagcccaagcggcttcgcagacagaatccgacctcgacgggaaacggcgaagcgctcatttcagtgtctctacatcgaagagtcgcaagtagtccgaagaaggtcacctggagttcagcaaactgaacctgcatcagtagcttagaccagcagcttcctggcacaaacattataatgaactatgctgaaacttgattcagcacttacatgatttgggtggtattcccttcagttttgctgtgctcgtgaagactttaatatgtacaatgctgagtccctgtatcaaaacaatgcaggtagtgataaaatcgtattgatcaccttctcttttctaccattatcggtggagttgtctcaagatgactagatcagcttctggcaggcctgtctagtgcccaatgcaactagggcgatggtacaggcccccaattttttgagttttctgaaatagataatataag

SEQ ID NO: 15092 - DNA, 2044 bp, Zea Mays
ggcgtttttttttttggggccttttgttcctgcttttctctttcaagaaaggtcacagattatcctacatattgtagctccgcaacctgttcagcaaaatgaggccttcagatgacagggcacagctttcaggctttgcacaatcagatgaatcgacacttgatgtggaggggcattgctgccatcagccgtcattcccttgttcgccgtcaatgcaaccgattgtttctgggtgcacacacacagagaacagcgcggcatacttcttatggccaacatcaaacctacagcactgtgcagccgaggggcgtgcaaactactttgccaacctttcaaagggacttctgccaaagattggccgtcggctgcccaagggccagcaagcaaacagcttgcttgacttgatgactataagggctttccatagcaagggtccaggaggtatttggtgtgatgttgatgttgttgagttttcgtactacggtgctccagctcaaactccaaaagtgcaaatattcacagagctcgtggataagttgtgtggcagtgatgaatgtattggctccggctctcaggttgcaagtcaggacacttttggaactttgggcgccattgtaaaacggagaactggcaacaagctggtaggtttcgtcaccaaccgacatgttgctgttgacttggactacccaaaccagaagatgtatcacccattgccacccaaccttgggcctggtgtttatcttggagctgtcgaaagggcaacatcttttatcacggatgatgtttggtatggaatctatgctggaacaaacccagtcacaactacagttaggggtgttggtgatattggggatgttaaggttatagatctgcagtgtccacttaatagattaatagggaggcgagtatgcaaaatcggcagaagttctggccacacgactggaactgtgatggcttatgcccttgagtacaacgacgagaaaggaataagctttttcactgacctccttgtcgtcggtgagaaccgccaaacatttgatctagaaggtgacagtggaagcctcattatcctgactggccaggacagcgagaagccgcgtcccatcgggataatatggggtggcacagcaaaccgtgggaggctaaagcttaggtgtgaccatggccctcaaaattggaccagtggagttgatcttggccgccttctggatcgtcttgaacttgatcttatcataaccagcgaatcactcaaagatgccgtgcagcagcaaaggcgcgcgttggcggctgcagctaattctgctgctggggagtcgtcgacagcagcagctcccgtcctagaagagaaagtggaggagatcttcgagcctctggggatcaagattgagcagctgcgtcggcacgacgtttcggcctctgaagcggaggaggcagctgggatcaatgtggaagagcgccagttcatctcaaactttgtgggcaggtcccctgtgcgtgatgaccagggtgctccaaggcaaattgcgaacctgaacaatccgtcagaggaagagctcgccatgttgctgcacctaggcgaccagtagcccaagcggcttcgcagacagaatccgacctcgacgggaaacggcgaagcgctcatttcagtgtctctacatcgaagagtcgcaagtagtccgaagaaggtcacctggagttcagcaaactgaacctgcatcagtagcttagaccagcagcttcctggcacaaacattataatgaactatgctgaaacttgattcagcacttacatgatttgggtggtattcccttcagttttgctgtgctcgtgaagactttaatatgtacaatgctgagtccctgtatcaaaacaatgcaggtagtgataaaatcgtattgatcaccttctcttttctaccattatcggtggagttgtctcaagatgactagatcagcttctggcaggcctgtctagtgcccaatgcaactagggcgatggtacaggcccccaattttttgagttttctgaaatagataatataag

SEQ ID NO: 15093 - DNA, 1991 bp, Zea Mays
ttttttggggccttttgttcctgcttttctctttcaagaaaggtcacagattatcctacatattgtagctccgcaacctgttcagcaaaatgaggccttcagatgacagggcacagctttcaggctttgcacaatcagatgaatcgacacttgatgtggaggggcattgctgccatcagccgtcattcccttgttcgccgtcaatgcaaccgattgtttctgggtgcacacacacagagaacagcgcggcatacttcttatggccaacatcaaacctacagcactgtgcagccgaggggcgtgcaaactactttgccaacctttcaaagggacttctgccaaagattggccgtcggctgcccaagggccagcaagcaaacagcttgcttgacttgatgactataagggctttccatagcaagggtccaggaggtatttggtgtgatgttgatgttgttgagttttcgtactacggtgctccagctcaaactccaaaagtgcaaatattcacagagctcgtggataagttgtgtggcagtgatgaatgtattggctccggctctcaggttgcaagtcaggacacttttggaactttgggcgccattgtaaaacggagaactggcaacaagctggtaggtttcgtcaccaaccgacatgttgctgttgacttggactacccaaaccagaagatgtatcacccattgccacccaaccttgggcctggtgtttatcttggagctgtcgaaagggcaacatcttttatcacggatgatgtttggtatggaatctatgctggaacaaacccaggtagaggagttataagttatgtggttaatataggaaattaagtattacctgcagctttagttgcttggataattttctgtatatttaatttctcaggtgacattattgcttgatcttttcatatcatgcaaggtttgacatttgtgaatactatattaaaataatcaaattaacactaacttgcctttcagttcaccacttgcaaataaagcaacatcattttttttgagaaaataaaatataagttaggactttctctaaacaaataaaaggctccctcaggtcatagatactgtcatttaggacaagatctggtgaaacatcaataacatatttatttggattagaaacatgttacttatatgtttagttttttataattttgtttgaaaatgcttgcaaaatctcatgatttgaagaatttttggaatatattctagaagaaattagtggtcaaaggtaaacattgaaaccgtggaaaggcaaatgtggcaaactatttttcaccagagggagtaaatccttagttttgatcactctaaccatgcagtacatatactatctcttcttctgctgatgattccaaatgatttacacaatgttctaattcccaaacatacatgccatgttctaattcccaaacatacgtgctatgttctaatgaatctgcagagacatttgtacgtgctgatggggcattcatcccatttgctcatgactttgacatctccacagtcacaactacagttaggggtgttggtgatattggggatgttaaggttatagatctgcagtgtccacttaatagattaatagggaggcgagtatgcaaaatcggcagaagttctggccacacgactggaactgtgatggcttatgcccttgagtacaacgacgagaaaggaataagctttttcactgacctccttgtcgtcggtgagaaccgccaaacatttgatctagaaggtgacagtggaagcctcattatcctgactggccaggacagcgagaagccgcgtcccatcgggataatatggggtggcacagcaaaccgtgggaggctaaagcttaggtgtgaccatggccctcaaaattggaccagtggagttgatcttggccgccttctggatcgtcttgaacttgatcttatcataaccagcgaatcactcaaagataactgacat

SEQ ID NO: 15094 - DNA, 2256 bp, Zea Mays
ctttgtttgcgtggctccccttgcgatcttgcagaatctattcctgaggaacaacagattatcctacatattgtagctccgcaacctgttcagcaaaatgaggccttcagatgacagggcacagctttcaggctttgcacaatcagatgaatcgacacttgatgtggaggggcattgctgccatcagccgtcattcccttgttcgccgtcaatgcaaccgattgtttctgggtgcacacacacagagaacagcgcggcatacttcttatggccaacatcaaacctacagcactgtgcagccgaggggcgtgcaaactactttgccaacctttcaaagggacttctgccaaagattggccgtcggctgcccaagggccagcaagcaaacagcttgcttgacttgatgactataagggctttccatagcaaggtactgcgttgctttggccttggaacggcagtgggcttccgcatcaggaaaggggttctaaccgatatccctgcaattctttgcttcgttgctcgcaaagttcacaagaagtggcttgatccggcccattgccttcctgccattcttgcgggtccaggaggtatttggtgtgatgttgatgttgttgagttttcgtactacggtgctccagctcaaactccaaaagtgcaaatattcacagagctcgtggataagttgtgtggcagtgatgaatgtattggctccggctctcaggttgcaagtcaggacacttttggaactttgggcgccattgtaaaacggagaactggcaacaagctggtaggtttcgtcaccaaccgacatgttgctgttgacttggactacccaaaccagaagatgtatcacccattgccacccaaccttgggcctggtgtttatcttggagctgtcgaaagggcaacatcttttatcacggatgatgtttggtatggaatctatgctggaacaaacccagagacatttgtacgtgctgatggggcattcatcccatttgctcatgactttgacatctccacagtcacaactacagttaggggtgttggtgatattggggatgttaaggttatagatctgcagtgtccacttaatagattaatagggaggcgagtatgcaaaatcggcagaagttctggccacacgactggaactgtgatggcttatgcccttgagtacaacgacgagaaaggaataagctttttcactgacctccttgtcgtcggtgagaaccgccaaacatttgatctagaaggtgacagtggaagcctcattatcctgactggccaggacagcgagaagccgcgtcccatcgggataatatggggtggcacagcaaaccgtgggaggctaaagcttaggtgtgaccatggccctcaaaattggaccagtggagttgatcttggccgccttctggatcgtcttgaacttgatcttatcataaccagcgaatcactcaaagatgccgtgcagcagcaaaggcgcgcgttggcggctgcagctaattctgctgctggggagtcgtcgacagcagcagctcccgtcctagaagagaaagtggaggagatcttcgagcctctggggatcaagattgagcagctgcgtcggcacgacgtttcggcctctgaagcggaggaggcagctgggatcaatgtggaagagcgccagttcatctcaaactttgtgggcaggtcccctgtgcgtgatgaccagggtgctccaaggcaaattgcgaacctgaacaatccgtcagaggaagagctcgccatgttgctgcacctaggcgaccagtagcccaagcggcttcgcagacagaatccgacctcgacgggaaacggcgaagcgctcatttcagtgtctctacatcgaagagtcgcaagtagtccgaagaaggtcacctggagttcagcaaactgaacctgcatcagtagcttagaccagcagcttcctggcacaaacattataatgaactatgctgaaacttgattcagcacttacatgatttgggtggtattcccttcagttttgctgtgctcgtgaagactttaatatgtacaatgctgagtccctgtatcaaaacaatgcaggtagtgataaaatcgtattgatcaccttctcttttctaccattatcggtggagttgtctcaagatgactagatcagcttctggcaggcctgtctagtgcccaatgcaactagggcgatggtacaggcccccaattttttgagttttctgaaatagataatataag

SEQ ID NO: 15095 - DNA, 2384 bp, Zea Mays
gggaagctgtaattcatacgtattttagatgattggggtccaggaggtatttggtgtgatgttgatgttgttgagttttcgtactacggtgctccagctcaaactccaaaagtgcaaatattcacagagctcgtggataagttgtgtggcagtgatgaatgtattggctccggctctcaggttgcaagtcaggacacttttggaactttgggcgccattgtaaaacggagaactggcaacaagctggtaggtttcgtcaccaaccgacatgttgctgttgacttggactacccaaaccagaagatgtatcacccattgccacccaaccttgggcctggtgtttatcttggagctgtcgaaagggcaacatcttttatcacggatgatgtttggtatggaatctatgctggaacaaacccaggtagaggagttataagttatgtggttaatataggaaattaagtattacctgcagctttagttgcttggataattttctgtatatttaatttctcaggtgacattattgcttgatcttttcatatcatgcaaggtttgacatttgtgaatactatattaaaataatcaaattaacactaacttgcctttcagttcaccacttgcaaataaagcaacatcattttttttgagaaaataaaatataagttaggactttctctaaacaaataaaaggctccctcaggtcatagatactgtcatttaggacaagatctggtgaaacatcaataacatatttatttggattagaaacatgttacttatatgtttagttttttataattttgtttgaaaatgcttgcaaaatctcatgatttgaagaatttttggaatatattctagaagaaattagtggtcaaaggtaaacattgaaaccgtggaaaggcaaatgtggcaaactatttttcaccagagggagtaaatccttagttttgatcactctaaccatgcagtacatatactatctcttcttctgctgatgattccaaatgatttacacaatgttctaattcccaaacatacatgccatgttctaattcccaaacatacgtgctatgttctaatgaatctgcagagacatttgtacgtgctgatggggcattcatcccatttgctcatgactttgacatctccacagtcacaactacagttaggggtgttggtgatattggggatgttaaggttatagatctgcagtgtccacttaatagattaatagggaggcgagtatgcaaaatcggcagaagttctggccacacgactggaactgtgatggcttatgcccttgagtacaacgacgagaaaggaataagctttttcactgacctccttgtcgtcggtgagaaccgccaaacatttgatctagaaggtgacagtggaagcctcattatcctgactggccaggacagcgagaagccgcgtcccatcgggataatatggggtggcacagcaaaccgtgggaggctaaagcttaggtgtgaccatggccctcaaaattggaccagtggagttgatcttggccgccttctggatcgtcttgaacttgatcttatcataaccagcgaatcactcaaagatgccgtgcagcagcaaaggcgcgcgttggcggctgcagctaattctgctgctggggagtcgtcgacagcagcagctcccgtcctagaagagaaagtggaggagatcttcgagcctctggggatcaagattgagcagctgcgtcggcacgacgtttcggcctctgaagcggaggaggcagctgggatcaatgtggaagagcgccagttcatctcaaactttgtgggcaggtcccctgtgcgtgatgaccagggtgctccaaggcaaattgcgaacctgaacaatccgtcagaggaagagctcgccatgttgctgcacctaggcgaccagtagcccaagcggcttcgcagacagaatccgacctcgacgggaaacggcgaagcgctcatttcagtgtctctacatcgaagagtcgcaagtagtccgaagaaggtcacctggagttcagcaaactgaacctgcatcagtagcttagaccagcagcttcctggcacaaacattataatgaactatgctgaaacttgattcagcacttacatgatttgggtggtattcccttcagttttgctgtgctcgtgaagactttaatatgtacaatgctgagtccctgtatcaaaacaatgcaggtagtgataaaatcgtattgatcaccttctcttttctaccattatcggtggagttgtctcaagatgactagatcagcttctggcaggcctgtctagtgcccaatgcaactagggcgatggtacaggcccccaattttttgagttttctgaaatagataatataag

SEQ ID NO: 15096 - DNA, 2237 bp, Zea Mays
gtgacactttttcagttattcctaccatgtcaggttgcaagtcaggacacttttggaactttgggcgccattgtaaaacggagaactggcaacaagctggtaggtttcgtcaccaaccgacatgttgctgttgacttggactacccaaaccagaagatgtatcacccattgccacccaaccttgggcctggtgtttatcttggagctgtcgaaagggcaacatcttttatcacggatgatgtttggtatggaatctatgctggaacaaacccaggtagaggagttataagttatgtggttaatataggaaattaagtattacctgcagctttagttgcttggataattttctgtatatttaatttctcaggtgacattattgcttgatcttttcatatcatgcaaggtttgacatttgtgaatactatattaaaataatcaaattaacactaacttgcctttcagttcaccacttgcaaataaagcaacatcattttttttgagaaaataaaatataagttaggactttctctaaacaaataaaaggctccctcaggtcatagatactgtcatttaggacaagatctggtgaaacatcaataacatatttatttggattagaaacatgttacttatatgtttagttttttataattttgtttgaaaatgcttgcaaaatctcatgatttgaagaatttttggaatatattctagaagaaattagtggtcaaaggtaaacattgaaaccgtggaaaggcaaatgtggcaaactatttttcaccagagggagtaaatccttagttttgatcactctaaccatgcagtacatatactatctcttcttctgctgatgattccaaatgatttacacaatgttctaattcccaaacatacatgccatgttctaattcccaaacatacgtgctatgttctaatgaatctgcagagacatttgtacgtgctgatggggcattcatcccatttgctcatgactttgacatctccacagtcacaactacagttaggggtgttggtgatattggggatgttaaggttatagatctgcagtgtccacttaatagattaatagggaggcgagtatgcaaaatcggcagaagttctggccacacgactggaactgtgatggcttatgcccttgagtacaacgacgagaaaggaataagctttttcactgacctccttgtcgtcggtgagaaccgccaaacatttgatctagaaggtgacagtggaagcctcattatcctgactggccaggacagcgagaagccgcgtcccatcgggataatatggggtggcacagcaaaccgtgggaggctaaagcttaggtgtgaccatggccctcaaaattggaccagtggagttgatcttggccgccttctggatcgtcttgaacttgatcttatcataaccagcgaatcactcaaagatgccgtgcagcagcaaaggcgcgcgttggcggctgcagctaattctgctgctggggagtcgtcgacagcagcagctcccgtcctagaagagaaagtggaggagatcttcgagcctctggggatcaagattgagcagctgcgtcggcacgacgtttcggcctctgaagcggaggaggcagctgggatcaatgtggaagagcgccagttcatctcaaactttgtgggcaggtcccctgtgcgtgatgaccagggtgctccaaggcaaattgcgaacctgaacaatccgtcagaggaagagctcgccatgttgctgcacctaggcgaccagtagcccaagcggcttcgcagacagaatccgacctcgacgggaaacggcgaagcgctcatttcagtgtctctacatcgaagagtcgcaagtagtccgaagaaggtcacctggagttcagcaaactgaacctgcatcagtagcttagaccagcagcttcctggcacaaacattataatgaactatgctgaaacttgattcagcacttacatgatttgggtggtattcccttcagttttgctgtgctcgtgaagactttaatatgtacaatgctgagtccctgtatcaaaacaatgcaggtagtgataaaatcgtattgatcaccttctcttttctaccattatcggtggagttgtctcaagatgactagatcagcttctggcaggcctgtctagtgcccaatgcaactagggcgatggtacaggcccccaattttttgagttttctgaaatagataatataag

SEQ ID NO: 15097 - DNA, 3459 bp, Zea Mays
ttgcgtaataagtacctcccctgaacatcaccatgctcatgtcacctgcggtttagcgaaaaacactccgaggggaagggagcgcgggtgcttgattcatccatcattccatctacgatggagtacgagcgcggggaccgggccaagcggggccgtggaggtggcggcggcggcggcggcggcggaggacgcggaggtggcggcgagtacgggcggcagcacggaggcgcgtacggcggaggcggatggcacgggcacgacgaaggaggaggctacggcgggggccgtggaggcggtggctactatcaccaagggcctcgcggccgcggagggtggcgcggccccggcgcgggcggcagccaggcgtacgggtccggcggcggccgcgcgtgggcgccggggccgggtgaggggagaggccttggggttggccgcgagtacgcccccgtcaggcgggcagcgccggcgcctgcgcctgcgcctagggaggttgcgactgcgcccatggtcaaggaagcgccgagttcgtcgggatccgttgaacgcatcacatctagtgaattggccggagtagaaccactagcatccacactagctgcgacatcttctgttggcacacgagtgccaatgcagagacctgactgtggtggcgcattatctcaagcaaaggtcaaactcttggtgaatcactttattgtcaactaccaaaaggtgtcaactatttttcactatgacataaacatcaagcttgatgaagcttcctctaaggcttcaggcaaagaactctcgaaggcagaatttctttctgtcaaggatgagctcttcagggaaagcagtttacggcgtctttcctcatgtgttgcttatgatggtggaagaaatctcttcacttctgctgaactgccagcaggtttatttcgtgtgagagttcgatcaaaggcctacattgtatcagtagatttgaagaagcagctgccattaagtcaactctcagatttacctgtacctagagaggtcttgcagggtcttgatgttgttgtgcgtgaggcctccagatggcgcaaggttatccttggtagaggattttactcaccaagcagcagtatagacattgggcagggtgttgtagctatgaaaggaacccagcagacacttaaatacactcaacaagggttgaacctgtgtgttgattattcagttatgccattttacaaagctggaccggtgatggaccttgttcacaaaatagtggggtaccttgattatcgaacaactctgaacaagaggcaaatggaaaatctggttgatgagcttaaaggccgacgtgtaactgtgattcatcggaggactaatcagaagtacacagtgcaaggcttgacacccttacctgccagccagatgacctttgtggatgctgaatccggacaaacaaagtgtcttgtggagtattatgctcagaaacatggcattgtgattgagtatcagatgctgccatgcttggatttgagcaagagcaaggacaaaccgaatcatgtcccaattgagctctgcactcttcttgaaggacagaggtttccaaaagcaaacttggataagaattctggcaggatactaaaaggaaaggctctaattcctgcatccaatcggaggaaagagattctagacttggtgaatgcttcggatggaccttgcagaggagaaattgcacagcgatttgggatttccttggatttacgaatgacagaagtcacgggtaggatccttcccccaccaaacctcaaactcggggcatccaatggccagacctccaaattcagtatcgatcagaactgccagtggaaccttgtgaagaagagactcgtagagggccgggatcttcagtgttggggcattgtcgacttcagtgctgagccgtctgacccccagcaggagcccctcaatggaaggatgtttattgagaagattgtgaggaagtgctgtgagcttggtatccgtatgaactccaacccatgcttcgtacacaaatctaagatggcagtgctctccgatccgcatcgactacaggaggagctaaacaaggcaaaacaggctgcagtgagcaagaagcagaggttgcagctccttttctgcccgatgtccgagcagcatccagggtacaagacactgaagctgatttgcgatacacagcttgggatcatgacccagtgtttcctgggcgaccgcgcaaacaagccgaatgggcaggaccagtacatgaccaaccttgccctcaagataaacggcaagcttgggggcagcaacgtccagctgttcgactcgctcccacgggtcggtggggcacctttcatgttcatcggtgctgacgtcaaccacccgtcaccggggaacgtggagagcccatcgattgcagccgtggttgcgtctatcaactccggtgtcagcaagtacgtgacaagaatccgtgcccagccgcaccgctgtgaggtgatccagcagctcggcgagatctgcctggagctcatcggagtcttcgagaagcgaaaccgcgtgaagccgcagaagatcatctacttccgcgacggcgtgagcgacgggcagttcgacatggtcctgaacgaggagctggcggacctggagaaggcgatcaaggtgggcggctacgcgccgaccgtcaccgtgatcgtggccaagaagcggcaccacacgcgcctgttccccaaggaccccagccagccgcagacgaagaacgggaacgtgccgcccggcacggtggtggacacgggcgtggtggacccgtccgcgtacgacttctacctgtgcagccacgccgggatcctgggcacgagcaggccgacgcactactacagcctggtggacgagcacggcttccggtccgacgacctgcagaagctggtctacaacctctgcttcgtgttcgcgcggtgcaccaagcccgtgtcgctggcgacgcccgtctactacgccgacctcgcggcgtaccgtggcaggctctactacgaggcggccatgatgccgtcccaccagcgagggacggggtcggcgtcctcgggctcctccgctgggacttttggcgtcactaacttcccgaggctgcacaaggatgtggagaacaacatgttcttcatctgacaccagtattttcttttgtgtgtacgcgtcttgccttttcttttgtgtggttatgagtttttttaaaaaaaaaagcgtacgctgcagtgtgcaaagttcgtactgggtatacgctgcatgactgtagatgaaggaaaagaagcaggtttgagttgtgaagaactgaagatagcgctgtaattgttccagcacaaggtccggttggaatgcaggcgttctatttcgagcgcatgtctggcgggcactcccaggcgtggttcaggcctgtcacaagatttcggtccagttttcattcccgtccgattcaag

SEQ ID NO: 15098 - DNA, 3047 bp, Zea Mays
ccccactcccgatgcgtccgccccaacgccgatagtcctcgcccctcccctccccgttgcgcccacccatgccccctccgcgcccgcgcctcccctcaaccaccgcaccgagatcgccgccgatctgagctcccctccccgttgcgcccacccatggtcgctgcttcgacttgctgttgctgctgctcctgcacgacgaccaatgaagggaacaacgtggtctgcgcgggcatggtgggcgcgtggaaggagaagtcgttgaaggcgccgccgaccgcagctcggctgtcgtcttgctgtcgtcttgctgagactgagacgcgatcaggtcggcggcctgcttccagtcgaacctctgcgccgggatggcgccggtggtgggcgacgcgaagaagttcgaggaagagtggagcgggacgggcgagtccagcagctcggcggggctgagcccgggcgggatggagaagtaggaggagggcgacatcggcggcggcgagatgggcaggctgggcggctgcacggacttgaacttgggcacgcctacgccgccgcccctggtggcgccgcggtggaacagccccctcggtgatggtggccaaccccaagatctatgtggccaaggccgtcgatgcctttgtggagttggcggaggcgagcaggtaaacagatatgcatatatcagggtccatgattttttgcatggcgtagctgatacctgggaacaaagccctggagtctggagaacgtgaactgcgtgacatgaggcaccgttaatttatcatcttacctttttttgactgcctgtttggtgggtgaacgtggtcgtcggatcggatgcgatgtttgctggggccgcgatcatgcgtcacccagtgattattccaggcaggcacttggcaagattgcctatttcttctctggaccacgatttatggtggccataattgttctcaaaacgttgctgccacaccagatccgcttggatttctggacacccccaataaatgattactgttaatccagtggatcagaaaatgacgtctctcttgttttctttgtttttctcctttgtccgtctgctttttgctcttgttctgctgctctaatcaggtggcttccatcctaatccgagtgtactcaacaaggttgagggagagactttggatacccattactgttagggagtcggtctagctacattcgtgataggccaataagttggagtttaatacgtaattcagatgtctatatctttaggaatctcttagtttctgcctaagatgtgggaatctatcaggaattcagctaattcaatgcgggctacttgccacaaaggttaatttttaggtaccagatcatctgatttctcagaagcaaaatgttgtttggagctcagtgacaccatcttgtaatgcctgtgattttacgggaaatggaggatcattctgtccatcccatgtctaagtctaaccatggctccttgtcaggaaatggttatgagatgaaacattcaggccataaagtttgcgattgggattcatcatcgaagtctgatcggtctcaccaagaagcatcagcagcaagtgaaagcagtccaaatgaacacacatcgactcaatcagacaatgatgaagatcatgggaaagataatcaggacacaatgaagccagtattgtccttggggaaggaaggctctgcctttttggccccaaaattacattacagcccatcttttgcttgtattccttatactgttgatgcttattatagtggggttggggtcttgacaggatatgctccacatgccattgtatgttcactcttaatttttcagtttctgtcttcctggccacattctgtccatccccagcaaaatgatacaacgaacactccgggtatgttacctgtggaacctgcagaagaaccaatatatgttaatgcaaaacaataccatgcaatccttaggaggaggcaaacacgtgctaaattggaggcccaaaacaagatggtgaaaaatcggaaggctgcaaaggagggcgagcctttttgggatagcccttggggccgtggaagaccgggatggcatattgaatgcagcgcaatgagtgctcactatttaggacatgtattcgatattcatggtggggggaaagatttgatttttcctcatcatgagaatgagcttgcacaaagccaagctgcttatcctgagagtgaggtgaagtgctggatgcataatggctttgttaacaaggatgataaaaaaatggcaaaatcagataataacttttcacgattagagatatcctgaatacttcctttgtcaaagctttcacttgtctgaaggaagacgtcggccttctgcttctccatcaccatcgttatcatgcaacctgctggaatgccacagcgggacaggagcatggggatgagcaggcgcaagatgatagcaagtggcgccggatcccgacgttcgacgactggaacctgcgggacgacatgcccgtcacccaatacttgcaagcagggacttcttcatcattgtgccgccgacagagaaggacgacgacgaggatctgttcaaggtgcccctgtgttccctgccaagccctacaactacaagaaggtgaaacaaaataggacgctgcattagtttctctcgccaattaattacactcagggggaaaaagttttctttcaccagctctgaagatagtatcagttaacattgtttcatatctccatttccatatacattatacccagtcggcactagcgagcgatgagaaagatactgaacaattctatgatccaagcatggaattataatcattgaaactctgttgctactgttacttggttcataggctgatatatacatccaagctcgcccgcaccgccacctccacagtttatcatggtgcttttgaccctgcttgacagaaccagcagtgatgtatatataggtcattttgcctaatttgcatgaatatgacaatgtttagttgtaaggttgtataaatggtcgattggggctgttggtttat

SEQ ID NO: 15099 - DNA, 2474 bp, Zea Mays
ccccactcccgatgcgtccgccccaacgccgatagtcctcgcccctcccctccccgttgcgcccacccatgccccctccgcgcccgcgcctcccctcaaccaccgcaccgagatcgccgccgatctgagctcccctccccgttgcgcccacccatggtcgctgcttcgacttgctgttgctgctgctcctgcacgacgaccaatgaagggaacaacgtggtctgcgcgggcatggtgggcgcgtggaaggagaagtcgttgaaggcgccgccgaccgcagctcggctgtcgtcttgctgtcgtcttgctgagactgagacgcgatcaggtcggcggcctgcttccagtcgaacctctgcgccgggatggcgccggtggtgggcgacgcgaagaagttcgaggaagagtggagcgggacgggcgagtccagcagctcggcggggctgagcccgggcgggatggagaagtaggaggagggcgacatcggcggcggcgagatgggcaggctgggcggctgcacggacttgaacttgggcacgcctacgccgccgcccctggtggcgccgcggtggaacagccccctcggtgatggtggccaaccccaagatctatgtggccaaggccgtcgatgcctttgtggagttggcggaggcgagcaggttaatttttaggtaccagatcatctgatttctcagaagcaaaatgttgtttggagctcagtgacaccatcttgtaatgcctgtgattttacgggaaatggaggatcattctgtccatcccatgtctaagtctaaccatggctccttgtcaggaaatggttatgagatgaaacattcaggccataaagtttgcgattgggattcatcatcgaagtctgatcggtctcaccaagaagcatcagcagcaagtgaaagcagtccaaatgaacacacatcgactcaatcagacaatgatgaagatcatgggaaagataatcaggacacaatgaagccagtattgtccttggggaaggaaggctctgcctttttggccccaaaattacattacagcccatcttttgcttgtattccttatactgttgatgcttattatagtggggttggggtcttgacaggatatgctccacatgccattgtccatccccagcaaaatgatacaacgaacactccgggtatgttacctgtggaacctgcagaagaaccaatatatgttaatgcaaaacaataccatgcaatccttaggaggaggcaaacacgtgctaaattggaggcccaaaacaagatggtgaaaaatcggaaggctgcaaaggagggcgagcctttttgggatagcccttggggccgtggaagaccgggatggcatattgaatgcagcgcaatgagtgctcactatttaggacatgtattcgatattcatggtggggggaaagatttgatttttcctcatcatgagaatgagcttgcacaaagccaagctgcttatcctgagagtgaggtgaagtgctggatgcataatggctttgttaacaaggatgataaaaaaatggcaaaatcagataataacttttcacgattagagatatcactgctctttaccatccattggctttaagatttttcttgatgcgcactcattatagatcagatgtgaaccattctgatcaagcacttgagattgcatctgatcgtgtctattacatttatcagttagtgcttctgcatctcatcacagatcctgaatacttcctttgtcaaagctttcacttgtctgaaggaagacgtcggccttctgcttctccatcaccatcgttatcatgcaacctgctggaatgccacagcgggacaggagcatggggatgagcaggcgcaagatgatagcaagtggcgccggatcccgacgttcgacgactggaacctgcgggacgacatgcccgtcacccaatacttgcaagcagggacttcttcatcattgtgccgccgacagagaaggacgacgacgaggatctgttcaaggtgcccctgtgttccctgccaagccctacaactacaagaaggtgaaacaaaataggacgctgcattagtttctctcgccaattaattacactcagggggaaaaagttttctttcaccagctctgaagatagtatcagttaacattgtttcatatctccatttccatatacattatacccagtcggcactagcgagcgatgagaaagatactgaacaattctatgatccaagcatggaattataatcattgaaactctgttgctactgttacttggttcataggctgatatatacatccaagctcgcccgcaccgccacctccacagtttatcatggtgcttttgaccctgcttgacagaaccagcagtgatgtatatataggtcattttgcctaatttgcatgaatatgacaatgtttagttgtaaggttgtataaatggtcgattggggctgttggtttat

SEQ ID NO: 15100 - DNA, 2132 bp, Zea Mays
ccccactcccgatgcgtccgccccaacgccgatagtcctcgcccctcccctccccgttgcgcccacccatgccccctccgcgcccgcgcctcccctcaaccaccgcaccgagatcgccgccgatctgagctcccctccccgttgcgcccacccatggtcgctgcttcgacttgctgttgctgctgctcctgcacgacgaccaatgaagggaacaacgtggtctgcgcgggcatggtgggcgcgtggaaggagaagtcgttgaaggcgccgccgaccgcagctcggctgtcgtcttgctgtcgtcttgctgagactgagacgcgatcaggtcggcggcctgcttccagtcgaacctctgcgccgggatggcgccggtggtgggcgacgcgaagaagttcgaggaagagtggagcgggacgggcgagtccagcagctcggcggggctgagcccgggcgggatggagaagtaggaggagggcgacatcggcggcggcgagatgggcaggctgggcggctgcacggacttgaacttgggcacgcctacgccgccgcccctggtggcgccgcggtggaacagccccctcggtgatggtggccaaccccaagatctatgtggccaaggccgtcgatgcctttgtggagttggcggaggcgagcaggttaatttttaggtaccagatcatctgatttctcagaagcaaaatgttgtttggagctcagtgacaccatcttgtaatgcctgtgattttacgggaaatggaggatcattctgtccatcccatgtctaagtctaaccatggctccttgtcaggaaatggttatgagatgaaacattcaggccataaagtttgcgattgggattcatcatcgaagtctgatcggtctcaccaagaagcatcagcagcaagtgaaagcagtccaaatgaacacacatcgactcaatcagacaatgatgaagatcatgggaaagataatcaggacacaatgaagccagtattgtccttggggaaggaaggctctgcctttttggccccaaaattacattacagcccatcttttgcttgtattccttatactgttgatgcttattatagtggggttggggtcttgacaggatatgctccacatgccattgtccatccccagcaaaatgatacaacgaacactccgggtatgttacctgtggaacctgcagaagaaccaatatatgttaatgcaaaacaataccatgcaatccttaggaggaggcaaacacgtgctaaattggaggcccaaaacaagatggtgaaaaatcggaaggctgcaaaggagggcgagcctttttgggatagcccttggggccgtggaagaccgggatggcatattgaatgcagcgcaatgagtgctcactatttaggacatgtattcgatattcatggtggggggaaagatttgatttttcctcatcatgagaatgagcttgcacaaagccaagctgcttatcctgagagtgaggtgaagtgctggatgcataatggctttgttaacaaggatgataaaaaaatggcaaaatcagataataacttttcacgattagagatgtacttgacttactttaggttcaaattatagtcattttgtgacttattggatttaaatttgagctgagcagataacaagcgacttgggggtattgatatttatttttctgtcttgtttaatctatttgttcaactaatttcaaaacagttagtgcttctgcatctcatcacagatcctgaatacttcctttgtcaaagctttcacttgtctgaaggaagacgtcggccttctgcttctccatcaccatcgttatcatgcaacctgctggaatgccacagcgggacaggagcatggggatgagcaggcgcaagatgatagcaagtggcgccggatcccgacgttcgacgactggaacctgcgggacgacatgcccgtcacccaatacttgcaagcagggacttcttcatcattgtgccgccgacagagaaggacgacgacgaggatctgttcaaggtgcccctgtgttccctgccaagccctacaactacaagaaggagctaactcaggcttacgaggtcctcagtgatcttgaaaatcaagagatctatgat

SEQ ID NO: 15101 - DNA, 2097 bp, Zea Mays
ccccactcccgatgcgtccgccccaacgccgatagtcctcgcccctcccctccccgttgcgcccacccatgccccctccgcgcccgcgcctcccctcaaccaccgcaccgagatcgccgccgatctgagctcccctccccgttgcgcccacccatggtcgctgcttcgacttgctgttgctgctgctcctgcacgacgaccaatgaagggaacaacgtggtctgcgcgggcatggtgggcgcgtggaaggagaagtcgttgaaggcgccgccgaccgcagctcggctgtcgtcttgctgtcgtcttgctgagactgagacgcgatcaggtcggcggcctgcttccagtcgaacctctgcgccgggatggcgccggtggtgggcgacgcgaagaagttcgaggaagagtggagcgggacgggcgagtccagcagctcggcggggctgagcccgggcgggatggagaagtaggaggagggcgacatcggcggcggcgagatgggcaggctgggcggctgcacggacttgaacttgggcacgcctacgccgccgcccctggtggcgccgcggtggaacagccccctcggtgatggtggccaaccccaagatctatgtggccaaggccgtcgatgcctttgtggagttggcggaggcgagcaggttaatttttaggtaccagatcatctgatttctcagaagcaaaatgttgtttggagctcagtgacaccatcttgtaatgcctgtgattttacgggaaatggaggatcattctgtccatcccatgtctaagtctaaccatggctccttgtcaggaaatggttatgagatgaaacattcaggccataaagtttgcgattgggattcatcatcgaagtctgatcggtctcaccaagaagcatcagcagcaagtgaaagcagtccaaatgaacacacatcgactcaatcagacaatgatgaagatcatgggaaagataatcaggacacaatgaagccagtattgtccttggggaaggaaggctctgcctttttggccccaaaattacattacagcccatcttttgcttgtattccttatactgttgatgcttattatagtggggttggggtcttgacaggatatgctccacatgccattgtccatccccagcaaaatgatacaacgaacactccgggtatgttacctgtggaacctgcagaagaaccaatatatgttaatgcaaaacaataccatgcaatccttaggaggaggcaaacacgtgctaaattggaggcccaaaacaagatggtgaaaaatcggaaggctgcaaaggagggcgagcctttttgggatagcccttggggccgtggaagaccgggatggcatattgaatgcagcgcaatgagtgctcactatttaggacatgtattcgatattcatggtggggggaaagatttgatttttcctcatcatgagaatgagcttgcacaaagccaagctgcttatcctgagagtgaggtgaagtgctggatgcataatggctttgttaacaaggatgataaaaaaatggcaaaatcagataataacttttcacgattagagatatcactgctctttaccatccattggctttaagatttttcttgatgcgcactcattatagatcagatgtgaaccattctgatcaagcacttgagattgcatctgatcgtgtctattacatttatcagatcctgaatacttcctttgtcaaagctttcacttgtctgaaggaagacgtcggccttctgcttctccatcaccatcgttatcatgcaacctgctggaatgccacagcgggacaggagcatggggatgagcaggcgcaagatgatagcaagtggcgccggatcccgacgttcgacgactggaacctgcgggacgacatgcccgtcacccaatacttgcaagcagggacttcttcatcattgtgccgccgacagagaaggacgacgacgaggatctgttcaaggtgcccctgtgttccctgccaagccctacaactacaagaaggagctaactcaggcttacgaggtcctcagtgatcttgaaaatcaagagatctatgatgacagagacaac

SEQ ID NO: 15102 - DNA, 2621 bp, Zea Mays
ccccactcccgatgcgtccgccccaacgccgatagtcctcgcccctcccctccccgttgcgcccacccatgccccctccgcgcccgcgcctcccctcaaccaccgcaccgagatcgccgccgatctgagctcccctccccgttgcgcccacccatggtcgctgcttcgacttgctgttgctgctgctcctgcacgacgaccaatgaagggaacaacgtggtctgcgcgggcatggtgggcgcgtggaaggagaagtcgttgaaggcgccgccgaccgcagctcggctgtcgtcttgctgtcgtcttgctgagactgagacgcgatcaggtcggcggcctgcttccagtcgaacctctgcgccgggatggcgccggtggtgggcgacgcgaagaagttcgaggaagagtggagcgggacgggcgagtccagcagctcggcggggctgagcccgggcgggatggagaagtaggaggagggcgacatcggcggcggcgagatgggcaggctgggcggctgcacggacttgaacttgggcacgcctacgccgccgcccctggtggcgccgcggtggaacagccccctcggtgatggtggccaaccccaagatctatgtggccaaggccgtcgatgcctttgtggagttggcggaggcgagcaggttaatttttaggtaccagatcatctgatttctcagaagcaaaatgttgtttggagctcagtgacaccatcttgtaatgcctgtgattttacgggaaatggaggatcattctgtccatcccatgtctaagtctaaccatggctccttgtcaggaaatggttatgagatgaaacattcaggccataaagtttgcgattgggattcatcatcgaagtctgatcggtctcaccaagaagcatcagcagcaagtgaaagcagtccaaatgaacacacatcgactcaatcagacaatgatgaagatcatgggaaagataatcaggacacaatgaagccagtattgtccttggggaaggaaggctctgcctttttggccccaaaattacattacagcccatcttttgcttgtattccttatactgttgatgcttattatagtggggttggggtcttgacaggatatgctccacatgccattgtccatccccagcaaaatgatacaacgaacactccgggtatgttacctgtggaacctgcagaagaaccaatatatgttaatgcaaaacaataccatgcaatccttaggaggaggcaaacacgtgctaaattggaggcccaaaacaagatggtgaaaaatcggaaggctgcaaaggagggcgagcctttttgggatagcccttggggccgtggaagaccgggatggcatattgaatgcagcgcaatgagtgctcactatttaggacatgtattcgatattcatggtggggggaaagatttgatttttcctcatcatgagaatgagcttgcacaaagccaagctgcttatcctgagagtgaggtgaagtgctggatgcataatggctttgttaacaaggatgataaaaaaatggcaaaatcagataataacttttcacgattagagatatcactgctctttaccatccattggctttaagatttttcttgatgcgcactcattatagatcagatgtgaaccattctgatcaagcacttgagattgcatctgatcgtgtctattacatttatcagatcctgaatacttcctttgtcaaagctttcacttgtctgaaggaagacgtcggccttctgcttctccatcaccatcgttatcatgcaacctgctggaatgccacagcgggacaggagcatggggatgagcaggcgcaagatgatagcaagtggcgccggatcccgacgttcgacgactggaacctgcgggacgacatgcccgtcacccaatacttgcaagcagggacttcttcatcattgtgccgccgacagagaaggacgacgacgaggatctgttcaaggtgcccctgtgttccctgccaagccctacaactacaagaagttctaggagctaactcaggcttacgaggtcctcagtgatcttgaaaatcaagagatctatgatgacagagacaacataatcctacacctgtttcattattggagtaatgcggtgctacatgtatggttctcttcttaaagctgtaagactaaggatcaccttttcctcttcgaacaagaaaacgaatgatgaaacggacttatcgattaccttcggttggatctgtcctcttggttgatacttgctgagccccggcggttgcgaatgcgactagtacaagaaacaacagcagcggcatggacgtcgacacagcagcgccatggacgcagcaagagcacctcgtcatcgtcatcatctctctctatcttccgcttccaccctcctagtcctacctcagtacctcactcagctcgaccgttcaaataaagctgatcttcagtctgtcggtcggtcagttgtgtgttgtccatccacacacaaaaaaaaatatgtaacgcgcattttaactgtataaattgggattttcccgctaactacagtatgaatactatgcgtgaccgaaaattaatataacaacaatatctaattgtgac

SEQ ID NO: 15103 - DNA, 2282 bp, Zea Mays
ccccactcccgatgcgtccgccccaacgccgatagtcctcgcccctcccctccccgttgcgcccacccatgccccctccgcgcccgcgcctcccctcaaccaccgcaccgagatcgccgccgatctgagctcccctccccgttgcgcccacccatggtcgctgcttcgacttgctgttgctgctgctcctgcacgacgaccaatgaagggaacaacgtggtctgcgcgggcatggtgggcgcgtggaaggagaagtcgttgaaggcgccgccgaccgcagctcggctgtcgtcttgctgtcgtcttgctgagactgagacgcgatcaggtcggcggcctgcttccagtcgaacctctgcgccgggatggcgccggtggtgggcgacgcgaagaagttcgaggaagagtggagcgggacgggcgagtccagcagctcggcggggctgagcccgggcgggatggagaagtaggaggagggcgacatcggcggcggcgagatgggcaggctgggcggctgcacggacttgaacttgggcacgcctacgccgccgcccctggtggcgccgcggtggaacagccccctcggtgatggtggccaaccccaagatctatgtggccaaggccgtcgatgcctttgtggagttggcggaggcgagcaggttaatttttaggtaccagatcatctgatttctcagaagcaaaatgttgtttggagctcagtgacaccatcttgtaatgcctgtgattttacgggaaatggaggatcattctgtccatcccatgtctaagtctaaccatggctccttgtcaggaaatggttatgagatgaaacattcaggccataaagtttgcgattgggattcatcatcgaagtctgatcggtctcaccaagaagcatcagcagcaagtgaaagcagtccaaatgaacacacatcgactcaatcagacaatgatgaagatcatgggaaagataatcaggacacaatgaagccagtattgtccttggggaaggaaggctctgcctttttggccccaaaattacattacagcccatcttttgcttgtattccttatactgttgatgcttattatagtggggttggggtcttgacaggatatgctccacatgccattgtccatccccagcaaaatgatacaacgaacactccgggtatgttacctgtggaacctgcagaagaaccaatatatgttaatgcaaaacaataccatgcaatccttaggaggaggcaaacacgtgctaaattggaggcccaaaacaagatggtgaaaaatcggaaggctgcaaaggagggcgagcctttttgggatagcccttggggccgtggaagaccgggatggcatattgaatgcagcgcaatgagtgctcactatttaggacatgtattcgatattcatggtggggggaaagatttgatttttcctcatcatgagaatgagcttgcacaaagccaagctgcttatcctgagagtgaggtgaagtgctggatgcataatggctttgttaacaaggatgataaaaaaatggcaaaatcagataataacttttcacgattagagatatcactgctctttaccatccattggctttaagatttttcttgatgcgcactcattatagatcagatgtgaaccattctgatcaagcacttgagattgcatctgatcgtgtctattacatttatcagatcctgaatacttcctttgtcaaagctttcacttgtctgaaggaagacgtcggccttctgcttctccatcaccatcgttatcatgcaacctgctggaatgccacagcgggacaggagcatggggatgagcaggcgcaagatgatagcaagtggcgccggatcccgacgttcgacgactggaacctgcgggacgacatgcccgtcacccaatacttgcaagcagggacttcttcatcattgtgccgccgacagagaaggacgacgacgaggatctgttcaaggtgcccctgtgttccctgccaagccctacaactacaagaagttctaggagctaactcaggcttacgaggtcctcagtgatcttgaaaatcaagagatctatgatgacagagacaacataatcctacacctgtttcattattggagtaatgcggtgctacatgtatggttctcttcttaaagctgtaagactaaggatcaccttttcctcttcgaacaagagcccaggaactgcgacgaggcgtgcgaggccgacctcggcgccacgcccgactgcccactgacgttgctgctcat

SEQ ID NO: 15104 - DNA, 2307 bp, Zea Mays
ccccactcccgatgcgtccgccccaacgccgatagtcctcgcccctcccctccccgttgcgcccacccatgccccctccgcgcccgcgcctcccctcaaccaccgcaccgagatcgccgccgatctgagctcccctccccgttgcgcccacccatggtcgctgcttcgacttgctgttgctgctgctcctgcacgacgaccaatgaagggaacaacgtggtctgcgcgggcatggtgggcgcgtggaaggagaagtcgttgaaggcgccgccgaccgcagctcggctgtcgtcttgctgtcgtcttgctgagactgagacgcgatcaggtcggcggcctgcttccagtcgaacctctgcgccgggatggcgccggtggtgggcgacgcgaagaagttcgaggaagagtggagcgggacgggcgagtccagcagctcggcggggctgagcccgggcgggatggagaagtaggaggagggcgacatcggcggcggcgagatgggcaggctgggcggctgcacggacttgaacttgggcacgcctacgccgccgcccctggtggcgccgcggtggaacagccccctcggtgatggtggccaaccccaagatctatgtggccaaggccgtcgatgcctttgtggagttggcggaggcgagcaggttaatttttaggtaccagatcatctgatttctcagaagcaaaatgttgtttggagctcagtgacaccatcttgtaatgcctgtgattttacgggaaatggaggatcattctgtccatcccatgtctaagtctaaccatggctccttgtcaggaaatggttatgagatgaaacattcaggccataaagtttgcgattgggattcatcatcgaagtctgatcggtctcaccaagaagcatcagcagcaagtgaaagcagtccaaatgaacacacatcgactcaatcagacaatgatgaagatcatgggaaagataatcaggacacaatgaagccagtattgtccttggggaaggaaggctctgcctttttggccccaaaattacattacagcccatcttttgcttgtattccttatactgttgatgcttattatagtggggttggggtcttgacaggatatgctccacatgccattgtccatccccagcaaaatgatacaacgaacactccgggtatgttacctgtggaacctgcagaagaaccaatatatgttaatgcaaaacaataccatgcaatccttaggaggaggcaaacacgtgctaaattggaggcccaaaacaagatggtgaaaaatcggaaggctgcaaaggagggcgagcctttttgggatagcccttggggccgtggaagaccgggatggcatattgaatgcagcgcaatgagtgctcactatttaggacatgtattcgatattcatggtggggggaaagatttgatttttcctcatcatgagaatgagcttgcacaaagccaagctgcttatcctgagagtgaggtgaagtgctggatgcataatggctttgttaacaaggatgataaaaaaatggcaaaatcagataataacttttcacgattagagatatcactgctctttaccatccattggctttaagatttttcttgatgcgcactcattatagatcagatgtgaaccattctgatcaagcacttgagattgcatctgatcgtgtctattacatttatcagttagtgcttctgcatctcatcacagatcctgaatacttcctttgtcaaagctttcacttgtctgaaggaagacgtcggccttctgcttctccatcaccatcgttatcatgcaacctgctggaatgccacagcgggacaggagcatggggatgagcaggcgcaagatgatagcaagtggcgccggatcccgacgttcgacgactggaacctgcgggacgacatgcccgtcacccaatacttgcaagcagggacttcttcatcattgtgccgccgacagagaaggacgacgacgaggatctgttcaaggtgcccctgtgttccctgccaagccctacaactacaagaagttctaggagctaactcaggcttacgaggtcctcagtgatcttgaaaatcaagagatctatgatgacagagacaacataatcctacacctgtttcattattggagtaatgcggtgctacatgtatggttctcttcttaaagctgtaagactaaggatcaccttttcctcttcgaacaagagcccaggaactgcgacgaggcgtgcgaggccgacctcggcgccacgcccgactgcccactgacgttgctgctcat

SEQ ID NO: 15105 - DNA, 3001 bp, Zea Mays
ccccactcccgatgcgtccgccccaacgccgatagtcctcgcccctcccctccccgttgcgcccacccatgccccctccgcgcccgcgcctcccctcaaccaccgcaccgagatcgccgccgatctgagctcccctccccgttgcgcccacccatggtcgctgcttcgacttgctgttgctgctgctcctgcacgacgaccaatgaagggaacaacgtggtctgcgcgggcatggtgggcgcgtggaaggagaagtcgttgaaggcgccgccgaccgcagctcggctgtcgtcttgctgtcgtcttgctgagactgagacgcgatcaggtcggcggcctgcttccagtcgaacctctgcgccgggatggcgccggtggtgggcgacgcgaagaagttcgaggaagagtggagcgggacgggcgagtccagcagctcggcggggctgagcccgggcgggatggagaagtaggaggagggcgacatcggcggcggcgagatgggcaggctgggcggctgcacggacttgaacttgggcacgcctacgccgccgcccctggtggcgccgcggtggaacagccccctcggtgatggtggccaaccccaagatctatgtggccaaggccgtcgatgcctttgtggagttggcggaggcgagcaggttaatttttaggtaccagatcatctgatttctcagaagcaaaatgttgtttggagctcagtgacaccatcttgtaatgcctgtgattttacgggaaatggaggatcattctgtccatcccatgtctaagtctaaccatggctccttgtcaggaaatggttatgagatgaaacattcaggccataaagtttgcgattgggattcatcatcgaagtctgatcggtctcaccaagaagcatcagcagcaagtgaaagcagtccaaatgaacacacatcgactcaatcagacaatgatgaagatcatgggaaagataatcaggacacaatgaagccagtattgtccttggggaaggaaggctctgcctttttggccccaaaattacattacagcccatcttttgcttgtattccttatactgttgatgcttattatagtggggttggggtcttgacaggatatgctccacatgccattgtccatccccagcaaaatgatacaacgaacactccgggtatgttacctgtggaacctgcagaagaaccaatatatgttaatgcaaaacaataccatgcaatccttaggaggaggcaaacacgtgctaaattggaggcccaaaacaagatggtgaaaaatcggaaggctgcaaaggagggcgagcctttttgggatagcccttggggccgtggaagaccgggatggcatattgaatgcagcgcaatgagtgctcactatttaggacatgtattcgatattcatggtggggggaaagatttgatttttcctcatcatgagaatgagcttgcacaaagccaagctgcttatcctgagagtgaggtgaagtgctggatgcataatggctttgttaacaaggatgataaaaaaatggcaaaatcagataataacttttcacgattagagatatcactgctctttaccatccattggctttaagatttttcttgatgcgcactcattatagatcagatgtgaaccattctgatcaagcacttgagattgcatctgatcgtgtctattacatttatcagatcctgaatacttcctttgtcaaagctttcacttgtctgaaggaagacgtcggccttctgcttctccatcaccatcgttatcatgcaacctgctggaatgccacagcgggacaggagcatggggatgagcaggcgcaagatgatagcaagtggcgccggatcccgacgttcgacgactggaacctgcgggacgacatgcccgtcacccaatacttgcaagcagggacttcttcatcattgtgccgccgacagagaaggacgacgacgaggatctgttcaaggtgcccctgtgttccctgccaagccctacaactacaagaaggtgaaacaaaataggacgctgcattagtttctctcgccaattaattacactcagggggaaaaagttttctttcaccagctctgaagatagtatcagttaacattgtttcatatctccatttccatatacattatacccagtcggcactagcgagcgatgagaaagatactgaacaattctatgatccaagcatggaattataatcattgaaactctgttgctactgttacttggttcataggctgatatatacatccaagctcgcccgcaccgccacctccacagtttatcatggtgcttttgaccctgcttgacagaaccagcagtgatgtatatataggtcattttgcctaatttgcatgaatatgacaatgtttagttgtaaggttgtataaatggtcgattggggctgttggtttatgattgtgatgaaaactaagaactcatgaatttgttttagttctaggagctaactcaggcttacgaggtcctcagtgatcttgaaaatcaagagatctatgatggtagtgttcttaatcacttttatgctttttcttagtgatgaaatgaagtttttaatctttgcacatgtctttcccagacagagacaacataatcctacacctgtttcattattggagtaatgcggtgctacatgtatggttctcttcttaaagctgatgcagcaccaagactggcagcatcaggttgatacccagatatagatctactgctcccacagtccacagcaagagaggcagctgcaagcaagtcaattttttacattggtgttaatttagtacatctgtctagtatttctcaagtagggtcatgctttaaatttaaatgggggcagtctcacattgtggagagccaagaaaacagggtgtgtctctctgaagacacgacagccctgaaggtaatacactgcagatgcaaaacattgacattatgaatccaatctatatgctgc

SEQ ID NO: 15106 - DNA, 2525 bp, Zea Mays
ccccactcccgatgcgtccgccccaacgccgatagtcctcgcccctcccctccccgttgcgcccacccatgccccctccgcgcccgcgcctcccctcaaccaccgcaccgagatcgccgccgatctgagctcccctccccgttgcgcccacccatggtcgctgcttcgacttgctgttgctgctgctcctgcacgacgaccaatgaagggaacaacgtggtctgcgcgggcatggtgggcgcgtggaaggagaagtcgttgaaggcgccgccgaccgcagctcggctgtcgtcttgctgtcgtcttgctgagactgagacgcgatcaggtcggcggcctgcttccagtcgaacctctgcgccgggatggcgccggtggtgggcgacgcgaagaagttcgaggaagagtggagcgggacgggcgagtccagcagctcggcggggctgagcccgggcgggatggagaagtaggaggagggcgacatcggcggcggcgagatgggcaggctgggcggctgcacggacttgaacttgggcacgcctacgccgccgcccctggtggcgccgcggtggaacagccccctcggtgatggtggccaaccccaagatctatgtggccaaggccgtcgatgcctttgtggagttggcggaggcgagcaggttaatttttaggtaccagatcatctgatttctcagaagcaaaatgttgtttggagctcagtgacaccatcttgtaatgcctgtgattttacgggaaatggaggatcattctgtccatcccatgtctaagtctaaccatggctccttgtcaggaaatggttatgagatgaaacattcaggccataaagtttgcgattgggattcatcatcgaagtctgatcggtctcaccaagaagcatcagcagcaagtgaaagcagtccaaatgaacacacatcgactcaatcagacaatgatgaagatcatgggaaagataatcaggacacaatgaagccagtattgtccttggggaaggaaggctctgcctttttggccccaaaattacattacagcccatcttttgcttgtattccttatactgttgatgcttattatagtggggttggggtcttgacaggatatgctccacatgccattgtccatccccagcaaaatgatacaacgaacactccgggtatgttacctgtggaacctgcagaagaaccaatatatgttaatgcaaaacaataccatgcaatccttaggaggaggcaaacacgtgctaaattggaggcccaaaacaagatggtgaaaaatcggaaggctgcaaaggagggcgagcctttttgggatagcccttggggccgtggaagaccgggatggcatattgaatgcagcgcaatgagtgctcactatttaggacatgtattcgatattcatggtggggggaaagatttgatttttcctcatcatgagaatgagcttgcacaaagccaagctgcttatcctgagagtgaggtgaagtgctggatgcataatggctttgttaacaaggatgataaaaaaatggcaaaatcagataataacttttcacgattagagatatcactgctctttaccatccattggctttaagatttttcttgatgcgcactcattatagatcagatgtgaaccattctgatcaagcacttgagattgcatctgatcgtgtctattacatttatcagatcctgaatacttcctttgtcaaagctttcacttgtctgaaggaagacgtcggccttctgcttctccatcaccatcgttatcatgcaacctgctggaatgccacagcgggacaggagcatggggatgagcaggcgcaagatgatagcaagtggcgccggatcccgacgttcgacgactggaacctgcgggacgacatgcccgtcacccaatacttgcaagcagggacttcttcatcattgtgccgccgacagagaaggacgacgacgaggatctgttcaaggtgcccctgtgttccctgccaagccctacaactacaagaagttctaggagctaactcaggcttacgaggtcctcagtgatcttgaaaatcaagagatctatgatgacagagacaacataatcctacacctgtttcattattggagtaatgcggtgctacatgtatggttctcttcttaaagctgtaagactaaggatcaccttttcctcttcgaacaaggaaaaaaaaacagtggtgcagtggacggtcaagtctggcaaggtctcaattccataatcatcctaggggcatggtctctatgggatcttcacaattgatgtgttttcgatggagtctcaccaagcctggtaaacactctcctgttggccagcaaggagattaagctgtgggcctttgcggggggcaaagatattataaatctgattgcctcacagataggtggtttagtgtctttctctggtcatgtagttatatcttgtagcacaagtgcaaatgtaatctgtgaaacaaaggattcggggtgtattgtaagggttct

SEQ ID NO: 15107 - DNA, 1557 bp, Zea Mays
ttataaatagcttgcattaaattctgtgaaaattatataaaaataagagtgttgataaaaaactaagaacgttgataaaaggctatttatgatctctagataaaagatctaaggagtacaaaaccataatgcataggctccttcaaatccaaaaacatttttgttgccaaacaaatgagcctgcattaataccgtcattcctgtaatgtgcatttaggtccatccccagcaaaatgatacaacgaacactccgggtatgttacctgtggaacctgcagaagaaccaatatatgttaatgcaaaacaataccatgcaatccttaggaggaggcaaacacgtgctaaattggaggcccaaaacaagatggtgaaaaatcggaaggctgcaaaggagggcgagcctttttgggatagcccttggggccgtggaagaccgggatggcatattgaatgcagcgcaatgagtgctcactatttaggacatgtattcgatattcatggtggggggaaagatttgatttttcctcatcatgagaatgagcttgcacaaagccaagctgcttatcctgagagtgaggtgaagtgctggatgcataatggctttgttaacaaggatgataaaaaaatggcaaaatcagataataacttttcacgattagagatatcactgctctttaccatccattggctttaagatttttcttgatgcgcactcattatagatcagatgtgaaccattctgatcaagcacttgagattgcatctgatcgtgtctattacatttatcagttagtgcttctgcatctcatcacagatcctgaatacttcctttgtcaaagctttcacttgtctgaaggaagacgtcggccttctgcttctccatcaccatcgttatcatgcaacctgctggaatgccacagcgggacaggagcatggggatgagcaggcgcaagatgatagcaagtggcgccggatcccgacgttcgacgactggaacctgcgggacgacatgcccgtcacccaatacttgcaagcagggacttcttcatcattgtgccgccgacagagaaggacgacgacgaggatctgttcaaggtgcccctgtgttccctgccaagccctacaactacaagaaggtgaaacaaaataggacgctgcattagtttctctcgccaattaattacactcagggggaaaaagttttctttcaccagctctgaagatagtatcagttaacattgtttcatatctccatttccatatacattatacccagtcggcactagcgagcgatgagaaagatactgaacaattctatgatccaagcatggaattataatcattgaaactctgttgctactgttacttggttcataggctgatatatacatccaagctcgcccgcaccgccacctccacagtttatcatggtgcttttgaccctgcttgacagaaccagcagtgatgtatatataggtcattttgcctaatttgcatgaatatgacaatgtttagttgtaaggttgtataaatggtcgattggggctgttggtttat

SEQ ID NO: 15108 - DNA, 1174 bp, Zea Mays
ttataaatagcttgcattaaattctgtgaaaattatataaaaataagagtgttgataaaaaactaagaacgttgataaaaggctatttatgatctctagataaaagatctaaggagtacaaaaccataatgcataggctccttcaaatccaaaaacatttttgttgccaaacaaatgagcctgcattaataccgtcattcctgtaatgtgcatttaggtccatccccagcaaaatgatacaacgaacactccgggtatgttacctgtggaacctgcagaagaaccaatatatgttaatgcaaaacaataccatgcaatccttaggaggaggcaaacacgtgctaaattggaggcccaaaacaagatggtgaaaaatcggaaggctgcaaaggagggcgagcctttttgggatagcccttggggccgtggaagaccgggatggcatattgaatgcagcgcaatgagtgctcactatttaggacatgtattcgatattcatggtggggggaaagatttgatttttcctcatcatgagaatgagcttgcacaaagccaagctgcttatcctgagagtgaggtgaagtgctggatgcataatggctttgttaacaaggatgataaaaaaatggcaaaatcagataataacttttcacgattagagatatcactgctctttaccatccattggctttaagatttttcttgatgcgcactcattatagatcagatgtgaaccattctgatcaagcacttgagattgcatctgatcgtgtctattacatttatcagatcctgaatacttcctttgtcaaagctttcacttgtctgaaggaagacgtcggccttctgcttctccatcaccatcgttatcatgcaacctgctggaatgccacagcgggacaggagcatggggatgagcaggcgcaagatgatagcaagtggcgccggatcccgacgttcgacgactggaacctgcgggacgacatgcccgtcacccaatacttgcaagcagggacttcttcatcattgtgccgccgacagagaaggacgacgacgaggatctgttcaaggtgcccctgtgttccctgccaagccctacaactacaagaagttctaggagctaactcaggcttacgaggtcctcagtgatcttgaaaatcaagagatctatgat

SEQ ID NO: 15109 - DNA, 483 bp, Zea Mays
gtcgagcatgtccagagggtggttttcttcgtacagttgccagacctgaaagcgcacaagattagctagaaattacaacctgacacgctggagcgacttcgtttcttcagttatgtattacggtacagattcagatctatattatgtttgtaattcagaacaataatatgtttgttacgctagccaaaatcaaaatggaaaagaagaaaaatgcaatcaacctattatgcagcaatgagatcccaattcatgctgccatagtaaaacttggcaccctttgttcaagaatcataaacctataggcattactacagctaccactttatttacagtttggcaattacacaaaaaatatatctgaaactatgtgatacaagaggtttctatgaaggcatgcgagtttgatattgtaaattcctagcatcaattttgatgaagatcatactaacagtacagaaaccagactgcaacactgcccagctt

SEQ ID NO: 15110 - DNA, 4211 bp, Zea Mays
tcaccttttcactgctccagcgaagaaggcacacagccagccgccgccgccgattattcatcttcctcacagcgccggcgctacatcttccgctacctcggcacaggcgacggcgggggcgctcaggctcgggctcgcgctcggagcgacggcgtcagcggcttccccctccgcctcttgccagtcgcctcgcgcccttgcctccggtcctccgcacaccagccggtgaccctgtgtgcgtgcccccctctctctctcctcccgcctccggtggatcgtcaaacggagccaggcctcggcgtctgcgccgcgcgcggcctgagggcagccggggggggggggggggggttcagcagccgctgctccagcaaggcggtcgcggggctttgggagcgcttatgccccaaagcgaagatcatgtcgagagccttagcgcgtcacccggtacctcctttcctgaaacttcgttccacggtttgcgacgacggctactggatgggcagattggaccacaaggactggctcgctccaaacgaggtgctcaaagtatttgtgaacatcagggacactagcctgataaacagcgtattcaagaaggcatgcagccggagagactacaagcccagcgaggcgctctacagcttgatgatcgacaggctggcctgcgccaggaggttcagtgatgtggaggagttgctgtccaaggcaagaaccgaaaagttgaggttttcagacgagttcttctacaggctgatcaagatgtacggcaacgtggcagaacatcctcagaaagccatggacaccctctttgcaatgcctgggtataattgttggccttctacaaagacattcaattacgtccttcacatgcttgtgtgcaagcggcagtacgaggttgttcatgaggtctactcgagcgcgcccaggcttggggtgacgttggacacatgttctttcaatatccttgtcaagggtttgtgccagtacggtaaatttgatgaggctatctccttgctgcatgagatgccgaagcaagggtgtcagcctaacgcgacaacctactcgaccttcatgcatttcctctgtcagcgcagtcaggttgataaagcatttgagctgtttgagagaatgcggaagcaggatattgctgcagatacagttgtgtacaatattttgatctctggtctctgcagggacgaaagagtgaccgaggcattcgacctgttcaagtcaatgacttctgaagggtgctgtcctaattcagggacatatcaggtacttcttgatggtctaatcagtttaggaaaactttttgaagccaaaagccttgtttgcactatgagtacagagggtgtgaggccgagcttccaatcatacaagctactgattgatggcctctgtagtgatgactgcgtgggtgatgcacatcttgtcttgaagcaaatggtgggccaaggttttgttccccggatgggcacttggacaaaacttctcacatccatgttcaagttttagcttccgcatcggtgatttccttggcctaacaagacacatgaatgaaaaattcaaattttggcagactcttgactgaaggtcatcaagtttggttagaggagcaagtggaccaatggcggcttgagtttgtgcttgtagtcctgcataccattgctacctatacatgattatcgtttgttggaatagcttccacggacatcaacctgaattatataagtctgacaagaaaaaccgttcgattctgtgatttatgttctgggcagttgaatgactaatcttgggcatttgaaagcctacagaactcttcgaaccctgttatgcaaggtccaagtgcgctgtaaaccctctgaaacaaagttggtcaccatcatctatctactcgcaagccaatctcaacaacatcatctggtgacatctgtagggcggctttcctccaagaccacataataagttggaaattttcctcttaactgccaaacagctgattcaaagccctctccttcccgtaccagacagcgtcataagaaatgtgcatcttacagagtggactgcatgcaactccttactacccatgtgggtcttctccaacagcagaggaagagctcttgcagcaaccaagacacttgttgatgtggtggtcctcctcctaccaccactagagaggtccgtacaggtgtgctggctgttcaacactataacgtacacgactaggccggtttcgccaccccaactccaggcgaacacgagtagttggccattgacacgagcggtgtccactggctgctgctgatgggggccaccgtcaccacaccgtcgtgaccaaacttttgtcaccaatcgcaacaagcccaaacgctcgccgagattcagaggcagggtgagggggggagacgagttcttgtcggtttcattcttggccgccgacttcacatgccaacaaccccaaggagcagaagccaggctaggaccactaggccttggatcttgtcagggatggactttgctgattcgagacggaagcctaatttcacggggaagattgccgtggctgctgccctcacggtcatgtgcataatcgtgttgaaacagtcccctagtttcagcggcaccagcgtgttctctcgccatgaaactggggtgacccatgtgttagtaacaggcggtgctggttatattggctcacatgctactcttcgtctccttagtgacaagtacagggttaccattgtggataacctatccagagggaacatgggagctgtcagagttcttcaacggctatttccagaacccggaaggcttcagtttatttatgctgacttaggcgatgccaaagctgtgaagaaaatattttcggagaatgcatttgacgctgttatgcactttgctgctgttgcttatgttggtgagagcacaatggagccactcaggtactaccacaacataacatcaaacacattgacagttcttgaggcaatggcagcatataatgtaaatactctgatttactcgagtacgtgtgcaacctatggtgaacctgatacgatgcctattgtagaaacaactcctcagaatcctatcaatccatacggtaaggcaaagaagatggcagaggacatcatcctagattttacaaaatcaaagaagcaatcagacatggctgtaatgatcttaagatacttcaatgtgattggatcggacccagaggggcgactaggagaagctccaaggccagagctacgcgagcatggacggatatccggtgcttgctttgatgcggctttgggaatcattccagggctaaaggttcgtggaactgattactccactgcagatggaacttgtattagggactacatcgatgtcacagaccttgtagatgcccatgtcaaagctcttggtaaagctcagccaggcaaagttggaatctacaacgtcggaacaggccaaggtagatcggtgaccgagtttgtagaagcttgcaagaaggcaacgggagcttccatcaaggtcgaatatcttgcccgtagacctggagattacgccgaggtatacagcgacccgtcgaaaatcctcagggacctcaactggacagcccaatacacggatcttggccaaagccttgcccaggcgtggaaatggcagaaggcgcacccgaacggatatgcatcggcctgattcagagctcaaaaggttgagagactcatcactcagattcatccaaggggtccgtccatgtgcagtcaatatagccttcagacaattggttcttcaccatagaaaaaacgtagcaacagcaacagaagagtcgtgattcttttattgcagagctggaagaagacaagagtatcgcagggagaatacactacctgttccttgattagtttcatttatatgtataggtcctcttttcgttggtggcattttagtacaatttggtgtaataacacaaggaaatcgtgttgtagacagggtagatcgaatctcgtgtatcgaccttcgtcttcttcgtggtggtagaatgaaaggatatatataaataagttgatgtatgtttctgttcccgtacttgtttcaagtctacacaaacacaaggctgcttgcctgcttctgccaggtccagcgagctgagctcctcagcttctcgtattatgagataacagtgagtcagtggcacaagcatttctttgaaaatg

SEQ ID NO: 15111 - DNA, 4719 bp, Zea Mays
tcaccttttcactgctccagcgaagaaggcacacagccagccgccgccgccgattattcatcttcctcacagcgccggcgctacatcttccgctacctcggcacaggcgacggcgggggcgctcaggctcgggctcgcgctcggagcgacggcgtcagcggcttccccctccgcctcttgccagtcgcctcgcgcccttgcctccggtcctccgcacaccagccggtgaccctgtgtgcgtgcccccctctctctctcctcccgcctccggtggatcgtcaaacggagccaggcctcggcgtctgcgccgcgcgcggcctgagggcagccggggggggggggggggggttcagcagccgctgctccagcaaggcggtcgcggggctttgggagcgcttatgccccaaagcgaagatcatgtcgagagccttagcgcgtcacccggtacctcctttcctgaaacttcgttccacggtttgcgacgacggctactggatgggcagattggaccacaaggactggctcgctccaaacgaggtgctcaaagtatttgtgaacatcagggacactagcctgataaacagcgtattcaagaaggcatgcagccggagagactacaagcccagcgaggcgctctacagcttgatgatcgacaggctggcctgcgccaggaggttcagtgatgtggaggagttgctgtccaaggcaagaaccgaaaagttgaggttttcagacgagttcttctacaggctgatcaagatgtacggcaacgtggcagaacatcctcagaaagccatggacaccctctttgcaatgcctgggtataattgttggccttctacaaagacattcaattacgtccttcacatgcttgtgtgcaagcggcagtacgaggttgttcatgaggtctactcgagcgcgcccaggcttggggtgacgttggacacatgttctttcaatatccttgtcaagggtttgtgccagtacggtaaatttgatgaggctatctccttgctgcatgagatgccgaagcaagggtgtcagcctaacgcgacaacctactcgaccttcatgcatttcctctgtcagcgcagtcaggttgataaagcatttgagctgtttgagagaatgcggaagcaggatattgctgcagatacagttgtgtacaatattttgatctctggtctctgcagggacgaaagagtgaccgaggcattcgacctgttcaagtcaatgacttctgaagggtgctgtcctaattcagggacatatcaggtacttcttgatggtctaatcagtttaggaaaactttttgaagccaaaagccttgtttgcactatgagtacagagggtgtgaggccgagcttccaatcatacaagctactgattgatggcctctgtagtgatgactgcgtgggtgatgcacatcttgtcttgaagcaaatggtgggccaaggttttgttccccggatgggcacttggacaaaacttctcacatccatgttcaagttttagcttccgcatcggtgatttccttggcctaacaagacacatgaatgaaaaattcaaattttggcagactcttgactgaaggtcatcaagtttggttagaggagcaagtggaccaatggcggcttgagtttgtgcttgtagtcctgcataccattgctacctatacatgattatcgtttgttggaatagcttccacggacatcaacctgaattatataagtctgacaagaaaaaccgttcgattctgtaggtgatttatgttctgggcagttgaatgactaatcttgggcatttgaaagcctacagaactcttcgaaccctgttatgcaaggtccaagtgcgctgtaaaccctctgaaacaaagttggtcaccatcatctatctactcgcaagccaatctcaacaacatcatctggtgacatctgtagggcggctttcctccaagaccacataataagttggaaattttcctcttaactgccaaacagctgattcaaagccctctccttcccgtaccagacagcgtcataagaaatgtgcatcttacagagtggactgcatgcaactccttactacccatgtgggtcttctccaacagcagaggaagagctcttgcagcaaccaagacacttgttgatgtggtggtcctcctcctaccaccactagagaggtccgtacaggtgtgctggctgttcaacactataacgtacacgactaggccggtttcgccaccccaactccaggcgaacacgagtagttggccattgacacgagcggtgtccactggctgctgctgatgggggccaccgtcaccacaccgtcgtgaccaaacttttgtcaccaatcgcaacaagcccaaacgctcgccgaggtattttctgcgtactaccatggagccacagccacaaggacgttgccagaagattatttaacaaaaaagaagtctcaatttctttttttgcaaattcggaggaatacgtacgtgccagccaactacacgcaaaaaggagtaattggccacaaggcaaacaaataatgtaaacaaatgcgaaaagattctggtacagtagaaccccacatgcgctaattatgacccgacctggtggtacaaatagaaataaaaacggcccctccccggcgacctggctggctccgcctcctccgttccgtctcatcgctccttcctcatcatcagttgttgccaccacccttccctccctccattcctctccgcgtcgccccacatcccatcttggcctggacacctgggctgcctcgctccgtttccgcgctcgcggacgcgccgagtcccggccgaaccaggcgcccgccctccctcccgccgctaccagcgtcgatctgcgaccgaagagcgattcagaggcagggtgagggggggagacgagttcttgtcggtttcattcttggccgccgacttcacatgccaacaaccccaaggagcagaagccaggctaggaccactaggccttggatcttgtcagggatggactttgctgattcgagacggaagcctaatttcacggggaagattgccgtggctgctgccctcacggtcatgtgcataatcgtgttgaaacagtcccctagtttcagcggcaccagcgtgttctctcgccatgaaactggggtgacccatgtgttagtaacaggcggtgctggttatattggctcacatgctactcttcgtctccttagtgacaagtacagggttaccattgtggataacctatccagagggaacatgggagctgtcagagttcttcaacggctatttccagaacccggaaggcttcagtttatttatgctgacttaggcgatgccaaagctgtgaagaaaatattttcggagaatgcatttgacgctgttatgcactttgctgctgttgcttatgttggtgagagcacaatggagccactcaggtactaccacaacataacatcaaacacattgacagttcttgaggcaatggcagcatataatgtaaatactctgatttactcgagtacgtgtgcaacctatggtgaacctgatacgatgcctattgtagaaacaactcctcagaatcctatcaatccatacggtaaggcaaagaagatggcagaggacatcatcctagattttacaaaatcaaagaagcaatcagacatggctgtaatgatcttaagatacttcaatgtgattggatcggacccagaggggcgactaggagaagctccaaggccagagctacgcgagcatggacggatatccggtgcttgctttgatgcggctttgggaatcattccagggctaaaggttcgtggaactgattactccactgcagatggaacttgtattagggactacatcgatgtcacagaccttgtagatgcccatgtcaaagctcttggtaaagctcagccaggcaaagttggaatctacaacgtcggaacaggccaaggtagatcggtgaccgagtttgtagaagcttgcaagaaggcaacgggagcttccatcaaggtcgaatatcttgcccgtagacctggagattacgccgaggtatacagcgacccgtcgaaaatcctcagggacctcaactggacagcccaatacacggatcttggccaaagccttgcccaggcgtggaaatggcagaaggcgcacccgaacggatatgcatcggcctgattcagagctcaaaaggttgagagactcatcactcagattcatccaaggggtccgtccatgtgcagtcaatatagccttcagacaattggttcttcaccatagaaaaaacgtagcaacagcaacagaagagtcgtgattcttttattgcagagctggaagaagacaagagtatcgcagggagaatacactacctgttccttgattagtttcatttatatgtataggtcctcttttcgttggtggcattttagtacaatttggtgtaataacacaaggaaatcgtgttgtagacagggtagatcgaatctcgtgtatcgaccttcgtcttcttcgtggtggtagaatgaaaggatatatataaataagttgatgtatgtttctgttcccgtacttgtttcaagtctacacaaacacaaggctgcttgcctgcttctgccaggtccagcgagctgagctcctcagcttctcgtattatgagataacagtgagtcagtggcacaagcatttctttgaaaatg

SEQ ID NO: 15112 - DNA, 4215 bp, Zea Mays
tcaccttttcactgctccagcgaagaaggcacacagccagccgccgccgccgattattcatcttcctcacagcgccggcgctacatcttccgctacctcggcacaggcgacggcgggggcgctcaggctcgggctcgcgctcggagcgacggcgtcagcggcttccccctccgcctcttgccagtcgcctcgcgcccttgcctccggtcctccgcacaccagccggtgaccctgtgtgcgtgcccccctctctctctcctcccgcctccggtggatcgtcaaacggagccaggcctcggcgtctgcgccgcgcgcggcctgagggcagccggggggggggggggggggttcagcagccgctgctccagcaaggcggtcgcggggctttgggagcgcttatgccccaaagcgaagatcatgtcgagagccttagcgcgtcacccggtacctcctttcctgaaacttcgttccacggtttgcgacgacggctactggatgggcagattggaccacaaggactggctcgctccaaacgaggtgctcaaagtatttgtgaacatcagggacactagcctgataaacagcgtattcaagaaggcatgcagccggagagactacaagcccagcgaggcgctctacagcttgatgatcgacaggctggcctgcgccaggaggttcagtgatgtggaggagttgctgtccaaggcaagaaccgaaaagttgaggttttcagacgagttcttctacaggctgatcaagatgtacggcaacgtggcagaacatcctcagaaagccatggacaccctctttgcaatgcctgggtataattgttggccttctacaaagacattcaattacgtccttcacatgcttgtgtgcaagcggcagtacgaggttgttcatgaggtctactcgagcgcgcccaggcttggggtgacgttggacacatgttctttcaatatccttgtcaagggtttgtgccagtacggtaaatttgatgaggctatctccttgctgcatgagatgccgaagcaagggtgtcagcctaacgcgacaacctactcgaccttcatgcatttcctctgtcagcgcagtcaggttgataaagcatttgagctgtttgagagaatgcggaagcaggatattgctgcagatacagttgtgtacaatattttgatctctggtctctgcagggacgaaagagtgaccgaggcattcgacctgttcaagtcaatgacttctgaagggtgctgtcctaattcagggacatatcaggtacttcttgatggtctaatcagtttaggaaaactttttgaagccaaaagccttgtttgcactatgagtacagagggtgtgaggccgagcttccaatcatacaagctactgattgatggcctctgtagtgatgactgcgtgggtgatgcacatcttgtcttgaagcaaatggtgggccaaggttttgttccccggatgggcacttggacaaaacttctcacatccatgttcaagttttagcttccgcatcggtgatttccttggcctaacaagacacatgaatgaaaaattcaaattttggcagactcttgactgaaggtcatcaagtttggttagaggagcaagtggaccaatggcggcttgagtttgtgcttgtagtcctgcataccattgctacctatacatgattatcgtttgttggaatagcttccacggacatcaacctgaattatataagtctgacaagaaaaaccgttcgattctgtaggtgatttatgttctgggcagttgaatgactaatcttgggcatttgaaagcctacagaactcttcgaaccctgttatgcaaggtccaagtgcgctgtaaaccctctgaaacaaagttggtcaccatcatctatctactcgcaagccaatctcaacaacatcatctggtgacatctgtagggcggctttcctccaagaccacataataagttggaaattttcctcttaactgccaaacagctgattcaaagccctctccttcccgtaccagacagcgtcataagaaatgtgcatcttacagagtggactgcatgcaactccttactacccatgtgggtcttctccaacagcagaggaagagctcttgcagcaaccaagacacttgttgatgtggtggtcctcctcctaccaccactagagaggtccgtacaggtgtgctggctgttcaacactataacgtacacgactaggccggtttcgccaccccaactccaggcgaacacgagtagttggccattgacacgagcggtgtccactggctgctgctgatgggggccaccgtcaccacaccgtcgtgaccaaacttttgtcaccaatcgcaacaagcccaaacgctcgccgagattcagaggcagggtgagggggggagacgagttcttgtcggtttcattcttggccgccgacttcacatgccaacaaccccaaggagcagaagccaggctaggaccactaggccttggatcttgtcagggatggactttgctgattcgagacggaagcctaatttcacggggaagattgccgtggctgctgccctcacggtcatgtgcataatcgtgttgaaacagtcccctagtttcagcggcaccagcgtgttctctcgccatgaaactggggtgacccatgtgttagtaacaggcggtgctggttatattggctcacatgctactcttcgtctccttagtgacaagtacagggttaccattgtggataacctatccagagggaacatgggagctgtcagagttcttcaacggctatttccagaacccggaaggcttcagtttatttatgctgacttaggcgatgccaaagctgtgaagaaaatattttcggagaatgcatttgacgctgttatgcactttgctgctgttgcttatgttggtgagagcacaatggagccactcaggtactaccacaacataacatcaaacacattgacagttcttgaggcaatggcagcatataatgtaaatactctgatttactcgagtacgtgtgcaacctatggtgaacctgatacgatgcctattgtagaaacaactcctcagaatcctatcaatccatacggtaaggcaaagaagatggcagaggacatcatcctagattttacaaaatcaaagaagcaatcagacatggctgtaatgatcttaagatacttcaatgtgattggatcggacccagaggggcgactaggagaagctccaaggccagagctacgcgagcatggacggatatccggtgcttgctttgatgcggctttgggaatcattccagggctaaaggttcgtggaactgattactccactgcagatggaacttgtattagggactacatcgatgtcacagaccttgtagatgcccatgtcaaagctcttggtaaagctcagccaggcaaagttggaatctacaacgtcggaacaggccaaggtagatcggtgaccgagtttgtagaagcttgcaagaaggcaacgggagcttccatcaaggtcgaatatcttgcccgtagacctggagattacgccgaggtatacagcgacccgtcgaaaatcctcagggacctcaactggacagcccaatacacggatcttggccaaagccttgcccaggcgtggaaatggcagaaggcgcacccgaacggatatgcatcggcctgattcagagctcaaaaggttgagagactcatcactcagattcatccaaggggtccgtccatgtgcagtcaatatagccttcagacaattggttcttcaccatagaaaaaacgtagcaacagcaacagaagagtcgtgattcttttattgcagagctggaagaagacaagagtatcgcagggagaatacactacctgttccttgattagtttcatttatatgtataggtcctcttttcgttggtggcattttagtacaatttggtgtaataacacaaggaaatcgtgttgtagacagggtagatcgaatctcgtgtatcgaccttcgtcttcttcgtggtggtagaatgaaaggatatatataaataagttgatgtatgtttctgttcccgtacttgtttcaagtctacacaaacacaaggctgcttgcctgcttctgccaggtccagcgagctgagctcctcagcttctcgtattatgagataacagtgagtcagtggcacaagcatttctttgaaaatg

SEQ ID NO: 15113 - DNA, 2078 bp, Zea Mays
acggcccctccccggcgacctggctggctccgcctcctccgttccgtctcatcgctccttcctcatcatcagttgttgccaccacccttccctccctccattcctctccgcgtcgccccacatcccatcttggcctggacacctgggctgcctcgctccgtttccgcgctcgcggacgcgccgagtcccggccgaaccaggcgcccgccctccctcccgccgctaccagcgtcgatctgcgaccgaagagcgaggcagggtgagggggggagacgagttcttgtcggtttcattcttggccgccgacttcacatgccaacaaccccaaggagcagaagccaggctaggaccactaggccttggatcttgtcagggatggactttgctgattcgagacggaagcctaatttcacggggaagattgccgtggctgctgccctcacggtcatgtgcataatcgtgttgaaacagtcccctagtttcagcggcaccagcgtgttctctcgccatgaaactggggtgacccatgtgttagtaacaggcggtgctggttatattggctcacatgctactcttcgtctccttagtgacaagtacagggttaccattgtggataacctatccagagggaacatgggagctgtcagagttcttcaacggctatttccagaacccggaaggcttcagtttatttatgctgacttaggcgatgccaaagctgtgaagaaaatattttcggagaatgcatttgacgctgttatgcactttgctgctgttgcttatgttggtgagagcacaatggagccactcaggtactaccacaacataacatcaaacacattgacagttcttgaggcaatggcagcatataatgtaaatactctgatttactcgagtacgtgtgcaacctatggtgaacctgatacgatgcctattgtagaaacaactcctcagaatcctatcaatccatacggtaaggcaaagaagatggcagaggacatcatcctagattttacaaaatcaaagaagcaatcagacatggctgtaatgatcttaagatacttcaatgtgattggatcggacccagaggggcgactaggagaagctccaaggccagagctacgcgagcatggacggatatccggtgcttgctttgatgcggctttgggaatcattccagggctaaaggttcgtggaactgattactccactgcagatggaacttgtattagggactacatcgatgtcacagaccttgtagatgcccatgtcaaagctcttggtaaagctcagccaggcaaagttggaatctacaacgtcggaacaggccaaggtagatcggtgaccgagtttgtagaagcttgcaagaaggcaacgggagcttccatcaaggtcgaatatcttgcccgtagacctggagattacgccgaggtatacagcgacccgtcgaaaatcctcagggacctcaactggacagcccaatacacggatcttggccaaagccttgcccaggcgtggaaatggcagaaggcgcacccgaacggatatgcatcggcctgattcagagctcaaaaggttgagagactcatcactcagattcatccaaggggtccgtccatgtgcagtcaatatagccttcagacaattggttcttcaccatagaaaaaacgtagcaacagcaacagaagagtcgtgattcttttattgcagagctggaagaagacaagagtatcgcagggagaatacactacctgttccttgattagtttcatttatatgtataggtcctcttttcgttggtggcattttagtacaatttggtgtaataacacaaggaaatcgtgttgtagacagggtagatcgaatctcgtgtatcgaccttcgtcttcttcgtggtggtagaatgaaaggatatatataaataagttgatgtatgtttctgttcccgtacttgtttcaagtctacacaaacacaaggctgcttgcctgcttctgccaggtccagcgagctgagctcctcagcttctcgtattatgagataacagtgagtcagtggcacaagcatttctttgaaaatg

SEQ ID NO: 15114 - DNA, 1288 bp, Zea Mays
gacatagctaggtacaggcacccagtcctgtcatgacgtaaaagcttatagaattcgatcagatggcataaatactactatgcagagggccaaaggttggtgggacgaacggaccagcaggctagcaggtcatccagaaagctttcgtgctcctccatttctaggctatagctagcctagctggggttggacgacctttcaggcacacgcatgcaagtacctgcagtcggttcataagaggaggaggaggccatatggacgacgaaggagccaagtagaaaaggcaggcaccgcaaccaacggtaaagctggtgatcgagcaagttttgtcaagagcgagctcatggaggatggcagcagtgctccaagacgggctactccccccacccgcaggagcagatctgccgacttccacaacttttcagaaaggaggagaagggacaggatcaacgagaagctgagagcgttgcaggagcttcttccaaactgcaccaagaccgacaaagtttccatgctagatgaagcgatcgactacctaaaatccctccagctacagcttcagatgctggtcatggggaaggggggaggaatggcaccggtggttcctcctgagctgcagcagtacatgcactacatcacggccgaccccgcccaccagatgatgcctccgccgctgcggccctccgccgggcagctgcagcccgccgccggccggcagtttcagataacccaagcagcagcagcagcagccaacaacgacaacgacccccagcgacgacgacagtccaacgtcgagtcggacttcttgagccagatgcagaacctgcacccctccgatcagccgcctcatcatcacaacttcctcaggccgccgagattgcagctctttacgccgaggggcggcggcggcggcctgcctaccacgagccacaacgccggctggatttccgggaggagttcctcgtataattttatggagtgacgtgtgtgctccctgatgctgccaaaattaatttgaaacaaccgttctcatcttgaactcagaagacggcgtcagcgcactctgggaccttcagctagcgtgtggtggtgtccatgcatgaatgaatgcagtagtagttatatatatattagcaagctagttgtgtcattaaataaaggaacgctgtgtgactgtgatgctgctgctgctgctcgttttgctatctgaatcgcacaccgttcaattcctccgatcctctgtgcgtgtcgatcgtacgtgttcgattcatgcaaaggctagttggcg

SEQ ID NO: 15115 - DNA, 1734 bp, Zea Mays
acgcgtcccctccccctatccaggcctcgccacccatgccctccccgtctcactgacggtggcccccaccgcccggctccgctcgtcggcgagcactcttcccctcctcccccgccccaccgcagtcccggccaagagatccggccgactccggtcgctcggactcggaggccggcgagccgctcgtgctgggcgccgggatgcaggcggccggcaccagacggtttcccggatctcgccggcgccgcgtctcggcgagattcggatagcgaagaacttgaactgaaggagcagaaacctgttccgaaggctctgtcgggaggcgattcaagtggcaacagatcaaacgattgctacttcccaggccttcatgatgacctgtcacaagactgccttgcctgggcaagcagatcggaccacccttccatttcttgtctgaacaagagattcaatctgctaatgaacagcgggtatctgtacaagctgcgaaggaaatacggcatcgttgagcactgggtgtacctcgcttgtagcctgatgccctgggaagcatttgatccatcgcagagacggtggatgaggctcccgaggatgccatgcgacgagtgcttctcctgtgcagacaaggagtcactcgccgtcggaacacagcttcttgtcttcggccgtgaatacaccggcctcgctatttgggtgtacaacttactgactcgcagttggtccccgtgcgctccgatgaatctgccccgctgccttcttgcctcgggaagctcaggcgagatcgccattgtcgctggtgggtgtgataagaacggacaagtgctgagatctgttgagctgtacaactcagagactggccactgggagactgtcccaggcatgaacctgcccaggcggctcgcttcaggtttcttcatggacggcaagttttacgtcattgggggcgtatcgagccagagggactcgttgacctgtggagaggaatacagccttgagacaagaacctggagaagaatacttgacatgtaccctggtggaaccagcgcatcccaatcgcctccccttgttgccgttgtgaatagccagctctacgccgccgaccagtcgacgaacgtggtcaagaagtatgacaaggcaaataacgcctgggacgtagtgaagccactgcccgtcagagctgactcgtccaatggctggggcctagctttcaaggcctgtggcgataggttgctggtgatcggaggccatagaggacctcgtggcgaggtaatactgttgcattcctggtgccccgaaggcggggaagactgggaggttctgtcggtgaaggaacgcgcaggcgtcttcgtttacaactgtgcaataatggggtgctgagttaccttttgctcttcggtacatgccgccgctggtttagcaaggcaacgaccatttcttgctgccatttagctgcccttttatagtgacttgtaattcagaaatgacctcccctccccgaaattttgcggcgctctcaaatgttgaatgttttgtagagagcatatatagagcattcagttcagtttacctggaactactctcttttttttttctgttaaactcgttcacatttttccttgttcttgtccagtacgaattttacgcggtaggagtattctttattcatcattgttgcgaacttaaatgtctgcgccattgtccggagacatatcttaggcctcgattttcagtgca

SEQ ID NO: 15116 - DNA, 545 bp, Zea Mays
acgcgtcccctccccctatccaggcctcgccacccatgccctccccgtctcactgacggtggcccccaccgcccggctccgctcgtcggcgagcactcttcccctcctcccccgccccaccgcagtcccggccaagagatccggccgactccggtcgctcggactcggaggccggcgagccgctcgtgctgggcgccgggatgcaggcggccggcaccagacggtttcccggatctcgccggcgccgcgtctcggcgagggacaaaaaaaaactatagcgaggacagttgcagaaaaaaaaaactagagctcggtttgtcaccttctcgtttacttcgctgatggttttgccccccatctgcggaacaacctctggctctggctggcagcagggtacacttgctagtgacaggcgttgaaactggaactctgctaaaaaaacacacaagctggtatgatgtgaacgtgaatatgatctctgaataatgaatgcaatgtatgaggggtcaatctcgctttttaaaagagttgaaggggcatcgatt

SEQ ID NO: 15117 - DNA, 1353 bp, Zea Mays
tctagcttcgttctcactccagagtctccaggctccaggcaggcagcagatagatcctcgccagtttctctctctcgctcgctcacatgatcacatcgcatctccctaaacatgctcttactcttgggtatcaggagccacaggagcgtgtataaaaaggtcctggccctctaaactctgaacctccaagcacgcgcgcgccctgtgctccccctcagtcctcgctggtcctttctccatcacaaacgctagtcttttcctaaagagaaaactccttccgtgtgtaaccagatccgctagcatcggtggaacctcggcctcgtttagttcctcggagaccgccggaagcgagcgatggcgtgcaagacgaagagcctgctgttggcgctcagcgtggcggcgctgctcgcggcgcggtcggagtcccacggcctgggggacttcacgagcgggagcgacgaggcgacgacgacgccggagatgcagaccttcttcaagccccaggccgccgcggcgctcccggaggccctcgacgcctccatgcccgccaagccggaggccacggcgctcccggccaccaccaccgccgccgccgcgacaacggccggcacggcgccgtcagccacgccgcgcaggtccgtgtccgtggccgccggcgtggcctgcggcgtggcggccgtggccgtggccggcatcgcggccgccgtggcgtacgtggtggtgcgcggcgcgcggcgcgggacggaggtgcagctcggttagctcctcccccgtgagccccgtccggccgggcccgcgtcataggccgtcgtcgtcggcgttaggatctgggttaagcgcgttgtttagctttgcgattttgtgttttagtcgatctgcagactgggcttgcttttgggtcggcggttgtattctttcgtacgtgtcgtgtcgctaccgagtacgtacggaccagcacagtggtgcatgtgtgacataaataaatgctggttgtagcgtcgtcgtggtgtctagagtctagaactttgctattgctgcatgaggatttttgctgttgagatgtgagtgagatgttgccgtctctggctggctactagctagctagatctcaggacgcctgaactctgtaccttggcgactggagcccaccatgaacgtccttgactgcatgagcctcccagagaatagagatgcagccaaacgacttgatgatgattaaaaagaggtaggaagaaaggcctgccagagtggccgcgttgtccagaacggaacagggacatcactgcctgccaacgcgatctcgccctggaccattcgtgagcagccggggaaaaaatgtttgtaccttttttg

SEQ ID NO: 15118 - DNA, 1231 bp, Zea Mays
tcggtctctgcctgtcttccacttccgtcgctcgcagtctctctcgcagaacagaaccagcaggcggcggcacacagcaagcagtcaagcaccagccgccaccgcccaccgccggtcgccagtcgccactgctccatggcgtgcccccaaatcccgtgacgggctgacggcgtgactcatcttcctcctctcctctctgtaacagtaaaaactgtgatccgctgtaatggctagtgaaggtgaagcttcacctccacgaaagcgtatgttgttggagttacctagtgaacatcaaagtcagaacttgacatcctcacctcatgcaaatacaactcaaccttttggtgtgtctgcatcatcatcaacacctgctgcaacatctcatgaacaaggtgcaaatccagaagaaggaattaatttggatgaggatgatccttcaaaattgaagcaagcaaagaagtccacttcaaatgtttggcagtattttgaaaagtatgaggttgtcgtagaggagaatggcaaatctgtgaagcaagtttgggccaaatgcaagtatccgggatgcaaaaacaagactagcaaagctagggctgaaagtagtagaggaacaactgcattttggtctcatttgaaaaattatcataagattgtgaaggggcaacaagagctcaaggcagaaaaggatcatggcacagtgcgggtggtcgtgtacttgatccatttcgtactcgccttgaccctaccatggtagaagcgcttgtctgcaccaaagattggataactggagcaagaaaaggttccaaggctaagagtgttgctattcctaatatggatgaagacctagatgatgatcatgatgatggaccagaggcatcgttgtaagcttgttgatgaagacctagatgatgataatgcaacatgaatgctctgaatgtttttattgtacttgttgcgtaatgctttgtgatcttgcgaacttgggacttgtggacttgtggctgtgtactttgtgatctgtgtgatgaacttgttatattgtgaacttgtgatctgtgtgatccacttattatattgtgaacttgtgatcaacttgttatattgtgaacttgtgatctgtgtgatccacttattatattgtgaacttgtgatcaacttgttatattgtgaacttgtgatattgaaaattgtgaacttgtgtttttgtgatatttgtaaactttgttgtattgtg

SEQ ID NO: 15119 - DNA, 1298 bp, Zea Mays
gagacctgcagatggagcacgccttcaagaaatggagctagacaagtcatagtcatctggtgcctcacgtcgtggatttgttggccacaaccacaagccatagtcaccaggtaaaaactgtgatccgctgtaatggctagtgaaggtgaagcttcacctccacgaaagcgtatgttgttggagttacctagtgaacatcaaagtcagaacttgacatcctcacctcatgcaaatacaactcaaccttttggtgtgtctgcatcatcatcaacacctgctgcaacatctcatgaacaaggtgcaaatccagaagaaggaattaatttggatgaggatgatccttcaaaattgaagcaagcaaagaagtccacttcaaatgtttggcagtattttgaaaagtatgaggttgtcgtagaggagaatggcaaatctgtgaagcaagtttgggccaaatgcaagtatccgggatgcaaaaacaagactagcaaagctagggctgaaagtagtagaggaacaactgcattttggtctcatttgaaaaattatcataagattgtgaaggggcaacaagagctcaaggcagaaaaggatcatggcacaggtatatgcattgtccagccatataaatatgatgaagaaaccagtttgagaaagttttatacagctattatcatgcatgagtatccatttaacattgctgagcatgaatactttgtggaattcattaaatcattaactttttaattgcatgaatgcttttagtgcgggtggtcgtgtacttgatccatttcgtactcgccttgaccctaccatggtagaagcgcttgtctgcaccaaagattggataactggagcaagaaaaggttccaaggctaagagtgttgctattcctaatatggatgaagacctagatgatgatcatgatgatggaccagaggcatcgttgtaagcttgttgatgaagacctagatgatgataatgcaacatgaatgctctgaatgtttttattgtacttgttgcgtaatgctttgtgatcttgcgaacttgggacttgtggacttgtggctgtgtactttgtgatctgtgtgatgaacttgttatattgtgaacttgtgatctgtgtgatccacttattatattgtgaacttgtgatcaacttgttatattgtgaacttgtgatctgtgtgatccacttattatattgtgaacttgtgatcaacttgttatattgtgaacttgtgatattgaaaattgtgaacttgtgtttttgtgatatttgtaaactttgttgtattgtg

SEQ ID NO: 15120 - DNA, 4601 bp, Zea Mays
gtcgagagtctggagccgcagccgctttggatccacctctctgcgcgcggggccgcgcctgcacttcgcacagtggcaggcggcagcccccaacgccatccacacatcccccggcaaaatccttacccaccgaaaaaagggaaaaatggaggcaggcaggcggcactgcggcagtcacacatgcgcacgggcacggtaaaagtacgagccaccttttccctctcgatcgagcggccgaggaggaggagagcctctctgtctctggcgaggggcgactgggcgagcgcttcgtctagacagcccagctgcgcatttggatgcaaattacgtgtggaggatggagtaaaatactgagcaagggagagggaagaggagacggtcttttcttttcttgagccgaggagggggatcaggtggagtgagcgagggggaggttttgccgccggcaatggagatgaatctccgggcggagagcccactctgctcccggggccgccccgccctcgtcgtgcgcccggccgctgcagccactggcctcgcgctgtctgtcgtaaggtgcagcagatttacgagaggcgggctcgttcgatgcatgattatcccaagaggaatccgaggagggcatcgacttctaagagcaagggcgttgcctctggagggtatgcttcgagacctactgctgaatccagtacgaagaagatagaacagagcaggaacaatgaaggtgatttcagcagagccaatgggtcactctatggcgaggcagcagagcaggcaagtactgctgaagaatcgtctcaggtttacatgacaggagacattttaagtggcgcagaaagggacggagctggtaccgaagaagaggctgaccaaaatcaatcttcagcgttgccttccgcgtccatggatgatgactcaatcgaccggcaacttgatgagtaccgtggtaaaataagtgctctagtaagttccaaacctgaaccttcgtcacttgcaagtgttgctggacaaaacgaatcagttggcggttttcacggccagcacgaaccaataactggttctgaggaacatggcagttcaattgttgatgcaccaacaaaaggcaggctatttgctgaggccgttgtgggtcataaggattttactgaatcagcagcaggaaaggcaagcagcgagaatgaggaagggcaagctgtctcgttagaagatgatgtcgggataagtacagacgcagatgaagagcttccggtatctgaagatgatccagaagtgctactgaggaggcttcaagagcttgctgatgagaattattcgactgggaacaactgttttgttttccctgaagtagtgaaggctgattcgatgattgatctttacttaaaccgcagcatgtcggccttagctagtgagtccgacgtttttgtaaaaggagcattcaatggttggagatggaaccgtttcactgaaacaatgcatagaagcgaattaagaggggattggtggtgctgcaagctctacattcccaagcaggcatacagactagactttgtattctttaacggtgacactgtctatgaaaataacaatcacaacgattttttcctggaaatagaaagtgacatagatgaacactcatttgaggacttcttggttgaagaaaagcgaaaggaactcgagaggcttgctgcagaagaagctgaaaggaaaagacaagctgaggagcggcacaggagagaggaagaaagggccgcgatggaagctgacagggcacaagcaaggtctgaggtcgagatgaagaaagagaaattgcgccagatgttgagttcggctagcagatatgctgagaacttatggtacatagaacctaacacctacagaggaggagacagagttagattgtactataatagaagctcgagatcactaatgcataacactgagatttggatgcatggaggttataacaactggattgatggactctcaatagctgaaagacttgtcaaatctcatgaaaaggaaggcgattggtggtatgtagaagttacattacctgaaagggcattggtgttggattgggtttttgctgatggaccacctgggaatgcatggaattatgataacaatggaaggcaggattttcatgccatcgttcctaataacatatcggatgatatcttttgggtggaagaagaacataggatctttacaaggcttcaacaagagagaagagaaagggagagtgccgaaagaataaaggctgagagatctgcaaaaatgaaggctgagatgaaggaaaagactatgagagcgtttctgctctcacaaaaacatattgtgtatactgagccactcgaagtacgtgcaggaaccactgtggacgttctttataatccttctaacacagtgctgaatggaaagtcagaggtttggttcagaggttcctttaaccgttggactcatccaagtggtcccttaccaccacagaagatggtaaaggctgagaatagttcacacttacgaacaacagtgttcccctggatgcatatatgatggactttgttttctctgagtcggaagaaggtggaagatatgacaataggaatgggatggattatcatattcctgtgtctgattcggttgcaagggaacctccaatgcatattgtgcacattgcagtggaaatggctcctatcgcaaaggttggaggccttggtgatgttgttacaagcctttcacgagctgttcaggatttaggccataaagttgaggttattctgccgaagtatgattgtttaatcctaagcagtgtgaaggatttacactaccaacaaagttttgcttcgggtggcacagaggtaaaagtatggtttggaaaggttgaagatctgccagtttacttcttggaaccacaaaatggcatgttttgggttggatgtgtctatgggaagaatgatgagagtagatttggcttcttctgtcattctgctctggagtttctgctccaaaaaggatcttctcctgatatcatacattgtcatgactggtcaagtgctcccgttgcttggctatacaaggaacagtatgctcttaatgggatgggaaatggtcggattgtatttaccatccacaatcttgagtttggagcgcatcacattggcaaggcaatggcacattgtgacaaggctacaactgtctctgatacatattcaaaggaagtggctggacacggagctattgcacctcactactataaattccatggaattcgaaatggaattgatcctgacatttgggatccatatactgacagatttattccggttcattatacatcagagaatgttcttgagggcaagagtgctgcaaaaaaggcattgcagcagatgcttggattacagcaaactgatagccctgttgttggaatcatcactcgtctaacagtgcagaagggaatccaccttatcaaacatgcaatgcatcgagctcttgaacgcaatgggcaggtggttttactgggttctgcaccagatcatcgcatacaaggtgactttacaaatttagccagtaagctgcatggtgaataccatggccgggtgaagctatgtttaacctatgacgagccactgtcacatttgatatatgctggcgcagacttcattcttgttccttccatcttcgaaccttgtggtttaacacagcttattgctatgcgctacggatccatcccgattgttcggaaaactggaggcctgtacgacaccgtctttgacgtcgacgatgataaggatcgggctcaagcacaaggcctcgagccaaatggattcagtttcgaaggagctgatagcagtggcgtagattatgctctcgacagagctataaccgcgttttatgatgcccgcgactggttcaactcccttagcaagagggtaatggagcaagattggtcatggaatagacctgcactagactacatggagttgtaccattctgctcgcaaaaactgatacatattatcacaagagaaaacaggctcagtttgcccagtttatgagcatctcagcctctcaggcctctgtgcaaattcaatttgcacactgggaagaaaaagagtactgattggccttgtggttgtgcatgaccgccgtccaaggtccaacgatgcaacacagagtgtatagttagagaatgtcacccgttgtacgttactgccgttacatgcatgtgtatacacatcaggtagtttgcaaaacaacattacgcgtatcccggccggctaccctgccataggctctgtctctttcaatttcaattaagaagaatgtaattgacctagttttagaaaaattggctccaaaacctacacaggccctaccaacaaactagacaacaatagcctgatacacaaagctcatccaacgtcgttgtcaagacgaatagctttaaactgcttaacacaagagacaaacaactctgaactctcaaaacgggccacacaaggccaaaggaaatcgacttgaaccaaacactaacaaacaaggagaaagagacaaccccacgcgagatagcactgatccttcaccatccaaccttgatcctct

SEQ ID NO: 15121 - DNA, 4736 bp, Zea Mays
cggcagcccccaacgccatccacacatcccccggcaaaatccttacccaccgaaaaaagggaaaaatggaggcaggcaggcggcactgcggcagtcacacatgcgcacgggcacggtaaaagtacgagccaccttttccctctcgatcgagcggccgaggaggaggagagcctctctgtctctggcgaggggcgactgggcgagcgcttcgtctagacagcccagctgcgcatttggatgcaaattacgtgtggaggatggagtaaaatactgagcaagggagagggaagaggagacggtcttttcttttcttgagccgaggagggggatcaggtggagtgagcgagggggaggttttgccgccggcaatggagatgaatctccgggcggagagcccactctgctcccggggccgccccgccctcgtcgtgcgcccggccgctgcagccactggcctcgcgctgtctgtcgtaaggtgcagcagatttacgagaggcgggctcgttcgatgcatggtatcaagttcagattatcccaagaggaatccgaggagggcatcgacttctaagagcaagggcgttgcctctggagggtatgcttcgagacctactgctgaatccagtacgaagaagatagaacagagcaggaacaatgaaggtgatttcagcagagccaatgggtcactctatggcgaggcagcagagcaggcaagtactgctgaagaatcgtctcaggtttacatgacaggagacattttaagtggcgcagaaagggacggagctggtaccgaagaagaggctgaccaaaatcaatcttcagcgttgccttccgcgtccatggatgatgactcaatcgaccggcaacttgatgagtaccgtggtaaaataagtgctctagtaagttccaaacctgaaccttcgtcacttgcaagtgttgctggacaaaacgaatcagttggcggttttcacggccagcacgaaccaataactggttctgaggaacatggcagttcaattgttgatgcaccaacaaaaggcaggctatttgctgaggccgttgtgggtcataaggattttactgaatcagcagcaggaaaggcaagcagcgagaatgaggaagggcaagctgtctcgttagaagatgatgtcgggataagtacagacgcagatgaagagcttccggtatctgaagatgatccagaagtgctactgaggaggcttcaagagcttgctgatgagaattattcgactgggaacaactgttttgttttccctgaagtagtgaaggctgattcgatgattgatctttacttaaaccgcagcatgtcggccttagctagtgagtccgacgtttttgtaaaaggagcattcaatggttggagatggaaccgtttcactgaaacaatgcatagaagcgaattaagaggggattggtggtgctgcaagctctacattcccaagcaggcatacagactagactttgtattctttaacggtgacactgtctatgaaaataacaatcacaacgattttttcctggaaatagaaagtgacatagatgaacactcatttgaggacttcttggttgaagaaaagcgaaaggaactcgagaggcttgctgcagaagaagctgaaaggaaaagacaagctgaggagcggcacaggagagaggaagaaagggccgcgatggaagctgacagggcacaagcaaggtctgaggtcgagatgaagaaagagaaattgcgccagatgttgagttcggctagcagatatgctgagaacttatggtacatagaacctaacacctacagaggaggagacagagttagattgtactataatagaagctcgagatcactaatgcataacactgagatttggatgcatggaggttataacaactggattgatggactctcaatagctgaaagacttgtcaaatctcatgaaaaggaaggcgattggtggtatgtagaagttacattacctgaaagggcattggtgttggattgggtttttgctgatggaccacctgggaatgcatggaattatgataacaatggaaggcaggattttcatgccatcgttcctaataacatatcggatgatatcttttgggtggaagaagaacataggatctttacaaggcttcaacaagagagaagagaaagggagagtgccgaaagaataaaggctgagagatctgcaaaaatgaaggctgagatgaaggaaaagactatgagagcgtttctgctctcacaaaaacatattgtgtatactgagccactcgaagtacgtgcaggaaccactgtggacgttctttataatccttctaacacagtgctgaatggaaagtcagaggtttggttcagaggttcctttaaccgttggactcatccaagtggtcccttaccaccacagaagatggtaaaggctgagaatagttcacacttacgaacaacagtcagtgttcccctggatgcatatatgatggactttgttttctctgagtcggaagaaggtggaagatatgacaataggaatgggatggattatcatattcctgtgtctgattcggttgcaagggaacctccaatgcatattgtgcacattgcagtggaaatggctcctatcgcaaaggttggaggccttggtgatgttgttacaagcctttcacgagctgttcaggatttaggccataaagttgaggttattctgccgaagtatgattgtttaatcctaagcagtcagcttcaatacacctcggatatattggagcacgttggcacgttggattataatttatgtgcgacttcgatggacatacaagcgaaggtctccgatgatggccctctcgtcggtgatcctagtgcctttcggagccttgccgttgccctctagtatctcaccttcacccgacctgatatctcttatgctatccagcaggtgaaggatttacactaccaacaaagttttgcttcgggtggcacagaggtaaaagtatggtttggaaaggttgaagatctgccagtttacttcttggaaccacaaaatggcatgttttgggttggatgtgtctatgggaagaatgatgagagtagatttggcttcttctgtcattctgctctggagtttctgctccaaaaaggatcttctcctgatatcatacattgtcatgactggtcaagtgctcccgttgcttggctatacaaggaacagtatgctcttaatgggatgggaaatggtcggattgtatttaccatccacaatcttgagtttggagcgcatcacattggcaaggcaatggcacattgtgacaaggctacaactgtctctgatacatattcaaaggaagtggctggacacggagctattgcacctcactactataaattccatggaattcgaaatggaattgatcctgacatttgggatccatatactgacagatttattccggttcattatacatcagagaatgttcttgagggcaagagtgctgcaaaaaaggcattgcagcagatgcttggattacagcaaactgatagccctgttgttggaatcatcactcgtctaacagtgcagaagggaatccaccttatcaaacatgcaatgcatcgagctcttgaacgcaatgggcaggtggttttactgggttctgcaccagatcatcgcatacaaggtgactttacaaatttagccagtaagctgcatggtgaataccatggccgggtgaagctatgtttaacctatgacgagccactgtcacatttgatatatgctggcgcagacttcattcttgttccttccatcttcgaaccttgtggtttaacacagcttattgctatgcgctacggatccatcccgattgttcggaaaactggaggcctgtacgacaccgtctttgacgtcgacgatgataaggatcgggctcaagcacaaggcctcgagccaaatggattcagtttcgaaggagctgatagcagtggcgtagattatgctctcgacagagctataaccgcgttttatgatgcccgcgactggttcaactcccttagcaagagggtaatggagcaagattggtcatggaatagacctgcactagactacatggagttgtaccattctgctcgcaaaaactgatacatattatcacaagagaaaacaggctcagtttgcccagtttatgagcatctcagcctctcaggcctctgtgcaaattcaatttgcacactgggaagaaaaagagtactgattggccttgtggttgtgcatgaccgccgtccaaggtccaacgatgcaacacagagtgtatagttagagaatgtcacccgttgtacgttactgccgttacatgcatgtgtatacacatcaggtagtttgcaaaacaacattacgcgtatcccggccggctaccctgccataggctctgtctctttcaatttcaattaagaagaatgtaattgacctagttttagaaaaattggctccaaaacctacacaggccctaccaacaaactagacaacaatagcctgatacacaaagctcatccaacgtcgttgtcaagacgaatagctttaaactgcttaacacaagagacaaacaactctgaactctcaaaacgggccacacaaggccaaaggaaatcgacttgaaccaaacactaacaaacaaggagaaagagacaaccccacgcgagatagcactgatccttcaccatccaaccttgatcctct

SEQ ID NO: 15122 - DNA, 4530 bp, Zea Mays
agcccccaacgccatccacacatcccccggcaaaatccttacccaccgaaaaaagggaaaaatggaggcaggcaggcggcactgcggcagtcacacatgcgcacgggcacggtaaaagtacgagccaccttttccctctcgatcgagcggccgaggaggaggagagcctctctgtctctggcgaggggcgactgggcgagcgcttcgtctagacagcccagctgcgcatttggatgcaaattacgtgtggaggatggagtaaaatactgagcaagggagagggaagaggagacggtcttttcttttcttgagccgaggagggggatcaggtggagtgagcgagggggaggttttgccgccggcaatggagatgaatctccgggcggagagcccactctgctcccggggccgccccgccctcgtcgtgcgcccggccgctgcagccactggcctcgcgctgtctgtcgtaaggtgcagcagatttacgagaggcgggctcgttcgatgcatggtatcaagttcagattatcccaagaggaatccgaggagggcatcgacttctaagagcaagggcgttgcctctggagggtatgcttcgagacctactgctgaatccagtacgaagaagatagaacagagcaggaacaatgaaggtgatttcagcagagccaatgggtcactctatggcgaggcagcagagcaggcaagtactgctgaagaatcgtctcaggtttacatgacaggagacattttaagtggcgcagaaagggacggagctggtaccgaagaagaggctgaccaaaatcaatcttcagcgttgccttccgcgtccatggatgatgactcaatcgaccggcaacttgatgagtaccgtggtaaaataagtgctctagtaagttccaaacctgaaccttcgtcacttgcaagtgttgctggacaaaacgaatcagttggcggttttcacggccagcacgaaccaataactggttctgaggaacatggcagttcaattgttgatgcaccaacaaaaggcaggctatttgctgaggccgttgtgggtcataaggattttactgaatcagcagcaggaaaggcaagcagcgagaatgaggaagggcaagctgtctcgttagaagatgatgtcgggataagtacagacgcagatgaagagcttccggtatctgaagatgatccagaagtgctactgaggaggcttcaagagcttgctgatgagaattattcgactgggaacaactgttttgttttccctgaagtagtgaaggctgattcgatgattgatctttacttaaaccgcagcatgtcggccttagctagtgagtccgacgtttttgtaaaaggagcattcaatggttggagatggaaccgtttcactgaaacaatgcatagaagcgaattaagaggggattggtggtgctgcaagctctacattcccaagcaggcatacagactagactttgtattctttaacggtgacactgtctatgaaaataacaatcacaacgattttttcctggaaatagaaagtgacatagatgaacactcatttgaggacttcttggttgaagaaaagcgaaaggaactcgagaggcttgctgcagaagaagctgaaaggaaaagacaagctgaggagcggcacaggagagaggaagaaagggccgcgatggaagctgacagggcacaagcaaggtctgaggtcgagatgaagaaagagaaattgcgccagatgttgagttcggctagcagatatgctgagaacttatggtacatagaacctaacacctacagaggaggagacagagttagattgtactataatagaagctcgagatcactaatgcataacactgagatttggatgcatggaggttataacaactggattgatggactctcaatagctgaaagacttgtcaaatctcatgaaaaggaaggcgattggtggtatgtagaagttacattacctgaaagggcattggtgttggattgggtttttgctgatggaccacctgggaatgcatggaattatgataacaatggaaggcaggattttcatgccatcgttcctaataacatatcggatgatatcttttgggtggaagaagaacataggatctttacaaggcttcaacaagagagaagagaaagggagagtgccgaaagaataaaggctgagagatctgcaaaaatgaaggctgagatgaaggaaaagactatgagagcgtttctgctctcacaaaaacatattgtgtatactgagccactcgaagtacgtgcaggaaccactgtggacgttctttataatccttctaacacagtgctgaatggaaagtcagaggtttggttcagaggttcctttaaccgttggactcatccaagtggtcccttaccaccacagaagatggtaaaggctgagaatagttcacacttacgaacaacagtgttcccctggatgcatatatgatggactttgttttctctgagtcggaagaaggtggaagatatgacaataggaatgggatggattatcatattcctgtgtctgattcggttgcaagggaacctccaatgcatattgtgcacattgcagtggaaatggctcctatcgcaaaggttggaggccttggtgatgttgttacaagcctttcacgagctgttcaggatttaggccataaagttgaggttattctgccgaagtatgattgtttaatcctaagcagtgtgaaggatttacactaccaacaaagttttgcttcgggtggcacagaggtaaaagtatggtttggaaaggttgaagatctgccagtttacttcttggaaccacaaaatggcatgttttgggttggatgtgtctatgggaagaatgatgagagtagatttggcttcttctgtcattctgctctggagtttctgctccaaaaaggatcttctcctgatatcatacattgtcatgactggtcaagtgctcccgttgcttggctatacaaggaacagtatgctcttaatgggatgggaaatggtcggattgtatttaccatccacaatcttgagtttggagcgcatcacattggcaaggcaatggcacattgtgacaaggctacaactgtctctgatacatattcaaaggaagtggctggacacggagctattgcacctcactactataaattccatggaattcgaaatggaattgatcctgacatttgggatccatatactgacagatttattccggttcattatacatcagagaatgttcttgagggcaagagtgctgcaaaaaaggcattgcagcagatgcttggattacagcaaactgatagccctgttgttggaatcatcactcgtctaacagtgcagaagggaatccaccttatcaaacatgcaatgcatcgagctcttgaacgcaatgggcaggtggttttactgggttctgcaccagatcatcgcatacaaggtgactttacaaatttagccagtaagctgcatggtgaataccatggccgggtgaagctatgtttaacctatgacgagccactgtcacatttgatatatgctggcgcagacttcattcttgttccttccatcttcgaaccttgtggtttaacacagcttattgctatgcgctacggatccatcccgattgttcggaaaactggaggcctgtacgacaccgtctttgacgtcgacgatgataaggatcgggctcaagcacaaggcctcgagccaaatggattcagtttcgaaggagctgatagcagtggcgtagattatgctctcgacagagctataaccgcgttttatgatgcccgcgactggttcaactcccttagcaagagggtaatggagcaagattggtcatggaatagacctgcactagactacatggagttgtaccattctgctcgcaaaaactgatacatattatcacaagagaaaacaggctcagtttgcccagtttatgagcatctcagcctctcaggcctctgtgcaaattcaatttgcacactgggaagaaaaagagtactgattggccttgtggttgtgcatgaccgccgtccaaggtccaacgatgcaacacagagtgtatagttagagaatgtcacccgttgtacgttactgccgttacatgcatgtgtatacacatcaggtagtttgcaaaacaacattacgcgtatcccggccggctaccctgccataggctctgtctctttcaatttcaattaagaagaatgtaattgacctagttttagaaaaattggctccaaaacctacacaggccctaccaacaaactagacaacaatagcctgatacacaaagctcatccaacgtcgttgtcaagacgaatagctttaaactgcttaacacaagagacaaacaactctgaactctcaaaacgggccacacaaggccaaaggaaatcgacttgaaccaaacactaacaaacaaggagaaagagacaaccccacgcgagatagcactgatccttcaccatccaaccttgatcctct

SEQ ID NO: 15123 - DNA, 4629 bp, Zea Mays
acacatcccccggcaaaatccttacccaccgaaaaaagggaaaaatggaggcaggcaggcggcactgcggcagtcacacatgcgcacgggcacggtaaaagtacgagccaccttttccctctcgatcgagcggccgaggaggaggagagcctctctgtctctggcgaggggcgactgggcgagcgcttcgtctagacagcccagctgcgcatttggatgcaaattacgtgtggaggatggagtaaaatactgagcaagggagagggaagaggagacggtcttttcttttcttgagccgaggagggggatcaggtggagtgagcgagggggaggttttgccgccggcaatggagatgaatctccgggcggagagcccactctgctcccggggccgccccgccctcgtcgtgcgcccggccgctgcagccactggcctcgcgctgtctgtcgtaaggtgcagcagatttacgagaggcgggctcgttcgatgcatggtatcaagttcagattatcccaagaggaatccgaggagggcatcgacttctaagagcaagggcgttgcctctggagggtatgcttcgagacctactgctgaatccagtacgaagaagatagaacagagcaggaacaatgaaggtgatttcagcagagccaatgggtcactctatggcgaggcagcagagcaggcaagtactgctgaagaatcgtctcaggtttacatgacaggagacattttaagtggcgcagaaagggacggagctggtaccgaagaagaggctgaccaaaatcaatcttcagcgttgccttccgcgtccatggatgatgactcaatcgaccggcaacttgatgagtaccgtggtaaaataagtgctctagtaagttccaaacctgaaccttcgtcacttgcaagtgttgctggacaaaacgaatcagttggcggttttcacggccagcacgaaccaataactggttctgaggaacatggcagttcaattgttgatgcaccaacaaaaggcaggctatttgctgaggccgttgtgggtcataaggattttactgaatcagcagcaggaaaggcaagcagcgagaatgaggaagggcaagctgtctcgttagaagatgatgtcgggataagtacagacgcagatgaagagcttccggtatctgaagatgatccagaagtgctactgaggaggcttcaagagcttgctgatgagaattattcgactgggaacaactgttttgttttccctgaagtagtgaaggctgattcgatgattgatctttacttaaaccgcagcatgtcggccttagctagtgagtccgacgtttttgtaaaaggagcattcaatggttggagatggaaccgtttcactgaaacaatgcatagaagcgaattaagaggggattggtggtgctgcaagctctacattcccaagcaggcatacagactagactttgtattctttaacggtgacactgtctatgaaaataacaatcacaacgattttttcctggaaatagaaagtgacatagatgaacactcatttgaggacttcttggttgaagaaaagcgaaaggaactcgagaggcttgctgcagaagaagctgaaaggaaaagacaagctgaggagcggcacaggagagaggaagaaagggccgcgatggaagctgacagggcacaagcaaggtctgaggtcgagatgaagaaagagaaattgcgccagatgttgagttcggctagcagatatgctgagaacttatggtacatagaacctaacacctacagaggaggagacagagttagattgtactataatagaagctcgagatcactaatgcataacactgagatttggatgcatggaggttataacaactggattgatggactctcaatagctgaaagacttgtcaaatctcatgaaaaggaaggcgattggtggtatgtagaagttacattacctgaaagggcattggtgttggattgggtttttgctgatggaccacctgggaatgcatggaattatgataacaatggaaggcaggattttcatgccatcgttcctaataacatatcggatgatatcttttgggtggaagaagaacataggatctttacaaggcttcaacaagagagaagagaaagggagagtgccgaaagaataaaggctgagagatctgcaaaaatgaaggctgagatgaaggaaaagactatgagagcgtttctgctctcacaaaaacatattgtgtatactgagccactcgaagtacgtgcaggaaccactgtggacgttctttataatccttctaacacagtgctgaatggaaagtcagaggtttggttcagaggttcctttaaccgttggactcatccaagtggtcccttaccaccacagaagatggtaaaggctgagaatagttcacacttacgaacaacagtcagtgttcccctggatgcatatatgatggactttgttttctctgagtcggaagaaggtggaagatatgacaataggaatgggatggattatcatattcctgtgtctgattcggttgcaagggaacctccaatgcatattgtgcacattgcagtggaaatggctcctatcgcaaaggtagatttacattttatattttgtgacacaaatgatgatactacttgacaactaccaatatcaatcaacacaggttggaggccttggtgatgttgttacaagcctttcacgagctgttcaggatttaggccataaagttgaggttattctgccgaagtatgattgtttaatcctaagcagtgtgaaggatttacactaccaacaaagttttgcttcgggtggcacagaggtaaaagtatggtttggaaaggttgaagatctgccagtttacttcttggaaccacaaaatggaccagctcaagtaaaaggtgttgatggtggcatcagtaaagtctgaatattgtcgtcttatattttgccaaaaaagaattctgctacattgtactattttctcatgttttgggttggatgtgtctatgggaagaatgatgagagtagatttggcttcttctgtcattctgctctggagtttctgctccaaaaaggatcttctcctgatatcatacattgtcatgactggtcaagtgctcccgttgcttggctatacaaggaacagtatgctcttaatgggatgggaaatggtcggattgtatttaccatccacaatcttgagtttggagcgcatcacattggcaaggcaatggcacattgtgacaaggctacaactgtctctgatacatattcaaaggaagtggctggacacggagctattgcacctcactactataaattccatggaattcgaaatggaattgatcctgacatttgggatccatatactgacagatttattccggttcattatacatcagagaatgttcttgagggcaagagtgctgcaaaaaaggcattgcagcagatgcttggattacagcaaactgatagccctgttgttggaatcatcactcgtctaacagtgcagaagggaatccaccttatcaaacatgcaatgcatcgagctcttgaacgcaatgggcaggtggttttactgggttctgcaccagatcatcgcatacaaggtgactttacaaatttagccagtaagctgcatggtgaataccatggccgggtgaagctatgtttaacctatgacgagccactgtcacatttgcttattgctatgcgctacggatccatcccgattgttcggaaaactggaggcctgtacgacaccgtctttgacgtcgacgatgataaggatcgggctcaagcacaaggcctcgagccaaatggattcagtttcgaaggagctgatagcagtggcgtagattatgctctcgacagagctataaccgcgttttatgatgcccgcgactggttcaactcccttagcaagagggtaatggagcaagattggtcatggaatagacctgcactagactacatggagttgtaccattctgctcgcaaaaactgatacatattatcacaagagaaaacaggctcagtttgcccagtttatgagcatctcagcctctcaggcctctgtgcaaattcaatttgcacactgggaagaaaaagagtactgattggccttgtggttgtgcatgaccgccgtccaaggtccaacgatgcaacacagagtgtatagttagagaatgtcacccgttgtacgttactgccgttacatgcatgtgtatacacatcaggtagtttgcaaaacaacattacgcgtatcccggccggctaccctgccataggctctgtctctttcaatttcaattaagaagaatgtaattgacctagttttagaaaaattggctccaaaacctacacaggccctaccaacaaactagacaacaatagcctgatacacaaagctcatccaacgtcgttgtcaagacgaatagctttaaactgcttaacacaagagacaaacaactctgaactctcaaaacgggccacacaaggccaaaggaaatcgacttgaaccaaacactaacaaacaaggagaaagagacaaccccacgcgagatagcactgatccttcaccatccaaccttgatcctct

SEQ ID NO: 15124 - DNA, 4114 bp, Zea Mays
ccggcaaaatccttacccaccgaaaaaagggaaaaatggaggcaggcaggcggcactgcggcagtcacacatgcgcacgggcacggtaaaagtacgagccaccttttccctctcgatcgagcggccgaggaggaggagagcctctctgtctctggcgaggggcgactgggcgagcgcttcgtctagacagcccagctgcgcatttggatgcaaattacgtgtggaggatggagtaaaatactgagcaagggagagggaagaggagacggtcttttcttttcttgagccgaggagggggatcaggtggagtgagcgagggggaggttttgccgccggcaatggagatgaatctccgggcggagagcccactctgctcccggggccgccccgccctcgtcgtgcgcccggccgctgcagccactggcctcgcgctgtctgtcgtaaggtgcagcagatttacgagaggcgggctcgttcgatgcatggtatcaagttcagattatcccaagaggaatccgaggagggcatcgacttctaagagcaagggcgttgcctctggagggtatgcttcgagacctactgctgaatccagtacgaagaagatagaacagagcaggaacaatgaaggtgatttcagcagagccaatgggtcactctatggcgaggcagcagagcaggcaagtactgctgaagaatcgtctcaggtttacatgacaggagacattttaagtggcgcagaaagggacggagctggtaccgaagaagaggctgaccaaaatcaatcttcagcgttgccttccgcgtccatggatgatgactcaatcgaccggcaacttgatgagtaccgtggtaaaataagtgctctagtaagttccaaacctgaaccttcgtcacttgcaagtgttgctggacaaaacgaatcagttggcggttttcacggccagcacgaaccaataactggttctgaggaacatggcagttcaattgttgatgcaccaacaaaaggcaggctatttgctgaggccgttgtgggtcataaggattttactgaatcagcagcaggaaaggcaagcagcgagaatgaggaagggcaagctgtctcgttagaagatgatgtcgggataagtacagacgcagatgaagagcttccggtatctgaagatgatccagaagtgctactgaggaggcttcaagagcttgctgatgagaattattcgactgggaacaactgttttgttttccctgaagtagtgaaggctgattcgatgattgatctttacttaaaccgcagcatgtcggccttagctagtgagtccgacgtttttgtaaaaggagcattcaatggttggagatggaaccgtttcactgaaacaatgcatagaagcgaattaagaggggattggtggtgctgcaagctctacattcccaagcaggcatacagactagactttgtattctttaacggtgacactgtctatgaaaataacaatcacaacgattttttcctggaaatagaaagtgacatagatgaacactcatttgaggacttcttggttgaagaaaagcgaaaggaactcgagaggcttgctgcagaagaagctgaaaggaaaagacaagctgaggagcggcacaggagagaggaagaaagggccgcgatggaagctgacagggcacaagcaaggtctgaggtcgagatgaagaaagagaaattgcgccagatgttgagttcggctagcagatatgctgagaacttatggtacatagaacctaacacctacagaggaggagacagagttagattgtactataatagaagctcgagatcactaatgcataacactgagatttggatgcatggaggttataacaactggattgatggactctcaatagctgaaagacttgtcaaatctcatgaaaaggaaggcgattggtggtatgtagaagtcagtgttcccctggatgcatatatgatggactttgttttctctgagtcggaagaaggtggaagatatgacaataggaatgggatggattatcatattcctgtgtctgattcggttgcaagggaacctccaatgcatattgtgcacattgcagtggaaatggctcctatcgcaaaggttggaggccttggtgatgttgttacaagcctttcacgagctgttcaggatttaggccataaagttgaggttattctgccgaagtatgattgtttaatcctaagcagtgtgaaggatttacactaccaacaaagttttgcttcgggtggcacagaggtaaaagtatggtttggaaaggttgaagatctgccagtttacttcttggaaccacaaaatggcatgttttgggttggatgtgtctatgggaagaatgatgagagtagatttggcttcttctgtcattctgctctggagtttctgctccaaaaaggatcttctcctgatatcatacattgtcatgactggtcaagtgctcccgttgcttggctatacaaggaacagtatgctcttaatgggatgggaaatggtcggattgtatttaccatccacaatcttgagtttggagcgcatcacattggcaaggcaatggcacattgtgacaaggctacaactgtctctgatacatattcaaaggaagtggctggacacggagctattgcacctcactactataaattccatggaattcgaaatggaattgatcctgacatttgggatccatatactgacagatttattccggttcattatacatcagagaatgttcttgagggcaagagtgctgcaaaaaaggcattgcagcagatgcttggattacagcaaactgatagccctgttgttggaatcatcactcgtctaacagtgcagaagggaatccaccttatcaaacatgcaatgcatcgagctcttgaacgcaatgggcaggtggttttactgggttctgcaccagatcatcgcatacaaggtgactttacaaatttagccagtaagctgcatggtgaataccatggccgggtgaagctatgtttaacctatgacgagccactgtcacatttgatatatgctggcgcagacttcattcttgttccttccatcttcgaaccttgtggtttaacacagcttattgctatgcgctacggatccatcccgattgttcggaaaactggaggcctgtacgacaccgtctttgacgtcgacgatgataaggatcgggctcaagcacaaggcctcgagccaaatggattcagtttcgaaggagctgatagcagtggcgtagattatgctctcgacaggcaagtataaacaacccatctgaagttgcgtaaactacagtgctgtaacacactaacgcttcttattccacctgcccgtcattttatctcagagctataaccgcgttttatgatgcccgcgactggttcaactcccttagcaagagggtaatggagcaagattggtcatggaatagacctgcactagactacatggagttgtaccattctgctcgcaaaaactgatacatattatcacaagagaaaacaggctcagtttgcccagtttatgagcatctcagcctctcaggcctctgtgcaaattcaatttgcacactgggaagaaaaagagtactgattggccttgtggttgtgcatgaccgccgtccaaggtccaacgatgcaacacagagtgtatagttagagaatgtcacccgttgtacgttactgccgttacatgcatgtgtatacacatcaggtagtttgcaaaacaacattacgcgtatcccggccggctaccctgccataggctctgtctctttcaatttcaattaagaagaatgtaattgacctagttttagaaaaattggctccaaaacctacacaggccctaccaacaaactagacaacaatagcctgatacacaaagctcatccaacgtcgttgtcaagacgaatagctttaaactgcttaacacaagagacaaacaactctgaactctcaaaacgggccacacaaggccaaaggaaatcgacttgaaccaaacactaacaaacaaggagaaagagacaaccccacgcgagatagcactgatccttcaccatccaaccttgatcctct

SEQ ID NO: 15125 - DNA, 4392 bp, Zea Mays
cccaccgaaaaaagggaaaaatggaggcaggcaggcggcactgcggcagtcacacatgcgcacgggcacggtaaaagtacgagccaccttttccctctcgatcgagcggccgaggaggaggagagcctctctgtctctggcgaggggcgactgggcgagcgcttcgtctagacagcccagctgcgcatttggatgcaaattacgtgtggaggatggagtaaaatactgagcaagggagagggaagaggagacggtcttttcttttcttgagccgaggagggggatcaggtggagtgagcgagggggaggttttgccgccggcaatggagatgaatctccgggcggagagcccactctgctcccggggccgccccgccctcgtcgtgcgcccggccgctgcagccactggcctcgcgctgtctgtcgtaaggtgcagcagatttacgagaggcgggctcgttcgatgcatgattatcccaagaggaatccgaggagggcatcgacttctaagagcaagggcgttgcctctggagggtatgcttcgagacctactgctgaatccagtacgaagaagatagaacagagcaggaacaatgaaggtgatttcagcagagccaatgggtcactctatggcgaggcagcagagcaggcaagtactgctgaagaatcgtctcaggtttacatgacaggagacattttaagtggcgcagaaagggacggagctggtaccgaagaagaggctgaccaaaatcaatcttcagcgttgccttccgcgtccatggatgatgactcaatcgaccggcaacttgatgagtaccgtggtaaaataagtgctctagtaagttccaaacctgaaccttcgtcacttgcaagtgttgctggacaaaacgaatcagttggcggttttcacggccagcacgaaccaataactggttctgaggaacatggcagttcaattgttgatgcaccaacaaaaggcaggctatttgctgaggccgttgtgggtcataaggattttactgaatcagcagcaggaaaggcaagcagcgagaatgaggaagggcaagctgtctcgttagaagatgatgtcgggataagtacagacgcagatgaagagcttccggtatctgaagatgatccagaagtgctactgaggaggcttcaagagcttgctgatgagaattattcgactgggaacaactgttttgttttccctgaagtagtgaaggctgattcgatgattgatctttacttaaaccgcagcatgtcggccttagctagtgagtccgacgtttttgtaaaaggagcattcaatggttggagatggaaccgtttcactgaaacaatgcatagaagcgaattaagaggggattggtggtgctgcaagctctacattcccaagcaggcatacagactagactttgtattctttaacggtgacactgtctatgaaaataacaatcacaacgattttttcctggaaatagaaagtgacatagatgaacactcatttgaggacttcttggttgaagaaaagcgaaaggaactcgagaggcttgctgcagaagaagctgaaaggaaaagacaagctgaggagcggcacaggagagaggaagaaagggccgcgatggaagctgacagggcacaagcaaggtctgaggtcgagatgaagaaagagaaattgcgccagatgttgagttcggctagcagatatgctgagaacttatggtacatagaacctaacacctacagaggaggagacagagttagattgtactataatagaagctcgagatcactaatgcataacactgagatttggatgcatggaggttataacaactggattgatggactctcaatagctgaaagacttgtcaaatctcatgaaaaggaaggcgattggtggtatgtagaaggcaggattttcatgccatcgttcctaataacatatcggatgatatcttttgggtggaagaagaacataggatctttacaaggcttcaacaagagagaagagaaagggagagtgccgaaagaataaaggctgagagatctgcaaaaatgaaggctgagatgaaggaaaagactatgagagcgtttctgctctcacaaaaacatattgtgtatactgagccactcgaagtacgtgcaggaaccactgtggacgttctttataatccttctaacacagtgctgaatggaaagtcagaggtttggttcagaggttcctttaaccgttggactcatccaagtggtcccttaccaccacagaagatggtaaaggctgagaatagttcacacttacgaacaacagtcagtgttcccctggatgcatatatgatggactttgttttctctgagtcggaagaaggtggaagatatgacaataggaatgggatggattatcatattcctgtgtctgattcggttgcaagggaacctccaatgcatattgtgcacattgcagtggaaatggctcctatcgcaaaggttggaggccttggtgatgttgttacaagcctttcacgagctgttcaggatttaggccataaagttgaggttattctgccgaagtatgattgtttaatcctaagcagtgtgaaggatttacactaccaacaaagttttgcttcgggtggcacagaggtaaaagtatggtttggaaaggttgaagatctgccagtttacttcttggaaccacaaaatggcatgttttgggttggatgtgtctatgggaagaatgatgagagtagatttggcttcttctgtcattctgctctggagtttctgctccaaaaaggatcttctcctgatatcatacattgtcatgactggtcaagtgctcccgttgcttggctatacaaggaacagtatgctcttaatgggatgggaaatggtcggattgtatttaccatccacaatcttgagtttggagcgcatcacattggcaaggcaatggcacattgtgacaaggctacaactgtctctgatacatattcaaaggaagtggctggacacggagctattgcacctcactactataaattccatggaattcgaaatggaattgatcctgacatttgggatccatatactgacagatttattccggttcattatacatcagagaatgttcttgagggcaagagtgctgcaaaaaaggcattgcagcagatgcttggattacagcaaactgatagccctgttgttggaatcatcactcgtctaacagtgcagaagggaatccaccttatcaaacatgcaatgcatcgagctcttgaacgcaatgggcaggtggttttactgggttctgcaccagatcatcgcatacaaggtgactttacaaatttagccagtaagctgcatggtgaataccatggccgggtgaagctatgtttaacctatgacgagccactgtcacatttgatatatgctggcgcagacttcattcttgttccttccatcttcgaaccttgtggtttaacacagcttattgctatgcgctacggatccatcccgattgttcggaaaactggaggcctgtacgacaccgtctttgacgtcgacgatgataaggatcgggctcaagcacaaggcctcgagccaaatggattcagtttcgaaggagctgatagcagtggcgtagattatgctctcgacagagctataaccgcgttttatgatgcccgcgactggttcaactcccttagcaagagggtaatggagcaagattggtcatggaatagacctgcactagactacatggagttgtaccattctgctcgcaaaaactgatacatattatcacaagagaaaacaggctcagtttgcccagtttatgagcatctcagcctctcaggcctctgtgcaaattcaatttgcacactgggaagaaaaagagtactgattggccttgtggttgtgcatgaccgccgtccaaggtccaacgatgcaacacagagtgtatagttagagaatgtcacccgttgtacgttactgccgttacatgcatgtgtatacacatcaggtagtttgcaaaacaacattacgcgtatcccggccggctaccctgccataggctctgtctctttcaatttcaattaagaagaatgtaattgacctagttttagaaaaattggctccaaaacctacacaggccctaccaacaaactagacaacaatagcctgatacacaaagctcatccaacgtcgttgtcaagacgaatagctttaaactgcttaacacaagagacaaacaactctgaactctcaaaacgggccacacaaggccaaaggaaatcgacttgaaccaaacactaacaaacaaggagaaagagacaaccccacgcgagatagcactgatccttcaccatccaaccttgatcctct

SEQ ID NO: 15126 - DNA, 1818 bp, Zea Mays
cagcaccagcccacgaaacatgttgaggtgaaggatttacactaccaacaaagttttgcttcgggtggcacagaggtaaaagtatggtttggaaaggttgaagatctgccagtttacttcttggaaccacaaaatggcatgttttgggttggatgtgtctatgggaagaatgatgagagtagatttggcttcttctgtcattctgctctggagtttctgctccaaaaaggatcttctcctgatatcatacattgtcatgactggtcaagtgctcccgttgcttggctatacaaggaacagtatgctcttaatgggatgggaaatggtcggattgtatttaccatccacaatcttgagtttggagcgcatcacattggcaaggcaatggcacattgtgacaaggctacaactgtctctgatacatattcaaaggaagtggctggacacggagctattgcacctcactactataaattccatggaattcgaaatggaattgatcctgacatttgggatccatatactgacagatttattccggttcattatacatcagagaatgttcttgagggcaagagtgctgcaaaaaaggcattgcagcagatgcttggattacagcaaactgatagccctgttgttggaatcatcactcgtctaacagtgcagaagggaatccaccttatcaaacatgcaatgcatcgagctcttgaacgcaatgggcaggtggttttactgggttctgcaccagatcatcgcatacaaggtgactttacaaatttagccagtaagctgcatggtgaataccatggccgggtgaagctatgtttaacctatgacgagccactgtcacatttgatatatgctggcgcagacttcattcttgttccttccatcttcgaaccttgtggtttaacacagcttattgctatgcgctacggatccatcccgattgttcggaaaactggaggcctgtacgacaccgtctttgacgtcgacgatgataaggatcgggctcaagcacaaggcctcgagccaaatggattcagtttcgaaggagctgatagcagtggcgtagattatgctctcgacagagctataaccgcgttttatgatgcccgcgactggttcaactcccttagcaagagggtaatggagcaagattggtcatggaatagacctgcactagactacatggagttgtaccattctgctcgcaaaaactgatacatattatcacaagagaaaacaggctcagtttgcccagtttatgagcatctcagcctctcaggcctctgtgcaaattcaatttgcacactgggaagaaaaagagtactgattggccttgtggttgtgcatgaccgccgtccaaggtccaacgatgcaacacagagtgtatagttagagaatgtcacccgttgtacgttactgccgttacatgcatgtgtatacacatcaggtagtttgcaaaacaacattacgcgtatcccggccggctaccctgccataggctctgtctctttcaatttcaattaagaagaatgtaattgacctagttttagaaaaattggctccaaaacctacacaggccctaccaacaaactagacaacaatagcctgatacacaaagctcatccaacgtcgttgtcaagacgaatagctttaaactgcttaacacaagagacaaacaactctgaactctcaaaacgggccacacaaggccaaaggaaatcgacttgaaccaaacactaacaaacaaggagaaagagacaaccccacgcgagatagcactgatccttcaccatccaaccttgatcctct

SEQ ID NO: 15127 - DNA, 1286 bp, Zea Mays
gttttcatgttcattatacatcagagaatgttcttgagggcaagagtgctgcaaaaaaggcattgcagcagatgcttggattacagcaaactgatagccctgttgttggaatcatcactcgtctaacagtgcagaagggaatccaccttatcaaacatgcaatgcatcgagctcttgaacgcaatgggcaggtggttttactgggttctgcaccagatcatcgcatacaaggtgactttacaaatttagccagtaagctgcatggtgaataccatggccgggtgaagctatgtttaacctatgacgagccactgtcacatttgatatatgctggcgcagacttcattcttgttccttccatcttcgaaccttgtggtttaacacagcttattgctatgcgctacggatccatcccgattgttcggaaaactggaggcctgtacgacaccgtctttgacgtcgacgatgataaggatcgggctcaagcacaaggcctcgagccaaatggattcagtttcgaaggagctgatagcagtggcgtagattatgctctcgacagagctataaccgcgttttatgatgcccgcgactggttcaactcccttagcaagagggtaatggagcaagattggtcatggaatagacctgcactagactacatggagttgtaccattctgctcgcaaaaactgatacatattatcacaagagaaaacaggctcagtttgcccagtttatgagcatctcagcctctcaggcctctgtgcaaattcaatttgcacactgggaagaaaaagagtactgattggccttgtggttgtgcatgaccgccgtccaaggtccaacgatgcaacacagagtgtatagttagagaatgtcacccgttgtacgttactgccgttacatgcatgtgtatacacatcaggtagtttgcaaaacaacattacgcgtatcccggccggctaccctgccataggctctgtctctttcaatttcaattaagaagaatgtaattgacctagttttagaaaaattggctccaaaacctacacaggccctaccaacaaactagacaacaatagcctgatacacaaagctcatccaacgtcgttgtcaagacgaatagctttaaactgcttaacacaagagacaaacaactctgaactctcaaaacgggccacacaaggccaaaggaaatcgacttgaaccaaacactaacaaacaaggagaaagagacaaccccacgcgagatagcactgatccttcaccatccaaccttgatcctct

SEQ ID NO: 15128 - DNA, 803 bp, Zea Mays
aaccaacccctatccgccccccgtcttttcccttttctctaccctctatctacccaccgttcccgtctctccgccgcttccttggaagacgaagaaaccctcctccaccaccaacccgatccagctacatccgttgagggccaggagcagctagccgtcttcgttcgatccgttcgcaccccccaacgcggcaggaaggagcgtgatggccaagacgagctcgttcaagctggagcaccccctcgagaagaggcaatctgaggctaaccgtatcagagagaagtaccctgacagaattccagtgattgttgagaaggctgagaggagtgatattcctgacatcgacaagaaaaagtacctcgtccctgcagatcttacagtcgggcaattcgtgtatgttgttaggaagagaatcaagctcagtgctgagaaggctatcttcatatttgtgaaaaacacccttccaccaacagctgctctgatgtcttcaatctatgaagagaacaaggacgaggatgggttcctctacatgacttacagtggtgagaacaccttcggactgctctagatggcccgcaatggggtcgccttgcccttgcccatgcctcctgtaaataagacctgccaagcaactgtgtatattctggtttcgtcgtcgcaagtggttgcgctctactgctaaagcctacctatcagttgtggagttgtcgtcgatgttatggacacacttaatcaagtttattaattgactggacctgaatcttgggtcagtaatgtgacatctcctatgtcgtttacggtta

SEQ ID NO: 15129 - DNA, 816 bp, Zea Mays
aaccaacccctatccgccccccgtcttttcccttttctctaccctctatctacccaccgttcccgtctctccgccgcttccttggaagacgaagaaaccctcctccaccaccaacccgatccagctacatccgttgaggcccggccaggagcagctagccgtcttcgttcgatccgttcgcaccccccaacgcggttcgatttgcaggaaggagcgtgatggccaagacgagctcgttcaagctggagcaccccctcgagaagaggcaatctgaggctaaccgtatcagagagaagtaccctgacagaattccagtgattgttgagaaggctgagaggagtgatattcctgacatcgacaagaaaaagtacctcgtccctgcagatcttacagtcgggcaattcgtgtatgttgttaggaagagaatcaagctcagtgctgagaaggctatcttcatatttgtgaaaaacacccttccaccaacagctgctctgatgtcttcaatctatgaagagaacaaggacgaggatgggttcctctacatgacttacagtggtgagaacaccttcggactgctctagatggcccgcaatggggtcgccttgcccttgcccatgcctcctgtaaataagacctgccaagcaactgtgtatattctggtttcgtcgtcgcaagtggttgcgctctactgctaaagcctacctatcagttgtggagttgtcgtcgatgttatggacacacttaatcaagtttattaattgactggacctgaatcttgggtcagtaatgtgacatctcctatgtcgtttacggtta

SEQ ID NO: 15130 - DNA, 807 bp, Zea Mays
aaccaacccctatccgccccccgtcttttcccttttctctaccctctatctacccaccgttcccgtctctccgccgcttccttggaagacgaagaaaccctcctccaccaccaacccgatccagctacatccgttgaggcccggccaggagcagctagccgtcttcgttcgatccgttcgcaccccccaacgcggcaggaaggagcgtgatggccaagacgagctcgttcaagctggagcaccccctcgagaagaggcaatctgaggctaaccgtatcagagagaagtaccctgacagaattccagtgattgttgagaaggctgagaggagtgatattcctgacatcgacaagaaaaagtacctcgtccctgcagatcttacagtcgggcaattcgtgtatgttgttaggaagagaatcaagctcagtgctgagaaggctatcttcatatttgtgaaaaacacccttccaccaacagctgctctgatgtcttcaatctatgaagagaacaaggacgaggatgggttcctctacatgacttacagtggtgagaacaccttcggactgctctagatggcccgcaatggggtcgccttgcccttgcccatgcctcctgtaaataagacctgccaagcaactgtgtatattctggtttcgtcgtcgcaagtggttgcgctctactgctaaagcctacctatcagttgtggagttgtcgtcgatgttatggacacacttaatcaagtttattaattgactggacctgaatcttgggtcagtaatgtgacatctcctatgtcgtttacggtta

SEQ ID NO: 15131 - DNA, 4053 bp, Zea Mays
aagagctcggtacatagccaagcaaacaggctgcaaacgctcacgaaaccacgcgtttggtggggtcggcgaggctggtgcggtggtgcacgccggtaactctcctcgccgtccaaagaagctataaattccacccaatcgccgccccgcacgcaccacaccgccccgaccatcaccgacaccagcgcctaagccccccccaaacggcaggagacagcagcaggccggaggtctcctccttctacgcatccactgagttccttcctgcgcaaagtaaatccccagttctttcggccgctgccaagttttcgaggtgggtctcgtgattttctttccaccatgcatgaattcgccctccgcgtcgcgtgattgcagcccgctttgcggggagacatgaaaagatgggaccttttttgaccctgcctccatagactggttggcttcacgggcgcgattccgcttcggttcaccgggttgcgtggcgatttttggaattatctagaggaccgagcatgtgggctattacctgatttttttggtgacgaattgatagttttgatttccctaatttcgcagtgttgctagccccgccagagttttcttctcccccgcagtcgaattgggcgagaagttgatgggaccgggggcacactggaaggttgtgtgagatcgcgaaggggaccgtgaaatcctgagagggctgcggtgattcggctgctcggctgtatgaactgtttcgtgaacctgggactcaactcgaactcgaaccactacgtcgcctgcctcctcatcttcctgctgcatttctccccccagttaaatccatccaattctaattcaactagtagttgtgaaggagaagaacagagctgcacagatggcgagcaacagtaagtcctgcttcttccccgggagctcttccagttttgggcttatagttgacagatggatgtttgttccaatttgaaaatatatcttaaatcgacgtgaattattaaagctgctcggctgaagaagaaccgattggatgacttgggatcactagtatttgttttcctacatgatacgttatcgggttattgattaggtatttatttggtggatctgatgccagttcgtggcaaaattgaaaattttcaacttaactttctgatcgtgtggttttgaaaaatcgttcttttgataacaagaaaaattcggggttctgatggtagttgggaggcacgcatgggccatgaaccatgaagtcccatattcaattgttggtgaagaaaggcaaaaataaataaataaataaatatactacaactctgcaagttgtttacatttcacacttgttataccaacatctcacgcaagaggccaagagaggaccgaccacttggaagcttctcggatttgaccccaccatgtggatttgtgaactcttgtgcctcattttgtagtactggggaccttcgttcactaagataattgttctcacaaccctaccactgttgtacgataaggaaaacggaacaatttagcttatagacttataccgattgctacaaaacctgactaccgaaaagtatatgccatcaagtgctgtgatgtttttgttaagtgcttaattccatgcatgttcgatccacagcggtatcatgctcatgaacacgggtaggcaaatgtatattggctagtggatataaccgtctacttgttcactatagtccaatgctgcaatttgcgtgtatttgttagggtttctcggaatataatttgctttttgtcattgtcgcacattcatgggtaacacttttgggtgtctcattgtgcctgctagcattaggcgacagaagcttggtgactaatgaagttgggctgcttagtgttctgaagacgtgaagcgtatctgatagaagggtttgctaaagaggtttcttccacaatcctacagagtaccagtgttaccatggcaaacattagtcatgagacatggcacactcattccttttagtttggagttggagcccatcttgtcaaaacatgatctacaagagtgtaccaatcaccatgctctgtcttttttttttacaaaaaagataaatctgcggttaatacagacaaagaacattgcacaggcccaaatttagttgttgagaggataactgaatcttaaactgtcctgtcttatttcaccatcattgttctgagacaggggaacatgcctcactactaaccctctattgtggaggggggtagaggagggttgatgtgagaagaacaggagatcagcaatttcacaacttggctcatgtggtgaaaatgcgagaaagccacacacaccatccgctattgttattggtggtgggtttgcaggtcttgctgctgctgatgcgctcagaaatgcatccttccaggttattcttctggaatctcgtgatagaattggtggcagagttcacactgactactcttttgggtttccagtcgatttgggagcatcttggcttcatggcgtttgtgaagaaaatcccttggcaccaataattggaaggcttggacttccactgtaccgcacaagtggagacgattctgtgctgtttgatcatgatctggagagctatgcactctatgacactaatggacgtcaagtaccacaggagttggtagaaaagattgggaaggtgtttgagaccatactggaagagactggcaaattgagggaaggaaccaatgaagatatgtctatcgcaaaagccattgcaattgttatggatagaaatccacagttgaggcaagaagggattgctcatgaagttcttcagtggtatttgtgccgtatggagggttggtttgccactgacgcagattcaatttcactacagggctgggatcaggaggtgctgcttccaggtggccatggcctcatggttcgtggatatcgtccagttataaatactcttgcaaaaggcttagatatacgcctcaaccataaggttttggaaattgttcgccaccggaacagggtagaggttactgtaagcagtggccaaacattcgttgcggacgctgcagtggtcactgttccgttgggtgtcctgaaagtgaaaaccatcagatttgagccgaggctgccagagtggaaagaagaggcaatcagagaactgacggttggagttgagaacaaaattgttctgcacttcggccaggttttctggcctaacgtggagttcctcggcgtcgtttcctctagcacgtatggttgcagctatttcctgaaccttcacaaggcaacaggccaccctgtccttgtttacatgcctgctggccgacttgctcgtgacattgagaagatgtcagatgaggctgctgcgcagtttgccttttctcagttgaagaagatccttcccaatgcagctgagccgatgaattacttggtgtcgcactggggctcggacgagaacacacttggctcctacacgttcgatggggtgaacaaaccccgcgacctgtacgagaagctgcgcatccccgtggacaacctgttcttcgcaggagaggccacgagtgtcaagtacacgggcacggtgcacggcgccttctccactggtgttatggcagccgaggagtgcaagatgcgagttctggagcggttcagggagcttgacatgctggagatgtgccaccctgccatgggcgacgaaagccctgtctccgtcccgttgctcatctctcggctctaagcagacgagaggttgtctatgggattgattggcacctgacagtacgctggacgtcccactgattgccggagggaaagctggcagtacagggagaaagaaactccccttgcttctccctcttcggcatgaggaatgtgctggcattacttgtgtggcgtttcatgttaaaacctatattgtgtattgtggccttgtgggtctgtgtgtgttcagggttatcatgtcatcttggtagaaaaggatgccccgtatgtattatgaacactagtaataataatacatatatgtaacttaactgtttggagtattgagttatttggcatgt

SEQ ID NO: 15132 - DNA, 2322 bp, Zea Mays
aagagctcggtacatagccaagcaaacaggctgcaaacgctcacgaaaccacgcgtttggtggggtcggcgaggctggtgcggtggtgcacgccggtaactctcctcgccgtccaaagaagctataaattccacccaatcgccgccccgcacgcaccacaccgccccgaccatcaccgacaccagcgcctaagccccccccaaacggcaggagacagcagcaggccggaggtctcctccttctacgcatccactgagttccttcctgcgcaaagtaaatccccagttctttcggccgctgccaagttttcgagtgttgctagccccgccagagttttcttctcccccgcagtcgaattgggcgagaagttgatgggaccgggggcacactggaaggttgtgtgagatcgcgaaggggaccgtgaaatcctgagagggctgcggtgattcggctgctcggctgtatgaactgtttcgtgaacctgggactcaactcgaactcgaaccactacgtcgcctgcctcctcatcttcctgctgcatttctccccccagttaaatccatccaattctaattcaactagtagttgtgaaggagaagaacagagctgcacagatggcgagcaacagctcatgtggtgaaaatgcgagaaagccacacacaccatccgctattgttattggtggtgggtttgcaggtcttgctgctgctgatgcgctcagaaatgcatccttccaggttattcttctggaatctcgtgatagaattggtggcagagttcacactgactactcttttgggtttccagtcgatttgggagcatcttggcttcatggcgtttgtgaagaaaatcccttggcaccaataattggaaggcttggacttccactgtaccgcacaagtggagacgattctgtgctgtttgatcatgatctggagagctatgcactctatgacactaatggacgtcaagtaccacaggagttggtagaaaagattgggaaggtgtttgagaccatactggaagagactggcaaattgagggaaggaaccaatgaagatatgtctatcgcaaaagccattgcaattgttatggatagaaatccacagttgaggcaagaagggattgctcatgaagttcttcagtggtatttgtgccgtatggagggttggtttgccactgacgcagattcaatttcactacagggctgggatcaggaggtgctgcttccaggtggccatggcctcatggttcgtggatatcgtccagttataaatactcttgcaaaaggcttagatatacgcctcaaccataaggttttggaaattgttcgccaccggaacagggtagaggttactgtaagcagtggccaaacattcgttgcggacgctgcagtggtcactgttccgttgggtgtcctgaaagtgaaaaccatcagatttgagccgaggctgccagagtggaaagaagaggcaatcagagaactgacggttggagttgagaacaaaattgttctgcacttcggccaggttttctggcctaacgtggagttcctcggcgtcgtttcctctagcacgtatggttgcagctatttcctgaaccttcacaaggcaacaggccaccctgtccttgtttacatgcctgctggccgacttgctcgtgacattgagaagatgtcagatgaggctgctgcgcagtttgccttttctcagttgaagaagatccttcccaatgcagctgagccgatgaattacttggtgtcgcactggggctcggacgagaacacacttggctcctacacgttcgatggggtgaacaaaccccgcgacctgtacgagaagctgcgcggcgccttctccactggtgttatggcagccgaggagtgcaagatgcgagttctggagcggttcagggagcttgacatgctggagatgtgccaccctgccatgggcgacgaaagccctgtctccgtcccgttgctcatctctcggctctaagcagacgagaggttgtctatgggattgattggcacctgacagtacgctggacgtcccactgattgccggagggaaagctggcagtacagggagaaagaaactccccttgcttctccctcttcggcatgaggaatgtgctggcattacttgtgtggcgtttcatgttaaaacctatattgtgtattgtggccttgtgggtctgtgtgtgttcagggttatcatgtcatcttggtagaaaaggatgccccgtatgtattatgaacactagtaataataatacatatatgtaacttaactgtttggagtattgagttatttggcatgt

SEQ ID NO: 15133 - DNA, 2480 bp, Zea Mays
aagagctcggtacatagccaagcaaacaggctgcaaacgctcacgaaaccacgcgtttggtggggtcggcgaggctggtgcggtggtgcacgccggtaactctcctcgccgtccaaagaagctataaattccacccaatcgccgccccgcacgcaccacaccgccccgaccatcaccgacaccagcgcctaagccccccccaaacggcaggagacagcagcaggccggaggtctcctccttctacgcatccactgagttccttcctgcgcaaagtaaatccccagttctttcggccgctgccaagttttcgagtgttgctagccccgccagagttttcttctcccccgcagtcgaattgggcgagaagttgatgggaccgggggcacactggaaggttgtgtgagatcgcgaaggggaccgtgaaatcctgagagggctgcggtgattcggctgctcggctgtatgaactgtttcgtgaacctgggactcaactcgaactcgaaccactacgtcgcctgcctcctcatcttcctgctgcatttctccccccagttaaatccatccaattctaattcaactagtagttgtgaaggagaagaacagagctgcacagatggcgagcaacagggaacatgcctcactactaaccctctattgtggaggggggtagaggagggttgatgtgagaagaacaggagatcagcaatttcacaacttggctcatgtggtgaaaatgcgagaaagccacacacaccatccgctattgttattggtggtgggtttgcaggtcttgctgctgctgatgcgctcagaaatgcatccttccaggttattcttctggaatctcgtgatagaattggtggcagagttcacactgactactcttttgggtttccagtcgatttgggagcatcttggcttcatggcgtttgtgaagaaaatcccttggcaccaataattggaaggcttggacttccactgtaccgcacaagtggagacgattctgtgctgtttgatcatgatctggagagctatgcactctatgacactaatggacgtcaagtaccacaggagttggtagaaaagattgggaaggtgtttgagaccatactggaagagactggcaaattgagggaaggaaccaatgaagatatgtctatcgcaaaagccattgcaattgttatggatagaaatccacagttgaggcaagaagggattgctcatgaagttcttcagtggtatttgtgccgtatggagggttggtttgccactgacgcagattcaatttcactacagggctgggatcaggaggtgctgcttccaggtggccatggcctcatggttcgtggatatcgtccagttataaatactcttgcaaaaggcttagatatacgcctcaaccataaggttttggaaattgttcgccaccggaacagggtagaggttactgtaagcagtggccaaacattcgttgcggacgctgcagtggtcactgttccgttgggtgtcctgaaagtgaaaaccatcagatttgagccgaggctgccagagtggaaagaagaggcaatcagagaactgacggttggagttgagaacaaaattgttctgcacttcggccaggttttctggcctaacgtggagttcctcggcgtcgtttcctctagcacgtatggttgcagctatttcctgaaccttcacaaggcaacaggccaccctgtccttgtttacatgcctgctggccgacttgctcgtgacattgagaagatgtcagatgaggctgctgcgcagtttgccttttctcagttgaagaagatccttcccaatgcagctgagccgatgaattacttggtgtcgcactggggctcggacgagaacacacttggctcctacacgttcgatggggtgaacaaaccccgcgacctgtacgagaagctgcgcatccccgtggacaacctgttcttcgcaggagaggccacgagtgtcaagtacacgggcacggtgcacggcgccttctccactggtgttatggcagccgaggagtgcaagatgcgagttctggagcggttcagggagcttgacatgctggagatgtgccaccctgccatgggcgacgaaagccctgtctccgtcccgttgctcatctctcggctctaagcagacgagaggttgtctatgggattgattggcacctgacagtacgctggacgtcccactgattgccggagggaaagctggcagtacagggagaaagaaactccccttgcttctccctcttcggcatgaggaatgtgctggcattacttgtgtggcgtttcatgttaaaacctatattgtgtattgtggccttgtgggtctgtgtgtgttcagggttatcatgtcatcttggtagaaaaggatgccccgtatgtattatgaacactagtaataataatacatatatgtaacttaactgtttggagtattgagttatttggcatgt

SEQ ID NO: 15134 - DNA, 3790 bp, Zea Mays
aagagctcggtacatagccaagcaaacaggctgcaaacgctcacgaaaccacgcgtttggtggggtcggcgaggctggtgcggtggtgcacgccggtaactctcctcgccgtccaaagaagctataaattccacccaatcgccgccccgcacgcaccacaccgccccgaccatcaccgacaccagcgcctaagccccccccaaacggcaggagacagcagcaggccggaggtctcctccttctacgcatccactgagttccttcctgcgcaaagtaaatccccagttctttcggccgctgccaagttttcgagtgttgctagccccgccagagttttcttctcccccgcagtcgaattgggcgagaagttgatgggaccgggggcacactggaaggttgtgtgagatcgcgaaggggaccgtgaaatcctgagagggctgcggtgattcggctgctcggctgtatgaactgtttcgtgaacctgggactcaactcgaactcgaaccactacgtcgcctgcctcctcatcttcctgctgcatttctccccccagttaaatccatccaattctaattcaactagtagttgtgaaggagaagaacagagctgcacagatggcgagcaacagtaagtcctgcttcttccccgggagctcttccagttttgggcttatagttgacagatggatgtttgttccaatttgaaaatatatcttaaatcgacgtgaattattaaagctgctcggctgaagaagaaccgattggatgacttgggatcactagtatttgttttcctacatgatacgttatcgggttattgattaggtatttatttggtggatctgatgccagttcgtggcaaaattgaaaattttcaacttaactttctgatcgtgtggttttgaaaaatcgttcttttgataacaagaaaaattcggggttctgatggtagttgggaggcacgcatgggccatgaaccatgaagtcccatattcaattgttggtgaagaaaggcaaaaataaataaataaataaatatactacaactctgcaagttgtttacatttcacacttgttataccaacatctcacgcaagaggccaagagaggaccgaccacttggaagcttctcggatttgaccccaccatgtggatttgtgaactcttgtgcctcattttgtagtactggggaccttcgttcactaagataattgttctcacaaccctaccactgttgtacgataaggaaaacggaacaatttagcttatagacttataccgattgctacaaaacctgactaccgaaaagtatatgccatcaagtgctgtgatgtttttgttaagtgcttaattccatgcatgttcgatccacagcggtatcatgctcatgaacacgggtaggcaaatgtatattggctagtggatataaccgtctacttgttcactatagtccaatgctgcaatttgcgtgtatttgttagggtttctcggaatataatttgctttttgtcattgtcgcacattcatgggtaacacttttgggtgtctcattgtgcctgctagcattaggcgacagaagcttggtgactaatgaagttgggctgcttagtgttctgaagacgtgaagcgtatctgatagaagggtttgctaaagaggtttcttccacaatcctacagagtaccagtgttaccatggcaaacattagtcatgagacatggcacactcattccttttagtttggagttggagcccatcttgtcaaaacatgatctacaagagtgtaccaatcaccatgctctgtcttttttttttacaaaaaagataaatctgcggttaatacagacaaagaacattgcacaggcccaaatttagttgttgagaggataactgaatcttaaactgtcctgtcttatttcaccatcattgttctgagacaggggaacatgcctcactactaaccctctattgtggaggggggtagaggagggttgatgtgagaagaacaggagatcagcaatttcacaacttggctcatgtggtgaaaatgcgagaaagccacacacaccatccgctattgttattggtggtgggtttgcaggtcttgctgctgctgatgcgctcagaaatgcatccttccaggttattcttctggaatctcgtgatagaattggtggcagagttcacactgactactcttttgggtttccagtcgatttgggagcatcttggcttcatggcgtttgtgaagaaaatcccttggcaccaataattggaaggcttggacttccactgtaccgcacaagtggagacgattctgtgctgtttgatcatgatctggagagctatgcactctatgacactaatggacgtcaagtaccacaggagttggtagaaaagattgggaaggtgtttgagaccatactggaagagactggcaaattgagggaaggaaccaatgaagatatgtctatcgcaaaagccattgcaattgttatggatagaaatccacagttgaggcaagaagggattgctcatgaagttcttcagtggtatttgtgccgtatggagggttggtttgccactgacgcagattcaatttcactacagggctgggatcaggaggtgctgcttccaggtggccatggcctcatggttcgtggatatcgtccagttataaatactcttgcaaaaggcttagatatacgcctcaaccataaggttttggaaattgttcgccaccggaacagggtagaggttactgtaagcagtggccaaacattcgttgcggacgctgcagtggtcactgttccgttgggtgtcctgaaagtgaaaaccatcagatttgagccgaggctgccagagtggaaagaagaggcaatcagagaactgacggttggagttgagaacaaaattgttctgcacttcggccaggttttctggcctaacgtggagttcctcggcgtcgtttcctctagcacgtatggttgcagctatttcctgaaccttcacaaggcaacaggccaccctgtccttgtttacatgcctgctggccgacttgctcgtgacattgagaagatgtcagatgaggctgctgcgcagtttgccttttctcagttgaagaagatccttcccaatgcagctgagccgatgaattacttggtgtcgcactggggctcggacgagaacacacttggctcctacacgttcgatggggtgaacaaaccccgcgacctgtacgagaagctgcgcatccccgtggacaacctgttcttcgcaggagaggccacgagtgtcaagtacacgggcacggtgcacggcgccttctccactggtgttatggcagccgaggagtgcaagatgcgagttctggagcggttcagggagcttgacatgctggagatgtgccaccctgccatgggcgacgaaagccctgtctccgtcccgttgctcatctctcggctctaagcagacgagaggttgtctatgggattgattggcacctgacagtacgctggacgtcccactgattgccggagggaaagctggcagtacagggagaaagaaactccccttgcttctccctcttcggcatgaggaatgtgctggcattacttgtgtggcgtttcatgttaaaacctatattgtgtattgtggccttgtgggtctgtgtgtgttcagggttatcatgtcatcttggtagaaaaggatgccccgtatgtattatgaacactagtaataataatacatatatgtaacttaactgtttggagtattgagttatttggcatgt

SEQ ID NO: 15135 - DNA, 2855 bp, Zea Mays
aagagctcggtacatagccaagcaaacaggctgcaaacgctcacgaaaccacgcgtttggtggggtcggcgaggctggtgcggtggtgcacgccggtaactctcctcgccgtccaaagaagctataaattccacccaatcgccgccccgcacgcaccacaccgccccgaccatcaccgacaccagcgcctaagccccccccaaacggcaggagacagcagcaggccggaggtctcctccttctacgcatccactgagttccttcctgcgcaaagtaaatccccagttctttcggccgctgccaagttttcgagtgttgctagccccgccagagttttcttctcccccgcagtcgaattgggcgagaagttgatgggaccgggggcacactggaaggttgtgtgagatcgcgaaggggaccgtgaaatcctgagagggctgcggtgattcggctgctcggctgtatgaactgtttcgtgaacctgggactcaactcgaactcgaaccactacgtcgcctgcctcctcatcttcctgctgcatttctccccccagttaaatccatccaattctaattcaactagtagttgtgaaggagaagaacagagctgcacagatggcgagcaacacattaggcgacagaagcttggtgactaatgaagttgggctgcttagtgttctgaagacgtgaagcgtatctgatagaagggtttgctaaagaggtttcttccacaatcctacagagtaccagtgttaccatggcaaacattagtcatgagacatggcacactcattccttttagtttggagttggagcccatcttgtcaaaacatgatctacaagagtgtaccaatcaccatgctctgtcttttttttttacaaaaaagataaatctgcggttaatacagacaaagaacattgcacaggcccaaatttagttgttgagaggataactgaatcttaaactgtcctgtcttatttcaccatcattgttctgagacaggggaacatgcctcactactaaccctctattgtggaggggggtagaggagggttgatgtgagaagaacaggagatcagcaatttcacaacttggctcatgtggtgaaaatgcgagaaagccacacacaccatccgctattgttattggtggtgggtttgcaggtcttgctgctgctgatgcgctcagaaatgcatccttccaggttattcttctggaatctcgtgatagaattggtggcagagttcacactgactactcttttgggtttccagtcgatttgggagcatcttggcttcatggcgtttgtgaagaaaatcccttggcaccaataattggaaggcttggacttccactgtaccgcacaagtggagacgattctgtgctgtttgatcatgatctggagagctatgcactctatgacactaatggacgtcaagtaccacaggagttggtagaaaagattgggaaggtgtttgagaccatactggaagagactggcaaattgagggaaggaaccaatgaagatatgtctatcgcaaaagccattgcaattgttatggatagaaatccacagttgaggcaagaagggattgctcatgaagttcttcagtggtatttgtgccgtatggagggttggtttgccactgacgcagattcaatttcactacagggctgggatcaggaggtgctgcttccaggtggccatggcctcatggttcgtggatatcgtccagttataaatactcttgcaaaaggcttagatatacgcctcaaccataaggttttggaaattgttcgccaccggaacagggtagaggttactgtaagcagtggccaaacattcgttgcggacgctgcagtggtcactgttccgttgggtgtcctgaaagtgaaaaccatcagatttgagccgaggctgccagagtggaaagaagaggcaatcagagaactgacggttggagttgagaacaaaattgttctgcacttcggccaggttttctggcctaacgtggagttcctcggcgtcgtttcctctagcacgtatggttgcagctatttcctgaaccttcacaaggcaacaggccaccctgtccttgtttacatgcctgctggccgacttgctcgtgacattgagaagatgtcagatgaggctgctgcgcagtttgccttttctcagttgaagaagatccttcccaatgcagctgagccgatgaattacttggtgtcgcactggggctcggacgagaacacacttggctcctacacgttcgatggggtgaacaaaccccgcgacctgtacgagaagctgcgcatccccgtggacaacctgttcttcgcaggagaggccacgagtgtcaagtacacgggcacggtgcacggcgccttctccactggtgttatggcagccgaggagtgcaagatgcgagttctggagcggttcagggagcttgacatgctggagatgtgccaccctgccatgggcgacgaaagccctgtctccgtcccgttgctcatctctcggctctaagcagacgagaggttgtctatgggattgattggcacctgacagtacgctggacgtcccactgattgccggagggaaagctggcagtacagggagaaagaaactccccttgcttctccctcttcggcatgaggaatgtgctggcattacttgtgtggcgtttcatgttaaaacctatattgtgtattgtggccttgtgggtctgtgtgtgttcagggttatcatgtcatcttggtagaaaaggatgccccgtatgtattatgaacactagtaataataatacatatatgtaacttaactgtttggagtattgagttatttggcatgt

SEQ ID NO: 15136 - DNA, 2651 bp, Zea Mays
aagagctcggtacatagccaagcaaacaggctgcaaacgctcacgaaaccacgcgtttggtggggtcggcgaggctggtgcggtggtgcacgccggtaactctcctcgccgtccaaagaagctataaattccacccaatcgccgccccgcacgcaccacaccgccccgaccatcaccgacaccagcgcctaagccccccccaaacggcaggagacagcagcaggccggaggtctcctccttctacgcatccactgagttccttcctgcgcaaagtaaatccccagttctttcggccgctgccaagttttcgaggtgggtctcgtgattttctttccaccatgcatgaattcgccctccgcgtcgcgtgattgcagcccgctttgcggggagacatgaaaagatgggaccttttttgaccctgcctccatagactggttggcttcacgggcgcgattccgcttcggttcaccgggttgcgtggcgatttttggaattatctagaggaccgagcatgtgggctattacctgatttttttggtgacgaattgatagttttgatttccctaatttcgcagtgttgctagccccgccagagttttcttctcccccgcagtcgaattgggcgagaagttgatgggaccgggggcacactggaaggttgtgtgagatcgcgaaggggaccgtgaaatcctgagagggctgcggtgattcggctgctcggctgtatgaactgtttcgtgaacctgggactcaactcgaactcgaaccactacgtcgcctgcctcctcatcttcctgctgcatttctccccccagttaaatccatccaattctaattcaactagtagttgtgaaggagaagaacagagctgcacagatggcgagcaacagctcatgtggtgaaaatgcgagaaagccacacacaccatccgctattgttattggtggtgggtttgcaggtcttgctgctgctgatgcgctcagaaatgcatccttccaggttattcttctggaatctcgtgatagaattggtggcagagttcacactgactactcttttgggtttccagtcgatttgggagcatcttggcttcatggcgtttgtgaagaaaatcccttggcaccaataattggaaggcttggacttccactgtaccgcacaagtggagacgattctgtgctgtttgatcatgatctggagagctatgcactctatgacactaatggacgtcaagtaccacaggagttggtagaaaagattgggaaggtgtttgagaccatactggaagagactggcaaattgagggaaggaaccaatgaagatatgtctatcgcaaaagccattgcaattgttatggatagaaatccacagttgaggcaagaagggattgctcatgaagttcttcagtggtatttgtgccgtatggagggttggtttgccactgacgcagattcaatttcactacagggctgggatcaggaggtgctgcttccaggtggccatggcctcatggttcgtggatatcgtccagttataaatactcttgcaaaaggcttagatatacgcctcaaccataaggttttggaaattgttcgccaccggaacagggtagaggttactgtaagcagtggccaaacattcgttgcggacgctgcagtggtcactgttccgttgggtgtcctgaaagtgaaaaccatcagatttgagccgaggctgccagagtggaaagaagaggcaatcagagaactgacggttggagttgagaacaaaattgttctgcacttcggccaggttttctggcctaacgtggagttcctcggcgtcgtttcctctagcacgtatggttgcagctatttcctgaaccttcacaaggcaacaggccaccctgtccttgtttacatgcctgctggccgacttgctcgtgacattgagaagatgtcagatgaggctgctgcgcagtttgccttttctcagttgaagaagatccttcccaatgcagctgagccgatgaattacttggtgtcgcactggggctcggacgagaacacacttggctcctacacgttcgatggggtgaacaaaccccgcgacctgtacgagaagctgcgcatccccgtggacaacctgttcttcgcaggagaggccacgagtgtcaagtacacgggcacggtgcacggcgccttctccactggtgttatggcagccgaggagtgcaagatgcgagttctggagcggttcagggagcttgacatgctggagatgtgccaccctgccatgggcgacgaaagccctgtctccgtcccgttgctcatctctcggctctaagcagacgagaggttgtctatgggattgattggcacctgacagtacgctggacgtcccactgattgccggagggaaagctggcagtacagggagaaagaaactccccttgcttctccctcttcggcatgaggaatgtgctggcattacttgtgtggcgtttcatgttaaaacctatattgtgtattgtggccttgtgggtctgtgtgtgttcagggttatcatgtcatcttggtagaaaaggatgccccgtatgtattatgaacactagtaataataatacatatatgtaacttaactgtttggagtattgagttatttggcatgt

SEQ ID NO: 15137 - DNA, 2137 bp, Zea Mays
ataaactacagctttataactcattaactctactgccatgacatgaggctctaacaccaagactacgaccccaccgcacactctgaccccacatgacagttatctgtctcccaacgaccagtcaaacccagagtccacggccatgcaccgactctcggagacgaaagtctcgagccatcccatccgtccactcatcctaccaacggcgcggatccctcctctcccgacgccggccagatccgcccgccactcggggaaaaaattcccgtcgtctccactccaccagtccacctgcatcctccctctctctctcccgctcccgtgctctctccctctccccaggatccgaattgccagcgcaccagtcgagctcgcgggacctcgccggcgccggcgatggcctcctcccttttggccggacggggagggggccaccaccacaactggggggagacgcgcgccccgctcgagcccataccccccaaccctagtcccagccagccccacccgcgcgccgacgggtccaagtccaagccgcgggcggcggccggctacgtgaagttccgcccggcgtccctgggccaccgcgaggcccgcgcgctccgggaccgcctcgcggtggagctcggccaggtccgcgccctcctctcccgcatcgacacctggcagcagcagggcccgccgccgcgcgcggtgctccgcggggcgatgcggaagcggtgcggccagatcctcagcaggctgcgcaaggacaagcgcagcgtgtggttcaacgcgcccgtcgaggtggagcgcctcggcctccacgactaccatgccgtcatcaagcgccccatggatctcggcaccgtcaaggagggcctcgccgccgggaggtacgcctcgcacgacgacttcgcggccgacgtccgcctcaccttcaccaacgcgctgcggtacaacccggtcggccacgaggttcacacgttcgctggcgccctcctcgcctacttcgagaggatgtacaaggaggcgctcgtttgtttagaggaagagcgcaagcgccttgagccgccgaggccagtggcggctgagctgccacctccgccggcagttgagcctgtcgaggcgaaggctaagacgagagcagggaatgtgaggatgcggaagcccaaggcgagggagcctaacaagagggagatgagcctggaggagaagaacatgctcaggctggggctggtgagcctgcccgaagagaagatgcacaatgtgcttcagatcgtgcgcaagaggaacaacaacccggagatgcttggggatgagatcgagcttgatattgatgagatggatgttgagacacagtgggagcttgatcgtttcgttactaacttcaacaaggcgctcaagaagtcccagcgtgctgcgatgttgaatggtggcgttgctgatgtaaccagtactgctgtggctgaggatgacactgcacctgtgggcgatgtgcctacattggttggcaatgacgatgcggagagtgaggaacctgtgaagagcactacagtggctgagcaggtggatgagtatgttgatattggggatgaaatgccagcagccacttaccaatccatggagatcgagaaggacgctgaaggtacgactggctctggtggttctggcagtggctcttcatcgtccagtggttctgagtcgaggagctcaggggacagtgcctcaggagctggcaatgctcattctttgacttaggggaggttggtaacaataggatttgaaaatctgaatgatccgagttcgtgtgcagcagtacagcaccatgtgtatgtaagctggaggtggaaggtactggtgtgttaaaagtagctgatcgaccttctcgtatgaagggggccagggctagtgtctgtgttcttaatggtagggttgatcgaccttctcgtaattgatgctttgtgcatgacattaaagtatggttttataagtaacaatgcagtatcatttgttgggtgatgacttttgatgtaagagttatttctgcattttggataggattacgcaagataaatttcaacgaccatgcaaatttgtgttgactgttgagtttgttctggtggtgttgcttgatctatgaaaattaccatccttt

SEQ ID NO: 15138 - DNA, 2189 bp, Zea Mays
ataaactacagctttataactcattaactctactgccatgacatgaggctctaacaccaagactacgaccccaccgcacactctgaccccacatgacagttatctgtctcccaacgaccagtcaaacccagagtccacggccatgcaccgactctcggagacgaaagtctcgagccatcccatccgtccactcatcctaccaacggcgcggatccctcctctcccgacgccggccagatccgcccgccactcggggaaaaaattcccgtcgtctccactccaccagtccacctgcatcctccctctctctctcccgctcccgtgctctctccctctccccaggatccgaattgccagcgcaccagtcgagctcgcgggacctcgccggcgccggcgatggcctcctcccttttggccggacggggagggggccaccaccacaactggggggagacgcgcgccccgctcgagcccataccccccaaccctagtcccagccagccccacccgcgcgccgacgggtccaagtccaagccgcgggcggcggccggctacgtgaagttccgcccggcgtccctgggccaccgcgaggcccgcgcgctccgggaccgcctcgcggtggagctcggccaggtccgcgccctcctctcccgcatcgacacctggcagcagcagggcccgccgccgcgcgcggtgctccgcggggcgatgcggaagcggtgcggccagatcctcagcaggctgcgcaaggacaagcgcagcgtgtggttcaacgcgcccgtcgaggtggagcgcctcggcctccacgactaccatgccgtcatcaagcgccccatggatctcggcaccgtcaaggagggcctcgccgccgggaggtacgcctcgcacgacgacttcgcggccgacgtccgcctcaccttcaccaacgcgctgcggtacaacccggtcggccacgaggttcacacgttcgctggcgccctcctcgcctacttcgagaggatgtacaaggaggcgctcgtttgtttagaggaagagcgcaagcgccttgagccgccgaggccagtggcggctgagctgccacctccgccggcagttgagcctgtcgaggcgaaggctaagacgagagcagggaatgtgaggatgcggaagcccaaggcgagggagcctaacaagagggagatgagcctggaggagaagaacatgctcaggctggggctggtgagcctgcccgaagagaagatgcacaatgtgcttcagatcgtgcgcaagaggaacaacaacccggagatgcttggggatgagatcgagcttgatattgatgagatggatgttgagacacagtgggagcttgatcgtttcgttactaacttcaacaaggcgctcaagaagtcccagcgtgctgcgatgttgaatggtggcgttgctgatgtaaccagtactgctgtggctgaggatgacactgcacctgtgggcgatgtgcctacattggttggcaatgacgatgcggagagtgaggaacctgtgaagagcactacagtggctgagcaggtggatgagtatgttgatattggggatgaaatgccagcagccacttaccaatccatggagatcgagaaggacgctgaaggttctgagtcgaggagctcaggggacagtgcctcaggagctggcaatgctcattctttgacttaggggaggttggtaacaataggatttgaaaatctgaatgatccgagttcgtgtgcaggtaattgtaagtgtgtagctgtttctgagacatgggtgtctgcttaggctttgattacgttagtagtagataacaaactggctttgtgggtgtctgacagcagtacagcaccatgtgtatgtaagctggaggtggaaggtactggtgtgttaaaagtagctgatcgaccttctcgtatgaagggggccagggctagtgtctgtgttcttaatggtagggttgatcgaccttctcgtaattgatgctttgtgcatgacattaaagtatggttttataagtaacaatgcagtatcatttgttgggtgatgacttttgatgtaagagttatttctgcattttggataggattacgcaagataaatttcaacgaccatgcaaatttgtgttgactgttgagtttgttctggtggtgttgcttgatctatgaaaattaccatccttt

SEQ ID NO: 15139 - DNA, 2623 bp, Zea Mays
gccggagccgcggcgccgcaccacctcaccggccccggggcccaagtccaacccggcaacccccctcaaaatcccattcgaaacctcccgattccctccacgaaatttacaaaaccacagcactcccgccaatctcccgcacgtttgggacccaaatccgcgatcccgttgcccagccgcagcgtacggaaacctagctccccccccgccgccgccgccgccgctgggatggacttctcggcgccctcattctcgctgggttttgactgggacgacgatgaccccccggccagcagcgaccggcgcgagcagccgcgcgggtacggggcccccgacgcgccgtcgttctcgttagggatcgacgacgacgacgacgtggaggagccccgcatcccggcgagaggccgccagaatgagcaggcgcgtgagttcacggcgcccgatccgccgtcgttctccctgggcttcgacgacgaacacggcgatggtgacatactctctgccgaccgttgccgcgagcagtcgcagccccaggtagcgcccggatctccttcaaatggcactgcagatgatgatgatgataaggaggatggcttcgtcgtcgctggtggcaagcggccggttcgagtggagcgtgacacgctatacccagatcccctgccgacgccagcggagaccaatcggttcaagcggctgcggaagggctctgcgacagcccatccggcgcaaactccccaggtgccgcaccgtgaggcgcctgacgctccgtcttcctcccttagcatcagcgacgacgacttcctaactggcggccagcatcacgagcgactgaagccacaagcctctcctcggatcccctcatcgctcagtatcgaagacgaggacgacgacttcttcctcgctggtgaccgacagccagagccaacactgcctcaagtgactcaactcaagcggctgcggaagggccctgtcccgccacatctggcgccatcaccgcctcctcccaaggtgccaggacagcccacgacggaagcctctccagtaatgactgaagatgcagcacgaggggcggttgggagttgggaagacgagatcgaggattggacaacagacgaggaccgaccagttcgagatgtgccaccatctgttggtagctgcagcacttcaagcaactcaaagttctctctgcttaaccgtggtgtccttatgacccagtcaggaactaaagcgagtacatcaaaatttacacaaacaccaaatacatctgcttcaatatctttggaagaaagctgcacaaagaaattacttcctaagataacagtaagcccgatgaggaaaatttatttgcttgattctgacactgatgctgacgatgactacagtcaaaataaagcaaagagcatgcagcaaaacaggaagccccaaatgaacagtactgtacagaagagcggggctatgatgagtgacaattgggcaacacctgccttggatgagttctgcaaggaatacttcgaatctccaaaagatgcaggattttctcagccgaaagaaggaaacactcattacaaggcttcacaacctaagaactctgggcacttccagcaacaagcgtcttcaagtggaggtgaagtggatgatggtcctcctgctatgcaatatctgtaccaccctgacccaagggtgggtgatttgttccggaacaggctgcaacatttcgttcctattggggcaggaagtaccatagcaaatgagcaaaacagagcaaaaagtctaagaagttgcaggaggcaatccagctcgagtgcagctgctaccgatgactgggtaactcctgggagggtctcagttccaactgatgctagcaaaagaagggtgcatgccagtggaactcattctggctctggccattggtttactaatgacagtgggaggaaggtttacgtctcaaaaaatggacaagagttgactgggcgtgatgcctatcgacaatatcaaaaggtacaagaagaaaggttcatcaggaaccaaacgaggtgctgctcaagtgaaaactgagactgcagccaaacgaggtactgctcaagtgaaaactgagactgcagccaaacgaggtacgagtagagcaaaaaggaagcggtgactgcctacattggctaggattctgtagttaggttttcacctcgcgtgcttgagttcacagccgatttgttggtagaagtagaaccatatgaatgtataacaagcctcagctgctctcgggtcttcttttagggtgcgtttggttgcaatgacaggacgggataggacgagacgatccctcaaataagattgttttgttcagggtcaagggttgggacaggattatcccagtgttgtccccagttatccctcaaaattggagggacgagaggatgccagaggacgtccctatcctggttgtcccgcaaccaaacacacccttatatcaggaggctagcgtatacgtcagtacatggttctattgtgtgtttgtaaatatgattttgctcttcatgtattcttctttttttggatgccaatgaggcaatgatctgtatgcaaaaggctggattactccacaggatgaataaaccattatttcaca

SEQ ID NO: 15140 - DNA, 2386 bp, Zea Mays
cggcgccgcaccacctcaccggccccggggcccaagtccaacccggcaacccccctcaaaatcccattcgaaacctcccgattccctccacgaaatttacaaaaccacagcactcccgccaatctcccgcacgtttgggacccaaatccgcgatcccgttgcccagccgcagcgtacggaaacctagctccccccccgccgccgccgccgccgctgggatggacttctcggcgccctcattctcgctgggttttgactgggacgacgatgaccccccggccagcagcgaccggcgcgagcagccgcgcgggtacggggcccccgacgcgccgtcgttctcgttagggatcgacgacgacgacgacgtggaggagccccgcatcccggcgagaggccgccagaatgagcaggcgcgtgagttcacggcgcccgatccgccgtcgttctccctgggcttcgacgacgaacacggcgatggtgacatactctctgccgaccgttgccgcgagcagtcgcagccccaggtagcgcccggatctccttcaaatggcactgcagatgatgatgatgataaggaggatggcttcgtcgtcgctggtggcaagcggccggttcgagtggagcgtgacacgctatacccagatcccctgccgacgccagcggagaccaatcggttcaagcggctgcggaagggctctgcgacagcccatccggcgcaaactccccaggtgccgcaccgtgaggcgcctgacgctccgtcttcctcccttagcatcagcgacgacgacttcctaactggcggccagcatcacgagcgactgaagccacaagcctctcctcggatcccctcatcgctcagtatcgaagacgaggacgacgacttcttcctcgctggtgaccgacagccagagccaacactgcctcaagtgactcaactcaagcggctgcggaagggccctgtcccgccacatctggcgccatcaccgcctcctcccaaggtgccaggacagcccacgacggaagcctctccagtaatgactgaagatgcagcacgaggggcggttgggagttgggaagacgagatcgaggattggacaacagacgaggaccgaccagttcgagtcaaaataaagcaaagagcatgcagcaaaacaggaagccccaaatgaacagtactgtacagaagagcggggctatgatgagtgacaattgggcaacacctgccttggatgagttctgcaaggaatacttcgaatctccaaaagatgcaggattttctcagccgaaagaaggaaacactcattacaaggcttcacaacctaagaactctgggcacttccagcaacaagcgtcttcaagtggaggtgaagtggatgatggtcctcctgctatgcaatatctgtaccaccctgacccaagggtgggtgatttgttccggaacaggctgcaacatttcgttcctattggggcaggaagtaccatagcaaatgagcaaaacagagcaaaaagtctaagaagttgcaggaggcaatccagctcgagtgcagctgctaccgatgactgggtaactcctgggagggtctcagttccaactgatgctagcaaaagaagggtgcatgccagtggaactcattctggctctggccattggtttactaatgacagtgggaggaaggtttacgtctcaaaaaatggacaagagttgactgggcgtgatgcctatcgacaatatcaaaaggaaagtggcaggggattcaacaggtacaagaagaaaggttcatcaggaaccaaacgaggtgctgctcaagtgaaaactgagactgcagccaaacgaggtactgctcaagtgaaaactgagactgcagccaaacgaggtacgagtagagcaaaaaggaagcggtgactgcctacattggctaggattctgtagttaggttttcacctcgcgtgcttgagttcacagccgatttgttggtagaagtagaaccatatgaatgtataacaagcctcagctgctctcgggtcttcttttagggtgcgtttggttgcaatgacaggacgggataggacgagacgatccctcaaataagattgttttgttcagggtcaagggttgggacaggattatcccagtgttgtccccagttatccctcaaaattggagggacgagaggatgccagaggacgtccctatcctggttgtcccgcaaccaaacacacccttatatcaggaggctagcgtatacgtcagtacatggttctattgtgtgtttgtaaatatgattttgctcttcatgtattcttctttttttggatgccaatgaggcaatgatctgtatgcaaaaggctggattactccacaggatgaataaaccattatttcaca

SEQ ID NO: 15141 - DNA, 2557 bp, Zea Mays
cggcgccgcaccacctcaccggccccggggcccaagtccaacccggcaacccccctcaaaatcccattcgaaacctcccgattccctccacgaaatttacaaaaccacagcactcccgccaatctcccgcacgtttgggacccaaatccgcgatcccgttgcccagccgcagcgtacggaaacctagctccccccccgccgccgccgccgccgctgggatggacttctcggcgccctcattctcgctgggttttgactgggacgacgatgaccccccggccagcagcgaccggcgcgagcagccgcgcgggtacggggcccccgacgcgccgtcgttctcgttagggatcgacgacgacgacgacgtggaggagccccgcatcccggcgagaggccgccagaatgagcaggcgcgtgagttcacggcgcccgatccgccgtcgttctccctgggcttcgacgacgaacacggcgatggtgacatactctctgccgaccgttgccgcgagcagtcgcagccccaggtagcgcccggatctccttcaaatggcactgcagatgatgatgatgataaggaggatggcttcgtcgtcgctggtggcaagcggccggttcgagtggagcgtgacacgctatacccagatcccctgccgacgccagcggagaccaatcggttcaagcggctgcggaagggctctgcgacagcccatccggcgcaaactccccaggtgccgcaccgtgaggcgcctgacgctccgtcttcctcccttagcatcagcgacgacgacttcctaactggcggccagcatcacgagcgactgaagccacaagcctctcctcggatcccctcatcgctcagtatcgaagacgaggacgacgacttcttcctcgctggtgaccgacagccagagccaacactgcctcaagtgactcaactcaagcggctgcggaagggccctgtcccgccacatctggcgccatcaccgcctcctcccaaggtgccaggacagcccacgacggaagcctctccagtaatgactgaagatgcagcacgaggggcggttgggagttgggaagacgagatcgaggattggacaacagacgaggaccgaccagttcgagatgtgccaccatctgttggtagctgcagcacttcaagcaactcaaagttctctctgcttaaccgtggtgtccttatgacccagtcaggaactaaagcgagtacatcaaaatttacacaaacaccaaatacatctgcttcaatatctttggaagaaagctgcacaaagaaattacttcctaagataacagtaagcccgatgaggaaaatttatttgcttgattctgacactgatgctgacgatgactacagtcaaaataaagcaaagagcatgcagcaaaacaggaagccccaaatgaacagtactgtacagaagagcggggctatgatgagtgacaattgggcaacacctgccttggatgagttctgcaaggaatacttcgaatctccaaaagatgcaggattttctcagccgaaagaaggaaacactcattacaaggcttcacaacctaagaactctgggcacttccagcaacaagcgtcttcaagtggaggctgcaacatttcgttcctattggggcaggaagtaccatagcaaatgagcaaaacagagcaaaaagtctaagaagttgcaggaggcaatccagctcgagtgcagctgctaccgatgactgggtaactcctgggagggtctcagttccaactgatgctagcaaaagaagggtgcatgccagtggaactcattctggctctggccattggtttactaatgacagtgggaggaaggtttacgtctcaaaaaatggacaagagttgactgggcgtgatgcctatcgacaatatcaaaaggaaagtggcaggggattcaacaggtacaagaagaaaggttcatcaggaaccaaacgaggtgctgctcaagtgaaaactgagactgcagccaaacgaggtactgctcaagtgaaaactgagactgcagccaaacgaggtacgagtagagcaaaaaggaagcggtgactgcctacattggctaggattctgtagttaggttttcacctcgcgtgcttgagttcacagccgatttgttggtagaagtagaaccatatgaatgtataacaagcctcagctgctctcgggtcttcttttagggtgcgtttggttgcaatgacaggacgggataggacgagacgatccctcaaataagattgttttgttcagggtcaagggttgggacaggattatcccagtgttgtccccagttatccctcaaaattggagggacgagaggatgccagaggacgtccctatcctggttgtcccgcaaccaaacacacccttatatcaggaggctagcgtatacgtcagtacatggttctattgtgtgtttgtaaatatgattttgctcttcatgtattcttctttttttggatgccaatgaggcaatgatctgtatgcaaaaggctggattactccacaggatgaataaaccattatttcaca

SEQ ID NO: 15142 - DNA, 1924 bp, Zea Mays
tttctcgtcttccctttaggctcggacacggacgcgcgaaccacggcaagtctcccgcacggcccacggcccacggcaagtctcccgcgaagtcgcaagtctcccgcacgaaccacgacaaatgtcaaccccgattcctcgccgtcgctcatctcctctctcccatctctgctagggttaggtcgtctcggcaagtcgccatgatgcagcagcccccgcagccgcagccgggtatggcgctacctcctccccctcagaccggtggcgggcagccaccgcagtggggcgcgatcccgccgccgatgacgcagcagtacggcgcaccacctccgcagcagcctccagcgatgtggggccagcctccgtcgcaggcgcactacgggcaggcgccgccccctcagccgtattatgccgcgccgccggtgccggccgcccccgctgcggcggacgaggtcaggacgctctggatcggggacctgcagtactggatggacgataactatgtcttcgggtgcttttcgaacaccggcgaggttcaaaatgtgaagctcatccgcgacaagaattcaggacagcttcagggctatggttttgttgaatttacaagccgtgcagctgcagagcgagttcttcagacatataatggacaaatgatgccaaatgttgacttgacatttcggctgaactgggccagtgctggtgaaaagcgtgatgatactcctgactatactattttcgttggtgatttggctgcagatgttacagattacttgttacaagagacattcagggttcattatccctcggtgaagggtgcaaaagttgtgactgataaattgacaatgcgtaccaagggttatggatttgtgaaatttggcgatcctacagagcaagctcgtgcaatgactgaaatgaatggaatgccttgttcttccaggcctatgcgtattggtcctgcagcaagtagaaaaaatgcaggtggtgttgttcaagagagaggataccaacaggctctattcgtataggggtcttggaactgacctgagctgcaatgcatttcttgtttaatgtgtggcctcatttagtaccaaattctcaaggagctcagtctgagaatgatcctaacaataccactatatttgttggtgggcttgaccccaatgtcactgaagatgtcctaaaacaagcattttctccttatggcgaagtcatccatgttaagatccctgttgggaagagatgtggttttgttcagtttgttaccagaccttctgctgagcaggcgctgctaatgttgcaaggggccttgattggtgcacagaatgttcggctttcgtggggtagaagcctgtcgaacaagcagactcagcctcagcaggaatccatgcaatggggtgcgggtgcgcctgctggtgttggtgattactatggtggctatggacaaggttatgaggcttatggcagtgggtatgcacaaccccaggaccctaacatgtatggttatggcgcttatgttggttatcccaattaccaacagcaaccagctgcacagcagccacagcaacaacagtgaggcctctttgctcgggtaggtcattgggttgtctgagatgggatcaattagtattatttctaggcattcatatattgatttcttgaaaatagaggtggtttcgaaaatctcctgattttgatggccccatggcatgttttcttcgagttatatcatatatatatgcactatgttatgtctatgaacaagtggtgctcaactgtgattgctatgttgaggcatgcttcgtagtttccttccagacttgtcttatatattgttctctcttttactctgtattgttatctctattagtgtgtattgcatatctactgcgatgctatatatgcgctgtgccgcctttcgttcgtt

SEQ ID NO: 15143 - DNA, 1787 bp, Zea Mays
gcgaaccacggcaagtctcccgcacggcccacggcccacggcaagtctcccgcgaagtcgcaagtctcccgcacgaaccacgacaaatgtcaaccccgattcctcgccgtcgctcatctcctctctcccatctctgctagggttaggtcgtctcggcaagtcgccatgatgcagcagcccccgcagccgcagccgggtatggcgctacctcctccccctcagaccggtggcgggcagccaccgcagtggggcgcgatcccgccgccgatgacgcagcagtacggcgcaccacctccgcagcagcctccagcgatgtggggccagcctccgtcgcaggcgcactacgggcaggcgccgccccctcagccgtattatgccgcgccgccggtgccggccgcccccgctgcggcggacgaggtcaggacgctctggatcggggacctgcagtactggatggacgataactatgtcttcgggtgcttttcgaacaccggcgaggttcaaaatgtgaagctcatccgcgacaagaattcaggacagcttcagggctatggttttgttgaatttacaagccgtgcagctgcagagcgagttcttcagacatataatggacaaatgatgccaaatgttgacttgacatttcggctgaactgggccagtgctggtgaaaagcgtgatgatactcctgactatactattttcgttggtgatttggctgcagatgttacagattacttgttacaagagacattcagggttcattatccctcggtgaagggtgcaaaagttgtgactgataaattgacaatgcgtaccaagggttatggatttgtgaaatttggcgatcctacagagcaagctcgtgcaatgactgaaatgaatggaatgccttgttcttccaggcctatgcgtattggtcctgcagcaagtagaaaaaatgcaggtggtgttgttcaagagagagtaccaaattctcaaggagctcagtctgagaatgatcctaacaataccactatatttgttggtgggcttgaccccaatgtcactgaagatgtcctaaaacaagcattttctccttatggcgaagtcatccatgttaagatccctgttgggaagagatgtggttttgttcagtttgttaccaggcgctgctaatgttgcaaggggccttgattggtgcacagaatgttcggctttcgtggggtagaagcctgtcgaacaagcagactcagcctcagcaggaatccatgcaatggggtgcgggtgcgcctgctggtgttggtgattactatggtggctatggacaaggttatgaggcttatggcagtgggtatgcacaaccccaggaccctaacatgtatggttatggcgcttatgttggttatcccaattaccaacagcaaccagctgcacagcagccacagcaacaacagtgaggcctctttgctcgggtaggtcattgggttgtctgagatgggatcaattagtattatttctaggcattcatatattgatttcttgaaaatagaggtggtttcgaaaatctcctgattttgatggccccatggcatgttttcttcgagttatatcatatatatatgcactatgttatgtctatgaacaagtggtgctcaactgtgattgctatgttgaggcatgcttcgtagtttccttccagacttgtcttatatattgttctctcttttactctgtattgttatctctattagtgtgtattgcatatctactgcgatgctatatatgcgctgtgccgcctttcgttcgtt

SEQ ID NO: 15144 - DNA, 1741 bp, Zea Mays
cccacggcccacggcaagtctcccgcgaagtcgcaagtctcccgcacgaaccacgacaaatgtcaaccccgattcctcgccgtcgctcatctcctctctcccatctctgctagggttaggtcgtctcggcaagtcgccatgatgcagcagcccccgcagccgcagccgggtatggcgctacctcctccccctcagaccggtggcgggcagccaccgcagtggggcgcgatcccgccgccgatgacgcagcagtacggcgcaccacctccgcagcagcctccagcgatgtggggccagcctccgtcgcaggcgcactacgggcaggcgccgccccctcagccgtattatgccgcgccgccggtgccggccgcccccgctgcggcggacgaggtcaggacgctctggatcggggacctgcagtactggatggacgataactatgtcttcgggtgcttttcgaacaccggcgaggttcaaaatgtgaagctcatccgcgacaagaattcaggacagcttcagggctatggttttgttgaatttacaagccgtgcagctgcagagcgagttcttcagacatataatggacaaatgatgccaaatgttgacttgacatttcggctgaactgggccagtgctggtgaaaagcgtgatgatactcctgactatactattttcgttggtgatttggctgcagatgttacagattacttgttacaagagacattcagggttcattatccctcggtgaagggtgcaaaagttgtgactgataaattgacaatgcgtaccaagggttatggatttgtgaaatttggcgatcctacagagcaagctcgtgcaatgactgaaatgaatggaatgccttgttcttccaggcctatgcgtattggtcctgcagcaagtagaaaaaatgcaggtggtgttgttcaagagagagtaccaaattctcaaggagctcagtctgagaatgatcctaacaataccactatatttgttggtgggcttgaccccaatgtcactgaagatgtcctaaaacaagcattttctccttatggcgaagtcatccatgttaagatccctgttgggaagagatgtggttttgttcagtttgttaccaggggccttgattggtgcacagaatgttcggctttcgtggggtagaagcctgtcgaacaagcagactcagcctcagcaggaatccatgcaatggggtgcgggtgcgcctgctggtgttggtgattactatggtggctatggacaaggttatgaggcttatggcagtgggtatgcacaaccccaggaccctaacatgtatggttatggcgcttatgttggttatcccaattaccaacagcaaccagctgcacagcagccacagcaacaacagtgaggcctctttgctcgggtaggtcattgggttgtctgagatgggatcaattagtattatttctaggcattcatatattgatttcttgaaaatagaggtggtttcgaaaatctcctgattttgatggccccatggcatgttttcttcgagttatatcatatatatatgcactatgttatgtctatgaacaagtggtgctcaactgtgattgctatgttgaggcatgcttcgtagtttccttccagacttgtcttatatattgttctctcttttactctgtattgttatctctattagtgtgtattgcatatctactgcgatgctatatatgcgctgtgccgcctttcgttcgtt

SEQ ID NO: 15145 - DNA, 1846 bp, Zea Mays
cccacggcccacggcaagtctcccgcgaagtcgcaagtctcccgcacgaaccacgacaaatgtcaaccccgattcctcgccgtcgctcatctcctctctcccatctctgctagggttaggtcgtctcggcaagtcgccatgatgcagcagcccccgcagccgcagccgggtatggcgctacctcctccccctcagaccggtggcgggcagccaccgcagtggggcgcgatcccgccgccgatgacgcagcagtacggcgcaccacctccgcagcagcctccagcgatgtggggccagcctccgtcgcaggcgcactacgggcaggcgccgccccctcagccgtattatgccgcgccgccggtgccggccgcccccgctgcggcggacgaggtcaggacgctctggatcggggacctgcagtactggatggacgataactatgtcttcgggtgcttttcgaacaccggcgaggttcaaaatgtgaagctcatccgcgacaagaattcaggacagcttcagggctatggttttgttgaatttacaagccgtgcagctgcagagcgagttcttcagacatataatggacaaatgatgccaaatgttgacttgacatttcggctgaactgggccagtgctggtgaaaagcgtgatgatactcctgactatactattttcgttggtgatttggctgcagatgttacagattacttgttacaagagacattcagggttcattatccctcggtgaagggtgcaaaagttgtgactgataaattgacaatgcgtaccaagggttatggatttgtgaaatttggcgatcctacagagcaagctcgtgcaatgactgaaatgaatggaatgccttgttcttccaggcctatgcgtattggtcctgcagcaagtagaaaaaatgcaggtggtgttgttcaagagagaggataccaacaggctctattcgtataggggtcttggaactgacctgagctgcaatgcatttcttgtttaatgtgtggcctcatttagtaccaaattctcaaggagctcagtctgagaatgatcctaacaataccactatatttgttggtgggcttgaccccaatgtcactgaagatgtcctaaaacaagcattttctccttatggcgaagtcatccatgttaagatccctgttgggaagagatgtggttttgttcagtttgttaccaggcgctgctaatgttgcaaggggccttgattggtgcacagaatgttcggctttcgtggggtagaagcctgtcgaacaagcagactcagcctcagcaggaatccatgcaatggggtgcgggtgcgcctgctggtgttggtgattactatggtggctatggacaaggttatgaggcttatggcagtgggtatgcacaaccccaggaccctaacatgtatggttatggcgcttatgttggttatcccaattaccaacagcaaccagctgcacagcagccacagcaacaacagtgaggcctctttgctcgggtaggtcattgggttgtctgagatgggatcaattagtattatttctaggcattcatatattgatttcttgaaaatagaggtggtttcgaaaatctcctgattttgatggccccatggcatgttttcttcgagttatatcatatatatatgcactatgttatgtctatgaacaagtggtgctcaactgtgattgctatgttgaggcatgcttcgtagtttccttccagacttgtcttatatattgttctctcttttactctgtattgttatctctattagtgtgtattgcatatctactgcgatgctatatatgcgctgtgccgcctttcgttcgtt

SEQ ID NO: 15146 - DNA, 1831 bp, Zea Mays
cccacggcccacggcaagtctcccgcgaagtcgcaagtctcccgcacgaaccacgacaaatgtcaaccccgattcctcgccgtcgctcatctcctctctcccatctctgctagggttaggtcgtctcggcaagtcgccatgatgcagcagcccccgcagccgcagccgggtatggcgctacctcctccccctcagaccggtggcgggcagccaccgcagtggggcgcgatcccgccgccgatgacgcagcagtacggcgcaccacctccgcagcagcctccagcgatgtggggccagcctccgtcgcaggcgcactacgggcaggcgccgccccctcagccgtattatgccgcgccgccggtgccggccgcccccgctgcggcggacgaggtcaggacgctctggatcggggacctgcagtactggatggacgataactatgtcttcgggtgcttttcgaacaccggcgaggttcaaaatgtgaagctcatccgcgacaagaattcaggacagcttcagggctatggttttgttgaatttacaagccgtgcagctgcagagcgagttcttcagacatataatggacaaatgatgccaaatgttgacttgacatttcggctgaactgggccagtgctggtgaaaagcgtgatgatactcctgactatactattttcgttggtgatttggctgcagatgttacagattacttgttacaagagacattcagggttcattatccctcggtgaagggtgcaaaagttgtgactgataaattgacaatgcgtaccaagggttatggatttgtgaaatttggcgatcctacagagcaagctcgtgcaatgactgaaatgaatggaatgccttgttcttccaggcctatgcgtattggtcctgcagcaagtagaaaaaatgcaggtggtgttgttcaagagagagtaccaaattctcaaggagctcagtctgagaatgatcctaacaataccactatatttgttggtgggcttgaccccaatgtcactgaagatgtcctaaaacaagcattttctccttatggcgaagtcatccatgttaagatccctgttgggaagagatgtggttttgttcagtttgttaccaggcgctgctaatgttgcaaggggccttgattggtgcacagaatgttcggctttcgtggggtagaagcctgtcgaacaagcagactcagcctcagcaggaatccatgcaatggggtgcgggtgcgcctgctggtgttggtgattactatggtggctatggacaaggttatgaggcttatggcagtgggtatgcacaaccccaggaccctaacatgtatggttatggcgcttatgttggttatcccaattaccaacagcaaccagctgcacagcagccacagcaacaacaggtgaagctcctagctaattgatgccctttggagtttaattggtgaaaaaaatatctctactaataacaaattgaggcctctttgctcgggtaggtcattgggttgtctgagatgggatcaattagtattatttctaggcattcatatattgatttcttgaaaatagaggtggtttcgaaaatctcctgattttgatggccccatggcatgttttcttcgagttatatcatatatatatgcactatgttatgtctatgaacaagtggtgctcaactgtgattgctatgttgaggcatgcttcgtagtttccttccagacttgtcttatatattgttctctcttttactctgtattgttatctctattagtgtgtattgcatatctactgcgatgctatatatgcgctgtgccgcctttcgttcgtt

SEQ ID NO: 15147 - DNA, 1767 bp, Zea Mays
cccacggcccacggcaagtctcccgcgaagtcgcaagtctcccgcacgaaccacgacaaatgtcaaccccgattcctcgccgtcgctcatctcctctctcccatctctgctagggttaggtcgtctcggcaagtcgccatgatgcagcagcccccgcagccgcagccgggtatggcgctacctcctccccctcagaccggtggcgggcagccaccgcagtggggcgcgatcccgccgccgatgacgcagcagtacggcgcaccacctccgcagcagcctccagcgatgtggggccagcctccgtcgcaggcgcactacgggcaggcgccgccccctcagccgtattatgccgcgccgccggtgccggccgcccccgctgcggcggacgaggtcaggacgctctggatcggggacctgcagtactggatggacgataactatgtcttcgggtgcttttcgaacaccggcgaggttcaaaatgtgaagctcatccgcgacaagaattcaggacagcttcagggctatggttttgttgaatttacaagccgtgcagctgcagagcgagttcttcagacatataatggacaaatgatgccaaatgttgacttgacatttcggctgaactgggccagtgctggtgaaaagcgtgatgatactcctgactatactattttcgttggtgatttggctgcagatgttacagattacttgttacaagagacattcagggttcattatccctcggtgaagggtgcaaaagttgtgactgataaattgacaatgcgtaccaagggttatggatttgtgaaatttggcgatcctacagagcaagctcgtgcaatgactgaaatgaatggaatgccttgttcttccaggcctatgcgtattggtcctgcagcaagtagaaaaaatgcaggtggtgttgttcaagagagagtaccaaattctcaaggagctcagtctgagaatgatcctaacaataccactatatttgttggtgggcttgaccccaatgtcactgaagatgtcctaaaacaagcattttctccttatggcgaagtcatccatgttaagatccctgttgggaagagatgtggttttgttcagtttgttaccagaccttctgctgagcaggcgctgctaatgttgcaaggggccttgattggtgcacagaatgttcggctttcgtggggtagaagcctgtcgaacaagcagactcaggaatccatgcaatggggtgcgggtgcgcctgctggtgttggtgattactatggtggctatggacaaggttatgaggcttatggcagtgggtatgcacaaccccaggaccctaacatgtatggttatggcgcttatgttggttatcccaattaccaacagcaaccagctgcacagcagccacagcaacaacagtgaggcctctttgctcgggtaggtcattgggttgtctgagatgggatcaattagtattatttctaggcattcatatattgatttcttgaaaatagaggtggtttcgaaaatctcctgattttgatggccccatggcatgttttcttcgagttatatcatatatatatgcactatgttatgtctatgaacaagtggtgctcaactgtgattgctatgttgaggcatgcttcgtagtttccttccagacttgtcttatatattgttctctcttttactctgtattgttatctctattagtgtgtattgcatatctactgcgatgctatatatgcgctgtgccgcctttcgttcgtt

SEQ ID NO: 15148 - DNA, 1933 bp, Zea Mays
cccacggcccacggcaagtctcccgcgaagtcgcaagtctcccgcacgaaccacgacaaatgtcaaccccgattcctcgccgtcgctcatctcctctctcccatctctgctagggttaggtcgtctcggcaagtcgccatgatgcagcagcccccgcagccgcagccgggtatggcgctacctcctccccctcagaccggtggcgggcagccaccgcagtggggcgcgatcccgccgccgatgacgcagcagtacggcgcaccacctccgcagcagcctccagcgatgtggggccagcctccgtcgcaggcgcactacgggcaggcgccgccccctcagccgtattatgccgcgccgccggtgccggccgcccccgctgcggcggacgaggtcaggacgctctggatcggggacctgcagtactggatggacgataactatgtcttcgggtgcttttcgaacaccggcgaggttcaaaatgtgaagctcatccgcgacaagaattcaggacagcttcagggctatggttttgttgaatttacaagccgtgcagctgcagagcgagttcttcagacatataatggacaaatgatgccaaatgttgacttgacatttcggctgaactgggccagtgctggtgaaaagcgtgatgatactcctgactatactattttcgttggtgatttggctgcagatgttacagattacttgttacaagagacattcagggttcattatccctcggtgaagggtgcaaaagttgtgactgataaattgacaatgcgtaccaagggttatggatttgtgaaatttggcgatcctacagagcaagctcgtgcaatgactgaaatgaatggaatgccttgttcttccaggcctatgcgtattggtcctgcagcaagtagaaaaaatgcaggtggtgttgttcaagagagaggataccaacaggctctattcgtataggggtcttggaactgacctgagctgcaatgcatttcttgtttaatgtgtggcctcatttagtaccaaattctcaaggagctcagtctgagaatgatcctaacaataccactatatttgttggtgggcttgaccccaatgtcactgaagatgtcctaaaacaagcattttctccttatggcgaagtcatccatgttaagatccctgttgggaagagatgtggttttgttcagtttgttaccagaccttctgctgagcaggcgctgctaatgttgcaaggggccttgattggtgcacagaatgttcggctttcgtggggtagaagcctgtcgaacaagcagactcagcctcagcaggaatccatgcaatggggtgcgggtgcgcctgctggtgttggtgattactatggtggctatggacaaggttatgaggcttatggcagtgggtatgcacaaccccaggaccctaacatgtatggttatggcgcttatgttggttatcccaattaccaacagcaaccagctgcacagcagccacagcaacaacaggtgaagctcctagctaattgatgccctttggagtttaattggtgaaaaaaatatctctactaataacaaattgaggcctctttgctcgggtaggtcattgggttgtctgagatgggatcaattagtattatttctaggcattcatatattgatttcttgaaaatagaggtggtttcgaaaatctcctgattttgatggccccatggcatgttttcttcgagttatatcatatatatatgcactatgttatgtctatgaacaagtggtgctcaactgtgattgctatgttgaggcatgcttcgtagtttccttccagacttgtcttatatattgttctctcttttactctgtattgttatctctattagtgtgtattgcatatctactgcgatgctatatatgcgctgtgccgcctttcgttcgtt

SEQ ID NO: 15149 - DNA, 2613 bp, Zea Mays
atgtagcataccgtacagatgtcacctataaaaaaaatcaacgccggcaggctttatgattcgtgcggaccaaaagcagacgcatcatcagcccggaaagaaggaagggagtacagacgacagagggcgcgagcagtcgagcactcgcgtcgcggtggcacctgcgatccgaagcgagtccgagtcacacggccacgccccttggtctccttcctccgcttgcggcttgcctttttcgggccgcctccgctcctctctctctctctggctctctccctctccaatggcccgccccaggaagccgccgccgccctcgccgcctaaggcggcggcgccgtccatcgctgacgcgctgctgctggccacggtctgcatggtgggtctgcccgtggaggtgcgggtccgcgacggatccgcctacgccggcgtcctccacactgcctgcgtcgacgccggatacggtgtcgtgctaaagaaagcaaagaagattgcaaacgggaagggagatgtgaatctctcgctgggatcgtttgtggacactcttgttgtttgcccagatgaccttgtacaagttattgcaaagggtctttcactcccccttaaaggtgtctgtaaacctcttgattccaacgtggttgctgccagtggatccttgaagcctcaaatttcacatgcaaatgacccaaaaatgtctaataaaactaaaaatatgtctccacttatgtatgttatcaattccagccatgcatactgttatgtattgttccatatatatgagaaatcgcatatggattgcatgtatgcatcctacttggccccaatataaatgagaaatcgatttttttcacatgcggatttaagcattagatatcaagcaatctatttaactccatttccttctttccattgtcgaacaattaatactatttttgtcacaggcaagctgagaaatgcacctcggtgggtcaggagaaaaatacttctgttaagagaaatggtcaagataatggtattactacaagtttaagttcttcaaccagacatgtgggggcatgtttatccaataattgggattctaggtctggaagtatggtgcctaaagttgatgttatcacaagttcagcttcagctgtgcccgtggtggcttcaggtgttaaaccctctcagccagtcaataattcagttgccaagattgtcacgtcaagcaaaactgctgctaaggaattcaaactcaatccttccgcaaaggtcttttctccatcttttgcaagttctaggcaagtacttgcagctgcggcccctgttgacacatactacatttcacactctgcccctgaagtaccaatgggtgtgcctgtatatgaaccaaaatctgtgtcagatcatgggccataatgcatcaaggctagacccatccagaattggcacaccataccatcctatgcaggtgggggcaacttatactacccctagtcctcagcctgtaatggctgggaagttcagtcctgttgtttatgttcaaccaggtcctcaggtgagtgattcacaattattgtttgccttgagacttgaagtggataaatatcaagaataggaggaggatgcagagtattgttcactattttatttatacaacctagaccttgggtaaagtatgttagcttgtatgctccagcaactgagtgttcttcacatctgatgtgattgaccttcgctgccaatcctgatgttgcacagattgttctatatatcaagttagtttgttaactggaattaactgttttattttgtaatggttcttttctgccatggttggtctgttcttatctctggcaaggaaccaaccttgctccatagaaatgatatatagtctaaatataagttaactcacatattttccccttcctcctcttggctcatctattcttggtttccattgaaggatgcaatgcatggaacaaccgttggttttcaaggatggccttgccctttgttattgaattcgtaccaagctagcatgcagaaattccaaggcaaccccccggtgtatttagctcctccagtcatggcaactgggaaccttccattggtggtaccaagccctgcatcacttgtgcagccgttcgaggccattcatcccataatggtccctgctgcaagcagcatggtcccaggaaaatacatgtaaacttgtcgtaccaatgacaatctccttttgttggaagaatcctggcgtacccattttgtctgaaaggactctagtctgttgattcacttgtcagttgctggtctgtgtccgtattttagttggaagggctttgcaacttcttgtcattcttcatgcttggtgtgggtttccaattttttttaggggcgggacagtaaaatgaattagggagaaaatgcagcgattctttgttatcttagcgacacctcttcttccaagagcagtatgtacaatgtgacattgtaaaagattcatatagtgaaggccttattttcacgaggctaatgtacatccatcttgcaagtgtaacagcttctgaagttctgttttgagaaaataaacttgttcgacaatattgtttaggtaatatcagcagtatatttttg

SEQ ID NO: 15150 - DNA, 2696 bp, Zea Mays
atgtagcataccgtacagatgtcacctataaaaaaaatcaacgccggcaggctttatgattcgtgcggaccaaaagcagacgcatcatcagcccggaaagaaggaagggagtacagacgacagagggcgcgagcagtcgagcactcgcgtcgcggtggcacctgcgatccgaagcgagtccgagtcacacggccacgccccttggtctccttcctccgcttgcggcttgcctttttcgggccgcctccgctcctctctctctctctggctctctccctctccaatggcccgccccaggaagccgccgccgccctcgccgcctaaggcggcggcgccgtccatcgctgacgcgctgctgctggccacggtctgcatggtgggtctgcccgtggaggtgcgggtccgcgacggatccgcctacgccggcgtcctccacactgcctgcgtcgacgccggatacggtgtcgtgctaaagaaagcaaagaagattgcaaacgggaagggagatgtgaatctctcgctgggatcgtttgtggacactcttgttgtttgcccagatgaccttgtacaagttattgcaaagggtctttcactcccccttaaaggtgtctgtaaacctcttgattccaacgtggttgctgccagtggatccttgaagcctcaaatttcacatgcaaatgacccaaaaatgtctaataaaactaaaaatatgtctccacttatgtatgttatcaattccagccatgcatactgttatgtattgttccatatatatgagaaatcgcatatggattgcatgtatgcatcctacttggccccaatataaatgagaaatcgatttttttcacatgcggatttaagcattagatatcaagcaatctatttaactccatttccttctttccattgtcgaacaattaatactatttttgtcacaggcaagctgagaaatgcacctcggtgggtcaggagaaaaatacttctgttaagagaaatggtcaagataatggtattactacaagtttaagttcttcaaccagacatgtgggggcatgtttatccaataattgggattctaggtctggaagtatggtgcctaaagttgatgttatcacaagttcagcttcagctgtgcccgtggtggcttcaggtgttaaaccctctcagccagtcaataattcagttgccaagattgtcacgtcaagcaaaactgctgctaaggaattcaaactcaatccttccgcaaaggtcttttctccatcttttgcaagttctaggcaagtacttgcagctgcggcccctgttgacacatactacatttcacactctgcccctgaagtaccaatgggtgtgcctgtatatgaaccaaaatctgtgtcaggtgtttcacctctatccaacaaggtttattgtagtaatctatctcctgcaaactatgccatttcacctcagtatgtgccgtctatcatgggccataatgcatcaaggctagacccatccagaattggcacaccataccatcctatgcaggtgggggcaacttatactacccctagtcctcagcctgtaatggctgggaagttcagtcctgttgtttatgttcaaccaggtcctcaggtgagtgattcacaattattgtttgccttgagacttgaagtggataaatatcaagaataggaggaggatgcagagtattgttcactattttatttatacaacctagaccttgggtaaagtatgttagcttgtatgctccagcaactgagtgttcttcacatctgatgtgattgaccttcgctgccaatcctgatgttgcacagattgttctatatatcaagttagtttgttaactggaattaactgttttattttgtaatggttcttttctgccatggttggtctgttcttatctctggcaaggaaccaaccttgctccatagaaatgatatatagtctaaatataagttaactcacatattttccccttcctcctcttggctcatctattcttggtttccattgaaggatgcaatgcatggaacaaccgttggttttcaaggatggccttgccctttgttattgaattcgtaccaagctagcatgcagaaattccaaggcaaccccccggtgtatttagctcctccagtcatggcaactgggaaccttccattggtggtaccaagccctgcatcacttgtgcagccgttcgaggccattcatcccataatggtccctgctgcaagcagcatggtcccaggaaaatacatgtaaacttgtcgtaccaatgacaatctccttttgttggaagaatcctggcgtacccattttgtctgaaaggactctagtctgttgattcacttgtcagttgctggtctgtgtccgtattttagttggaagggctttgcaacttcttgtcattcttcatgcttggtgtgggtttccaattttttttaggggcgggacagtaaaatgaattagggagaaaatgcagcgattctttgttatcttagcgacacctcttcttccaagagcagtatgtacaatgtgacattgtaaaagattcatatagtgaaggccttattttcacgaggctaatgtacatccatcttgcaagtgtaacagcttctgaagttctgttttgagaaaataaacttgttcgacaatattgtttaggtaatatcagcagtatatttttg

SEQ ID NO: 15151 - DNA, 2892 bp, Zea Mays
atgtagcataccgtacagatgtcacctataaaaaaaatcaacgccggcaggctttatgattcgtgcggaccaaaagcagacgcatcatcagcccggaaagaaggaagggagtacagacgacagagggcgcgagcagtcgagcactcgcgtcgcggtggcacctgcgatccgaagcgagtccgagtcacacggccacgccccttggtctccttcctccgcttgcggcttgcctttttcgggccgcctccgctcctctctctctctctggctctctccctctccaatggcccgccccaggaagccgccgccgccctcgccgcctaaggcggcggcgccgtccatcgctgacgcgctgctgctggccacggtctgcatggtgggtctgcccgtggaggtgcgggtccgcgacggatccgcctacgccggcgtcctccacactgcctgcgtcgacgccggatacggtgtcgtgctaaagaaagcaaagaagattgcaaacgggaagggagatgtgaatctctcgctgggatcgtttgtggacactcttgttgtttgcccagatgaccttgtacaagttattgcaaagggtctttcactcccccttaaaggtgtctgtaaacctcttgattccaacgtggttgctgccagtggatccttgaagcctcaaatttcacatgcaaatgacccaaaaatgtctaataaaactaaaaatatgtctccacttatgcaagctgagaaatgcacctcggtgggtcaggagaaaaatacttctgttaagagaaatggtcaagataatggtattactacaagtttaagttcttcaaccagacatgtgggggcatgtttatccaataattgggattctaggtctggaagtatggtgcctaaagttgatgttatcacaagttcagcttcagctgtgcccgtggtggcttcaggtgttaaaccctctcagccagtcaataattcagttgccaagattgtcacgtcaagcaaaactgctgctaaggaattcaaactcaatccttccgcaaaggtcttttctccatcttttgcaagttctaggcaagtacttgcagctgcggcccctgttgacacatactacatttcacactctgcccctgaagtaccaatgggtgtgcctgtatatgaaccaaaatctgtgtcaggtgtttcacctctatccaacaaggtttattgtagtaatctatctcctgcaaactatgccatttcacctcagtatgtgccgtctgtaagtgcttcgatctattcttatgtgtttttgattgtttcatttatttcgccttcattggataatactatattatcctcttgatatttaaaaaggctattggatggcaacttgtaacatgcctttggttcaagttgataacttgctgcatatggcttaggcttactccgttatcatttgttctatatttgaggccatgcacgtactcagttactcctatgtgctttgcctttgcagttgagctattcaagccattcttacctgttagctgtctaatttacttgtctgttggattaaatgaataaattgaacttgtaaactgattcttcatgtcaacttacagcttatcagctttaatttaattctgatgcaagaaaaaaaatctttttactccgaactgaaaaacctagctcacatgtaaatgtattttttatgtttgaaagcttcttttaacaacttgccttttatgttctattactgtactttgtgcaagcatattttaatacacttaaatttggtcttgcttgttgcctctatcatggatgtctaacattaccatgcttctggattctggtactacttaaccttttgggtcatagatcatgggccataatgcatcaaggctagacccatccagaattggcacaccataccatcctatgcaggtgggggcaacttatactacccctagtcctcagcctgtaatggctgggaagttcagtcctgttgtttatgttcaaccaggtcctcaggtgagtgattcacaattattgtttgccttgagacttgaagtggataaatatcaagaataggaggaggatgcagagtattgttcactattttatttatacaacctagaccttgggtaaagtatgttagcttgtatgctccagcaactgagtgttcttcacatctgatgtgattgaccttcgctgccaatcctgatgttgcacagattgttctatatatcaagatgcaatgcatggaacaaccgttggttttcaaggatggccttgccctttgttattgaattcgtaccaagctagcatgcagaaattccaaggcaaccccccggtgtatttagctcctccagtcatggcaactgggaaccttccattggtggtaccaagccctgcatcacttgtgcagccgttcgaggccattcatcccataatggtccctgctgcaagcagcatggtcccaggaaaatacatgtaaacttgtcgtaccaatgacaatctccttttgttggaagaatcctggcgtacccattttgtctgaaaggactctagtctgttgattcacttgtcagttgctggtctgtgtccgtattttagttggaagggctttgcaacttcttgtcattcttcatgcttggtgtgggtttccaattttttttaggggcgggacagtaaaatgaattagggagaaaatgcagcgattctttgttatcttagcgacacctcttcttccaagagcagtatgtacaatgtgacattgtaaaagattcatatagtgaaggccttattttcacgaggctaatgtacatccatcttgcaagtgtaacagcttctgaagttctgttttgagaaaataaacttgttcgacaatattgtttaggtaatatcagcagtatatttttg

SEQ ID NO: 15152 - DNA, 2226 bp, Zea Mays
agacgacagagggcgcgagcagtcgagcactcgcgtcgcggtggcacctgcgatccgaagcgagtccgagtcacacggccacgccccttggtctccttcctccgcttgcggcttgcctttttcgggccgcctccgctcctctctctctctctggctctctccctctccaatggcccgccccaggaagccgccgccgccctcgccgcctaaggcggcggcgccgtccatcgctgacgcgctgctgctggccacggtctgcatggtgggtctgcccgtggaggtgcgggtccgcgacggatccgcctacgccggcgtcctccacactgcctgcgtcgacgccggatacggtgtcgtgctaaagaaagcaaagaagattgcaaacgggaagggagatgtgaatctctcgctgggatcgtttgtggacactcttgttgtttgcccagatgaccttgtacaagttattgcaaagggtctttcactcccccttaaaggtgtctgtaaacctcttgattccaacgtggttgctgccagtggatccttgaagcctcaaatttcacatgcaaatgacccaaaaatgtctaataaaactaaaaatatgtctccacttatgcaagctgagaaatgcacctcggtgggtcaggagaaaaatacttctgttaagagaaatggtcaagataatggtattactacaagtttaagttcttcaaccagacatgtgggggcatgtttatccaataattgggattctaggtctggaagtatggtgcctaaagttgatgttatcacaagttcagcttcagctgtgcccgtggtggcttcaggtgttaaaccctctcagccagtcaataattcagttgccaagattgtcacgtcaagcaaaactgctgctaaggaattcaaactcaatccttccgcaaaggtcttttctccatcttttgcaagttctaggcaagtacttgcagctgcggcccctgttgacacatactacatttcacactctgcccctgaagtaccaatgggtgtgcctgtatatgaaccaaaatctgtgtcaggtgtttcacctctatccaacaaggtttattgtagtaatctatctcctgcaaactatgccatttcacctcagtatgtgccgtctatcatgggccataatgcatcaaggctagacccatccagaattggcacaccataccatcctatgcaggtgggggcaacttatactacccctagtcctcagcctgtaatggctgggaagttcagtcctgttgtttatgttcaaccaggtcctcagcaactgagtgttcttcacatctgatgtgattgaccttcgctgccaatcctgatgttgcacagattgttctatatatcaagttagtttgttaactggaattaactgttttattttgtaatggttcttttctgccatggttggtctgttcttatctctggcaaggaaccaaccttgctccatagaaatgatatatagtctaaatataagttaactcacatattttccccttcctcctcttggctcatctattcttggtttccattgaaggatgcaatgcatggaacaaccgttggttttcaaggatggccttgccctttgttattgaattcgtaccaagctagcatgcagaaattccaaggcaaccccccggtgtatttagctcctccagtcatggcaactgggaaccttccattggtggtaccaagccctgcatcacttgtgcagccgttcgaggccattcatcccataatggtccctgctgcaagcagcatggtcccaggaaaatacatgtaaacttgtcgtaccaatgacaatctccttttgttggaagaatcctggcgtacccattttgtctgaaaggactctagtctgttgattcacttgtcagttgctggtctgtgtccgtattttagttggaagggctttgcaacttcttgtcattcttcatgcttggtgtgggtttccaattttttttaggggcgggacagtaaaatgaattagggagaaaatgcagcgattctttgttatcttagcgacacctcttcttccaagagcagtatgtacaatgtgacattgtaaaagattcatatagtgaaggccttattttcacgaggctaatgtacatccatcttgcaagtgtaacagcttctgaagttctgttttgagaaaataaacttgttcgacaatattgtttaggtaatatcagcagtatatttttg

SEQ ID NO: 15153 - DNA, 1904 bp, Zea Mays
cagtcgagcactcgcgtcgcggtggcacctgcgatccgaagcgagtccgagtcacacggccacgccccttggtctccttcctccgcttgcggcttgcctttttcgggccgcctccgctcctctctctctctctggctctctccctctccaatggcccgccccaggaagccgccgccgccctcgccgcctaaggcggcggcgccgtccatcgctgacgcgctgctgctggccacggtctgcatggtgggtctgcccgtggaggtgcgggtccgcgacggatccgcctacgccggcgtcctccacactgcctgcgtcgacgccggatacggtgtcgtgctaaagaaagcaaagaagattgcaaacgggaagggagatgtgaatctctcgctgggatcgtttgtggacactcttgttgtttgcccagatgaccttgtacaagttattgcaaagggtctttcactcccccttaaaggtgtctgtaaacctcttgattccaacgtggttgctgccagtggatccttgaagcctcaaatttcacatgcaaatgacccaaaaatgtctaataaaactaaaaatatgtctccacttatgcaagctgagaaatgcacctcggtgggtcaggagaaaaatacttctgttaagagaaatggtcaagataatggtattactacaagtttaagttcttcaaccagacatgtgggggcatgtttatccaataattgggattctaggtctggaagtatggtgcctaaagttgatgttatcacaagttcagcttcagctgtgcccgtggtggcttcaggtgttaaaccctctcagccagtcaataattcagttgccaagattgtcacgtcaagcaaaactgctgctaaggaattcaaactcaatccttccgcaaaggtcttttctccatcttttgcaagttctaggcaagtacttgcagctgcggcccctgttgacacatactacatttcacactctgcccctgaagtaccaatgggtgtgcctgtatatgaaccaaaatctgtgtcaggtgtttcacctctatccaacaaggtttattgtagtaatctatctcctgcaaactatgccatttcacctcagtatgtgccgtctatcatgggccataatgcatcaaggctagacccatccagaattggcacaccataccatcctatgcaggtaatggctgggaagttcagtcctgttgtttatgttcaaccaggtcctcaggatgcaatgcatggaacaaccgttggttttcaaggatggccttgccctttgttattgaattcgtaccaagctagcatgcagaaattccaaggcaaccccccggtgtatttagctcctccagtcatggcaactgggaaccttccattggtggtaccaagccctgcatcacttgtgcagccgttcgaggccattcatcccataatggtccctgctgcaagcagcatggtcccaggaaaatacatgtaaacttgtcgtaccaatgacaatctccttttgttggaagaatcctggcgtacccattttgtctgaaaggactctagtctgttgattcacttgtcagttgctggtctgtgtccgtattttagttggaagggctttgcaacttcttgtcattcttcatgcttggtgtgggtttccaattttttttaggggcgggacagtaaaatgaattagggagaaaatgcagcgattctttgttatcttagcgacacctcttcttccaagagcagtatgtacaatgtgacattgtaaaagattcatatagtgaaggccttattttcacgaggctaatgtacatccatcttgcaagtgtaacagcttctgaagttctgttttgagaaaataaacttgttcgacaatattgtttaggtaatatcagcagtatatttttg

SEQ ID NO: 15154 - DNA, 1857 bp, Zea Mays
cagtcgagcactcgcgtcgcggtggcacctgcgatccgaagcgagtccgagtcacacggccacgccccttggtctccttcctccgcttgcggcttgcctttttcgggccgcctccgctcctctctctctctctggctctctccctctccaatggcccgccccaggaagccgccgccgccctcgccgcctaaggcggcggcgccgtccatcgctgacgcgctgctgctggccacggtctgcatggtgggtctgcccgtggaggtgcgggtccgcgacggatccgcctacgccggcgtcctccacactgcctgcgtcgacgccggatacggtgtcgtgctaaagaaagcaaagaagattgcaaacgggaagggagatgtgaatctctcgctgggatcgtttgtggacactcttgttgtttgcccagatgaccttgtacaagttattgcaaagggtctttcactcccccttaaaggtgtctgtaaacctcttgattccaacgtggttgctgccagtggatccttgaagcctcaaatttcacatgcaaatgacccaaaaatgtctaataaaactaaaaatatgtctccacttatgcaagctgagaaatgcacctcggtgggtcaggagaaaaatacttctgttaagagaaatggtcaagataatggtattactacaagtttaagttcttcaaccagacatgtgggggcatgtttatccaataattgggattctaggtctggaagtatggtgcctaaagttgatgttatcacaagttcagcttcagctgtgcccgtggtggcttcaggtgttaaaccctctcagccagtcaataattcagttgccaagattgtcacgtcaagcaaaactgctgctaaggaattcaaactcaatccttccgcaaaggtcttttctccatcttttgcaagttctaggcaagtacttgcagctgcggcccctgttgacacatactacatttcacactctgcccctgaagtaccaatgggtgtgcctgtatatgaaccaaaatctgtgtcagatcatgggccataatgcatcaaggctagacccatccagaattggcacaccataccatcctatgcaggtgggggcaacttatactacccctagtcctcagcctgtaatggctgggaagttcagtcctgttgtttatgttcaaccaggtcctcaggatgcaatgcatggaacaaccgttggttttcaaggatggccttgccctttgttattgaattcgtaccaagctagcatgcagaaattccaaggcaaccccccggtgtatttagctcctccagtcatggcaactgggaaccttccattggtggtaccaagccctgcatcacttgtgcagccgttcgaggccattcatcccataatggtccctgctgcaagcagcatggtcccaggaaaatacatgtaaacttgtcgtaccaatgacaatctccttttgttggaagaatcctggcgtacccattttgtctgaaaggactctagtctgttgattcacttgtcagttgctggtctgtgtccgtattttagttggaagggctttgcaacttcttgtcattcttcatgcttggtgtgggtttccaattttttttaggggcgggacagtaaaatgaattagggagaaaatgcagcgattctttgttatcttagcgacacctcttcttccaagagcagtatgtacaatgtgacattgtaaaagattcatatagtgaaggccttattttcacgaggctaatgtacatccatcttgcaagtgtaacagcttctgaagttctgttttgagaaaataaacttgttcgacaatattgtttaggtaatatcagcagtatatttttg

SEQ ID NO: 15155 - DNA, 5638 bp, Zea Mays
gccgaatctcacaaatgcaggctggaatgctggattgtcaacctctggagcccacgctccaacagaagcctccacctctgcggtcatgagggtcatctaaccttttcacagctccagcgaatgcacacagccgccgtcgtttcttcgtcttcctctcagcgccggcgctcccactcgtgctccctcccccactcgcgctcggcacgcaggccacgcggcggcgctcaggctcgggatatcagcgacggcggggcggtcccaggcttgtcgtcttcgtcagcggctccccctcctgcctctcgccaatcgcctcgcgccctcgcctctggttctccgcacacagcccggcgaccctgcgtgcgcccctaccgcctccggtggaccatcgacggctcctggcccggcggctgcgctgcacgccgcgcgcggccggcgggcagcgggagctagcagccgctgctgcaccaaggcggtcgcgccgctttgggagcgcttttgccccaaagcgaagcattaccagtccgcttaacgcttcagcgcgctgaagcgtgcgtttagttccgctttttggaaccctgtgctgacttctctttcgaggatctagagcgcacaatgatattttgctagcgttatgctcttcaactcgccaaaatcagcaaaacgaataggagtacagttcctatcagttgcaagtgcagactgctttggtcgagatgtctctccgacgcactttgcatccctgttaaaggaatgcaggtctgtgaatacagttcgtcaaattcatcagaagataattgcttgcggccttctttcgtatccatcatctttgttgtctgtgccactcgcaccacttccatcacattcatatgtatcaccaaaatctttgggcaccggtgttgtagcttcctatcttgcttgtggtgctacgaaggatgctctctcagtgttggagcgtgtcacaccatcaccagccgtgtggtggaatctactcgtaagagaacacatcaaggaaggccaccttgatagagcaattggtgtatcttgtcgcatgctgcgtgctggaactaagccagaccattttactctgccgtatgcgctgaaagcatgtggagagctaccttcatactgttgtggaagagcattacatggactcatatgttgcaatggatttgagtcaaatgtctttgtctgcaatgcattggtggcaatgtattcccgctgtggttctttggaggatgccagtctggtgtttgatgaaataacacggaagggaattgatgatgttatctcatggaattcaattgttgctgcccatgttaagggtagtaatccgcggactgcattagagctgttttcagagatgtcaatgattgttcacgaaaaagctacaaatgaaaggtcagatatcattagcattgtcaacattcttcctgcatgtgcttctctaaaggcattgcctcaaattaaggaaatccacagctatgccattcggaatggcacatttgcagatgcttttgtgtgcaatgctctgattgatacctatgcaaagtgtgggtcaatgaacgatgcggtaaaggttttcaatgtaatggaattcaaggatgtcgtttcttggaatgcaatggttactggatacacccaaagtgggaactttggggcagccttcgagcttttcgagaatatgcgcaaggaaaatatcccactagatgtcataacgtggagtgctgtaattgcagggtatgctcagagggggtgtagccaagaggcccttgatgcattccagcaaatgattcttgatggttcagagccaaattctgtcactatcatctctctattgtctgcttgcgcttccttgggagcattgtctcagggcatggaaattcatgcatactctctgaagaagtgtcttttatccttggataatgattttggtggtgacggtgacggtgaggatctaatggtgtacaatgcattaatagatatgtactcaaagtgcagaagtttcaaagctgcacgctccatatttgattccatacctcgaagagaacgtaatgtggtgacttggaccgtcatgattggtggatatgcacaatatggagactcaaatgatgccctcaagattttctcagagatgatttcaaaaccatacgcagttgccccaaatgcttatacaatttcctgcattttgatggcctgtgcacatctggcagctcttcgtatgggtaagcagattcacgcttatgtcacccgtcaccatgaatatgaaccatctgtgtactttgtggcaaattgccttattgatatgtactcaaagtgtggtgatgttgatactgctagaaatgtatttgatagcatgcctaaaaggaatgaagtatcttggacttcaatgatgtcagggtatggaatgcatggtcgtggtaaggaggctttagacatatttgacaagatgcagaaggcaggctttgttcctgatgatatttccttcctggttcttctttatgcttgtagccattctggcatggtggatcaaggtctgaattactttgatatcatgcgcagggattatgatgtagttgccagtgcagagcattatgcttgtgttattgacttactggctcgctgtgggcgattagataaggcatggaaaacaattcaggaaatgccaatggagcctagtgcagttatctgggttgcattacttagtgcctgtagagttcattcgaatgtggaacttgctgaatatgctctgaacaaactggtcaatatgaaagcagagaatgatggatcctacacacttatctccaacatatatgctaatgcaaggcggtggaaagatgtagcaagaatcagacaattaatgaagaaatcagggattaagaagaggccaggatgcagctgggtccaaggtaagaagggtactgcatcattctttgttggagatcgatcacaccctctatctccagagatatattctcttttagagagattaattggccgcatcaaggttatgggttatgtccccgagacaaactttgcactgcatgatgttgatgacgaggagaaaaataatcttctcagtgaacacagcgagaagcttgctctcgcatatgggctcctcacgacttcccctggttgtcccatacggatcacaaagaaccttcgtgtttgcggtgattgtcatagtgcattcacctacatctccaagattgttgaccatgagatcattgtacgagattccagtcgcttccatcatttcaagaatggctcttgttcctgtggtggctattggtgataccttgttctgtgaaagcagcaggggtggattcaggccctgggccacctgggccatgacgtaaatgcctagggtttcagagatgaacagggcaactcatgagctgggcagcgggagacaagcggcgcgtgggagcgggagcgaggtgacgagcgggcggcacgggctgcaggccgacggccaacgggactcgggagcctagcccagagccacaagataacgcaggcgggagatactagcgcgtgcagcaaccaggtctagaagaaaggaagcccagctttatcctggagccaagaagccgagggagcgagggagcagccaggcatggaggagcctgttccggctgatccccaagattttcttgaagccaaggagatcaggttcagggatcagatatgagcaataataatcttgaggcagtgacactccttataatcttccttcgaatctccagagcttgtgagtcatttagttatgtttatatgtgtacttaactattcccatttatgttttaaaaatatttttgggggtcttacttacctgctatttagaaatcttgttgtaaataacttcatgtgggacagtaccttactccatcttccccttactgacttgtaagttcatccttaccacctactctatttacaagtttacgttcttaaaccaacatttagcaatctttgcagaaatgtcaaaaacaaccaattcaccggttgagtacctgataaactaaaggggatcgataatctccaataagtacctttactgcaacagttgtggtgacttttatttgacacactatgttttgtataaaaccggctcagggcttttttaaatcctagatccgccaccgtccgcaagggtgaagcagctgtccttcctaaggttatgccctttgttcctagttcttctctgctttagtttattatgtatgtctaaaggtatttctttttcaaatttagttgtcatcagctgtttgaggatttgttaaactgctggtcaaatttcttagctgtagaatggatgaaagggaggagagcgctcacatccggtcgaccggtcgttttggtggaacgggagcatttcaactatttatggtaaatttttatatggagactctagtagccgctccggtcctcttttattggaaaccaaacatccaaaaataggaatgtagtcacttcattctccttcactcctcaaccaaacacacccaaagccaggagccaggatctaattcaattggtgcatcatctattcatctagaatgtcatcccaagccaggcttctttgctttgtggtgactgccattgcaaagctagcaacatgccatattgagttgcttcgggaagcacgggtgtcattgggtaagtttgctcgttcccgaacctcagacaggagagtctggcaatgggcctgtgactatttagggctcatgaatgaaccagccatctgtttatcagtactgggaccgtccactgcccaaggtaatggtcctggtgttgtgcattggcgtggaggaggaacagcgatggtagttcacgttccttttttaccttttagcagagcaaaaaggtaaaaattctgcaagcacttctttagttaaatgtggaataagcatcctttcatattctttaagggagctgtatatatgcttacaatctgagcacagcgatgtgaaatatttgcactttgactgaggtactaaaactgaagtgtcatagcatcaaggggagacactagctaaacaaacctgttgtttgcttatgtaaaatatcatgcttgttttgtatctattggtagttcataatattatcttatatagaaaatgccaaagtttgtattgcaggtccaccgtttcatgattttcatttaccgacctcctcccaacaaaatgaagatcggttcagtctggcatgatttctctagcagaatgccttgtgcatatatatagcgaccttattttgtgatcgtagcgacgtagcatgctgaagatccaagctccttttcgagaaaaggtctggtctggacatccaagcagagagtcttgtacacatggttgactatttcagaggcacactcaggtgcacccgtgtttgtacatggagcgcctgattggctaattggatgagcgtcgcgtggctttacgctgcagctgctcgtgcagtctctgccttgtgtatataggaaccaaacactgtcatgcgtcataaagattaaagagctgttttgtatgaaatacatgctcagatgtgatacctggtgacgaaatctcagacatcgagttggcattgctaaggaatgaagccatattatattactcagcaagtcagcaggcatgcttat

SEQ ID NO: 15156 - DNA, 6121 bp, Zea Mays
gccgaatctcacaaatgcaggctggaatgctggattgtcaacctctggagcccacgctccaacagaagcctccacctctgcggtcatgagggtcatctaaccttttcacagctccagcgaatgcacacagccgccgtcgtttcttcgtcttcctctcagcgccggcgctcccactcgtgctccctcccccactcgcgctcggcacgcaggccacgcggcggcgctcaggctcgggatatcagcgacggcggggcggtcccaggcttgtcgtcttcgtcagcggctccccctcctgcctctcgccaatcgcctcgcgccctcgcctctggttctccgcacacagcccggcgaccctgcgtgcgcccctaccgcctccggtggaccatcgacggctcctggcccggcggctgcgctgcacgccgcgcgcggccggcgggcagcgggagctagcagccgctgctgcaccaaggcggtcgcgccgctttgggagcgcttttgccccaaagcgaagcattaccagtccgcttaacgcttcagcgcgctgaagcgtgcgtttagttccgctttttggaaccctgtgctgacttctctttcgaggatctagagcgcacaatgatattttgctagcgttatgctcttcaactcgccaaaatcagcaaaacgaataggagtacagttcctatcagttgcaagtgcagactgctttggtcgagatgtctctccgacgcactttgcatccctgttaaaggaatgcaggtctgtgaatacagttcgtcaaattcatcagaagataattgcttgcggccttctttcgtatccatcatctttgttgtctgtgccactcgcaccacttccatcacattcatatgtatcaccaaaatctttgggcaccggtgttgtagcttcctatcttgcttgtggtgctacgaaggatgctctctcagtgttggagcgtgtcacaccatcaccagccgtgtggtggaatctactcgtaagagaacacatcaaggaaggccaccttgatagagcaattggtgtatcttgtcgcatgctgcgtgctggaactaagccagaccattttactctgccgtatgcgctgaaagcatgtggagagctaccttcatactgttgtggaagagcattacatggactcatatgttgcaatggatttgagtcaaatgtctttgtctgcaatgcattggtggcaatgtattcccgctgtggttctttggaggatgccagtctggtgtttgatgaaataacacggaagggaattgatgatgttatctcatggaattcaattgttgctgcccatgttaagggtagtaatccgcggactgcattagagctgttttcagagatgtcaatgattgttcacgaaaaagctacaaatgaaaggtcagatatcattagcattgtcaacattcttcctgcatgtgcttctctaaaggcattgcctcaaattaaggaaatccacagctatgccattcggaatggcacatttgcagatgcttttgtgtgcaatgctctgattgatacctatgcaaagtgtgggtcaatgaacgatgcggtaaaggttttcaatgtaatggaattcaaggatgtcgtttcttggaatgcaatggttactggatacacccaaagtgggaactttggggcagccttcgagcttttcgagaatatgcgcaaggaaaatatcccactagatgtcataacgtggagtgctgtaattgcagggtatgctcagagggggtgtagccaagaggcccttgatgcattccagcaaatgattcttgatggttcagagccaaattctgtcactatcatctctctattgtctgcttgcgcttccttgggagcattgtctcagggcatggaaattcatgcatactctctgaagaagtgtcttttatccttggataatgattttggtggtgacggtgacggtgaggatctaatggtgtacaatgcattaatagatatgtactcaaagtgcagaagtttcaaagctgcacgctccatatttgattccatacctcgaagagaacgtaatgtggtgacttggaccgtcatgattggtggatatgcacaatatggagactcaaatgatgccctcaagattttctcagagatgatttcaaaaccatacgcagttgccccaaatgcttatacaatttcctgcattttgatggcctgtgcacatctggcagctcttcgtatgggtaagcagattcacgcttatgtcacccgtcaccatgaatatgaaccatctgtgtactttgtggcaaattgccttattgatatgtactcaaagtgtggtgatgttgatactgctagaaatgtatttgatagcatgcctaaaaggaatgaagtatcttggacttcaatgatgtcagggtatggaatgcatggtcgtggtaaggaggctttagacatatttgacaagatgcagaaggcaggctttgttcctgatgatatttccttcctggttcttctttatgcttgtagccattctggcatggtggatcaaggtctgaattactttgatatcatgcgcagggattatgatgtagttgccagtgcagagcattatgcttgtgttattgacttactggctcgctgtgggcgattagataaggcatggaaaacaattcaggaaatgccaatggagcctagtgcagttatctgggttgcattacttagtgcctgtagagttcattcgaatgtggaacttgctgaatatgctctgaacaaactggtcaatatgaaagcagagaatgatggatcctacacacttatctccaacatatatgctaatgcaaggcggtggaaagatgtagcaagaatcagacaattaatgaagaaatcagggattaagaagaggccaggatgcagctgggtccaaggtaagaagggtactgcatcattctttgttggagatcgatcacaccctctatctccagagatatattctcttttagagagattaattggccgcatcaaggttatgggttatgtccccgagacaaactttgcactgcatgatgttgatgacgaggagaaaaataatcttctcagtgaacacagcgagaagcttgctctcgcatatgggctcctcacgacttcccctggttgtcccatacggatcacaaagaaccttcgtgtttgcggtgattgtcatagtgcattcacctacatctccaagattgttgaccatgagatcattgtacgagattccagtcgcttccatcatttcaagaatggctcttgttcctgtggtggctattggtgataccttgttctgtgaaagcagcaggggtggattcaggccctgggccacctgggccatgacgtaaatgcctagggtttcagagatgaacagggcaactcatgagctgggcagcgggagacaagcggcgcgtgggagcgggagcgaggtgacgagcgggcggcacgggctgcaggccgacggccaacgggactcgggagcctagcccagagccacaagataacgcaggcgggagatactagcgcgtgcagcaaccaggtctagaagaaaggaagcccagctttatcctggagccaagaagccgaggtgagattgtggttggactggaagggagcgagggagcagccaggcatggaggagcctgttccggctgatccccaagattttcttgaagccaaggagatcaggttcaggtgcctgcttgtctcaattcatgttactgcatacaaaatcttgctgatttcaactgtttttttttgcccctgaagaatcgttttctcgagttctcgtggcttatccatccttttatctgtttctcactttctctgttcttggaagacgctaatttcagctcagttctctgcaaatttctctgtaataaagtttatatagctatgtagttagaatcacactaaacactgttaactttagcaaatttcttagaatatgttaatcacgcattcacacacccgtgctactaaactgctattggtagctaacaaaccatttggtggttcacggcactggtcatttcaattcctcgcactagttcagttgtaagtgagatctcatgagctcgaaaatctcaatccttggatgtttacagacaacatgccattgttcacttttaatttaattttagtgttctgcagggatcagatatgagcaataataatcttgaggcagtgacactccttataatcttccttcgaatctccagagcttgtgagtcatttagttatgtttatatgtgtacttaactattcccatttatgttttaaaaatatttttgggggtcttacttacctgctatttagaaatcttgttgtaaataacttcatgtgggacagtaccttactccatcttccccttactgacttgtaagttcatccttaccacctactctatttacaagtttacgttcttaaaccaacatttagcaatctttgcagaaatgtcaaaaacaaccaattcaccggttgagtacctgataaactaaaggggatcgataatctccaataagtacctttactgcaacagttgtggtgacttttatttgacacactatgttttgtataaaaccggctcagggcttttttaaatcctagatccgccaccgtccgcaagggtgaagcagctgtccttcctaaggttatgccctttgttcctagttcttctctgctttagtttattatgtatgtctaaaggtatttctttttcaaatttagttgtcatcagctgtttgaggatttgttaaactgctggtcaaatttcttagctgtagaatggatgaaagggaggagagcgctcacatccggtcgaccggtcgttttggtggaacgggagcatttcaactatttatggtaaatttttatatggagactctagtagccgctccggtcctcttttattggaaaccaaacatccaaaaataggaatgtagtcacttcattctccttcactcctcaaccaaacacacccaaagccaggagccaggatctaattcaattggtgcatcatctattcatctagaatgtcatcccaagccaggcttctttgctttgtggtgactgccattgcaaagctagcaacatgccatattgagttgcttcgggaagcacgggtgtcattgggtaagtttgctcgttcccgaacctcagacaggagagtctggcaatgggcctgtgactatttagggctcatgaatgaaccagccatctgtttatcagtactgggaccgtccactgcccaaggtaatggtcctggtgttgtgcattggcgtggaggaggaacagcgatggtagttcacgttccttttttaccttttagcagagcaaaaaggtaaaaattctgcaagcacttctttagttaaatgtggaataagcatcctttcatattctttaagggagctgtatatatgcttacaatctgagcacagcgatgtgaaatatttgcactttgactgaggtactaaaactgaagtgtcatagcatcaaggggagacactagctaaacaaacctgttgtttgcttatgtaaaatatcatgcttgttttgtatctattggtagttcataatattatcttatatagaaaatgccaaagtttgtattgcaggtccaccgtttcatgattttcatttaccgacctcctcccaacaaaatgaagatcggttcagtctggcatgatttctctagcagaatgccttgtgcatatatatagcgaccttattttgtgatcgtagcgacgtagcatgctgaagatccaagctccttttcgagaaaaggtctggtctggacatccaagcagagagtcttgtacacatggttgactatttcagaggcacactcaggtgcacccgtgtttgtacatggagcgcctgattggctaattggatgagcgtcgcgtggctttacgctgcagctgctcgtgcagtctctgccttgtgtatataggaaccaaacactgtcatgcgtcataaagattaaagagctgttttgtatgaaatacatgctcagatgtgatacctggtgacgaaatctcagacatcgagttggcattgctaaggaatgaagccatattatattactcagcaagtcagcaggcatgcttat

SEQ ID NO: 15157 - DNA, 5347 bp, Zea Mays
gccgaatctcacaaatgcaggctggaatgctggattgtcaacctctggagcccacgctccaacagaagcctccacctctgcggtcatgagggtcatctaaccttttcacagctccagcgaatgcacacagccgccgtcgtttcttcgtcttcctctcagcgccggcgctcccactcgtgctccctcccccactcgcgctcggcacgcaggccacgcggcggcgctcaggctcgggatatcagcgacggcggggcggtcccaggcttgtcgtcttcgtcagcggctccccctcctgcctctcgccaatcgcctcgcgccctcgcctctggttctccgcacacagcccggcgaccctgcgtgcgcccctaccgcctccggtggaccatcgacggctcctggcccggcggctgcgctgcacgccgcgcgcggccggcgggcagcgggagctagcagccgctgctgcaccaaggcggtcgcgccgctttgggagcgcttttgccccaaagcgaagcattaccagtccgcttaacgcttcagcgcgctgaagcgtgcgtttagttccgctttttggaaccctgtgctgacttctctttcgaggatctagagcgcacaatgatattttgctagcgttatgctcttcaactcgccaaaatcagcaaaacgaataggagtacagttcctatcagttgcaagtgcagactgctttggtcgagatgtctctccgacgcactttgcatccctgttaaaggaatgcaggtctgtgaatacagttcgtcaaattcatcagaagataattgcttgcggccttctttcgtatccatcatctttgttgtctgtgccactcgcaccacttccatcacattcatatgtatcaccaaaatctttgggcaccggtgttgtagcttcctatcttgcttgtggtgctacgaaggatgctctctcagtgttggagcgtgtcacaccatcaccagccgtgtggtggaatctactcgtaagagaacacatcaaggaaggccaccttgatagagcaattggtgtatcttgtcgcatgctgcgtgctggaactaagccagaccattttactctgccgtatgcgctgaaagcatgtggagagctaccttcatactgttgtggaagagcattacatggactcatatgttgcaatggatttgagtcaaatgtctttgtctgcaatgcattggtggcaatgtattcccgctgtggttctttggaggatgccagtctggtgtttgatgaaataacacggaagggaattgatgatgttatctcatggaattcaattgttgctgcccatgttaagggtagtaatccgcggactgcattagagctgttttcagagatgtcaatgattgttcacgaaaaagctacaaatgaaaggtcagatatcattagcattgtcaacattcttcctgcatgtgcttctctaaaggcattgcctcaaattaaggaaatccacagctatgccattcggaatggcacatttgcagatgcttttgtgtgcaatgctctgattgatacctatgcaaagtgtgggtcaatgaacgatgcggtaaaggttttcaatgtaatggaattcaaggatgtcgtttcttggaatgcaatggttactggatacacccaaagtgggaactttggggcagccttcgagcttttcgagaatatgcgcaaggaaaatatcccactagatgtcataacgtggagtgctgtaattgcagggtatgctcagagggggtgtagccaagaggcccttgatgcattccagcaaatgattcttgatggttcagagccaaattctgtcactatcatctctctattgtctgcttgcgcttccttgggagcattgtctcagggcatggaaattcatgcatactctctgaagaagtgtcttttatccttggataatgattttggtggtgacggtgacggtgaggatctaatggtgtacaatgcattaatagatatgtactcaaagtgcagaagtttcaaagctgcacgctccatatttgattccatacctcgaagagaacgtaatgtggtgacttggaccgtcatgattggtggatatgcacaatatggagactcaaatgatgccctcaagattttctcagagatgatttcaaaaccatacgcagttgccccaaatgcttatacaatttcctgcattttgatggcctgtgcacatctggcagctcttcgtatgggtaagcagattcacgcttatgtcacccgtcaccatgaatatgaaccatctgtgtactttgtggcaaattgccttattgatatgtactcaaagtgtggtgatgttgatactgctagaaatgtatttgatagcatgcctaaaaggaatgaagtatcttggacttcaatgatgtcagggtatggaatgcatggtcgtggtaaggaggctttagacatatttgacaagatgcagaaggcaggctttgttcctgatgatatttccttcctggttcttctttatgcttgtagccattctggcatggtggatcaaggtctgaattactttgatatcatgcgcagggattatgatgtagttgccagtgcagagcattatgcttgtgttattgacttactggctcgctgtgggcgattagataaggcatggaaaacaattcaggaaatgccaatggagcctagtgcagttatctgggttgcattacttagtgcctgtagagttcattcgaatgtggaacttgctgaatatgctctgaacaaactggtcaatatgaaagcagagaatgatggatcctacacacttatctccaacatatatgctaatgcaaggcggtggaaagatgtagcaagaatcagacaattaatgaagaaatcagggattaagaagaggccaggatgcagctgggtccaaggtaagaagggtactgcatcattctttgttggagatcgatcacaccctctatctccagagatatattctcttttagagagattaattggccgcatcaaggttatgggttatgtccccgagacaaactttgcactgcatgatgttgatgacgaggagaaaaataatcttctcagtgaacacagcgagaagcttgctctcgcatatgggctcctcacgacttcccctggttgtcccatacggatcacaaagaaccttcgtgtttgcggtgattgtcatagtgcattcacctacatctccaagattgttgaccatgagatcattgtacgagattccagtcgcttccatcatttcaagaatggctcttgttcctgtggtggctattggtgataccttgttctgtgaaagcagcaggggtggattcaggccctgggccacctgggccatgacgtaaatgcctagggtttcagagatgaacagggcaactcatgagctgggcagcgggagacaagcggcgcgtgggagcgggagcgaggtgacgagcgggcggcacgggctgcaggccgacggccaacgggactcgggagcctagcccagagccacaagataacgcaggcgggagatactagcgcgtgcagcaaccaggtctagaagaaaggaagcccagctttatcctggagccaagaagccgagggagcgagggagcagccaggcatggaggagcctgttccggctgatccccaagattttcttgaagccaaggagatcaggttcagggatcagatatgagcaataataatcttgaggcagtgacactccttataatcttccttcgaatctccagagcttaaatcttgttgtaaataacttcatgtgggacagtaccttactccatcttccccttactgacttaaatgtcaaaaacaaccaattcaccggttgagtacctgataaactaaaggggatcgataatctccaataagtacctttactgcaacagttgtggtgacttttatttgacacactatgttttgtataaaaccggctcagggcttttttaaatcctagatccgccaccgtccgcaagggtgaagcagctgtccttcctaaggttatgccctttgttcctagttcttctctgctttagtttattatgtatgtctaaaggtatttctttttcaaatttagttgtcatcagctgtttgaggatttgttaaactgctggtcaaatttcttagctgtagaatggatgaaagggaggagagcgctcacatccggtcgaccggtcgttttggtggaacgggagcatttcaactatttatgccaggagccaggatctaattcaattggtgcatcatctattcatctagaatgtcatcccaagccaggcttctttgctttgtggtgactgccattgcaaagctagcaacatgccatattgagttgcttcgggaagcacgggtgtcattggtttgctcgttcccgaacctcagacaggagagtctggcaatgggcctgtgactatttagggctcatgaatgaaccagccatctgtttatcagtactgggaccgtccactgcccaaggtaatggtcctggtgttgtgcattggcgtggaggaggaacagcgatggtagttcacgttccttttttaccttttagcagagcaaaaaggtaaaaattctgcaagcacttctttagttaaatgtggaataagcatcctttcatattctttaagggagctgtatatatgcttacaatctgagcacagcgatgtgaaatatttgcactttgactgaggtactaaaactgaagtgtcatagcatcaaggggagacactagctaaacaaacctgttgtttgcttatgtaaaatatcatgcttgttttgtatctattggtagttcataatattatcttatatagaaaatgccaaagtttgtattgcaggtccaccgtttcatgattttcatttaccgacctcctcccaacaaaatgaagatcggttcagtctggcatgatttctctagcagaatgccttgtgcatatatatagcgaccttattttgtgatcgtagcgacgtagcatgctgaagatccaagctccttttcgagaaaaggtctggtctggacatccaagcagagagtcttgtacacatggttgactatttcagaggcacactcaggtgcacccgtgtttgtacatggagcgcctgattggctaattggatgagcgtcgcgtggctttacgctgcagctgctcgtgcagtctctgccttgtgtatataggaaccaaacactgtcatgcgtcataaagattaaagagctgttttgtatgaaatacatgctcagatgtgatacctggtgacgaaatctcagacatcgagttggcattgctaaggaatgaagccatattatattactcagcaagtcagcaggcatgcttat

SEQ ID NO: 15158 - DNA, 6092 bp, Zea Mays
gccgaatctcacaaatgcaggctggaatgctggattgtcaacctctggagcccacgctccaacagaagcctccacctctgcggtcatgagggtcatctaaccttttcacagctccagcgaatgcacacagccgccgtcgtttcttcgtcttcctctcagcgccggcgctcccactcgtgctccctcccccactcgcgctcggcacgcaggccacgcggcggcgctcaggctcgggatatcagcgacggcggggcggtcccaggcttgtcgtcttcgtcagcggctccccctcctgcctctcgccaatcgcctcgcgccctcgcctctggttctccgcacacagcccggcgaccctgcgtgcgcccctaccgcctccggtggaccatcgacggctcctggcccggcggctgcgctgcacgccgcgcgcggccggcgggcagcgggagctagcagccgctgctgcaccaaggcggtcgcgccgctttgggagcgcttttgccccaaagcgaagcattaccagtccgcttaacgcttcagcgcgctgaagcgtgcgtttagttccgctttttggaaccctgtgctgacttctctttcgaggatctagagcgcacaatgatattttgctagcgttatgctcttcaactcgccaaaatcagcaaaacgaataggagtacagttcctatcagttgcaagtgcagactgctttggtcgagatgtctctccgacgcactttgcatccctgttaaaggaatgcaggtctgtgaatacagttcgtcaaattcatcagaagataattgcttgcggccttctttcgtatccatcatctttgttgtctgtgccactcgcaccacttccatcacattcatatgtatcaccaaaatctttgggcaccggtgttgtagcttcctatcttgcttgtggtgctacgaaggatgctctctcagtgttggagcgtgtcacaccatcaccagccgtgtggtggaatctactcgtaagagaacacatcaaggaaggccaccttgatagagcaattggtgtatcttgtcgcatgctgcgtgctggaactaagccagaccattttactctgccgtatgcgctgaaagcatgtggagagctaccttcatactgttgtggaagagcattacatggactcatatgttgcaatggatttgagtcaaatgtctttgtctgcaatgcattggtggcaatgtattcccgctgtggttctttggaggatgccagtctggtgtttgatgaaataacacggaagggaattgatgatgttatctcatggaattcaattgttgctgcccatgttaagggtagtaatccgcggactgcattagagctgttttcagagatgtcaatgattgttcacgaaaaagctacaaatgaaaggtcagatatcattagcattgtcaacattcttcctgcatgtgcttctctaaaggcattgcctcaaattaaggaaatccacagctatgccattcggaatggcacatttgcagatgcttttgtgtgcaatgctctgattgatacctatgcaaagtgtgggtcaatgaacgatgcggtaaaggttttcaatgtaatggaattcaaggatgtcgtttcttggaatgcaatggttactggatacacccaaagtgggaactttggggcagccttcgagcttttcgagaatatgcgcaaggaaaatatcccactagatgtcataacgtggagtgctgtaattgcagggtatgctcagagggggtgtagccaagaggcccttgatgcattccagcaaatgattcttgatggttcagagccaaattctgtcactatcatctctctattgtctgcttgcgcttccttgggagcattgtctcagggcatggaaattcatgcatactctctgaagaagtgtcttttatccttggataatgattttggtggtgacggtgacggtgaggatctaatggtgtacaatgcattaatagatatgtactcaaagtgcagaagtttcaaagctgcacgctccatatttgattccatacctcgaagagaacgtaatgtggtgacttggaccgtcatgattggtggatatgcacaatatggagactcaaatgatgccctcaagattttctcagagatgatttcaaaaccatacgcagttgccccaaatgcttatacaatttcctgcattttgatggcctgtgcacatctggcagctcttcgtatgggtaagcagattcacgcttatgtcacccgtcaccatgaatatgaaccatctgtgtactttgtggcaaattgccttattgatatgtactcaaagtgtggtgatgttgatactgctagaaatgtatttgatagcatgcctaaaaggaatgaagtatcttggacttcaatgatgtcagggtatggaatgcatggtcgtggtaaggaggctttagacatatttgacaagatgcagaaggcaggctttgttcctgatgatatttccttcctggttcttctttatgcttgtagccattctggcatggtggatcaaggtctgaattactttgatatcatgcgcagggattatgatgtagttgccagtgcagagcattatgcttgtgttattgacttactggctcgctgtgggcgattagataaggcatggaaaacaattcaggaaatgccaatggagcctagtgcagttatctgggttgcattacttagtgcctgtagagttcattcgaatgtggaacttgctgaatatgctctgaacaaactggtcaatatgaaagcagagaatgatggatcctacacacttatctccaacatatatgctaatgcaaggcggtggaaagatgtagcaagaatcagacaattaatgaagaaatcagggattaagaagaggccaggatgcagctgggtccaaggtaagaagggtactgcatcattctttgttggagatcgatcacaccctctatctccagagatatattctcttttagagagattaattggccgcatcaaggttatgggttatgtccccgagacaaactttgcactgcatgatgttgatgacgaggagaaaaataatcttctcagtgaacacagcgagaagcttgctctcgcatatgggctcctcacgacttcccctggttgtcccatacggatcacaaagaaccttcgtgtttgcggtgattgtcatagtgcattcacctacatctccaagattgttgaccatgagatcattgtacgagattccagtcgcttccatcatttcaagaatggctcttgttcctgtggtggctattggtgataccttgttctgtgaaagcagcaggggtggattcaggccctgggccacctgggccatgacgtaaatgcctagggtttcagagatgaacagggcaactcatgagctgggcagcgggagacaagcggcgcgtgggagcgggagcgaggtgacgagcgggcggcacgggctgcaggccgacggccaacgggactcgggagcctagcccagagccacaagataacgcaggcgggagatactagcgcgtgcagcaaccaggtctagaagaaaggaagcccagctttatcctggagccaagaagccgagggagcgagggagcagccaggcatggaggagcctgttccggctgatccccaagattttcttgaagccaaggagatcaggttcaggtgcctgcttgtctcaattcatgttactgcatacaaaatcttgctgatttcaactgtttttttttgcccctgaagaatcgttttctcgagttctcgtggcttatccatccttttatctgtttctcactttctctgttcttggaagacgctaatttcagctcagttctctgcaaatttctctgtaataaagtttatatagctatgtagttagaatcacactaaacactgttaactttagcaaatttcttagaatatgttaatcacgcattcacacacccgtgctactaaactgctattggtagctaacaaaccatttggtggttcacggcactggtcatttcaattcctcgcactagttcagttgtaagtgagatctcatgagctcgaaaatctcaatccttggatgtttacagacaacatgccattgttcacttttaatttaattttagtgttctgcagggatcagatatgagcaataataatcttgaggcagtgacactccttataatcttccttcgaatctccagagcttgtgagtcatttagttatgtttatatgtgtacttaactattcccatttatgttttaaaaatatttttgggggtcttacttacctgctatttagaaatcttgttgtaaataacttcatgtgggacagtaccttactccatcttccccttactgacttgtaagttcatccttaccacctactctatttacaagtttacgttcttaaaccaacatttagcaatctttgcagaaatgtcaaaaacaaccaattcaccggttgagtacctgataaactaaaggggatcgataatctccaataagtacctttactgcaacagttgtggtgacttttatttgacacactatgttttgtataaaaccggctcagggcttttttaaatcctagatccgccaccgtccgcaagggtgaagcagctgtccttcctaaggttatgccctttgttcctagttcttctctgctttagtttattatgtatgtctaaaggtatttctttttcaaatttagttgtcatcagctgtttgaggatttgttaaactgctggtcaaatttcttagctgtagaatggatgaaagggaggagagcgctcacatccggtcgaccggtcgttttggtggaacgggagcatttcaactatttatggtaaatttttatatggagactctagtagccgctccggtcctcttttattggaaaccaaacatccaaaaataggaatgtagtcacttcattctccttcactcctcaaccaaacacacccaaagccaggagccaggatctaattcaattggtgcatcatctattcatctagaatgtcatcccaagccaggcttctttgctttgtggtgactgccattgcaaagctagcaacatgccatattgagttgcttcgggaagcacgggtgtcattggtttgctcgttcccgaacctcagacaggagagtctggcaatgggcctgtgactatttagggctcatgaatgaaccagccatctgtttatcagtactgggaccgtccactgcccaaggtaatggtcctggtgttgtgcattggcgtggaggaggaacagcgatggtagttcacgttccttttttaccttttagcagagcaaaaaggtaaaaattctgcaagcacttctttagttaaatgtggaataagcatcctttcatattctttaagggagctgtatatatgcttacaatctgagcacagcgatgtgaaatatttgcactttgactgaggtactaaaactgaagtgtcatagcatcaaggggagacactagctaaacaaacctgttgtttgcttatgtaaaatatcatgcttgttttgtatctattggtagttcataatattatcttatatagaaaatgccaaagtttgtattgcaggtccaccgtttcatgattttcatttaccgacctcctcccaacaaaatgaagatcggttcagtctggcatgatttctctagcagaatgccttgtgcatatatatagcgaccttattttgtgatcgtagcgacgtagcatgctgaagatccaagctccttttcgagaaaaggtctggtctggacatccaagcagagagtcttgtacacatggttgactatttcagaggcacactcaggtgcacccgtgtttgtacatggagcgcctgattggctaattggatgagcgtcgcgtggctttacgctgcagctgctcgtgcagtctctgccttgtgtatataggaaccaaacactgtcatgcgtcataaagattaaagagctgttttgtatgaaatacatgctcagatgtgatacctggtgacgaaatctcagacatcgagttggcattgctaaggaatgaagccatattatattactcagcaagtcagcaggcatgcttat

SEQ ID NO: 15159 - DNA, 5324 bp, Zea Mays
gccgaatctcacaaatgcaggctggaatgctggattgtcaacctctggagcccacgctccaacagaagcctccacctctgcggtcatgagggtcatctaaccttttcacagctccagcgaatgcacacagccgccgtcgtttcttcgtcttcctctcagcgccggcgctcccactcgtgctccctcccccactcgcgctcggcacgcaggccacgcggcggcgctcaggctcgggatatcagcgacggcggggcggtcccaggcttgtcgtcttcgtcagcggctccccctcctgcctctcgccaatcgcctcgcgccctcgcctctggttctccgcacacagcccggcgaccctgcgtgcgcccctaccgcctccggtggaccatcgacggctcctggcccggcggctgcgctgcacgccgcgcgcggccggcgggcagcgggagctagcagccgctgctgcaccaaggcggtcgcgccgctttgggagcgcttttgccccaaagcgaagcattaccagtccgcttaacgcttcagcgcgctgaagcgtgcgtttagttccgctttttggaaccctgtgctgacttctctttcgaggatctagagcgcacaatgatattttgctagcgttatgctcttcaactcgccaaaatcagcaaaacgaataggagtacagttcctatcagttgcaagtgcagactgctttggtcgagatgtctctccgacgcactttgcatccctgttaaaggaatgcaggtctgtgaatacagttcgtcaaattcatcagaagataattgcttgcggccttctttcgtatccatcatctttgttgtctgtgccactcgcaccacttccatcacattcatatgtatcaccaaaatctttgggcaccggtgttgtagcttcctatcttgcttgtggtgctacgaaggatgctctctcagtgttggagcgtgtcacaccatcaccagccgtgtggtggaatctactcgtaagagaacacatcaaggaaggccaccttgatagagcaattggtgtatcttgtcgcatgctgcgtgctggaactaagccagaccattttactctgccgtatgcgctgaaagcatgtggagagctaccttcatactgttgtggaagagcattacatggactcatatgttgcaatggatttgagtcaaatgtctttgtctgcaatgcattggtggcaatgtattcccgctgtggttctttggaggatgccagtctggtgtttgatgaaataacacggaagggaattgatgatgttatctcatggaattcaattgttgctgcccatgttaagggtagtaatccgcggactgcattagagctgttttcagagatgtcaatgattgttcacgaaaaagctacaaatgaaaggtcagatatcattagcattgtcaacattcttcctgcatgtgcttctctaaaggcattgcctcaaattaaggaaatccacagctatgccattcggaatggcacatttgcagatgcttttgtgtgcaatgctctgattgatacctatgcaaagtgtgggtcaatgaacgatgcggtaaaggttttcaatgtaatggaattcaaggatgtcgtttcttggaatgcaatggttactggatacacccaaagtgggaactttggggcagccttcgagcttttcgagaatatgcgcaaggaaaatatcccactagatgtcataacgtggagtgctgtaattgcagggtatgctcagagggggtgtagccaagaggcccttgatgcattccagcaaatgattcttgatggttcagagccaaattctgtcactatcatctctctattgtctgcttgcgcttccttgggagcattgtctcagggcatggaaattcatgcatactctctgaagaagtgtcttttatccttggataatgattttggtggtgacggtgacggtgaggatctaatggtgtacaatgcattaatagatatgtactcaaagtgcagaagtttcaaagctgcacgctccatatttgattccatacctcgaagagaacgtaatgtggtgacttggaccgtcatgattggtggatatgcacaatatggagactcaaatgatgccctcaagattttctcagagatgatttcaaaaccatacgcagttgccccaaatgcttatacaatttcctgcattttgatggcctgtgcacatctggcagctcttcgtatgggtaagcagattcacgcttatgtcacccgtcaccatgaatatgaaccatctgtgtactttgtggcaaattgccttattgatatgtactcaaagtgtggtgatgttgatactgctagaaatgtatttgatagcatgcctaaaaggaatgaagtatcttggacttcaatgatgtcagggtatggaatgcatggtcgtggtaaggaggctttagacatatttgacaagatgcagaaggcaggctttgttcctgatgatatttccttcctggttcttctttatgcttgtagccattctggcatggtggatcaaggtctgaattactttgatatcatgcgcagggattatgatgtagttgccagtgcagagcattatgcttgtgttattgacttactggctcgctgtgggcgattagataaggcatggaaaacaattcaggaaatgccaatggagcctagtgcagttatctgggttgcattacttagtgcctgtagagttcattcgaatgtggaacttgctgaatatgctctgaacaaactggtcaatatgaaagcagagaatgatggatcctacacacttatctccaacatatatgctaatgcaaggcggtggaaagatgtagcaagaatcagacaattaatgaagaaatcagggattaagaagaggccaggatgcagctgggtccaaggtaagaagggtactgcatcattctttgttggagatcgatcacaccctctatctccagagatatattctcttttagagagattaattggccgcatcaaggttatgggttatgtccccgagacaaactttgcactgcatgatgttgatgacgaggagaaaaataatcttctcagtgaacacagcgagaagcttgctctcgcatatgggctcctcacgacttcccctggttgtcccatacggatcacaaagaaccttcgtgtttgcggtgattgtcatagtgcattcacctacatctccaagattgttgaccatgagatcattgtacgagattccagtcgcttccatcatttcaagaatggctcttgttcctgtggtggctattggtgataccttgttctgtgaaagcagcaggggtggattcaggccctgggccacctgggccatgacgtaaatgcctagggtttcagagatgaacagggcaactcatgagctgggcagcgggagacaagcggcgcgtgggagcgggagcgaggtgacgagcgggcggcacgggctgcaggccgacggccaacgggactcgggagcctagcccagagccacaagataacgcaggcgggagatactagcgcgtgcagcaaccaggtctagaagaaaggaagcccagctttatcctggagccaagaagccgaggtgagattgtggttggactggaagggagcgagggagcagccaggcatggaggagcctgttccggctgatccccaagattttcttgaagccaaggagatcaggttcagggatcagatatgagcaataataatcttgaggcagtgacactccttataatcttccttcgaatctccagagcttaaatcttgttgtaaataacttcatgtgggacagtaccttactccatcttccccttactgacttaaatgtcaaaaacaaccaattcaccggttgagtacctgataaactaaaggggatcgataatctccaataagtacctttactgcaacagttgtggtgacttttatttgacacactatgttttgtataaaaccggctcagggcttttttaaatcctagatccgccaccgtccgcaagggtgaagcagctgtccttcctaaggttatgccctttgttcctagttcttctctgctttagtttattatgtatgtctaaaggtatttctttttcaaatttagttgtcatcagctgtttgaggatttgttaaactgctggtcaaatttcttagctgtagaatggatgaaagggaggagagcgctcacatccggtcgaccggtcgttttggtggaacgggagcatttcaactatttatgaatgtcatcccaagccaggcttctttgctttgtggtgactgccattgcaaagctagcaacatgccatattgagttgcttcgggaagcacgggtgtcattggtttgctcgttcccgaacctcagacaggagagtctggcaatgggcctgtgactatttagggctcatgaatgaaccagccatctgtttatcagtactgggaccgtccactgcccaaggtaatggtcctggtgttgtgcattggcgtggaggaggaacagcgatggtagttcacgttccttttttaccttttagcagagcaaaaaggtaaaaattctgcaagcacttctttagttaaatgtggaataagcatcctttcatattctttaagggagctgtatatatgcttacaatctgagcacagcgatgtgaaatatttgcactttgactgaggtactaaaactgaagtgtcatagcatcaaggggagacactagctaaacaaacctgttgtttgcttatgtaaaatatcatgcttgttttgtatctattggtagttcataatattatcttatatagaaaatgccaaagtttgtattgcaggtccaccgtttcatgattttcatttaccgacctcctcccaacaaaatgaagatcggttcagtctggcatgatttctctagcagaatgccttgtgcatatatatagcgaccttattttgtgatcgtagcgacgtagcatgctgaagatccaagctccttttcgagaaaaggtctggtctggacatccaagcagagagtcttgtacacatggttgactatttcagaggcacactcaggtgcacccgtgtttgtacatggagcgcctgattggctaattggatgagcgtcgcgtggctttacgctgcagctgctcgtgcagtctctgccttgtgtatataggaaccaaacactgtcatgcgtcataaagattaaagagctgttttgtatgaaatacatgctcagatgtgatacctggtgacgaaatctcagacatcgagttggcattgctaaggaatgaagccatattatattactcagcaagtcagcaggcatgcttat

SEQ ID NO: 15160 - DNA, 4920 bp, Zea Mays
gccgaatctcacaaatgcaggctggaatgctggattgtcaacctctggagcccacgctccaacagaagcctccacctctgcggtcatgagggtcatctaaccttttcacagctccagcgaatgcacacagccgccgtcgtttcttcgtcttcctctcagcgccggcgctcccactcgtgctccctcccccactcgcgctcggcacgcaggccacgcggcggcgctcaggctcgggatatcagcgacggcggggcggtcccaggcttgtcgtcttcgtcagcggctccccctcctgcctctcgccaatcgcctcgcgccctcgcctctggttctccgcacacagcccggcgaccctgcgtgcgcccctaccgcctccggtggaccatcgacggctcctggcccggcggctgcgctgcacgccgcgcgcggccggcgggcagcgggagctagcagccgctgctgcaccaaggcggtcgcgccgctttgggagcgcttttgccccaaagcgaagcattaccagtccgcttaacgcttcagcgcgctgaagcgtgcgtttagttccgctttttggaaccctgtgctgacttctctttcgaggatctagagcgcacaatgatattttgctagcgttatgctcttcaactcgccaaaatcagcaaaacgaataggagtacagttcctatcagttgcaagtgcagactgctttggtcgagatgtctctccgacgcactttgcatccctgttaaaggaatgcaggtctgtgaatacagttcgtcaaattcatcagaagataattgcttgcggccttctttcgtatccatcatctttgttgtctgtgccactcgcaccacttccatcacattcatatgtatcaccaaaatctttgggcaccggtgttgtagcttcctatcttgcttgtggtgctacgaaggatgctctctcagtgttggagcgtgtcacaccatcaccagccgtgtggtggaatctactcgtaagagaacacatcaaggaaggccaccttgatagagcaattggtgtatcttgtcgcatgctgcgtgctggaactaagccagaccattttactctgccgtatgcgctgaaagcatgtggagagctaccttcatactgttgtggaagagcattacatggactcatatgttgcaatggatttgagtcaaatgtctttgtctgcaatgcattggtggcaatgtattcccgctgtggttctttggaggatgccagtctggtgtttgatgaaataacacggaagggaattgatgatgttatctcatggaattcaattgttgctgcccatgttaagggtagtaatccgcggactgcattagagctgttttcagagatgtcaatgattgttcacgaaaaagctacaaatgaaaggtcagatatcattagcattgtcaacattcttcctgcatgtgcttctctaaaggcattgcctcaaattaaggaaatccacagctatgccattcggaatggcacatttgcagatgcttttgtgtgcaatgctctgattgatacctatgcaaagtgtgggtcaatgaacgatgcggtaaaggttttcaatgtaatggaattcaaggatgtcgtttcttggaatgcaatggttactggatacacccaaagtgggaactttggggcagccttcgagcttttcgagaatatgcgcaaggaaaatatcccactagatgtcataacgtggagtgctgtaattgcagggtatgctcagagggggtgtagccaagaggcccttgatgcattccagcaaatgattcttgatggttcagagccaaattctgtcactatcatctctctattgtctgcttgcgcttccttgggagcattgtctcagggcatggaaattcatgcatactctctgaagaagtgtcttttatccttggataatgattttggtggtgacggtgacggtgaggatctaatggtgtacaatgcattaatagatatgtactcaaagtgcagaagtttcaaagctgcacgctccatatttgattccatacctcgaagagaacgtaatgtggtgacttggaccgtcatgattggtggatatgcacaatatggagactcaaatgatgccctcaagattttctcagagatgatttcaaaaccatacgcagttgccccaaatgcttatacaatttcctgcattttgatggcctgtgcacatctggcagctcttcgtatgggtaagcagattcacgcttatgtcacccgtcaccatgaatatgaaccatctgtgtactttgtggcaaattgccttattgatatgtactcaaagtgtggtgatgttgatactgctagaaatgtatttgatagcatgcctaaaaggaatgaagtatcttggacttcaatgatgtcagggtatggaatgcatggtcgtggtaaggaggctttagacatatttgacaagatgcagaaggcaggctttgttcctgatgatatttccttcctggttcttctttatgcttgtagccattctggcatggtggatcaaggtctgaattactttgatatcatgcgcagggattatgatgtagttgccagtgcagagcattatgcttgtgttattgacttactggctcgctgtgggcgattagataaggcatggaaaacaattcaggaaatgccaatggagcctagtgcagttatctgggttgcattacttagtgcctgtagagttcattcgaatgtggaacttgctgaatatgctctgaacaaactggtcaatatgaaagcagagaatgatggatcctacacacttatctccaacatatatgctaatgcaaggcggtggaaagatgtagcaagaatcagacaattaatgaagaaatcagggattaagaagaggccaggatgcagctgggtccaaggtaagaagggtactgcatcattctttgttggagatcgatcacaccctctatctccagagatatattctcttttagagagattaattggccgcatcaaggttatgggttatgtccccgagacaaactttgcactgcatgatgttgatgacgaggagaaaaataatcttctcagtgaacacagcgagaagcttgctctcgcatatgggctcctcacgacttcccctggttgtcccatacggatcacaaagaaccttcgtgtttgcggtgattgtcatagtgcattcacctacatctccaagattgttgaccatgagatcattgtacgagattccagtcgcttccatcatttcaagaatggctcttgttcctgtggtggctattggtgataccttgttctgtgaaagcagcaggggtggattcaggccctgggccacctgggccatgacgtaaatgcctagggtttcagagatgaacagggcaactcatgagctgggcagcgggagacaagcggcgcgtgggagcgggagcgaggtgacgagcgggcggcacgggctgcaggccgacggccaacgggactcgggagcctagcccagagccacaagataacgcaggcgggagatactagcgcgtgcagcaaccaggtctagaagaaaggaagcccagctttatcctggagccaagaagccgagggagcgagggagcagccaggcatggaggagcctgttccggctgatccccaagattttcttgaagccaaggagatcaggttcagggatcagatatgagcaataataatcttgaggcagtgacactccttataatcttccttcgaatctccagagcttgtgagtcatttagttatgtttatatgtgtacttaactattcccatttatgttttaaaaatatttttgggggtcttacttacctgctatttagaaatcttgttgtaaataacttcatgtgggacagtaccttactccatcttccccttactgacttggcttttttaaatcctagatccgccaccgtccgcaagggtgaagcagctgtccttcctaagttgtcatcagctgtttgaggatttgttaaactgctggtcaaatttcttagctgtagaatggatgaaagggaggagagcgctcacatccggtcgaccggtcgttttggtggaacgggagcatttcaactatttatgaatgtcatcccaagccaggcttctttgctttgtggtgactgccattgcaaagctagcaacatgccatattgagttgcttcgggaagcacgggtgtcattgggtaagtttgctcgttcccgaacctcagacaggagagtctggcaatgggcctgtgactatttagggctcatgaatgaaccagccatctgtttatcagtactgggaccgtccactgcccaaggtaatggtcctggtgttgtgcattggcgtggaggaggaacagcgatggtagttcacgttccttttttaccttttagcagagcaaaaagtttgtattgcaggtccaccgtttcatgattttcatttaccgacctcctcccaacaaaatgaagatcggttcagtctggcatgatttctctagcagaatgccttgtgcatatatatagcgaccttattttgtgatcgtagcgacgtagcatgctgaagatccaagctccttttcgagaaaaggtctggtctggacatccaagcagagagtcttgtacacatggttgactatttcagaggcacactcaggtgcacccgtgtttgtacatggagcgcctgattggctaattggatgagcgtcgcgtggctttacgctgcagctgctcgtgcagtctctgccttgtgtatataggaaccaaacactgtcatgcgtcataaagattaaagagctgttttgtatgaaatacatgctcagatgtgatacctggtgacgaaatctcagacatcgagttggcattgctaaggaatgaagccatattatattactcagcaagtcagcaggcatgcttat

SEQ ID NO: 15161 - DNA, 5493 bp, Zea Mays
gccgaatctcacaaatgcaggctggaatgctggattgtcaacctctggagcccacgctccaacagaagcctccacctctgcggtcatgagggtcatctaaccttttcacagctccagcgaatgcacacagccgccgtcgtttcttcgtcttcctctcagcgccggcgctcccactcgtgctccctcccccactcgcgctcggcacgcaggccacgcggcggcgctcaggctcgggatatcagcgacggcggggcggtcccaggcttgtcgtcttcgtcagcggctccccctcctgcctctcgccaatcgcctcgcgccctcgcctctggttctccgcacacagcccggcgaccctgcgtgcgcccctaccgcctccggtggaccatcgacggctcctggcccggcggctgcgctgcacgccgcgcgcggccggcgggcagcgggagctagcagccgctgctgcaccaaggcggtcgcgccgctttgggagcgcttttgccccaaagcgaagcattaccagtccgcttaacgcttcagcgcgctgaagcgtgcgtttagttccgctttttggaaccctgtgctgacttctctttcgaggatctagagcgcacaatgatattttgctagcgttatgctcttcaactcgccaaaatcagcaaaacgaataggagtacagttcctatcagttgcaagtgcagactgctttggtcgagatgtctctccgacgcactttgcatccctgttaaaggaatgcaggtctgtgaatacagttcgtcaaattcatcagaagataattgcttgcggccttctttcgtatccatcatctttgttgtctgtgccactcgcaccacttccatcacattcatatgtatcaccaaaatctttgggcaccggtgttgtagcttcctatcttgcttgtggtgctacgaaggatgctctctcagtgttggagcgtgtcacaccatcaccagccgtgtggtggaatctactcgtaagagaacacatcaaggaaggccaccttgatagagcaattggtgtatcttgtcgcatgctgcgtgctggaactaagccagaccattttactctgccgtatgcgctgaaagcatgtggagagctaccttcatactgttgtggaagagcattacatggactcatatgttgcaatggatttgagtcaaatgtctttgtctgcaatgcattggtggcaatgtattcccgctgtggttctttggaggatgccagtctggtgtttgatgaaataacacggaagggaattgatgatgttatctcatggaattcaattgttgctgcccatgttaagggtagtaatccgcggactgcattagagctgttttcagagatgtcaatgattgttcacgaaaaagctacaaatgaaaggtcagatatcattagcattgtcaacattcttcctgcatgtgcttctctaaaggcattgcctcaaattaaggaaatccacagctatgccattcggaatggcacatttgcagatgcttttgtgtgcaatgctctgattgatacctatgcaaagtgtgggtcaatgaacgatgcggtaaaggttttcaatgtaatggaattcaaggatgtcgtttcttggaatgcaatggttactggatacacccaaagtgggaactttggggcagccttcgagcttttcgagaatatgcgcaaggaaaatatcccactagatgtcataacgtggagtgctgtaattgcagggtatgctcagagggggtgtagccaagaggcccttgatgcattccagcaaatgattcttgatggttcagagccaaattctgtcactatcatctctctattgtctgcttgcgcttccttgggagcattgtctcagggcatggaaattcatgcatactctctgaagaagtgtcttttatccttggataatgattttggtggtgacggtgacggtgaggatctaatggtgtacaatgcattaatagatatgtactcaaagtgcagaagtttcaaagctgcacgctccatatttgattccatacctcgaagagaacgtaatgtggtgacttggaccgtcatgattggtggatatgcacaatatggagactcaaatgatgccctcaagattttctcagagatgatttcaaaaccatacgcagttgccccaaatgcttatacaatttcctgcattttgatggcctgtgcacatctggcagctcttcgtatgggtaagcagattcacgcttatgtcacccgtcaccatgaatatgaaccatctgtgtactttgtggcaaattgccttattgatatgtactcaaagtgtggtgatgttgatactgctagaaatgtatttgatagcatgcctaaaaggaatgaagtatcttggacttcaatgatgtcagggtatggaatgcatggtcgtggtaaggaggctttagacatatttgacaagatgcagaaggcaggctttgttcctgatgatatttccttcctggttcttctttatgcttgtagccattctggcatggtggatcaaggtctgaattactttgatatcatgcgcagggattatgatgtagttgccagtgcagagcattatgcttgtgttattgacttactggctcgctgtgggcgattagataaggcatggaaaacaattcaggaaatgccaatggagcctagtgcagttatctgggttgcattacttagtgcctgtagagttcattcgaatgtggaacttgctgaatatgctctgaacaaactggtcaatatgaaagcagagaatgatggatcctacacacttatctccaacatatatgctaatgcaaggcggtggaaagatgtagcaagaatcagacaattaatgaagaaatcagggattaagaagaggccaggatgcagctgggtccaaggtaagaagggtactgcatcattctttgttggagatcgatcacaccctctatctccagagatatattctcttttagagagattaattggccgcatcaaggttatgggttatgtccccgagacaaactttgcactgcatgatgttgatgacgaggagaaaaataatcttctcagtgaacacagcgagaagcttgctctcgcatatgggctcctcacgacttcccctggttgtcccatacggatcacaaagaaccttcgtgtttgcggtgattgtcatagtgcattcacctacatctccaagattgttgaccatgagatcattgtacgagattccagtcgcttccatcatttcaagaatggctcttgttcctgtggtggctattggtgataccttgttctgtgaaagcagcaggggtggattcaggccctgggccacctgggccatgacgtaaatgcctagggtttcagagatgaacagggcaactcatgagctgggcagcgggagacaagcggcgcgtgggagcgggagcgaggtgacgagcgggcggcacgggctgcaggccgacggccaacgggactcgggagcctagcccagagccacaagataacgcaggcgggagatactagcgcgtgcagcaaccaggtctagaagaaaggaagcccagctttatcctggagccaagaagccgaggtgagattgtggttggactggaagggagcgagggagcagccaggcatggaggagcctgttccggctgatccccaagattttcttgaagccaaggagatcaggttcagggatcagatatgagcaataataatcttgaggcagtgacactccttataatcttccttcgaatctccagagcttgtgagtcatttagttatgtttatatgtgtacttaactattcccatttatgttttaaaaatatttttgggggtcttacttacctgctatttagaaatcttgttgtaaataacttcatgtgggacagtaccttactccatcttccccttactgacttgtaagttcatccttaccacctactctatttacaagtttacgttcttaaaccaacatttagcaatctttgcagaaatgtcaaaaacaaccaattcaccggttgagtacctgataaactaaaggggatcgataatctccaataagtacctttactgcaacagttgtggtgacttttatttgacacactatgttttgtataaaaccggctcagggcttttttaaatcctagatccgccaccgtccgcaagggtgaagcagctgtccttcctaaggttatgccctttgttcctagttcttctctgctttagtttattatgtatgtctaaaggtatttctttttcaaatttagttgtcatcagctgtttgaggatttgttaaactgctggtcaaatttcttagctgtagaatggatgaaagggaggagagcgctcacatccggtcgaccggtcgttttggtggaacgggagcatttcaactatttatgaatgtcatcccaagccaggcttctttgctttgtggtgactgccattgcaaagctagcaacatgccatattgagttgcttcgggaagcacgggtgtcattgggtaagtttgctcgttcccgaacctcagacaggagagtctggcaatgggcctgtgactatttagggctcatgaatgaaccagccatctgtttatcagtactgggaccgtccactgcccaaggtaatggtcctggtgttgtgcattggcgtggaggaggaacagcgatggtagttcacgttccttttttaccttttagcagagcaaaaaggtaaaaattctgcaagcacttctttagttaaatgtggaataagcatcctttcatattctttaagggagctgtatatatgcttacaatctgagcacagcgatgtgaaatatttgcactttgactgaggtactaaaactgaagtgtcatagcatcaaggggagacactagctaaacaaacctgttgtttgcttatgtaaaatatcatgcttgttttgtatctattggtagttcataatattatcttatatagaaaatgccaaagtttgtattgcaggtccaccgtttcatgattttcatttaccgacctcctcccaacaaaatgaagatcggttcagtctggcatgatttctctagcagaatgccttgtgcatatatatagcgaccttattttgtgatcgtagcgacgtagcatgctgaagatccaagctccttttcgagaaaaggtctggtctggacatccaagcagagagtcttgtacacatggttgactatttcagaggcacactcaggtgcacccgtgtttgtacatggagcgcctgattggctaattggatgagcgtcgcgtggctttacgctgcagctgctcgtgcagtctctgccttgtgtatataggaaccaaacactgtcatgcgtcataaagattaaagagctgttttgtatgaaatacatgctcagatgtgatacctggtgacgaaatctcagacatcgagttggcattgctaaggaatgaagccatattatattactcagcaagtcagcaggcatgcttat

SEQ ID NO: 15162 - DNA, 6096 bp, Zea Mays
cagaagcctccacctctgcggtcatgagggtcatctaaccttttcacagctccagcgaatgcacacagccgccgtcgtttcttcgtcttcctctcagcgccggcgctcccactcgtgctccctcccccactcgcgctcggcacgcaggccacgcggcggcgctcaggctcgggatatcagcgacggcggggcggtcccaggcttgtcgtcttcgtcagcggctccccctcctgcctctcgccaatcgcctcgcgccctcgcctctggttctccgcacacagcccggcgaccctgcgtgcgcccctaccgcctccggtggaccatcgacggctcctggcccggcggctgcgctgcacgccgcgcgcggccggcgggcagcgggagctagcagccgctgctgcaccaaggcggtcgcgccgctttgggagcgcttttgccccaaagcgaagcattaccagtccgcttaacgcttcagcgcgctgaagcgtgcgtttagttccgctttttggaaccctgtgctgacttctctttcgaggatctagagcgcacaatgatattttgctagcgttatgctcttcaactcgccaaaatcagcaaaacgaataggagtacagttcctatcagttgcaagtgcagactgctttggtcgagatgtctctccgacgcactttgcatccctgttaaaggaatgcaggtctgtgaatacagttcgtcaaattcatcagaagataattgcttgcggccttctttcgtatccatcatctttgttgtctgtgccactcgcaccacttccatcacattcatatgtatcaccaaaatctttgggcaccggtgttgtagcttcctatcttgcttgtggtgctacgaaggatgctctctcagtgttggagcgtgtcacaccatcaccagccgtgtggtggaatctactcgtaagagaacacatcaaggaaggccaccttgatagagcaattggtgtatcttgtcgcatgctgcgtgctggaactaagccagaccattttactctgccgtatgcgctgaaagcatgtggagagctaccttcatactgttgtggaagagcattacatggactcatatgttgcaatggatttgagtcaaatgtctttgtctgcaatgcattggtggcaatgtattcccgctgtggttctttggaggatgccagtctggtgtttgatgaaataacacggaagggaattgatgatgttatctcatggaattcaattgttgctgcccatgttaagggtagtaatccgcggactgcattagagctgttttcagagatgtcaatgattgttcacgaaaaagctacaaatgaaaggtcagatatcattagcattgtcaacattcttcctgcatgtgcttctctaaaggcattgcctcaaattaaggaaatccacagctatgccattcggaatggcacatttgcagatgcttttgtgtgcaatgctctgattgatacctatgcaaagtgtgggtcaatgaacgatgcggtaaaggttttcaatgtaatggaattcaaggatgtcgtttcttggaatgcaatggttactggatacacccaaagtgggaactttggggcagccttcgagcttttcgagaatatgcgcaaggaaaatatcccactagatgtcataacgtggagtgctgtaattgcagggtatgctcagagggggtgtagccaagaggcccttgatgcattccagcaaatgattcttgatggttcagagccaaattctgtcactatcatctctctattgtctgcttgcgcttccttgggagcattgtctcagggcatggaaattcatgcatactctctgaagaagtgtcttttatccttggataatgattttggtggtgacggtgacggtgaggatctaatggtgtacaatgcattaatagatatgtactcaaagtgcagaagtttcaaagctgcacgctccatatttgattccatacctcgaagagaacgtaatgtggtgacttggaccgtcatgattggtggatatgcacaatatggagactcaaatgatgccctcaagattttctcagagatgatttcaaaaccatacgcagttgccccaaatgcttatacaatttcctgcattttgatggcctgtgcacatctggcagctcttcgtatgggtaagcagattcacgcttatgtcacccgtcaccatgaatatgaaccatctgtgtactttgtggcaaattgccttattgatatgtactcaaagtgtggtgatgttgatactgctagaaatgtatttgatagcatgcctaaaaggaatgaagtatcttggacttcaatgatgtcagggtatggaatgcatggtcgtggtaaggaggctttagacatatttgacaagatgcagaaggcaggctttgttcctgatgatatttccttcctggttcttctttatgcttgtagccattctggcatggtggatcaaggtctgaattactttgatatcatgcgcagggattatgatgtagttgccagtgcagagcattatgcttgtgttattgacttactggctcgctgtgggcgattagataaggcatggaaaacaattcaggaaatgccaatggagcctagtgcagttatctgggttgcattacttagtgcctgtagagttcattcgaatgtggaacttgctgaatatgctctgaacaaactggtcaatatgaaagcagagaatgatggatcctacacacttatctccaacatatatgctaatgcaaggcggtggaaagatgtagcaagaatcagacaattaatgaagaaatcagggattaagaagaggccaggatgcagctgggtccaaggtaagaagggtactgcatcattctttgttggagatcgatcacaccctctatctccagagatatattctcttttagagagattaattggccgcatcaaggttatgggttatgtccccgagacaaactttgcactgcatgatgttgatgacgaggagaaaaataatcttctcagtgaacacagcgagaagcttgctctcgcatatgggctcctcacgacttcccctggttgtcccatacggatcacaaagaaccttcgtgtttgcggtgattgtcatagtgcattcacctacatctccaagattgttgaccatgagatcattgtacgagattccagtcgcttccatcatttcaagaatggctcttgttcctgtggtggctattggtgataccttgttctgtgaaagcagcaggtgcagaagcaacactaatgttttccaagtgaaagaaatactaatgtgatcatgacttttctcaggactaatgtgttcatgacttcattataatgattcacgcagaattctgtttaccattatttctctctttgtttttagttcttctgtgacatacacctgcactggtgtttatgttgtttgtctctctttgttcatgtctaatgctgatatatttgaaggcataattcttatagatgatctgcacagtccactgttgttcattctcctgaataagccctgctgtttgagttgccattagaggttgattcttctctgattaataagtgataattatcatccttgtatcagatattcgcggtgcttgtgtcatgattttctaatggcttacgtttctacagaaactgagcatatttttcctttgcaaatttgaagactaattatctgtatcctctttctacctttcttgaatgcaatgttgtctttctacatttactatagcaagcacccaacctttgatcgatgggctggaaatttgtgtttttctttcatcaaaattgtttgtttcgattattcattctcaaagaaaacggtatttttagccattcagtctaatcacctcactattgtcttgtgtgagacttggagttaatttaatccataggtagttcactcaaattctgaaatgtaatttaaataaggtttgcttctatcagtcgaatctgtgaaagttgacatttttactaaggcagcaatttgtataattgctaaacttctccgcaagcaggggtggattcaggccctgggccacctgggccatgacgtaaatgcctagggtttcagagatgaacagggcaactcatgagctgggcagcgggagacaagcggcgcgtgggagcgggagcgaggtgacgagcgggcggcacgggctgcaggccgacggccaacgggactcgggagcctagcccagagccacaagataacgcaggcgggagatactagcgcgtgcagcaaccaggtctagaagaaaggaagcccagctttatcctggagccaagaagccgagggagcgagggagcagccaggcatggaggagcctgttccggctgatccccaagattttcttgaagccaaggagatcaggttcagggatcagatatgagcaataataatcttgaggcagtgacactccttataatcttccttcgaatctccagagcttgtgagtcatttagttatgtttatatgtgtacttaactattcccatttatgttttaaaaatatttttgggggtcttacttacctgctatttagaaatcttgttgtaaataacttcatgtgggacagtaccttactccatcttccccttactgacttgtaagttcatccttaccacctactctatttacaagtttacgttcttaaaccaacatttagcaatctttgcagaaatgtcaaaaacaaccaattcaccggttgagtacctgataaactaaaggggatcgataatctccaataagtacctttactgcaacagttgtggtgacttttatttgacacactatgttttgtataaaaccggctcagggcttttttaaatcctagatccgccaccgtccgcaagggtgaagcagctgtccttcctaaggttatgccctttgttcctagttcttctctgctttagtttattatgtatgtctaaaggtatttctttttcaaatttagttgtcatcagctgtttgaggatttgttaaactgctggtcaaatttcttagctgtagaatggatgaaagggaggagagcgctcacatccggtcgaccggtcgttttggtggaacgggagcatttcaactatttatggtaaatttttatatggagactctagtagccgctccggtcctcttttattggaaaccaaacatccaaaaataggaatgtagtcacttcattctccttcactcctcaaccaaacacacccaaagccaggagccaggatctaattcaattggtgcatcatctattcatctagaatgtcatcccaagccaggcttctttgctttgtggtgactgccattgcaaagctagcaacatgccatattgagttgcttcgggaagcacgggtgtcattggtttgctcgttcccgaacctcagacaggagagtctggcaatgggcctgtgactatttagggctcatgaatgaaccagccatctgtttatcagtactgggaccgtccactgcccaaggtaatggtcctggtgttgtgcattggcgtggaggaggaacagcgatggtagttcacgttccttttttaccttttagcagagcaaaaagtttgtattgcaggtccaccgtttcatgattttcatttaccgacctcctcccaacaaaatgaagatcggttcagtctggcatgatttctctagcagaatgccttgtgcatatatatagcgaccttattttgtgatcgtagcgacgtagcatgctgaagatccaagctccttttcgagaaaaggtctggtctggacatccaagcagagagtcttgtacacatggttgactatttcagaggcacactcaggtgcacccgtgtttgtacatggagcgcctgattggctaattggatgagcgtcgcgtggctttacgctgcagctgctcgtgcagtctctgccttgtgtatataggaaccaaacactgtcatgcgtcataaagattaaagagctgttttgtatgaaatacatgctcagatgtgatacctggtgacgaaatctcagacatcgagttggcattgctaaggaatgaagccatattatattactcagcaagtcagcaggcatgcttat

SEQ ID NO: 15163 - DNA, 6817 bp, Zea Mays
cagaagcctccacctctgcggtcatgagggtcatctaaccttttcacagctccagcgaatgcacacagccgccgtcgtttcttcgtcttcctctcagcgccggcgctcccactcgtgctccctcccccactcgcgctcggcacgcaggccacgcggcggcgctcaggctcgggatatcagcgacggcggggcggtcccaggcttgtcgtcttcgtcagcggctccccctcctgcctctcgccaatcgcctcgcgccctcgcctctggttctccgcacacagcccggcgaccctgcgtgcgcccctaccgcctccggtggaccatcgacggctcctggcccggcggctgcgctgcacgccgcgcgcggccggcgggcagcgggagctagcagccgctgctgcaccaaggcggtcgcgccgctttgggagcgcttttgccccaaagcgaagcattaccagtccgcttaacgcttcagcgcgctgaagcgtgcgtttagttccgctttttggaaccctgtgctgacttctctttcgaggatctagagcgcacaatgatattttgctagcgttatgctcttcaactcgccaaaatcagcaaaacgaataggagtacagttcctatcagttgcaagtgcagactgctttggtcgagatgtctctccgacgcactttgcatccctgttaaaggaatgcaggtctgtgaatacagttcgtcaaattcatcagaagataattgcttgcggccttctttcgtatccatcatctttgttgtctgtgccactcgcaccacttccatcacattcatatgtatcaccaaaatctttgggcaccggtgttgtagcttcctatcttgcttgtggtgctacgaaggatgctctctcagtgttggagcgtgtcacaccatcaccagccgtgtggtggaatctactcgtaagagaacacatcaaggaaggccaccttgatagagcaattggtgtatcttgtcgcatgctgcgtgctggaactaagccagaccattttactctgccgtatgcgctgaaagcatgtggagagctaccttcatactgttgtggaagagcattacatggactcatatgttgcaatggatttgagtcaaatgtctttgtctgcaatgcattggtggcaatgtattcccgctgtggttctttggaggatgccagtctggtgtttgatgaaataacacggaagggaattgatgatgttatctcatggaattcaattgttgctgcccatgttaagggtagtaatccgcggactgcattagagctgttttcagagatgtcaatgattgttcacgaaaaagctacaaatgaaaggtcagatatcattagcattgtcaacattcttcctgcatgtgcttctctaaaggcattgcctcaaattaaggaaatccacagctatgccattcggaatggcacatttgcagatgcttttgtgtgcaatgctctgattgatacctatgcaaagtgtgggtcaatgaacgatgcggtaaaggttttcaatgtaatggaattcaaggatgtcgtttcttggaatgcaatggttactggatacacccaaagtgggaactttggggcagccttcgagcttttcgagaatatgcgcaaggaaaatatcccactagatgtcataacgtggagtgctgtaattgcagggtatgctcagagggggtgtagccaagaggcccttgatgcattccagcaaatgattcttgatggttcagagccaaattctgtcactatcatctctctattgtctgcttgcgcttccttgggagcattgtctcagggcatggaaattcatgcatactctctgaagaagtgtcttttatccttggataatgattttggtggtgacggtgacggtgaggatctaatggtgtacaatgcattaatagatatgtactcaaagtgcagaagtttcaaagctgcacgctccatatttgattccatacctcgaagagaacgtaatgtggtgacttggaccgtcatgattggtggatatgcacaatatggagactcaaatgatgccctcaagattttctcagagatgatttcaaaaccatacgcagttgccccaaatgcttatacaatttcctgcattttgatggcctgtgcacatctggcagctcttcgtatgggtaagcagattcacgcttatgtcacccgtcaccatgaatatgaaccatctgtgtactttgtggcaaattgccttattgatatgtactcaaagtgtggtgatgttgatactgctagaaatgtatttgatagcatgcctaaaaggaatgaagtatcttggacttcaatgatgtcagggtatggaatgcatggtcgtggtaaggaggctttagacatatttgacaagatgcagaaggcaggctttgttcctgatgatatttccttcctggttcttctttatgcttgtagccattctggcatggtggatcaaggtctgaattactttgatatcatgcgcagggattatgatgtagttgccagtgcagagcattatgcttgtgttattgacttactggctcgctgtgggcgattagataaggcatggaaaacaattcaggaaatgccaatggagcctagtgcagttatctgggttgcattacttagtgcctgtagagttcattcgaatgtggaacttgctgaatatgctctgaacaaactggtcaatatgaaagcagagaatgatggatcctacacacttatctccaacatatatgctaatgcaaggcggtggaaagatgtagcaagaatcagacaattaatgaagaaatcagggattaagaagaggccaggatgcagctgggtccaaggtaagaagggtactgcatcattctttgttggagatcgatcacaccctctatctccagagatatattctcttttagagagattaattggccgcatcaaggttatgggttatgtccccgagacaaactttgcactgcatgatgttgatgacgaggagaaaaataatcttctcagtgaacacagcgagaagcttgctctcgcatatgggctcctcacgacttcccctggttgtcccatacggatcacaaagaaccttcgtgtttgcggtgattgtcatagtgcattcacctacatctccaagattgttgaccatgagatcattgtacgagattccagtcgcttccatcatttcaagaatggctcttgttcctgtggtggctattggtgataccttgttctgtgaaagcagcaggtgcagaagcaacactaatgttttccaagtgaaagaaatactaatgtgatcatgacttttctcaggactaatgtgttcatgacttcattataatgattcacgcagaattctgtttaccattatttctctctttgtttttagttcttctgtgacatacacctgcactggtgtttatgttgtttgtctctctttgttcatgtctaatgctgatatatttgaaggcataattcttatagatgatctgcacagtccactgttgttcattctcctgaataagccctgctgtttgagttgccattagaggttgattcttctctgattaataagtgataattatcatccttgtatcagatattcgcggtgcttgtgtcatgattttctaatggcttacgtttctacagaaactgagcatatttttcctttgcaaatttgaagactaattatctgtatcctctttctacctttcttgaatgcaatgttgtctttctacatttactatagcaagcacccaacctttgatcgatgggctggaaatttgtgtttttctttcatcaaaattgtttgtttcgattattcattctcaaagaaaacggtatttttagccattcagtctaatcacctcactattgtcttgtgtgagacttggagttaatttaatccataggtagttcactcaaattctgaaatgtaatttaaataaggtttgcttctatcagtcgaatctgtgaaagttgacatttttactaaggcagcaatttgtataattgctaaacttctccgcaagcaggggtggattcaggccctgggccacctgggccatgacgtaaatgcctagggtttcagagatgaacagggcaactcatgagctgggcagcgggagacaagcggcgcgtgggagcgggagcgaggtgacgagcgggcggcacgggctgcaggccgacggccaacgggactcgggagcctagcccagagccacaagataacgcaggcgggagatactagcgcgtgcagcaaccaggtctagaagaaaggaagcccagctttatcctggagccaagaagccgagggagcgagggagcagccaggcatggaggagcctgttccggctgatccccaagattttcttgaagccaaggagatcaggttcaggtgcctgcttgtctcaattcatgttactgcatacaaaatcttgctgatttcaactgtttttttttgcccctgaagaatcgttttctcgagttctcgtggcttatccatccttttatctgtttctcactttctctgttcttggaagacgctaatttcagctcagttctctgcaaatttctctgtaataaagtttatatagctatgtagttagaatcacactaaacactgttaactttagcaaatttcttagaatatgttaatcacgcattcacacacccgtgctactaaactgctattggtagctaacaaaccatttggtggttcacggcactggtcatttcaattcctcgcactagttcagttgtaagtgagatctcatgagctcgaaaatctcaatccttggatgtttacagacaacatgccattgttcacttttaatttaattttagtgttctgcagggatcagatatgagcaataataatcttgaggcagtgacactccttataatcttccttcgaatctccagagcttgtgagtcatttagttatgtttatatgtgtacttaactattcccatttatgttttaaaaatatttttgggggtcttacttacctgctatttagaaatcttgttgtaaataacttcatgtgggacagtaccttactccatcttccccttactgacttgtaagttcatccttaccacctactctatttacaagtttacgttcttaaaccaacatttagcaatctttgcagaaatgtcaaaaacaaccaattcaccggttgagtacctgataaactaaaggggatcgataatctccaataagtacctttactgcaacagttgtggtgacttttatttgacacactatgttttgtataaaaccggctcagggcttttttaaatcctagatccgccaccgtccgcaagggtgaagcagctgtccttcctaaggttatgccctttgttcctagttcttctctgctttagtttattatgtatgtctaaaggtatttctttttcaaatttagttgtcatcagctgtttgaggatttgttaaactgctggtcaaatttcttagctgtagaatggatgaaagggaggagagcgctcacatccggtcgaccggtcgttttggtggaacgggagcatttcaactatttatggtaaatttttatatggagactctagtagccgctccggtcctcttttattggaaaccaaacatccaaaaataggaatgtagtcacttcattctccttcactcctcaaccaaacacacccaaagccaggagccaggatctaattcaattggtgcatcatctattcatctagaatgtcatcccaagccaggcttctttgctttgtggtgactgccattgcaaagctagcaacatgccatattgagttgcttcgggaagcacgggtgtcattggtttgctcgttcccgaacctcagacaggagagtctggcaatgggcctgtgactatttagggctcatgaatgaaccagccatctgtttatcagtactgggaccgtccactgcccaaggtaatggtcctggtgttgtgcattggcgtggaggaggaacagcgatggtagttcacgttccttttttaccttttagcagagcaaaaaggtaaaaattctgcaagcacttctttagttaaatgtggaataagcatcctttcatattctttaagggagctgtatatatgcttacaatctgagcacagcgatgtgaaatatttgcactttgactgaggtactaaaactgaagtgtcatagcatcaaggggagacactagctaaacaaacctgttgtttgcttatgtaaaatatcatgcttgttttgtatctattggtagttcataatattatcttatatagaaaatgccaaagtttgtattgcaggtccaccgtttcatgattttcatttaccgacctcctcccaacaaaatgaagatcggttcagtctggcatgatttctctagcagaatgccttgtgcatatatatagcgaccttattttgtgatcgtagcgacgtagcatgctgaagatccaagctccttttcgagaaaaggtctggtctggacatccaagcagagagtcttgtacacatggttgactatttcagaggcacactcaggtgcacccgtgtttgtacatggagcgcctgattggctaattggatgagcgtcgcgtggctttacgctgcagctgctcgtgcagtctctgccttgtgtatataggaaccaaacactgtcatgcgtcataaagattaaagagctgttttgtatgaaatacatgctcagatgtgatacctggtgacgaaatctcagacatcgagttggcattgctaaggaatgaagccatattatattactcagcaagtcagcaggcatgcttat

SEQ ID NO: 15164 - DNA, 6019 bp, Zea Mays
cagaagcctccacctctgcggtcatgagggtcatctaaccttttcacagctccagcgaatgcacacagccgccgtcgtttcttcgtcttcctctcagcgccggcgctcccactcgtgctccctcccccactcgcgctcggcacgcaggccacgcggcggcgctcaggctcgggatatcagcgacggcggggcggtcccaggcttgtcgtcttcgtcagcggctccccctcctgcctctcgccaatcgcctcgcgccctcgcctctggttctccgcacacagcccggcgaccctgcgtgcgcccctaccgcctccggtggaccatcgacggctcctggcccggcggctgcgctgcacgccgcgcgcggccggcgggcagcgggagctagcagccgctgctgcaccaaggcggtcgcgccgctttgggagcgcttttgccccaaagcgaagcattaccagtccgcttaacgcttcagcgcgctgaagcgtgcgtttagttccgctttttggaaccctgtgctgacttctctttcgaggatctagagcgcacaatgatattttgctagcgttatgctcttcaactcgccaaaatcagcaaaacgaataggagtacagttcctatcagttgcaagtgcagactgctttggtcgagatgtctctccgacgcactttgcatccctgttaaaggaatgcaggtctgtgaatacagttcgtcaaattcatcagaagataattgcttgcggccttctttcgtatccatcatctttgttgtctgtgccactcgcaccacttccatcacattcatatgtatcaccaaaatctttgggcaccggtgttgtagcttcctatcttgcttgtggtgctacgaaggatgctctctcagtgttggagcgtgtcacaccatcaccagccgtgtggtggaatctactcgtaagagaacacatcaaggaaggccaccttgatagagcaattggtgtatcttgtcgcatgctgcgtgctggaactaagccagaccattttactctgccgtatgcgctgaaagcatgtggagagctaccttcatactgttgtggaagagcattacatggactcatatgttgcaatggatttgagtcaaatgtctttgtctgcaatgcattggtggcaatgtattcccgctgtggttctttggaggatgccagtctggtgtttgatgaaataacacggaagggaattgatgatgttatctcatggaattcaattgttgctgcccatgttaagggtagtaatccgcggactgcattagagctgttttcagagatgtcaatgattgttcacgaaaaagctacaaatgaaaggtcagatatcattagcattgtcaacattcttcctgcatgtgcttctctaaaggcattgcctcaaattaaggaaatccacagctatgccattcggaatggcacatttgcagatgcttttgtgtgcaatgctctgattgatacctatgcaaagtgtgggtcaatgaacgatgcggtaaaggttttcaatgtaatggaattcaaggatgtcgtttcttggaatgcaatggttactggatacacccaaagtgggaactttggggcagccttcgagcttttcgagaatatgcgcaaggaaaatatcccactagatgtcataacgtggagtgctgtaattgcagggtatgctcagagggggtgtagccaagaggcccttgatgcattccagcaaatgattcttgatggttcagagccaaattctgtcactatcatctctctattgtctgcttgcgcttccttgggagcattgtctcagggcatggaaattcatgcatactctctgaagaagtgtcttttatccttggataatgattttggtggtgacggtgacggtgaggatctaatggtgtacaatgcattaatagatatgtactcaaagtgcagaagtttcaaagctgcacgctccatatttgattccatacctcgaagagaacgtaatgtggtgacttggaccgtcatgattggtggatatgcacaatatggagactcaaatgatgccctcaagattttctcagagatgatttcaaaaccatacgcagttgccccaaatgcttatacaatttcctgcattttgatggcctgtgcacatctggcagctcttcgtatgggtaagcagattcacgcttatgtcacccgtcaccatgaatatgaaccatctgtgtactttgtggcaaattgccttattgatatgtactcaaagtgtggtgatgttgatactgctagaaatgtatttgatagcatgcctaaaaggaatgaagtatcttggacttcaatgatgtcagggtatggaatgcatggtcgtggtaaggaggctttagacatatttgacaagatgcagaaggcaggctttgttcctgatgatatttccttcctggttcttctttatgcttgtagccattctggcatggtggatcaaggtctgaattactttgatatcatgcgcagggattatgatgtagttgccagtgcagagcattatgcttgtgttattgacttactggctcgctgtgggcgattagataaggcatggaaaacaattcaggaaatgccaatggagcctagtgcagttatctgggttgcattacttagtgcctgtagagttcattcgaatgtggaacttgctgaatatgctctgaacaaactggtcaatatgaaagcagagaatgatggatcctacacacttatctccaacatatatgctaatgcaaggcggtggaaagatgtagcaagaatcagacaattaatgaagaaatcagggattaagaagaggccaggatgcagctgggtccaaggtaagaagggtactgcatcattctttgttggagatcgatcacaccctctatctccagagatatattctcttttagagagattaattggccgcatcaaggttatgggttatgtccccgagacaaactttgcactgcatgatgttgatgacgaggagaaaaataatcttctcagtgaacacagcgagaagcttgctctcgcatatgggctcctcacgacttcccctggttgtcccatacggatcacaaagaaccttcgtgtttgcggtgattgtcatagtgcattcacctacatctccaagattgttgaccatgagatcattgtacgagattccagtcgcttccatcatttcaagaatggctcttgttcctgtggtggctattggtgataccttgttctgtgaaagcagcaggtgcagaagcaacactaatgttttccaagtgaaagaaatactaatgtgatcatgacttttctcaggactaatgtgttcatgacttcattataatgattcacgcagaattctgtttaccattatttctctctttgtttttagttcttctgtgacatacacctgcactggtgtttatgttgtttgtctctctttgttcatgtctaatgctgatatatttgaaggcataattcttatagatgatctgcacagtccactgttgttcattctcctgaataagccctgctgtttgagttgccattagaggttgattcttctctgattaataagtgataattatcatccttgtatcagatattcgcggtgcttgtgtcatgattttctaatggcttacgtttctacagaaactgagcatatttttcctttgcaaatttgaagactaattatctgtatcctctttctacctttcttgaatgcaatgttgtctttctacatttactatagcaagcacccaacctttgatcgatgggctggaaatttgtgtttttctttcatcaaaattgtttgtttcgattattcattctcaaagaaaacggtatttttagccattcagtctaatcacctcactattgtcttgtgtgagacttggagttaatttaatccataggtagttcactcaaattctgaaatgtaatttaaataaggtttgcttctatcagtcgaatctgtgaaagttgacatttttactaaggcagcaatttgtataattgctaaacttctccgcaagcaggggtggattcaggccctgggccacctgggccatgacgtaaatgcctagggtttcagagatgaacagggcaactcatgagctgggcagcgggagacaagcggcgcgtgggagcgggagcgaggtgacgagcgggcggcacgggctgcaggccgacggccaacgggactcgggagcctagcccagagccacaagataacgcaggcgggagatactagcgcgtgcagcaaccaggtctagaagaaaggaagcccagctttatcctggagccaagaagccgaggtgagattgtggttggactggaagggagcgagggagcagccaggcatggaggagcctgttccggctgatccccaagattttcttgaagccaaggagatcaggttcagggatcagatatgagcaataataatcttgaggcagtgacactccttataatcttccttcgaatctccagagcttgtgagtcatttagttatgtttatatgtgtacttaactattcccatttatgttttaaaaatatttttgggggtcttacttacctgctatttagaaatcttgttgtaaataacttcatgtgggacagtaccttactccatcttccccttactgacttaaatgtcaaaaacaaccaattcaccggttgagtacctgataaactaaaggggatcgataatctccaataagtacctttactgcaacagttgtggtgacttttatttgacacactatgttttgtataaaaccggctcagggcttttttaaatcctagatccgccaccgtccgcaagggtgaagcagctgtccttcctaagctgtagaatggatgaaagggaggagagcgctcacatccggtcgaccggtcgttttggtggaacgggagcatttcaactatttatgaatgtcatcccaagccaggcttctttgctttgtggtgactgccattgcaaagctagcaacatgccatattgagttgcttcgggaagcacgggtgtcattgggtaagtttgctcgttcccgaacctcagacaggagagtctggcaatgggcctgtgactatttagggctcatgaatgaaccagccatctgtttatcagtactgggaccgtccactgcccaaggtaatggtcctggtgttgtgcattggcgtggaggaggaacagcgatggtagttcacgttccttttttaccttttagcagagcaaaaaggtaaaaattctgcaagcacttctttagttaaatgtggaataagcatcctttcatattctttaagggagctgtatatatgcttacaatctgagcacagcgatgtgaaatatttgcactttgactgaggtactaaaactgaagtgtcatagcatcaaggggagacactagctaaacaaacctgttgtttgcttatgtaaaatatcatgcttgttttgtatctattggtagttcataatattatcttatatagaaaatgccaaagtttgtattgcaggtccaccgtttcatgattttcatttaccgacctcctcccaacaaaatgaagatcggttcagtctggcatgatttctctagcagaatgccttgtgcatatatatagcgaccttattttgtgatcgtagcgacgtagcatgctgaagatccaagctccttttcgagaaaaggtctggtctggacatccaagcagagagtcttgtacacatggttgactatttcagaggcacactcaggtgcacccgtgtttgtacatggagcgcctgattggctaattggatgagcgtcgcgtggctttacgctgcagctgctcgtgcagtctctgccttgtgtatataggaaccaaacactgtcatgcgtcataaagattaaagagctgttttgtatgaaatacatgctcagatgtgatacctggtgacgaaatctcagacatcgagttggcattgctaaggaatgaagccatattatattactcagcaagtcagcaggcatgcttat

SEQ ID NO: 15165 - DNA, 6042 bp, Zea Mays
cagaagcctccacctctgcggtcatgagggtcatctaaccttttcacagctccagcgaatgcacacagccgccgtcgtttcttcgtcttcctctcagcgccggcgctcccactcgtgctccctcccccactcgcgctcggcacgcaggccacgcggcggcgctcaggctcgggatatcagcgacggcggggcggtcccaggcttgtcgtcttcgtcagcggctccccctcctgcctctcgccaatcgcctcgcgccctcgcctctggttctccgcacacagcccggcgaccctgcgtgcgcccctaccgcctccggtggaccatcgacggctcctggcccggcggctgcgctgcacgccgcgcgcggccggcgggcagcgggagctagcagccgctgctgcaccaaggcggtcgcgccgctttgggagcgcttttgccccaaagcgaagcattaccagtccgcttaacgcttcagcgcgctgaagcgtgcgtttagttccgctttttggaaccctgtgctgacttctctttcgaggatctagagcgcacaatgatattttgctagcgttatgctcttcaactcgccaaaatcagcaaaacgaataggagtacagttcctatcagttgcaagtgcagactgctttggtcgagatgtctctccgacgcactttgcatccctgttaaaggaatgcaggtctgtgaatacagttcgtcaaattcatcagaagataattgcttgcggccttctttcgtatccatcatctttgttgtctgtgccactcgcaccacttccatcacattcatatgtatcaccaaaatctttgggcaccggtgttgtagcttcctatcttgcttgtggtgctacgaaggatgctctctcagtgttggagcgtgtcacaccatcaccagccgtgtggtggaatctactcgtaagagaacacatcaaggaaggccaccttgatagagcaattggtgtatcttgtcgcatgctgcgtgctggaactaagccagaccattttactctgccgtatgcgctgaaagcatgtggagagctaccttcatactgttgtggaagagcattacatggactcatatgttgcaatggatttgagtcaaatgtctttgtctgcaatgcattggtggcaatgtattcccgctgtggttctttggaggatgccagtctggtgtttgatgaaataacacggaagggaattgatgatgttatctcatggaattcaattgttgctgcccatgttaagggtagtaatccgcggactgcattagagctgttttcagagatgtcaatgattgttcacgaaaaagctacaaatgaaaggtcagatatcattagcattgtcaacattcttcctgcatgtgcttctctaaaggcattgcctcaaattaaggaaatccacagctatgccattcggaatggcacatttgcagatgcttttgtgtgcaatgctctgattgatacctatgcaaagtgtgggtcaatgaacgatgcggtaaaggttttcaatgtaatggaattcaaggatgtcgtttcttggaatgcaatggttactggatacacccaaagtgggaactttggggcagccttcgagcttttcgagaatatgcgcaaggaaaatatcccactagatgtcataacgtggagtgctgtaattgcagggtatgctcagagggggtgtagccaagaggcccttgatgcattccagcaaatgattcttgatggttcagagccaaattctgtcactatcatctctctattgtctgcttgcgcttccttgggagcattgtctcagggcatggaaattcatgcatactctctgaagaagtgtcttttatccttggataatgattttggtggtgacggtgacggtgaggatctaatggtgtacaatgcattaatagatatgtactcaaagtgcagaagtttcaaagctgcacgctccatatttgattccatacctcgaagagaacgtaatgtggtgacttggaccgtcatgattggtggatatgcacaatatggagactcaaatgatgccctcaagattttctcagagatgatttcaaaaccatacgcagttgccccaaatgcttatacaatttcctgcattttgatggcctgtgcacatctggcagctcttcgtatgggtaagcagattcacgcttatgtcacccgtcaccatgaatatgaaccatctgtgtactttgtggcaaattgccttattgatatgtactcaaagtgtggtgatgttgatactgctagaaatgtatttgatagcatgcctaaaaggaatgaagtatcttggacttcaatgatgtcagggtatggaatgcatggtcgtggtaaggaggctttagacatatttgacaagatgcagaaggcaggctttgttcctgatgatatttccttcctggttcttctttatgcttgtagccattctggcatggtggatcaaggtctgaattactttgatatcatgcgcagggattatgatgtagttgccagtgcagagcattatgcttgtgttattgacttactggctcgctgtgggcgattagataaggcatggaaaacaattcaggaaatgccaatggagcctagtgcagttatctgggttgcattacttagtgcctgtagagttcattcgaatgtggaacttgctgaatatgctctgaacaaactggtcaatatgaaagcagagaatgatggatcctacacacttatctccaacatatatgctaatgcaaggcggtggaaagatgtagcaagaatcagacaattaatgaagaaatcagggattaagaagaggccaggatgcagctgggtccaaggtaagaagggtactgcatcattctttgttggagatcgatcacaccctctatctccagagatatattctcttttagagagattaattggccgcatcaaggttatgggttatgtccccgagacaaactttgcactgcatgatgttgatgacgaggagaaaaataatcttctcagtgaacacagcgagaagcttgctctcgcatatgggctcctcacgacttcccctggttgtcccatacggatcacaaagaaccttcgtgtttgcggtgattgtcatagtgcattcacctacatctccaagattgttgaccatgagatcattgtacgagattccagtcgcttccatcatttcaagaatggctcttgttcctgtggtggctattggtgataccttgttctgtgaaagcagcaggtgcagaagcaacactaatgttttccaagtgaaagaaatactaatgtgatcatgacttttctcaggactaatgtgttcatgacttcattataatgattcacgcagaattctgtttaccattatttctctctttgtttttagttcttctgtgacatacacctgcactggtgtttatgttgtttgtctctctttgttcatgtctaatgctgatatatttgaaggcataattcttatagatgatctgcacagtccactgttgttcattctcctgaataagccctgctgtttgagttgccattagaggttgattcttctctgattaataagtgataattatcatccttgtatcagatattcgcggtgcttgtgtcatgattttctaatggcttacgtttctacagaaactgagcatatttttcctttgcaaatttgaagactaattatctgtatcctctttctacctttcttgaatgcaatgttgtctttctacatttactatagcaagcacccaacctttgatcgatgggctggaaatttgtgtttttctttcatcaaaattgtttgtttcgattattcattctcaaagaaaacggtatttttagccattcagtctaatcacctcactattgtcttgtgtgagacttggagttaatttaatccataggtagttcactcaaattctgaaatgtaatttaaataaggtttgcttctatcagtcgaatctgtgaaagttgacatttttactaaggcagcaatttgtataattgctaaacttctccgcaagcaggggtggattcaggccctgggccacctgggccatgacgtaaatgcctagggtttcagagatgaacagggcaactcatgagctgggcagcgggagacaagcggcgcgtgggagcgggagcgaggtgacgagcgggcggcacgggctgcaggccgacggccaacgggactcgggagcctagcccagagccacaagataacgcaggcgggagatactagcgcgtgcagcaaccaggtctagaagaaaggaagcccagctttatcctggagccaagaagccgagggagcgagggagcagccaggcatggaggagcctgttccggctgatccccaagattttcttgaagccaaggagatcaggttcagtgttctgcagggatcagatatgagcaataataatcttgaggcagtgacactccttataatcttccttcgaatctccagagcttgtgagtcatttagttatgtttatatgtgtacttaactattcccatttatgttttaaaaatatttttgggggtcttacttacctgctatttagaaatcttgttgtaaataacttcatgtgggacagtaccttactccatcttccccttactgacttgtaagttcatccttaccacctactctatttacaagtttacgttcttaaaccaacatttagcaatctttgcagaaatgtcaaaaacaaccaattcaccggttgagtacctgataaactaaaggggatcgataatctccaataagtacctttactgcaacagttgtggtgacttttatttgacacactatgttttgtataaaaccggctcagggcttttttaaatcctagatccgccaccgtccgcaagggtgaagcagctgtccttcctaaggttatgccctttgttcctagttcttctctgctttagtttattatgtatgtctaaaggtatttctttttcaaatttagttgtcatcagctgtttgaggatttgttaaactgctggtcaaatttcttagctgtagaatggatgaaagggaggagagcgctcacatccggtcgaccggtcgttttggtggaacgggagcatttcaactatttatgaatgtcatcccaagccaggcttctttgctttgtggtgactgccattgcaaagctagcaacatgccatattgagttgcttcgggaagcacgggtgtcattgggtaaggtactgacttgatccttgttgtgtagggtagatgatcagtgcatccatcattaagtatgttacttctcacagagcatcttaattgcttcatttcctgcagtttgctcgttcccgaacctcagacaggagagtctggcaatgggcctgtgactatttagggctcatgaatgaaccagccatctgtttatcagtactgggaccgtccactgcccaaggtaatggtcctggtgttgtgcattggcgtggaggaggaacagcgatggtagttcacgttccttttttaccttttagcagagcaaaaagtttgtattgcaggtccaccgtttcatgattttcatttaccgacctcctcccaacaaaatgaagatcggttcagtctggcatgatttctctagcagaatgccttgtgcatatatatagcgaccttattttgtgatcgtagcgacgtagcatgctgaagatccaagctccttttcgagaaaaggtctggtctggacatccaagcagagagtcttgtacacatggttgactatttcagaggcacactcaggtgcacccgtgtttgtacatggagcgcctgattggctaattggatgagcgtcgcgtggctttacgctgcagctgctcgtgcagtctctgccttgtgtatataggaaccaaacactgtcatgcgtcataaagattaaagagctgttttgtatgaaatacatgctcagatgtgatacctggtgacgaaatctcagacatcgagttggcattgctaaggaatgaagccatattatattactcagcaagtcagcaggcatgcttat

SEQ ID NO: 15166 - DNA, 6117 bp, Zea Mays
cagaagcctccacctctgcggtcatgagggtcatctaaccttttcacagctccagcgaatgcacacagccgccgtcgtttcttcgtcttcctctcagcgccggcgctcccactcgtgctccctcccccactcgcgctcggcacgcaggccacgcggcggcgctcaggctcgggatatcagcgacggcggggcggtcccaggcttgtcgtcttcgtcagcggctccccctcctgcctctcgccaatcgcctcgcgccctcgcctctggttctccgcacacagcccggcgaccctgcgtgcgcccctaccgcctccggtggaccatcgacggctcctggcccggcggctgcgctgcacgccgcgcgcggccggcgggcagcgggagctagcagccgctgctgcaccaaggcggtcgcgccgctttgggagcgcttttgccccaaagcgaagcattaccagtccgcttaacgcttcagcgcgctgaagcgtgcgtttagttccgctttttggaaccctgtgctgacttctctttcgaggatctagagcgcacaatgatattttgctagcgttatgctcttcaactcgccaaaatcagcaaaacgaataggagtacagttcctatcagttgcaagtgcagactgctttggtcgagatgtctctccgacgcactttgcatccctgttaaaggaatgcaggtctgtgaatacagttcgtcaaattcatcagaagataattgcttgcggccttctttcgtatccatcatctttgttgtctgtgccactcgcaccacttccatcacattcatatgtatcaccaaaatctttgggcaccggtgttgtagcttcctatcttgcttgtggtgctacgaaggatgctctctcagtgttggagcgtgtcacaccatcaccagccgtgtggtggaatctactcgtaagagaacacatcaaggaaggccaccttgatagagcaattggtgtatcttgtcgcatgctgcgtgctggaactaagccagaccattttactctgccgtatgcgctgaaagcatgtggagagctaccttcatactgttgtggaagagcattacatggactcatatgttgcaatggatttgagtcaaatgtctttgtctgcaatgcattggtggcaatgtattcccgctgtggttctttggaggatgccagtctggtgtttgatgaaataacacggaagggaattgatgatgttatctcatggaattcaattgttgctgcccatgttaagggtagtaatccgcggactgcattagagctgttttcagagatgtcaatgattgttcacgaaaaagctacaaatgaaaggtcagatatcattagcattgtcaacattcttcctgcatgtgcttctctaaaggcattgcctcaaattaaggaaatccacagctatgccattcggaatggcacatttgcagatgcttttgtgtgcaatgctctgattgatacctatgcaaagtgtgggtcaatgaacgatgcggtaaaggttttcaatgtaatggaattcaaggatgtcgtttcttggaatgcaatggttactggatacacccaaagtgggaactttggggcagccttcgagcttttcgagaatatgcgcaaggaaaatatcccactagatgtcataacgtggagtgctgtaattgcagggtatgctcagagggggtgtagccaagaggcccttgatgcattccagcaaatgattcttgatggttcagagccaaattctgtcactatcatctctctattgtctgcttgcgcttccttgggagcattgtctcagggcatggaaattcatgcatactctctgaagaagtgtcttttatccttggataatgattttggtggtgacggtgacggtgaggatctaatggtgtacaatgcattaatagatatgtactcaaagtgcagaagtttcaaagctgcacgctccatatttgattccatacctcgaagagaacgtaatgtggtgacttggaccgtcatgattggtggatatgcacaatatggagactcaaatgatgccctcaagattttctcagagatgatttcaaaaccatacgcagttgccccaaatgcttatacaatttcctgcattttgatggcctgtgcacatctggcagctcttcgtatgggtaagcagattcacgcttatgtcacccgtcaccatgaatatgaaccatctgtgtactttgtggcaaattgccttattgatatgtactcaaagtgtggtgatgttgatactgctagaaatgtatttgatagcatgcctaaaaggaatgaagtatcttggacttcaatgatgtcagggtatggaatgcatggtcgtggtaaggaggctttagacatatttgacaagatgcagaaggcaggctttgttcctgatgatatttccttcctggttcttctttatgcttgtagccattctggcatggtggatcaaggtctgaattactttgatatcatgcgcagggattatgatgtagttgccagtgcagagcattatgcttgtgttattgacttactggctcgctgtgggcgattagataaggcatggaaaacaattcaggaaatgccaatggagcctagtgcagttatctgggttgcattacttagtgcctgtagagttcattcgaatgtggaacttgctgaatatgctctgaacaaactggtcaatatgaaagcagagaatgatggatcctacacacttatctccaacatatatgctaatgcaaggcggtggaaagatgtagcaagaatcagacaattaatgaagaaatcagggattaagaagaggccaggatgcagctgggtccaaggtaagaagggtactgcatcattctttgttggagatcgatcacaccctctatctccagagatatattctcttttagagagattaattggccgcatcaaggttatgggttatgtccccgagacaaactttgcactgcatgatgttgatgacgaggagaaaaataatcttctcagtgaacacagcgagaagcttgctctcgcatatgggctcctcacgacttcccctggttgtcccatacggatcacaaagaaccttcgtgtttgcggtgattgtcatagtgcattcacctacatctccaagattgttgaccatgagatcattgtacgagattccagtcgcttccatcatttcaagaatggctcttgttcctgtggtggctattggtgataccttgttctgtgaaagcagcaggtgcagaagcaacactaatgttttccaagtgaaagaaatactaatgtgatcatgacttttctcaggactaatgtgttcatgacttcattataatgattcacgcagaattctgtttaccattatttctctctttgtttttagttcttctgtgacatacacctgcactggtgtttatgttgtttgtctctctttgttcatgtctaatgctgatatatttgaaggcataattcttatagatgatctgcacagtccactgttgttcattctcctgaataagccctgctgtttgagttgccattagaggttgattcttctctgattaataagtgataattatcatccttgtatcagatattcgcggtgcttgtgtcatgattttctaatggcttacgtttctacagaaactgagcatatttttcctttgcaaatttgaagactaattatctgtatcctctttctacctttcttgaatgcaatgttgtctttctacatttactatagcaagcacccaacctttgatcgatgggctggaaatttgtgtttttctttcatcaaaattgtttgtttcgattattcattctcaaagaaaacggtatttttagccattcagtctaatcacctcactattgtcttgtgtgagacttggagttaatttaatccataggtagttcactcaaattctgaaatgtaatttaaataaggtttgcttctatcagtcgaatctgtgaaagttgacatttttactaaggcagcaatttgtataattgctaaacttctccgcaagcaggggtggattcaggccctgggccacctgggccatgacgtaaatgcctagggtttcagagatgaacagggcaactcatgagctgggcagcgggagacaagcggcgcgtgggagcgggagcgaggtgacgagcgggcggcacgggctgcaggccgacggccaacgggactcgggagcctagcccagagccacaagataacgcaggcgggagatactagcgcgtgcagcaaccaggtctagaagaaaggaagcccagctttatcctggagccaagaagccgagggagcgagggagcagccaggcatggaggagcctgttccggctgatccccaagattttcttgaagccaaggagatcaggttcagggatcagatatgagcaataataatcttgaggcagtgacactccttataatcttccttcgaatctccagagcttgtgagtcatttagttatgtttatatgtgtacttaactattcccatttatgttttaaaaatatttttgggggtcttacttacctgctatttagaaatcttgttgtaaataacttcatgtgggacagtaccttactccatcttccccttactgacttaaatgtcaaaaacaaccaattcaccggttgagtacctgataaactaaaggggatcgataatctccaataagtacctttactgcaacagttgtggtgacttttatttgacacactatgttttgtataaaaccggctcagggcttttttaaatcctagatccgccaccgtccgcaagggtgaagcagctgtccttcctaaggttatgccctttgttcctagttcttctctgctttagtttattatgtatgtctaaaggtatttctttttcaaatttagttgtcatcagctgtttgaggatttgttaaactgctggtcaaatttcttagctgtagaatggatgaaagggaggagagcgctcacatccggtcgaccggtcgttttggtggaacgggagcatttcaactatttatgaatgtcatcccaagccaggcttctttgctttgtggtgactgccattgcaaagctagcaacatgccatattgagttgcttcgggaagcacgggtgtcattggtttgctcgttcccgaacctcagacaggagagtctggcaatgggcctgtgactatttagggctcatgaatgaaccagccatctgtttatcagtactgggaccgtccactgcccaaggtaatggtcctggtgttgtgcattggcgtggaggaggaacagcgatggtagttcacgttccttttttaccttttagcagagcaaaaaggtaaaaattctgcaagcacttctttagttaaatgtggaataagcatcctttcatattctttaagggagctgtatatatgcttacaatctgagcacagcgatgtgaaatatttgcactttgactgaggtactaaaactgaagtgtcatagcatcaaggggagacactagctaaacaaacctgttgtttgcttatgtaaaatatcatgcttgttttgtatctattggtagttcataatattatcttatatagaaaatgccaaagtttgtattgcaggtccaccgtttcatgattttcatttaccgacctcctcccaacaaaatgaagatcggttcagtctggcatgatttctctagcagaatgccttgtgcatatatatagcgaccttattttgtgatcgtagcgacgtagcatgctgaagatccaagctccttttcgagaaaaggtctggtctggacatccaagcagagagtcttgtacacatggttgactatttcagaggcacactcaggtgcacccgtgtttgtacatggagcgcctgattggctaattggatgagcgtcgcgtggctttacgctgcagctgctcgtgcagtctctgccttgtgtatataggaaccaaacactgtcatgcgtcataaagattaaagagctgttttgtatgaaatacatgctcagatgtgatacctggtgacgaaatctcagacatcgagttggcattgctaaggaatgaagccatattatattactcagcaagtcagcaggcatgcttat

SEQ ID NO: 15167 - DNA, 6030 bp, Zea Mays
cagaagcctccacctctgcggtcatgagggtcatctaaccttttcacagctccagcgaatgcacacagccgccgtcgtttcttcgtcttcctctcagcgccggcgctcccactcgtgctccctcccccactcgcgctcggcacgcaggccacgcggcggcgctcaggctcgggatatcagcgacggcggggcggtcccaggcttgtcgtcttcgtcagcggctccccctcctgcctctcgccaatcgcctcgcgccctcgcctctggttctccgcacacagcccggcgaccctgcgtgcgcccctaccgcctccggtggaccatcgacggctcctggcccggcggctgcgctgcacgccgcgcgcggccggcgggcagcgggagctagcagccgctgctgcaccaaggcggtcgcgccgctttgggagcgcttttgccccaaagcgaagcattaccagtccgcttaacgcttcagcgcgctgaagcgtgcgtttagttccgctttttggaaccctgtgctgacttctctttcgaggatctagagcgcacaatgatattttgctagcgttatgctcttcaactcgccaaaatcagcaaaacgaataggagtacagttcctatcagttgcaagtgcagactgctttggtcgagatgtctctccgacgcactttgcatccctgttaaaggaatgcaggtctgtgaatacagttcgtcaaattcatcagaagataattgcttgcggccttctttcgtatccatcatctttgttgtctgtgccactcgcaccacttccatcacattcatatgtatcaccaaaatctttgggcaccggtgttgtagcttcctatcttgcttgtggtgctacgaaggatgctctctcagtgttggagcgtgtcacaccatcaccagccgtgtggtggaatctactcgtaagagaacacatcaaggaaggccaccttgatagagcaattggtgtatcttgtcgcatgctgcgtgctggaactaagccagaccattttactctgccgtatgcgctgaaagcatgtggagagctaccttcatactgttgtggaagagcattacatggactcatatgttgcaatggatttgagtcaaatgtctttgtctgcaatgcattggtggcaatgtattcccgctgtggttctttggaggatgccagtctggtgtttgatgaaataacacggaagggaattgatgatgttatctcatggaattcaattgttgctgcccatgttaagggtagtaatccgcggactgcattagagctgttttcagagatgtcaatgattgttcacgaaaaagctacaaatgaaaggtcagatatcattagcattgtcaacattcttcctgcatgtgcttctctaaaggcattgcctcaaattaaggaaatccacagctatgccattcggaatggcacatttgcagatgcttttgtgtgcaatgctctgattgatacctatgcaaagtgtgggtcaatgaacgatgcggtaaaggttttcaatgtaatggaattcaaggatgtcgtttcttggaatgcaatggttactggatacacccaaagtgggaactttggggcagccttcgagcttttcgagaatatgcgcaaggaaaatatcccactagatgtcataacgtggagtgctgtaattgcagggtatgctcagagggggtgtagccaagaggcccttgatgcattccagcaaatgattcttgatggttcagagccaaattctgtcactatcatctctctattgtctgcttgcgcttccttgggagcattgtctcagggcatggaaattcatgcatactctctgaagaagtgtcttttatccttggataatgattttggtggtgacggtgacggtgaggatctaatggtgtacaatgcattaatagatatgtactcaaagtgcagaagtttcaaagctgcacgctccatatttgattccatacctcgaagagaacgtaatgtggtgacttggaccgtcatgattggtggatatgcacaatatggagactcaaatgatgccctcaagattttctcagagatgatttcaaaaccatacgcagttgccccaaatgcttatacaatttcctgcattttgatggcctgtgcacatctggcagctcttcgtatgggtaagcagattcacgcttatgtcacccgtcaccatgaatatgaaccatctgtgtactttgtggcaaattgccttattgatatgtactcaaagtgtggtgatgttgatactgctagaaatgtatttgatagcatgcctaaaaggaatgaagtatcttggacttcaatgatgtcagggtatggaatgcatggtcgtggtaaggaggctttagacatatttgacaagatgcagaaggcaggctttgttcctgatgatatttccttcctggttcttctttatgcttgtagccattctggcatggtggatcaaggtctgaattactttgatatcatgcgcagggattatgatgtagttgccagtgcagagcattatgcttgtgttattgacttactggctcgctgtgggcgattagataaggcatggaaaacaattcaggaaatgccaatggagcctagtgcagttatctgggttgcattacttagtgcctgtagagttcattcgaatgtggaacttgctgaatatgctctgaacaaactggtcaatatgaaagcagagaatgatggatcctacacacttatctccaacatatatgctaatgcaaggcggtggaaagatgtagcaagaatcagacaattaatgaagaaatcagggattaagaagaggccaggatgcagctgggtccaaggtaagaagggtactgcatcattctttgttggagatcgatcacaccctctatctccagagatatattctcttttagagagattaattggccgcatcaaggttatgggttatgtccccgagacaaactttgcactgcatgatgttgatgacgaggagaaaaataatcttctcagtgaacacagcgagaagcttgctctcgcatatgggctcctcacgacttcccctggttgtcccatacggatcacaaagaaccttcgtgtttgcggtgattgtcatagtgcattcacctacatctccaagattgttgaccatgagatcattgtacgagattccagtcgcttccatcatttcaagaatggctcttgttcctgtggtggctattggtgataccttgttctgtgaaagcagcaggtgcagaagcaacactaatgttttccaagtgaaagaaatactaatgtgatcatgacttttctcaggactaatgtgttcatgacttcattataatgattcacgcagaattctgtttaccattatttctctctttgtttttagttcttctgtgacatacacctgcactggtgtttatgttgtttgtctctctttgttcatgtctaatgctgatatatttgaaggcataattcttatagatgatctgcacagtccactgttgttcattctcctgaataagccctgctgtttgagttgccattagaggttgattcttctctgattaataagtgataattatcatccttgtatcagatattcgcggtgcttgtgtcatgattttctaatggcttacgtttctacagaaactgagcatatttttcctttgcaaatttgaagactaattatctgtatcctctttctacctttcttgaatgcaatgttgtctttctacatttactatagcaagcacccaacctttgatcgatgggctggaaatttgtgtttttctttcatcaaaattgtttgtttcgattattcattctcaaagaaaacggtatttttagccattcagtctaatcacctcactattgtcttgtgtgagacttggagttaatttaatccataggtagttcactcaaattctgaaatgtaatttaaataaggtttgcttctatcagtcgaatctgtgaaagttgacatttttactaaggcagcaatttgtataattgctaaacttctccgcaagcaggggtggattcaggccctgggccacctgggccatgacgtaaatgcctagggtttcagagatgaacagggcaactcatgagctgggcagcgggagacaagcggcgcgtgggagcgggagcgaggtgacgagcgggcggcacgggctgcaggccgacggccaacgggactcgggagcctagcccagagccacaagataacgcaggcgggagatactagcgcgtgcagcaaccaggtctagaagaaaggaagcccagctttatcctggagccaagaagccgagggagcgagggagcagccaggcatggaggagcctgttccggctgatccccaagattttcttgaagccaaggagatcaggttcagggatcagatatgagcaataataatcttgaggcagtgacactccttataatcttccttcgaatctccagagcttaaatcttgttgtaaataacttcatgtgggacagtaccttactccatcttccccttactgacttaaatgtcaaaaacaaccaattcaccggttgagtacctgataaactaaaggggatcgataatctccaataagtacctttactgcaacagttgtggtgacttttatttgacacactatgttttgtataaaaccggctcagggcttttttaaatcctagatccgccaccgtccgcaagggtgaagcagctgtccttcctaaggttatgccctttgttcctagttcttctctgctttagtttattatgtatgtctaaaggtatttctttttcaaatttagttgtcatcagctgtttgaggatttgttaaactgctggtcaaatttcttagctgtagaatggatgaaagggaggagagcgctcacatccggtcgaccggtcgttttggtggaacgggagcatttcaactatttatgaatgtcatcccaagccaggcttctttgctttgtggtgactgccattgcaaagctagcaacatgccatattgagttgcttcgggaagcacgggtgtcattgggtaagtttgctcgttcccgaacctcagacaggagagtctggcaatgggcctgtgactatttagggctcatgaatgaaccagccatctgtttatcagtactgggaccgtccactgcccaaggtaatggtcctggtgttgtgcattggcgtggaggaggaacagcgatggtagttcacgttccttttttaccttttagcagagcaaaaaggtaaaaattctgcaagcacttctttagttaaatgtggaataagcatcctttcatattctttaagggagctgtatatatgcttacaatctgagcacagcgatgtgaaatatttgcactttgactgaggtactaaaactgaagtgtcatagcatcaaggggagacactagctaaacaaacctgttgtttgcttatgtaaaatatcatgcttgttttgtatctattggtagttcataatattatcttatatagaaaatgccaaagtttgtattgcaggtccaccgtttcatgattttcatttaccgacctcctcccaacaaaatgaagatcggttcagtctggcatgatttctctagcagaatgccttgtgcatatatatagcgaccttattttgtgatcgtagcgacgtagcatgctgaagatccaagctccttttcgagaaaaggtctggtctggacatccaagcagagagtcttgtacacatggttgactatttcagaggcacactcaggtgcacccgtgtttgtacatggagcgcctgattggctaattggatgagcgtcgcgtggctttacgctgcagctgctcgtgcagtctctgccttgtgtatataggaaccaaacactgtcatgcgtcataaagattaaagagctgttttgtatgaaatacatgctcagatgtgatacctggtgacgaaatctcagacatcgagttggcattgctaaggaatgaagccatattatattactcagcaagtcagcaggcatgcttat

SEQ ID NO: 15168 - DNA, 6333 bp, Zea Mays
cagaagcctccacctctgcggtcatgagggtcatctaaccttttcacagctccagcgaatgcacacagccgccgtcgtttcttcgtcttcctctcagcgccggcgctcccactcgtgctccctcccccactcgcgctcggcacgcaggccacgcggcggcgctcaggctcgggatatcagcgacggcggggcggtcccaggcttgtcgtcttcgtcagcggctccccctcctgcctctcgccaatcgcctcgcgccctcgcctctggttctccgcacacagcccggcgaccctgcgtgcgcccctaccgcctccggtggaccatcgacggctcctggcccggcggctgcgctgcacgccgcgcgcggccggcgggcagcgggagctagcagccgctgctgcaccaaggcggtcgcgccgctttgggagcgcttttgccccaaagcgaagcattaccagtccgcttaacgcttcagcgcgctgaagcgtgcgtttagttccgctttttggaaccctgtgctgacttctctttcgaggatctagagcgcacaatgatattttgctagcgttatgctcttcaactcgccaaaatcagcaaaacgaataggagtacagttcctatcagttgcaagtgcagactgctttggtcgagatgtctctccgacgcactttgcatccctgttaaaggaatgcaggtctgtgaatacagttcgtcaaattcatcagaagataattgcttgcggccttctttcgtatccatcatctttgttgtctgtgccactcgcaccacttccatcacattcatatgtatcaccaaaatctttgggcaccggtgttgtagcttcctatcttgcttgtggtgctacgaaggatgctctctcagtgttggagcgtgtcacaccatcaccagccgtgtggtggaatctactcgtaagagaacacatcaaggaaggccaccttgatagagcaattggtgtatcttgtcgcatgctgcgtgctggaactaagccagaccattttactctgccgtatgcgctgaaagcatgtggagagctaccttcatactgttgtggaagagcattacatggactcatatgttgcaatggatttgagtcaaatgtctttgtctgcaatgcattggtggcaatgtattcccgctgtggttctttggaggatgccagtctggtgtttgatgaaataacacggaagggaattgatgatgttatctcatggaattcaattgttgctgcccatgttaagggtagtaatccgcggactgcattagagctgttttcagagatgtcaatgattgttcacgaaaaagctacaaatgaaaggtcagatatcattagcattgtcaacattcttcctgcatgtgcttctctaaaggcattgcctcaaattaaggaaatccacagctatgccattcggaatggcacatttgcagatgcttttgtgtgcaatgctctgattgatacctatgcaaagtgtgggtcaatgaacgatgcggtaaaggttttcaatgtaatggaattcaaggatgtcgtttcttggaatgcaatggttactggatacacccaaagtgggaactttggggcagccttcgagcttttcgagaatatgcgcaaggaaaatatcccactagatgtcataacgtggagtgctgtaattgcagggtatgctcagagggggtgtagccaagaggcccttgatgcattccagcaaatgattcttgatggttcagagccaaattctgtcactatcatctctctattgtctgcttgcgcttccttgggagcattgtctcagggcatggaaattcatgcatactctctgaagaagtgtcttttatccttggataatgattttggtggtgacggtgacggtgaggatctaatggtgtacaatgcattaatagatatgtactcaaagtgcagaagtttcaaagctgcacgctccatatttgattccatacctcgaagagaacgtaatgtggtgacttggaccgtcatgattggtggatatgcacaatatggagactcaaatgatgccctcaagattttctcagagatgatttcaaaaccatacgcagttgccccaaatgcttatacaatttcctgcattttgatggcctgtgcacatctggcagctcttcgtatgggtaagcagattcacgcttatgtcacccgtcaccatgaatatgaaccatctgtgtactttgtggcaaattgccttattgatatgtactcaaagtgtggtgatgttgatactgctagaaatgtatttgatagcatgcctaaaaggaatgaagtatcttggacttcaatgatgtcagggtatggaatgcatggtcgtggtaaggaggctttagacatatttgacaagatgcagaaggcaggctttgttcctgatgatatttccttcctggttcttctttatgcttgtagccattctggcatggtggatcaaggtctgaattactttgatatcatgcgcagggattatgatgtagttgccagtgcagagcattatgcttgtgttattgacttactggctcgctgtgggcgattagataaggcatggaaaacaattcaggaaatgccaatggagcctagtgcagttatctgggttgcattacttagtgcctgtagagttcattcgaatgtggaacttgctgaatatgctctgaacaaactggtcaatatgaaagcagagaatgatggatcctacacacttatctccaacatatatgctaatgcaaggcggtggaaagatgtagcaagaatcagacaattaatgaagaaatcagggattaagaagaggccaggatgcagctgggtccaaggtaagaagggtactgcatcattctttgttggagatcgatcacaccctctatctccagagatatattctcttttagagagattaattggccgcatcaaggttatgggttatgtccccgagacaaactttgcactgcatgatgttgatgacgaggagaaaaataatcttctcagtgaacacagcgagaagcttgctctcgcatatgggctcctcacgacttcccctggttgtcccatacggatcacaaagaaccttcgtgtttgcggtgattgtcatagtgcattcacctacatctccaagattgttgaccatgagatcattgtacgagattccagtcgcttccatcatttcaagaatggctcttgttcctgtggtggctattggtgataccttgttctgtgaaagcagcaggtgcagaagcaacactaatgttttccaagtgaaagaaatactaatgtgatcatgacttttctcaggactaatgtgttcatgacttcattataatgattcacgcagaattctgtttaccattatttctctctttgtttttagttcttctgtgacatacacctgcactggtgtttatgttgtttgtctctctttgttcatgtctaatgctgatatatttgaaggcataattcttatagatgatctgcacagtccactgttgttcattctcctgaataagccctgctgtttgagttgccattagaggggtggattcaggccctgggccacctgggccatgacgtaaatgcctagggtttcagagatgaacagggcaactcatgagctgggcagcgggagacaagcggcgcgtgggagcgggagcgaggtgacgagcgggcggcacgggctgcaggccgacggccaacgggactcgggagcctagcccagagccacaagataacgcaggcgggagatactagcgcgtgcagcaaccaggtctagaagaaaggaagcccagctttatcctggagccaagaagccgagggagcgagggagcagccaggcatggaggagcctgttccggctgatccccaagattttcttgaagccaaggagatcaggttcaggtgcctgcttgtctcaattcatgttactgcatacaaaatcttgctgatttcaactgtttttttttgcccctgaagaatcgttttctcgagttctcgtggcttatccatccttttatctgtttctcactttctctgttcttggaagacgctaatttcagctcagttctctgcaaatttctctgtaataaagtttatatagctatgtagttagaatcacactaaacactgttaactttagcaaatttcttagaatatgttaatcacgcattcacacacccgtgctactaaactgctattggtagctaacaaaccatttggtggttcacggcactggtcatttcaattcctcgcactagttcagttgtaagtgagatctcatgagctcgaaaatctcaatccttggatgtttacagacaacatgccattgttcacttttaatttaattttagtgttctgcagggatcagatatgagcaataataatcttgaggcagtgacactccttataatcttccttcgaatctccagagcttgtgagtcatttagttatgtttatatgtgtacttaactattcccatttatgttttaaaaatatttttgggggtcttacttacctgctatttagaaatcttgttgtaaataacttcatgtgggacagtaccttactccatcttccccttactgacttgtaagttcatccttaccacctactctatttacaagtttacgttcttaaaccaacatttagcaatctttgcagaaatgtcaaaaacaaccaattcaccggttgagtacctgataaactaaaggggatcgataatctccaataagtacctttactgcaacagttgtggtgacttttatttgacacactatgttttgtataaaaccggctcagggcttttttaaatcctagatccgccaccgtccgcaagggtgaagcagctgtccttcctaaggttatgccctttgttcctagttcttctctgctttagtttattatgtatgtctaaaggtatttctttttcaaatttagttgtcatcagctgtttgaggatttgttaaactgctggtcaaatttcttagctgtagaatggatgaaagggaggagagcgctcacatccggtcgaccggtcgttttggtggaacgggagcatttcaactatttatggtaaatttttatatggagactctagtagccgctccggtcctcttttattggaaaccaaacatccaaaaataggaatgtagtcacttcattctccttcactcctcaaccaaacacacccaaagccaggagccaggatctaattcaattggtgcatcatctattcatctagaatgtcatcccaagccaggcttctttgctttgtggtgactgccattgcaaagctagcaacatgccatattgagttgcttcgggaagcacgggtgtcattggtttgctcgttcccgaacctcagacaggagagtctggcaatgggcctgtgactatttagggctcatgaatgaaccagccatctgtttatcagtactgggaccgtccactgcccaaggtaatggtcctggtgttgtgcattggcgtggaggaggaacagcgatggtagttcacgttccttttttaccttttagcagagcaaaaaggtaaaaattctgcaagcacttctttagttaaatgtggaataagcatcctttcatattctttaagggagctgtatatatgcttacaatctgagcacagcgatgtgaaatatttgcactttgactgaggtactaaaactgaagtgtcatagcatcaaggggagacactagctaaacaaacctgttgtttgcttatgtaaaatatcatgcttgttttgtatctattggtagttcataatattatcttatatagaaaatgccaaagtttgtattgcaggtccaccgtttcatgattttcatttaccgacctcctcccaacaaaatgaagatcggttcagtctggcatgatttctctagcagaatgccttgtgcatatatatagcgaccttattttgtgatcgtagcgacgtagcatgctgaagatccaagctccttttcgagaaaaggtctggtctggacatccaagcagagagtcttgtacacatggttgactatttcagaggcacactcaggtgcacccgtgtttgtacatggagcgcctgattggctaattggatgagcgtcgcgtggctttacgctgcagctgctcgtgcagtctctgccttgtgtatataggaaccaaacactgtcatgcgtcataaagattaaagagctgttttgtatgaaatacatgctcagatgtgatacctggtgacgaaatctcagacatcgagttggcattgctaaggaatgaagccatattatattactcagcaagtcagcaggcatgcttat

SEQ ID NO: 15169 - DNA, 642 bp, Zea Mays
tttggctggccgagcgaaagcgccgacgaggacccatacgccgcggcgctgttccggacgatcatcggcggcatgtgcctcgccgggatcatcatttctccctctcagaacctctcgaaccctaattcctgccgcctcagtagcttctttccatttgttcactggcacatgcgtagtatctatctcccgcctcacggacaaagaacaggcggcgccaatcctattcctatatggagatgtataccttgcctgccaagtaacaacacgaccaacaacagatctagcgatcgacaaggtagcccagacaaccttcgctgcgagctgacgactggcagtgagatctagcagaagagctacatatgttcgtgtgcctatgcaaaaatagaactccgatcgatctctggctgcatgcagctctcaaggcgtgcgtgcagcaaaaactttgcaagctcagaagggtagctagcaggaggtggcgagataagccgggaggagactagcttgagaagctataggcggccatggaaggggaggcgaggaggaggaggaagaggaggagaggaaaggggaacgggcggaggtggaagagaatgtggagaagggaggaaggagttattgcgaacgagttgaggtggtgcaatc

SEQ ID NO: 15170 - DNA, 993 bp, Zea Mays
gccgcctgtaacaaccaacaaacacccctgggcaagaaggaacacaccaatccacagaaagctgccgtcgtcttccaaccaatcgggaccccaatggcgccttttggcctccagatttgtccgcaaattcagttcatcagttggttcgccttctctccagatctccagtacacacacccgaacgtgcttccacaagatcgcctcgcctgcatgcccagtgccagtgacacccggcttctcctctcctccatttcaattcctcacttcaaagacgctgcacgcctgcctgcctgcctgcgcgctggggggctcactgtcactggtcaccgtcaacactgcatcaatcttcgggcatgtgtgcatggacccatatactgaccatctgagcaacgagacaagcacacatttaacaatgcagggccccgtccagctgcgcccgtcggaccggagagtccttgcgcgagggttcccttctctctgcacaagaaaatgggaggaaggaaaggatgagtgttgatcattccaatctcctcctcattatgagagtcaactgctagcttctcaactaagctgggttaggtgcctagtgtacctagcaaacggatttcagtttcaacaataatacagtactgccatctggtaactaggtttcgttatcattggacaaatgtgtgcactcaatgtcaaatgaagaaatgagcgctacaaagctagacggggctatgatctgacagatggtaccatcttcaggcttcgtttggaaggaaccaggattttattttgtcaagaacagaatcacaagtgcttacttgttgactgttgctatgagagagcctgcttattgtgatcttccttttctttttcacattcctcttgttcagagcagcacgggccatgcttccaaagtcctttcccatcacccctcgctgtctttccttggatgcaagtgttttctacaagtcctgtcgacacaaacgaaactccttcacgagc

SEQ ID NO: 15171 - DNA, 50 bp, Zea Mays
ccaccagaatggggtcatagagcacctccaatggtccctagagacttctg

SEQ ID NO: 15172 - DNA, 4265 bp, Zea Mays
cggaggtagtactgtataccactgtacatgtacatatgcgtgcgctatactatatacgaatagcatagagccagtcaataacacacgcaactcacaagaagattctcagggagggatttctcaactgtattctactcgcaaacagtttaaatatacatactcatgtgctgctgccgctgctaccgactagtcggttcatccactataggagtaataggacctgtatatatatccacagactctagcgaacgttcttcactcccatcccatattcccatccggaaaacaaagcagcaccagcacaacagatcgatagcaagagctgccgctgcaactcctactgtttcttccggccgggcactaccggtcagaacaatggataacaaatcagcctcctcctcgtgcgtcatcaccccggcggccacgtccaccatgtcatcagccggcggcgagagcagctgggccgtgcacatcgcgaacttcctggcctccatgccgcaagacgacatcgcaacgacggatgatccgcaagcggcggtctctggcggcggcggcagcttctcttcttccttcgattcctttggcgacgccgacgcctcctcctttatcacgtctcagctcatgtgcggcggcgacgacgacgagtccctacaggacaccgcctgctcttctgcagctggccaaaagatggctaccatggagagtttcggcttgaagcaaatggcagccatggatggcgcgaaagagtccaacatgccccaccacctgcagctcatggccaagtacgtggaagctgtgggttcaaaacagcaggtgactggcgtgggggatcaacaagccatcaacagttcaagtaatagcgagaaggcgctgctgtgtgagagcaatgagctgaggaagagagggctttgcttggtccctatctctatgttgatagactatctcggatgattctttctcatgtatagtataccaccagcagtatattcaatacagcgcgctgttatggttcatacatcacgcccttctgtcagctgacagggacctactccaatatagctagctgttgagctgtctggtcatatatatacctttcaaataaaaggacaaattaaaacatatatccaactactattgggaaacaacaacaaaaaagcaaagcaggtattaaagttgacgcactgaggaaaaacttcgtatagcggaccatactaagggttgatttggtgatcagggaattggaggagatccatggggaggaatctccttgttattcaattttaaatagcaaggggatttcttcccatgaatcccctccaattcactggtcaccaaaccagccctaatgtttcggtaaaccctccagtgcaattatttgtcagcttccattccatgcaagtaactgatgaaaacatatgtacctcgtctcagcgattagtagatcaacataacagcttaattagcgctagggtgtgaactaacaaaacgagcagtttaagaaagtaattagctgcaaggctcagtcgaccagtctgcagtccacatggatagagggatgattcccttacgttacgtctgtccacactcagtagttgtatgtatggtgaccaacgaactagacgcgagctgtaataatactgacctcatgtcacgaggaagctagcagttctttaatgagtggctgatgccaaaaaacccgctcaatcagtcagaataagcacaaggggcatcgctgaccttccagaaatactaagtcctgactaaaccaaaacaagcaattaataataagtgctcatcgaattagttcagttcaataattttacataccttctgcagaggttgcaactagccaacgtacgtacttctgtagcagaataagatatttgcatgtgctatcacagggagacagttagcatccaccgagtggacctggaattctggacagtgcaagaatattctgctcagtgctcctgaaccgtatggtgcatttctcattttataggacgtgagtgcagtagagacacgcttcacattaaccttaattatttgagaatttacaatatttccgaatctctgatggctcagaatgagggtgggcaactggccatctgcacctatgctcacgatgtattttccgttttttgaggtctttgaaaaaacattgagcttttttttcctgaaaggaatgtgtgtgtacagtatactaactactgaaaattagctcaaaatatagcaaacaagtgcatctctttaacattttagtgcggcatggattgtgaagacaaatacatggcacatttctgtgcatttgtgatctgtcaatgcacaagatgcttataatactgactgtagctggctggaaaaggcacggttattttatttgtcaagtcgtgactatttttctatttcattatatagccctactccctagtgtttccaaatagtcactctccatagaggaactcattggataataagtctttattaataaaaggccacttggcatgtctgacccttatcctcagtattccatctattcgatggaacttttcagtgacaaccaagcataagtttaaacaccacagccgttgggcactctatcctaaatgtatctagacatagtgtaaatataagtgcatagcaaaaaaatgctttgtatatataaaatccagagtgtaaatataagtgcatagcaaaaaaatgctttgtatatataaaatccagagtgtcttataactttgaatagatggagtatatatgtatcaagaaaagctaaaacgacctacaattttggagagagtaatacataaccacctccaaaatgtacatggtaataaccggcttagaactgaacttaaagttccaaatatacgaatattgtgaagtttaggagatatttaataaagtggaaatgtatcgttcaaaaatgaggaaaatgataaatgggcaaggaaaagaaggtaactatgtttcctttaactgaaaaattattcagggcacatgccaagttagactcgaactattggctagttccaagttgtagaacatcatgcatatgattcttctccatctcaatagaattcatggttcattgccacattactactggttgggtaatggaatagtattactactaggtgaccttgatgaacatgcaagtgagaatctaattaataattacagtacagggcagtgacagctgacgatgtcgaacagccgttgcaaaatttcctcgcataatcgatcaaataggaaaaaggtttacctacttccttcttctagttaacctggcgacagaccaccataatattccagacaacagtagtatgatatacggaggagggcaggttcacagaatgcggcagttccgggccaaccagaagcatttggagtgggcaacggctatacggatcagcagctccgaaacagacaaggacctatcacctatatgtgttggaactgctgcaaaatcatgcgcataaaacaaaggaagaaagccttgcagtagttagaacttcgtaaccttgtgcttgtgcatcgtttgaacgaatctcgatcccctcgcaagttgctccaggctttgtacttttctgggggcgccgcgcaccgctggagcctgccgccgacgcgcgaccatacgcgctggcacatgagtatatatcccactgccgcaacgccaacgccgcccgtcgagcggcggagcggttatccaattgcaacatgtaattgtctttccaaatgtcttggctctccacgcaaaattttagtccctccacgtccccactcgtcgaaaccctagtttttagcaagttgctcgccaatctgcaagtttggtggcgggaacaagtggcagcaactaatcgaggtcgtctcatggcgataccacgcgaaaaaaagaagaagaggacatgggggaagaaaataggatttactgctaggagcgttagtgtggaactcacttacgcgcgcccagagatttccagaagcagtgggtggagtaccacgcgacggagggaacgccggcggcttggcgcgctctggttctccgcaagaccgcaagtccgcaagattccggcgagagagaagcaaagggaggggatttgggccggccgggccacacgagcctggcccatcaaaacaagtcgacatgggcgggcgctagcagctccaaaaggtcactaaggtctaagggcgaggctccaaaatgctcgggctccgattttcttccaattgcattggctctggcaacggagccactttcttgc

SEQ ID NO: 15173 - DNA, 1093 bp, Zea Mays
cccactcccgcgttaaacacccgccatccgcctcagcagcattcggcactcacttctgaagaatgacagccgtggccctggcgctgcccacggacgacgacaaagacggcggccgccgaggcgtcgaccactccccgacggctcccgcgccccctcctccgccgccgccgccccaggagctggtcatggtggcgcgcgccgtgcagcggctcgtggcgcggaacgacgcggtggtgccgccggcgccggacgggcgcggaggaggccggagactcgggatgcgggcgttcgaggcggcggagggcgcggcggcgccgcgcatcggcgtgcccgagtacctggagcgcgtgcaccgctacgccgcgctggaccccgagtgctacgtcgtggcgtacgcctacgtggacatggccgcgcaccgccggcccgccgccgccgtcgcgtccaggaacgtccaccgcctcctcctcgcgtccctcctcgtcgcctccaagccaccacagcaacgccttcttcgcgcgcgtgggcggcgtgagcaacgcggagatgaacaggctggagctggagctgctggacgtgctcgacttcgcggtcgcggtcgaccaccgcgtgtaccgcaggtaccgcgagcacctggagaaggagacgacgctgatgatgctgcgcagggacgacggccacggcccgcccgtgcccgtgcccggcagcggcgcggcgcccaccaagtcgagaacggccgcgtcgtcggtcgtcaagccgccgctgacggaggatcgtcgccgcccggccgaagctggcgacgccgacggcggcggcgaacacgacgaccggcggaagctgcccaacagcgcgacggcggcggcgtctcttcgagagctgtgggccttcgattactagccgtagattgttgcatgtccaagctgaagcctgcagtgcaggcaaagagtgtgtcgtgtgttgtcgtgcgtgctaatccaacgacaggtagtgtaactggatgaaatctcaagctgttgagcgtcattgacgtactgttcatcgaattgaaaactatactagttgcctagttcacaatctattcctagctacctga

SEQ ID NO: 15174 - DNA, 1840 bp, Zea Mays
ccgccagtctcttgtcacaccaaacacccagtggttcaggctggccaaagttatgagttatctgccctgtcctcccaaactaatctagtcccaggaaactaatttcaacacacaactggacgacggtgcgttgcgttggtggccgccggcgacgatgtcgtcgtccgcgggcgacaagaggaagaagacggcgtgcgtgaccggagggaacgggtacatcggctccgcgctcatcaagatgctgctggaggacggatacgccgtcaagacgacgacgacatggacaagaactcccacctcaagggcctgcagcagctcgggccgctgacggttctccgcgccgacatggacgaggagggcagcttcgacgacgccgtcgccggctgcgactacgccttcctcgtcgccgccccggtgaacctctcggcacaggatccagagaaagagcagatcgagccgtccgtccgaggcacgctgaacgcgatgcggtcgtgcgcgaaggccgggacggtgcggcgcgtgatcctgacctcgtcggtggccggagtctacatcaggccggacctgctgcaactgcgaggcgacgggcacgtgctggacgaggagtcctggtccgacgtcgagtacctcagagccaacaggccaccaacctgggggtactgcgtgtcgaaggtgctcctcgagaaggaggcgtgcaggttcgcgggcgagcacggcatcagcctggtcaccgtctgccccgtcatcaccgtgggcgcggcgccggcgcccaaggtccgcacgagcatcatcgacagcctctccatgctgtccggcgacgagcgagggctcgccgtgctcaagggcatcgagaagacctccggcgcggtgcagctggtccacgtcgacgacctctgccgcgccgagctgttcctggcggaggcggcggcggccgacgggaggtacatctgctgcggcctcaacacgaccgtcctcgagctcgcgcgtttcctggcacacaagtacccgcagtacggcgtgaaaacaaacctcgacggcgatgaacagcagctactcgagaagccgagggtgagggtgtcgtcggagaagctcgtccgggaagggtttgagtacaggcacaacacgctggacgagatctacgacaatgtggttgagtacggcaagtcgttagggattctgccctactgatacatagatgcccgagcttaattaagtacgagggcagcatatatgttatcggacatatacgagtcttggaaagtaattaaataatttatggagatatttttcattggaaaaaacagtgtgagagttctaaactagctcaaaattgagctgaaaagcacttttgaacccccctccccctacattttactattgctgctgaacgacgtggaggtcagattccatgtccgactgagaggatcgtcgaggtcggcgcggaaggcctccaggctccaggagggcgagcgtctgaggtgggagtgggacgtcttcgccatgtcatctgcggtttcagaatcgagacggccaagcacgtttggtgtgatatggaatcgtgatgaacagctgtcaggactccacccacgggctctccagtggaaggtgcggctgaagaagacgcgatgcagaaggcgacgccggtggctgatgaaggcgctgtggagaagacgccggctgtgaatgggccgcgagtggcaagacgtgttcgcaagcccaatgtgcgtgtatgtgggccggaatggttgaggcagtagtgagatgtacaaatatgtaataagcagaacgctttggacagagaatgatgagaaatcacaataccaatccccgcttcccccgc

SEQ ID NO: 15175 - DNA, 1870 bp, Zea Mays
cgccagtctcttgtcacaccaaacacccagtggttcaggctggccaaagttatgagttatctgccctgtcctcccaaactaatctagtcccaggaaactaatttcaacacacaactggacgacggtgcgttgcgttggtggccgccggcgacgatgtcgtcgtccgcgggcgacaagaggaagaagacggcgtgcgtgaccggagggaacgggtacatcggctccgcgctcatcaagatgctgctggaggacggatacgccgtcaagacgacgacgacatggacaagaactcccacctcaagggcctgcagcagctcgggccgctgacggttctccgcgccgacatggacgaggagggcagcttcgacgacgccgtcgccggctgcgactacgccttcctcgtcgccgccccggtgaacctctcggcacaggatccagaggcttgcttggcggtggatgtcccgatggcagaaagagcagatcgagccgtccgtccgaggcacgctgaacgcgatgcggtcgtgcgcgaaggccgggacggtgcggcgcgtgatcctgacctcgtcggtggccggagtctacatcaggccggacctgctgcaactgcgaggcgacgggcacgtgctggacgaggagtcctggtccgacgtcgagtacctcagagccaacaggccaccaacctgggggtactgcgtgtcgaaggtgctcctcgagaaggaggcgtgcaggttcgcgggcgagcacggcatcagcctggtcaccgtctgccccgtcatcaccgtgggcgcggcgccggcgcccaaggtccgcacgagcatcatcgacagcctctccatgctgtccggcgacgagcgagggctcgccgtgctcaagggcatcgagaagacctccggcgcggtgcagctggtccacgtcgacgacctctgccgcgccgagctgttcctggcggaggcggcggcggccgacgggaggtacatctgctgcggcctcaacacgaccgtcctcgagctcgcgcgtttcctggcacacaagtacccgcagtacggcgtgaaaacaaacctcgacggcgatgaacagcagctactcgagaagccgagggtgagggtgtcgtcggagaagctcgtccgggaagggtttgagtacaggcacaacacgctggacgagatctacgacaatgtggttgagtacggcaagtcgttagggattctgccctactgatacatagatgcccgagcttaattaagtacgagggcagcatatatgttatcggacatatacgagtcttggaaagtaattaaataatttatggagatatttttcattggaaaaaacagtgtgagagttctaaactagctcaaaattgagctgaaaagcacttttgaacccccctccccctacattttactattgctgctgaacgacgtggaggtcagattccatgtccgactgagaggatcgtcgaggtcggcgcggaaggcctccaggctccaggagggcgagcgtctgaggtgggagtgggacgtcttcgccatgtcatctgcggtttcagaatcgagacggccaagcacgtttggtgtgatatggaatcgtgatgaacagctgtcaggactccacccacgggctctccagtggaaggtgcggctgaagaagacgcgatgcagaaggcgacgccggtggctgatgaaggcgctgtggagaagacgccggctgtgaatgggccgcgagtggcaagacgtgttcgcaagcccaatgtgcgtgtatgtgggccggaatggttgaggcagtagtgagatgtacaaatatgtaataagcagaacgctttggacagagaatgatgagaaatcacaataccaatccccgcttcccccgc

SEQ ID NO: 15176 - DNA, 1931 bp, Zea Mays
cgccagtctcttgtcacaccaaacacccagtggttcaggctggccaaagttatgagttatctgccctgtcctcccaaactaatctagtcccaggaaactaatttcaacacacaactggacgacggtgcgttgcgttggtggccgccggcgacgatgtcgtcgtccgcgggcgacaagaggaagaagacggcgtgcgtgaccggagggaacgggtacatcggctccgcgctcatcaagatgctgctggaggacggatacgccgtcaagacgacggtcaggaaccccgcgccatagaaatcctacactttgctacttcagccaggcctaggcgcgcatgtgcctttactttactgtcgctgttggagacgacatggacaagaactcccacctcaagggcctgcagcagctcgggccgctgacggttctccgcgccgacatggacgaggagggcagcttcgacgacgccgtcgccggctgcgactacgccttcctcgtcgccgccccggtgaacctctcggcacaggatccagagaaagagcagatcgagccgtccgtccgaggcacgctgaacgcgatgcggtcgtgcgcgaaggccgggacggtgcggcgcgtgatcctgacctcgtcggtggccggagtctacatcaggccggacctgctgcaactgcgaggcgacgggcacgtgctggacgaggagtcctggtccgacgtcgagtacctcagagccaacaggccaccaacctgggggtactgcgtgtcgaaggtgctcctcgagaaggaggcgtgcaggttcgcgggcgagcacggcatcagcctggtcaccgtctgccccgtcatcaccgtgggcgcggcgccggcgcccaaggtccgcacgagcatcatcgacagcctctccatgctgtccggcgacgagcgagggctcgccgtgctcaagggcatcgagaagacctccggcgcggtgcagctggtccacgtcgacgacctctgccgcgccgagctgttcctggcggaggcggcggcggccgacgggaggtacatctgctgcggcctcaacacgaccgtcctcgagctcgcgcgtttcctggcacacaagtacccgcagtacggcgtgaaaacaaacctcgacggcgatgaacagcagctactcgagaagccgagggtgagggtgtcgtcggagaagctcgtccgggaagggtttgagtacaggcacaacacgctggacgagatctacgacaatgtggttgagtacggcaagtcgttagggattctgccctactgatacatagatgcccgagcttaattaagtacgagggcagcatatatgttatcggacatatacgagtcttggaaagtaattaaataatttatggagatatttttcattggaaaaaacagtgtgagagttctaaactagctcaaaattgagctgaaaagcacttttgaacccccctccccctacattttactattgctgctgaacgacgtggaggtcagattccatgtccgactgagaggatcgtcgaggtcggcgcggaaggcctccaggctccaggagggcgagcgtctgaggtgggagtgggacgtcttcgccatgtcatctgcggtttcagaatcgagacggccaagcacgtttggtgtgatatggaatcgtgatgaacagctgtcaggactccacccacgggctctccagtggaaggtgcggctgaagaagacgcgatgcagaaggcgacgccggtggctgatgaaggcgctgtggagaagacgccggctgtgaatgggccgcgagtggcaagacgtgttcgcaagcccaatgtgcgtgtatgtgggccggaatggttgaggcagtagtgagatgtacaaatatgtaataagcagaacgctttggacagagaatgatgagaaatcacaataccaatccccgcttcccccgc

SEQ ID NO: 15177 - DNA, 1324 bp, Zea Mays
cgccagtctcttgtcacaccaaacacccagtggttcaggctggccaaagttatgagttatctgccctgtcctcccaaactaatctagtcccaggaaactaatttcaacacacaactggacgacggtgcgttgcgttggtggccgccggcgacgatgtcgtcgtccgcgggcgacaagaggaagaagacggcgtgcgtgaccggagggaacgggtacatcggctccgcgctcatcaagatgctgctggaggacggatacgccgtcaagacgacggtcaggaaccccgacgacatggacaagaactcccacctcaagggcctgcagcagctcgggccgctgacggttctccgcgccgacatggacgaggagggcagcttcgacgacgccgagctgttcctggcggaggcggcggcggccgacgggaggtacatctgctgcggcctcaacacgaccgtcctcgagctcgcgcgtttcctggcacacaagtacccgcagtacggcgtgaaaacaaacctcgacggcgatgaacagcagctactcgagaagccgagggtgagggtgtcgtcggagaagctcgtccgggaagggtttgagtacaggcacaacacgctggacgagatctacgacaatgtggttgagtacggcaagtcgttagggattctgccctactgatacatagatgcccgagcttaattaagtacgagggcagcatatatgttatcggacatatacgagtcttggaaagtaattaaataatttatggagatatttttcattggaaaaaacagtgtgagagttctaaactagctcaaaattgagctgaaaagcacttttgaacccccctccccctacattttactattgctgctgaacgacgtggaggtcagattccatgtccgactgagaggatcgtcgaggtcggcgcggaaggcctccaggctccaggagggcgagcgtctgaggtgggagtgggacgtcttcgccatgtcatctgcggtttcagaatcgagacggccaagcacgtttggtgtgatatggaatcgtgatgaacagctgtcaggactccacccacgggctctccagtggaaggtgcggctgaagaagacgcgatgcagaaggcgacgccggtggctgatgaaggcgctgtggagaagacgccggctgtgaatgggccgcgagtggcaagacgtgttcgcaagcccaatgtgcgtgtatgtgggccggaatggttgaggcagtagtgagatgtacaaatatgtaataagcagaacgctttggacagagaatgatgagaaatcacaataccaatccccgcttcccccgc

SEQ ID NO: 15178 - DNA, 1852 bp, Zea Mays
cgccagtctcttgtcacaccaaacacccagtggttcaggctggccaaagttatgagttatctgccctgtcctcccaaactaatctagtcccaggaaactaatttcaacacacaactggacgacggtgcgttgcgttggtggccgccggcgacgatgtcgtcgtccgcgggcgacaagaggaagaagacggcgtgcgtgaccggagggaacgggtacatcggctccgcgctcatcaagatgctgctggaggacggatacgccgtcaagacgacggtcaggaaccccgacgacatggacaagaactcccacctcaagggcctgcagcagctcgggccgctgacggttctccgcgccgacatggacgaggagggcagcttcgacgacgccgtcgccggctgcgactacgccttcctcgtcgccgccccggtgaacctctcggcacaggatccagagaaagagcagatcgagccgtccgtccgaggcacgctgaacgcgatgcggtcgtgcgcgaaggccgggacggtgcggcgcgtgatcctgacctcgtcggtggccggagtctacatcaggccggacctgctgcaactgcgaggcgacgggcacgtgctggacgaggagtcctggtccgacgtcgagtacctcagagccaacaggccaccaacctgggggtactgcgtgtcgaaggtgctcctcgagaaggaggcgtgcaggttcgcgggcgagcacggcatcagcctggtcaccgtctgccccgtcatcaccgtgggcgcggcgccggcgcccaaggtccgcacgagcatcatcgacagcctctccatgctgtccggcgacgagcgagggctcgccgtgctcaagggcatcgagaagacctccggcgcggtgcagctggtccacgtcgacgacctctgccgcgccgagctgttcctggcggaggcggcggcggccgacgggaggtacatctgctgcggcctcaacacgaccgtcctcgagctcgcgcgtttcctggcacacaagtacccgcagtacggcgtgaaaacaaacctcgacggcgatgaacagcagctactcgagaagccgagggtgagggtgtcgtcggagaagctcgtccgggaagggtttgagtacaggcacaacacgctggacgagatctacgacaatgtggttgagtacggcaagtcgttagggattctgccctactgatacatagatgcccgagcttaattaagtacgagggcagcatatatgttatcggacatatacgagtcttggaaagtaattaaataatttatggagatatttttcattggaaaaaacagtgtgagagttctaaactagctcaaaattgagctgaaaagcacttttgaacccccctccccctacattttactattgctgctgaacgacgtggaggtcagattccatgtccgactgagaggatcgtcgaggtcggcgcggaaggcctccaggctccaggagggcgagcgtctgaggtgggagtgggacgtcttcgccatgtcatctgcggtttcagaatcgagacggccaagcacgtttggtgtgatatggaatcgtgatgaacagctgtcaggactccacccacgggctctccagtggaaggtgcggctgaagaagacgcgatgcagaaggcgacgccggtggctgatgaaggcgctgtggagaagacgccggctgtgaatgggccgcgagtggcaagacgtgttcgcaagcccaatgtgcgtgtatgtgggccggaatggttgaggcagtagtgagatgtacaaatatgtaataagcagaacgctttggacagagaatgatgagaaatcacaataccaatccccgcttcccccgc

SEQ ID NO: 15179 - DNA, 1227 bp, Zea Mays
cagcaacctcaaaggctcaaactaccacctgttcacttgtcgccaatccatcagtgtcgggacaacccatcagagctagctagggccagctagcagcgatttatcctagctagctagcaagcttctcttcttcttgccctcgtcgatcgatcggtatggcggcggcggcaggtgaggagaggaagaagacggcgtgcgtgaccggagggaacggctacatcgcgtcgttgctcatcaagatgctgctggagaagggctacgccgtgaagacgacggtgaggcaccccgaggacaaggagagcaactcccacctggaggacctggagaagctgggcctgggccccttggaggtctaccgcgccgacctcgccgaggaaggcagctacgacgaggccgtcgccggatgcgactacgccttcctgctcgccgcgccggtcaactacacgtccaagaaccctgagaaagagctgatggagctcggcgtccaaggcactctgaacgtgatgaggtcgtgcgtcaagtccggcacggtgaagcgcgtggtcctgacctcgtcgacggccgccgtctccagcaagccgctggaaaacgacgggcacgggcacgtgctggacgaggagtccttgtccgacatcgactacctcaccgccaaaaggactggcctctgggcgtacccggtgtcgaaggtgctcatggagaaggcggcggcggagttcgcggcggtcgagggcgtcagcctggtgaccctgtgcccctccgtcaccgtgggcgaggcgcccgacaggcaggtctacaccaccgtccccgccatcctctccctgctctccggcgacgaggcggagctcaaggtgctccggggcatcgagcgggcctccggctccgtgccgctggtgcacgtcgaggacgtctgccgcgccgagatcttcgccgccgaggaggccgccgacgggaggtacatctgcaacggcgtcgacaccaccatcgtcgagatggcccgtttcctggcagacaagtacccgcagtacgacgtcaacaccaaccttccggcggagatctccttgagaagccgatcgcgctccggccgtccaccaagctgatcaaggaagggttcgagttcaagtacaagacgctggagcacatctatgagaacatggtggagtacggcaaggccattgggatcctgcacaattgatgtgatgctgaccgatcctccgtgtgtgctttgga

SEQ ID NO: 15180 - DNA, 2167 bp, Zea Mays
gcggcgtcgaccgtcgccgagtgggggctcgtctgcggcgagcgctacaaggtcggcctcgcccaggccgtgttcttcgccggctgcatgatcggagcgggcgtgttcggccacctctcggactcgttcctgggccggaaggggtcgctgcaggtggtgtgcgtgctcaacgccgccttcggcctgctgaccgcgctggccccgacctactgggcctacgcggcgctgcgcctcctcacgggcttcagcacgggcagcgtcggcgtgctggccttcgtgctggccaccgagcccgtcggccccgcccgccgcggcgccgccggcatgtccgccttctacttcttctccggcggcatcgcggcgctcgccggcgtcgccgcgctcctcccgcgctcctggcgcctgctctacgccgccacctcgctcccctcgctcgtcttcgccgtcgccgtcgtcccgttcgtctccgagtcgcccaggtggtacctcgtgcgccgccgccccgacgacgccttgcgggtcgtccgcgccatcgcggccgccaacggcagggccgtgccagaggatctcacgctcaagcttgacgacgaggacgaggacgatgatgggggcgcggcggcggcggcggcggcggcggcatccacttcctcgggctccatcgtcgacgtgttccggtcgccgaccacgcgggtgcgcctcgtgctgtccgtgctcatcaacctcctcgcctcggtggtgtactacggcctcagcctcaacgtggtcaacctcaagaccaacctctacgtcaccgtcgtcgtcaactcgctcgccgagatgcccgcctacctgctcacggcgctgctcctcgaccgtttcgggcggaagcctctcgccatcggcaccatgctgctcagtggcgtcttctgcaccgccgggagtctcatacccggagcagggaccatgaggctggcgcggatggcctgcggcgtggtgggcatcttcggcatggcggcgacgtacaacctgctgttcatctacacggcggagctgttccccacggtggtgcggaacgcggcgctggggtgcacggcgcaggcggcgcagatgggggccatcgtggcgccgctggtggtggtgctcggggagaggctgccgttcgcggtgttcggcgcctcgggcatcgtcggcggcctgctcgtcttctacctgccggagaccatgaacaagcccctgtacgacaccatggcagggctggaggaaggggagaagagcgtcatcaagtgagaggatcggtctagccgtccaggtgaactgcacaaagcgctgcgtcctcggaatgtgcatgtccacagtccactgttactggagactgatcttgtgaataatacgtttcgtttcgatacattacaaacgaggtatatacatgcacatgttgttttcgtcaaacaagctgcacagtaacgtgttgtttcaaaacactgcaatagtcgccaggaactgcaggttgccaacacgtggaggtagaacaatgcaattatgcatccaaacccaatatacctcctcccaattcctattttaagaaagttaataaacaattctctagctgtttctcgtctcttctcccaaaaacttcacccgcgaatacaaggtgctgcgctacggaaatcttcaccacaatttcctcctcctaaaactatcaccgtccacgtccaggtcctcctccatggcgacgtccaggctgaggaccgtgacgaacatgtcaaggttgtcgtcgggccccgccagacgctcgagctcctcgaacgcctcggtgtggcggtccacctcgttgctggagacgatgaacgcctacaagcccgcgaggaagcggcgagcggagttggagacgaccgcggcgcgacccgcgacatcgagcacggtggtgaggtggtggcgatcactggcgatgatcaccggagtggaagtggaagagaagaacacaaaggacatagaacagacaggatagcgacggtagaggaagaaggtagattctcaaaaacagaattccgttacagtgttttcgatgccctctctctcaagccactctaccatattagggccgcctattcgttattcgttttgttctcaatccatgtgaattaagtaaaattagatgagtttttaatctcaaataaatcaaaatctt

SEQ ID NO: 15181 - DNA, 3338 bp, Zea Mays
ggctcgtctgcggcgagcgctacaaggtcggcctcgcccaggccgtgttcttcgccggctgcatgatcggtcagtgcgcgtatctgaattcattccggaccgcgtgttcgtcgtttggaaaggaaatggttttttttagattaggcgtataactagaggtgcggcggccgtcgagtcgagtgagtgcttcgcttctggcgggctcagcagctcatcggccacatgcacgacacgacacgacacgaatgccggacatgtgctgtggtctgatctggtggatgaggagatggtcaagtgccattttacctcggtcctctactcctctcttacagcatttcggcggcggcagccttagacaaaagtgcagccgcgcagcttgacttgaggtgcggcgcatcttgtcggctttgtcccgtagctttctctgccggtagccgtctctgttccaacatctagcattctaccgtagcgaatgagtccaaagcacagttaaaaacggtctggtctcgatgtcccgctcaggcacgcagtttcccaacgttcacagcttctggcgaaacgagatataccgaggaatcttttcgcctgatcctaatcctacctagcatccactacgcctttctgtggctctggactagcgttagagtcccggaccggaagtcagatccgatcagaattcagaacacaacaaatgaagccgtgtcaatcaatatgctatcatgttatcttctgctattgactccaccagctttgcatgtccactctcatgtgatgatggataagtataagagtagatgaatggattatgggggaaaatgaaattgatatgcaggcatgcggtggtcagtcaggttggtcatgtctaggcattccgaaggcaaacaaagcgaaacctccgtgcctcgtctcgtctgccaccgattggtctgcgaagcggcgtagcgcgacgtgacacgtaggcacgcgtggcgcggattagcttggctacgtggctccccccgccgcgccaaatgccacgacggctttgacggggaggatgtctcacggtcacggctcagcgcccagccaatcactcgcttggctttggcttggcttggcttgcctcgcccatcgcctccggcctctccattcccgcctggcctggctcacccacaagcagaccaaaaaaaaatagtcgtctctttggtgtgggcttttcacctttggctgggctagtttctcatctagacagggcctcgtggtcaattatctttcttcctatgcaggagcgggcgtgttcggccacctctcggactcgttcctgggccggaaggggtcgctgcaggtggtgtgcgtgctcaacgccgccttcggcctgctgaccgcgctggccccgacctactgggcctacgcggcgctgcgcctcctcacgggcttcagcacgggcagcgtcggcgtgctggccttcgtgctggccaccgagcccgtcggccccgcccgccgcggcgccgccggcatgtccgccttctacttcttctccggcggcatcgcggcgctcgccggcgtcgccgcgctcctcccgcgctcctggcgcctgctctacgccgccacctcgctcccctcgctcgtcttcgccgtcgccgtcgtcccgttcgtctccgagtcgcccaggtggtacctcgtgcgccgccgccccgacgacgccttgcgggtcgtccgcgccatcgcggccgccaacggcagggccgtgccagaggatctcacgctcaagcttgacgacgaggacgaggacgatgatgggggcgcggcggcggcggcggcggcggcggcatccacttcctcgggctccatcgtcgacgtgttccggtcgccgaccacgcgggtgcgcctcgtgctgtccgtgctcatcaacctcctcgcctcggtggtgtactacggcctcagcctcaacgtggtcaacctcaagaccaacctctacgtcaccgtcgtcgtcaactcgctcgccgagatgcccgcctacctgctcacggcgctgctcctcgaccgtttcgggcggaagcctctcgccatcggcaccatgctgctcagtggcgtcttctgcaccgccgggagtctcatacccggagcagggaccatgaggctggcgcggatggcctgcggcgtggtgggcatcttcggcatggcggcgacgtacaacctgctgttcatctacacggcggagctgttccccacggtggtgcggaacgcggcgctggggtgcacggcgcaggcggcgcagatgggggccatcgtggcgccgctggtggtggtgctcggggagaggctgccgttcgcggtgttcggcgcctcgggcatcgtcggcggcctgctcgtcttctacctgccggagaccatgaacaagcccctgtacgacaccatggcagggctggaggaaggggagaagagcgtcatcaagtgagaggatcggtctagccgtccaggtgaactgcacaaagcgctgcgtcctcggaatgtgcatgtccacagtccactgttactggagactgatcttgtgaataatacgtttcgtttcgatacattacaaacgaggtatatacatgcacatgttgttttcgtcaaacaagctgcacagtaacgtgttgtttcaaaacactgcaatagtcgccaggaactgcaggttgccaacacgtggaggtagaacaatgcaattatgcatccaaacccaatatacctcctcccaattcctattttaagaaagttaataaacaattctctagctgtttctcgtctcttctcccaaaaacttcacccgcgaatacaaggtgctgcgctacggaaatcttcaccacaatttcctcctcctaaaactatcaccgtccacgtccaggtcctcctccatggcgacgtccaggctgaggaccgtgacgaacatgtcaaggttgtcgtcgggccccgccagacgctcgagctcctcgaacgcctcggtgtggcggtccacctcgttgctggagacgatgaacgcctacaagcccgcgaggaagcggcgagcggagttggagacgaccgcggcgcgacccgcgacatcgagcacggtggtgaggtggtggcgatcactggcgatgatcaccggagtggaagtggaagagaagaacacaaaggacatagaacagacaggatagcgacggtagaggaagaaggtagattctcaaaaacagaattccgttacagtgttttcgatgccctctctctcaagccactctaccatattagggccgcctattcgttattcgttttgttctcaatccatgtgaattaagtaaaattagatgagtttttaatctcaaataaatcaaaatctt

SEQ ID NO: 15182 - DNA, 1024 bp, Zea Mays
gccgcacccaccccaaccccaacccaacgggccgggtcccttcagattctcgacagtccgcgttaaataggccgccccgctcgccttccactcctcgttcccacacccctcaccgcgtccgcctcccctaccatctagggtttctagggttttcgaggaggaggaaatggcgtctgatagggtgctcgggactgtgaagtggttcaacggaaccaagggcttcggtttcatcacccccgacgacggtagcgaggacctattcgtccaccagtcctccatcaagtccgacggctaccgcagtcttaacgacggcgatgccgtcgaatacaccgtcggcagcggcaacgacggccgcgccaaggccctcgatgtcaccgcgcccggcggcggcccgcttgccggcggggaacgtcccgacggcggcaacggcggtgggcgaggcggatacggcggcggctatggcggtgggtacggtggaggcggcggtggaggcggccgcggctgcttcaagtgcggcgaggagggccaccgtcgcgtcggatccggcggagtcccatgtcgcctctcgccgcttccctacccctccaaaggtatcgctcggctgactcttgcgtgaagtcgtcggagcaaactatctatcagtagtactagcagtgtcgtttcgttttggtctgtcgtggcgtggtagtaagaaatgcaagtgagcagcaccagtatctttccgtttgaatcagttgtaaggcagtcatggtcatggttggctctgccggatctatctgtcatgaactatctatattatatcattatcaatgttatgcaatgagtctttggcattgagttaaggtaaaatactggaatgcctttgttgattcttttggttggttttcgttcttgtgtcgtctgtaatctttgcaggatcaacttcggcgtcctttttgtgttaaattatgatagcggagtgggattgttgtcttaagatccttttgtgttgtattatgatagtgcatagtggagtgagactggg

SEQ ID NO: 15183 - DNA, 973 bp, Zea Mays
gccgcacccaccccaaccccaacccaacgggccgggtcccttcagattctcgacagtccgcgttaaataggccgccccgctcgccttccactcctcgttcccacacccctcaccgcgtccgcctcccctaccatctagggtttctagggttttcgaggaggaggaaatggcgtctgatagggtgctcgggactgtgaagtggttcaacggaaccaagggcttcggtttcatcacccccgacgacggtagcgaggacctattcgtccaccagtcctccatcaagtccgacggctaccgcagtcttaacgacggcgatgccgtcgaatacaccgtcggcagcggcaacgacggccgcgccaaggccctcgatgtcaccgcgcccggcggcggcccgcttgccggcggggaacgtcccgacggcggcaacggcggtgggcgaggcggccgcggctgcttcaagtgcggcgaggagggccaccgtcgcgtcggatccggcggagtcccatgtcgcctctcgccgcttccctacccctccaaaggtatcgctcggctgactcttgcgtgaagtcgtcggagcaaactatctatcagtagtactagcagtgtcgtttcgttttggtctgtcgtggcgtggtagtaagaaatgcaagtgagcagcaccagtatctttccgtttgaatcagttgtaaggcagtcatggtcatggttggctctgccggatctatctgtcatgaactatctatattatatcattatcaatgttatgcaatgagtctttggcattgagttaaggtaaaatactggaatgcctttgttgattcttttggttggttttcgttcttgtgtcgtctgtaatctttgcaggatcaacttcggcgtcctttttgtgttaaattatgatagcggagtgggattgttgtcttaagatccttttgtgttgtattatgatagtgcatagtggagtgagactggg

SEQ ID NO: 15184 - DNA, 570 bp, Zea Mays
ggctgcttcaagtgcggcgaggagggccacatctcccgcgactgccccaacaaaaggcgttaggcgcggcgccaccgtcgcgtcggatccggcggagtcccatgtcgcctctcgccgcttccctacccctccaaaggtatcgctcggctgactcttgcgtgaagtcgtcggagcaaactatctatcagtagtactagcagtgtcgtttcgttttggtctgtcgtggcgtggtagtaagaaatgcaagtgagcagcaccagtatctttccgtttgaatcagttgtaaggcagtcatggtcatggttggctctgccggatctatctgtcatgaactatctatattatatcattatcaatgttatgcaatgagtctttggcattgagttaaggtaaaatactggaatgcctttgttgattcttttggttggttttcgttcttgtgtcgtctgtaatctttgcaggatcaacttcggcgtcctttttgtgttaaattatgatagcggagtgggattgttgtcttaagatccttttgtgttgtattatgatagtgcatagtggagtgagactggg

SEQ ID NO: 15185 - DNA, 1557 bp, Zea Mays
ttgctagctagccgcccttagcttcgcacgcgacatctatcatcggccaagaaacggagcagatcggtcggccgccgacatgggggatcacgctgagatgctgcatgccactccggccatgtacaacggcgccggcgctgcccctcgtggtggctggtggagtacggcggtgcccgcgaccacgtgctcgacggagctggccggcggcttcaccacgtggtcgtccgccctggctgctagctacgacctggcggcggagggggcaaaggccaacaagagcgccaccaccgcctcgtcggagtcgcccgggaacaacagctccgtgaccttccaagaaccggccggcggcgtcggaaccgccgtggtgcagcagcctcttgctggctgcgctgactggaggcatccctatttgagcagcggcgctgctactttgcatgggtttctgcaagatggtcaccagcaggacatgagctcatcgacaactgagcagagccccatggccgcatcaagcctcatgaacccttcatccaataacctagccctggccctgcaacaaggtcaccatcaccaagagccggaccaccagcagatgctgtccaacttcggcggctccgaggccgagctgctcctgtcgccgacgacctcaccctacgggttccagtcgtctctgctgagaagcctcatggagccgacagcggacgcggcgaagccggctttgccggggtaccagcagcagtatgaccagtaccagcagatgggcatgggccaggcgaggtcgtttgcaccggccggcggagctgccagcagggaggcactccagttcaccaacgacgcgccgtcctggaacccttccgctgcggctgggttcggcgtgccgccggcgccggcgccggcgccggcgccggctgaccaagctagcagcagcgtacgttctgtgaaaccatcgccggcggcgcgtgctactgcaacccttgcattaaagactgcgttggaaggagtaggagagtctgctagctccatcatcaccaagaagaaggcaaacggagagctggtgccggccttcaagaaatcgaggctccagacgccgtcgccgttgccaacgttcaaggttaggaaggagaagctaggggacagggtcactgcactccaacaactcgtcgccccttttggaaagacggatacagcatcggtgctccatgagaccgtcgagtacatcaagttcctccacgaccaggtccttagtgctccatacttgaagaacaacggccatcaagtgccctacctgaagagatcaagtcctgacaggtccgaggacgacaacagccatgccggcgagagatcactcaagggccgggggctgtgcctggtcccgatatcgagcacgttcgcggtagccagcgaggtgcccgtcgatttcgggtggagtactgcatttgctgccagctttaggtagaagagaaggctgggaacgaagagcgcgccaaagctctgatcagaggcgtcgaacgagtatataactagctagctagccagctaccacagatcgatcgacctgcc

SEQ ID NO: 15186 - DNA, 1563 bp, Zea Mays
ttgctagctagccgcccttagcttcgcacgcgacatctatcatcggccaagaaacggagcagatcggtcggccgccgacatgggggatcacgctgagatgctgcatgccactccggccatgtacaacggcgccggcgctgcccctcgtggtggctggtggagtacggcggtgcccgcgaccacgtgctcgacggagctggccggcggcttcaccacgtggtcgtccgccctggctgctagctacgacctggcggcggagggggcaaaggccaacaagagcgccaccaccgcctcgtcggagtcgcccgggaacaacagctccgtgaccttccaagaaccggccggcggcgtcggaaccgccgtggtgcagcagcctcttgctggctgcgctgactggaggcatccctatttgagcagcggcgctgctactttgcatgggtttctgcaagatggtcaccagcaggacatgagctcatcgacaactgagcagagccccatggccgcatcaagcctcatgaacccttcatccaataacctagccctggccctgcaacaaggtcaccatcaccaagagccggaccaccagcagatgctgtccaacttcggcggctccgaggccgagctgctcctgtcgccgacgacctcaccctacgggttccagtcgtctctgctgagaagcctcatggagccgacagcggacgcggcgaagccggctttgccggggtaccagcagcagtatgaccagtaccagcagatgggcatgggccaggcgaggtcgtttgcaccggccggcggagctgccagcagggaggcactccagttcaccaacgacgcgccgtcctggaacccttccgctgcggctgggttcggcgtgccgccggcgccggcgccggcgccggcgccggctgaccaagctagcagcagcgtacgttctgtgaaaccatcgccggcggcgcgtgctactgcaacccttgcattaaagactgcgttggaaggagtaggagagtctgctagctccatcatcaccaagaagaaggcaaacggagagctggtgccggccttcaagaaatcgaggctccagacgccgtcgccgttgccaacgttcaaggttaggaaggagaagctaggggacagggtcactgcactccaacaactcgtcgccccttttggaaagacggatacagcatcggtgctccatgagaccgtcgagtacatcaagttcctccacgaccaggtcggggtccttagtgctccatacttgaagaacaacggccatcaagtgccctacctgaagagatcaagtcctgacaggtccgaggacgacaacagccatgccggcgagagatcactcaagggccgggggctgtgcctggtcccgatatcgagcacgttcgcggtagccagcgaggtgcccgtcgatttcgggtggagtactgcatttgctgccagctttaggtagaagagaaggctgggaacgaagagcgcgccaaagctctgatcagaggcgtcgaacgagtatataactagctagctagccagctaccacagatcgatcgacctgcc

SEQ ID NO: 15187 - DNA, 569 bp, Zea Mays
gcgtcaccgcgtccccaacgcgaatcatccttcttccgtcaccagacagacggtagagagtcgaacaatcgccggctcgacgcccctcttcccgacgccgcacgccttcacggtcctcggccgccgatcttccagagcggttcgacaccgtgctcgccacggtcgacatcactgctgccgccgccgccgccggaaagttggcatcgttgtcgacctctttctccccttcttccacccaggaggcaacatgtcgtcgctcgccgctgcgagagcggataacttctactatccgccggaatggagccccaagaagggtgggctgaacaagttccatggccagcatgcgctcagggagcgagcgaggaagctcgaccagggcatcctgattataaggtttgagatgccttttaacatttggtgtggtggatgcaattccatgatagcgaagggagtaagatttaatgctgagaagaaacaagttggaaattattactctaccaagtagttgcaaccagtggtggaaattcaatgttattcctcattttgaacaaatggttgatgactgattt

SEQ ID NO: 15188 - DNA, 900 bp, Zea Mays
tcgaggtctgcagagacattgctgctgccagcagatgaagatcgagacaagcttgcggatcctatgtaccggcttgaacaccaggaagaggatcttcggaagaaaaaagaagctgagccagttttagttcgccttcagcgactctcggacagccggcactctgatgattatgccctgaacagagcactccgcgatcgtcttaggagagttgctgaagagaagaagtccgcgagaaagataggccttggtgtgcggctcttgcctccctccgcagaagatgccaccgcagcggcttcagtgaagtttgcatcgaaatttgagaaaagcagaagggataagagggccgcaatcaaagctgcctccatctttccggagtcatcaagctcagcatcacatggtaaacccgacctcgtgctgaagaggcggaacataaaagctggagccgctacagcactgatggcaggcagggtgaagccgtcctcgtggcagagcgccagttccacgagctcaaggactcggatgcctgttctggcagcacgcaagtaggcagctcgttgcctcaggctttgtgtgggaaatagggggcttgtgaaatatggacttgcccgtaatattgctatgtttctttggttgtactatactcacaaatatgacgccgttgacttttttcaaaaatttgaccactcgtcttatttaaagtactttttcaaaaatgttaaattttaaatcaaacacaaactaccaaacaaataaaaaaataaataataacttattattttttaaataagacgagtggtaaagttttttttttcaaaaaaaaaggtgtaatatatttatgaatggtagtacttttacggattgtctaaggggcgtttgttaattagtgttttcattgttttc

SEQ ID NO: 15189 - DNA, 1226 bp, Zea Mays
aggaccccggattcttctttccaccgctgttaagctggctcgttgccattctgccattgtcccgacctgctggctgctgccctctaattccttttactccccgccgagcgaaacaaacggccttcttggtcgcctcccccatttcgccgctgggcgctggctcaccccactggctttctcaagtttcaagcccctgctgcatcttggccaggttgacttggagttggaagtgtcgtcgttttgttctccagcatggacacaaccgccgacatgagtggcctgaagctcggactgtcttgaacacacaagagtcctatatgtacacattgtgaaacttcatcaagggagcaattctccatgactgatgagtccaccaaatcttctattttcccttctttccacatgttccatgcctgaaacatgacacaatctcatatcaggatcgtttttatcatgtggacagttctgaattattatgagagtgtgccagtccttacatatgctctaagattaggaaaatccatgtgaagatgtggtgagctgatcttcaaaccacttacaatctccagcattaaaacaccaaagctctcttcctttctctggcatcctctagagaagttgagactgtcgaccagctcaaaatgatcagggcactggcatgtcggcattgccttagtgagatcgcagtagccgaacgggccacaagaggcgtagagatcacatccaacactaggttcctcagaaatcagcacccaggatgatgtgctattttcccagaccaggagcctcatcttgcctgtgtggtgaagtgagaagtgcatgtagggagaaccggctaagactgtgaacgtatagtagatctcatcccctgtgtcgaccatcatccattggtatgtgactgaggtattgttggcctggtacgtgccgccggatgctgggacatcattaaaaaaagaagaacgatagtacggcaatgtcccattccaaatgaacacctgaacgtttgaggaggccggatccatgccagaagagatgtccccggttgatggatcgtcagggctcttccaggcaaagaggcccgtagccggttgtgacctgtatcttatcatactcctcatggttggaagcactgtatcagtcgggtgatcgaagctttgccatacgtccgtgccgtttggcgatcgaaggacaaagttccctgagttgagcagcactgcaaaagctcc

SEQ ID NO: 15190 - DNA, 628 bp, Zea Mays
aggaccccggattcttctttccaccgctgttaagctggctcgttgccattctgccattgtcccgacctgctggctgctgccctctaattccttttactccccgccgagcgaaacaaacggccttcttggtcgcctcccccatttcgccgctgggcgctggctcaccccactggctttctcaagtttcaagcccctgctgcatcttggccagttgaagatgagcagggcatcaatcaaaatcatcccagagtgctacaggcagactagtgatggatcttgattctaatttcttcaagaggaaggatgctaggggtagcatgttgcttgcttactccatgtcaacagcaagcagatcgaagttgttcctgtggatgctacaagcaacacttttggatgcatgctactttgctttgcattttgtagcagaggataaagttgcaagtgaactaggttcctgaacccaaaacatgtggttgcaacagtagacatttgatctatgagagctttgacaagccaaacttgttgttgcctacttattacgatttgaaaggtgacaagtagactcattattgtgaccgattattggcgctaatggaaatatgacctacgctttggctatttctgtgta

SEQ ID NO: 15191 - DNA, 2808 bp, Zea Mays
aggaccccggattcttctttccaccgctgttaagctggctcgttgccattctgccattgtcccgacctgctggctgctgccctctaattccttttactccccgccgagcgaaacaaacggccttcttggtcgcctcccccatttcgccgctgggcgctggctcaccccactggctttctcaagtttcaagcccctgctgcatcttggccagttgaagatgagcagggcatcaatcaaaatcatcccagagtgctacagacaggcagcacttaagctgaaaggtggaataacaacttgaagagtgacgggacaaagacatcgacgacctggtccaaactaagtccaaaacactgcagaccggtggactttgacgccgtaattgccttgggctgggccgttgggcgatgtaacgcgtcatcaacacgaccgtcaccggccccatgtaccatcacgcaagcgcacgcgattaatagcggaagaacctccggcgccggcatttcgccggcggacacgctcaacagcgggggcaacgtcaccgatggcgagacgctggtctcggccggtggcacattcaccctgggcttcttctccccgtcgaccacggtgctgaccaagaggtacctcgggatctggttcacggcgtctggtacggacgccgtcttgtgggtggccaaccgcgaaaccccgctaaacaacacctccggcgtcctggtgatgagcagccgggtgggccttcgccttctcgacggctctggccggaccgcctggtcctcaaacacgaccggcgcctccacctcttcggtggcacagctgctcgggtccggcaacctcgtcgtgcgcgagaagagcagcaacgccgtcttccagtggcagtcgttcgaccatccgcagaacaccttgctcgccggcatgaggttcggcaagaacctaaagaccggcatggagtggtccctgacgtcgtggcgggcgcaggacgaccccgcgacgggggactaccgtcgtgtcatggacacgaagggccttccggacatcgttacttggcacggcaacgccaagaagtaccgcgcgggtccgtggaacgggcgctggttcagcggcgtgccggagatggactcagggtacaagctgttctccgtccagatggtggacggcccggacgaggtcacctacgtgctcaacaccacggccggcatccccttcacccgcgtggtgctggacgaggttggcaaggtgcgggtcctgatgtggctgccgaccagccgggtgtggaaggaatacccatggctgccgcgcgacgcctgcgacgagtacacgtcctgcggcgcgttcggcctgtgcaacgtcgacgccgcgccgacgccgtcctgcagctgcgccgtggggttcagccccgtgaacgcgtcggagtggtccaggagggaagcctccggcgggtgccagagggacgtgccgctggagtgcgccgccggcaacgggacggcggtgacggaccggttcgcgcccgtgcacggcgtgaagctccctgacacggacaacgcgacggtggacatgggcgcgacgctggagcagtgcaaggcgaggtgcctcgccaactgctcgtgcgtggcctatgcccccgccgacatccgaggcggcggcgatggcagcggctgcgtcatgtggaaggataacatcgttgatgtccggtacatagaaaatgggcaggatctgtttctgaggttggccaagtctgaatcagctacaggggagagggtccgtctggcaaagattttggttccagtgatggcgtttgtgcttgcactcacggccgccggcatgtaccttgcttggaactgcaagcttagagccaagcgtcggaacagggataatttgaggaaagcgatcctaggatactcgactgcgccaaacgaactcggtgatgaaaacgtagagctcccatttgtcagccttggagagattgctgcagcaacaaataatttttccgaggacaacatgcttgggcaaggtggctttgggaaggtctataagggtacgctgggacagaacgtgcaggttgcaatcaaaaggctcggccaatgttcaggacagggcgtggaggagttcaggaacgaagccgtcctgatcgcgaagctgcagcacaggaacctggtcaggcttcttggatgctgcatcgacggagacgagaagctgctagtctacgaatacttaccgaacagaagcctggactccattatttttgatgctgcaagtaaacacctccttgattggccaacacgtttcaagataatcagaggagtatgtcgagggctcctttatctccaccaggactcaaggctgactataatccacagagacctgaagacgagcaacatactgctggacgcagatatgagccccaagatatcggatttcggcatggcaagaatctttggtggaaaccagcatgaagcgaacaccaatcgagttgttgggacgtacggttacatgtctcctgaatatgcaatggacggcgtgttttctgtcaagtcagacacgtacagtttcggcgtcatagtcttggagatcataagtggcctgaagatcagtttaacccattgcaatggcttccctaacctgctagcttatgcatggagcttgtggatagacgacagagccatggatctcgtggactcgtccctggagaagagcagttcctgcagtgaagctttacgctgtatccagatcggactgctgtgtgtgcaggacaacccgaatagtaggccgctcatgtcgtcggtggtgaccatgctcgagaacgaaaatgtgtaa

SEQ ID NO: 15192 - DNA, 3039 bp, Zea Mays
cctgtccccaacctccccccacctcccctgacctcgctcccgaacggctcgccccacatctaccgcgtgccagccgccctcgctcccgttcagtccgtctcccccctctctccatccaaagcctacgcgccgccgccccgccaccgggcgcgccctcgttctcctacctagccgtgttctccaactgcccgctcgtcgccgcggtgctcaccttcgccatcgcgcaatccatcaaggtcctcaccacctggtataaggagaaccggtgggatgcgaagcagctggtgggctccggtgggatgccgtcctcgcactcggccaccgtcacagcgctcgccgtcgccgtcggcctgtaagaggggctcgccagctcgctgttcgccaccgccgtcgtctttgtctccgtgctctattccatcgctcccgtactccctgttgcggcggttgagaacagtggcgacaagatctcatggagagaagctatgcggaccccaggaaaggtgaagtcgtcgtgcgatggtggagatggccgatgggaggctccaccaaccctagggtgcggccaacaagacgctactcgccactgcgtgggtcggcagtgagatctcagggagagaagccatgcaaccccatgaaaggcgaaactgtcgcacgatggtggagacgaccggcggtaggatgcaagtatgagcatttggcaaagagagtattcctccccatgctcccgctccctcctgcaccccacgctcgccgacgagccgctcgacctcgtcgcagcttgccgagccatcatgcgcctcggtgcggtggtcaacatcatccacgccgtcaatcgcttgttggtcctacgctcagtgcatgagtccttcaactggcggtggtggagcaaccgtactaccacagcgcatacacaggacgtagagaacaactccagaaggtgagccccagatctccgctgccgtcttctcgcctgaaaaaagaggggcatctctatcgccaccaaccactagcaggcggcggacgctgctcgcaggaggcacaataagccacttcaggcttcagtctgttctgtgatcagcagaacattatgggctctaaaacaggaggacttttgagatttacagagcttcaactaagtcaacttgttgagtcgcttgttacatatcttttgcatatgggaaaaaataatagataaggtacttggagttggcaaacaattgtttgatatacccttttcatatgcacttgttttttggttaccaacctgctagctaataacaagttttcactcatctctaccattttttggaatggcggcgtctcttcgctatatgtcaatcaaagaggtagtgtgagacacatattggcaactgaccaaatgacttcagatatttggggtctcatcgatgttcaaacagagaatgcacaaagtagtcagaaatgatgcttgtcaattgtcaaacttattttggttggcttattttcaagattaaatgatctctggtaactgaggagaatgttgtagatgttgattttccttttaggaaggtgaagctctccgatgtggtagggggaatggaaaatgtgcatatatgcttctgattgcagtgagattagcctcgtccaagttatgggatctgccatgaactagacaagattataagtttacagaggccttacatcaagagagtacaagattgccataaggaagtaaagtctttgagaaaagtgaccttatgagaagcttgagaaaatcaacttgtgtgtgagaagttttgtctacttgtgctaattagtcatatgatatttttagtcatgaactagacaagatcagaagtttaaagaggttttacatcgagtacaagatcgccataaggaagtacaagtctttgaggaaagtgaccttatgaaaagtttgagcaaatcaacttgtgtgcgagaagttttgtctacttgtgctgatcagtcataccttggaatattgctgaattgttgcctttgttgctcattggcttcaatacttcatacaccatcaaatgagtcatgtgcaaaattcttcgaagcatcagttcttgctctagaagaacttcatcagaggcggggtcgaatcagcaacgacggctgacatgacgctacccatccagttgctcactgctcaggttatagcgaagaacattgtcttagctggatacaaggagatgcagaagctctgagttttgaggatggatctatggatggttacactatcgcatttgggatcagaaatgtgacacacattgagaaagctctatcagaagcttacagttgatggttctaaagcaagggtggaggttcctatgcttggagttgagtcatgtggatgtccctatttttaaatagatgaaaagtttgctcagatgattcaggaagccggattccagagggtggaatatgaaaacctcctgagcggtgtagttgccattcattctggactgaaactgtagagctgaatacagatggttgttttttcatgggtgcaccgattctacaattagtagtatttgttgttttttaatgaattctataataggttcggtggcttgtaaaagcagctggtgctggctgtcagcatcatcacaatatgtagaataagtagtatttgctagaagtatgtgctggagcagtagcgtcagtggctattttggcttttaagccagctgacctcttccatttgtaaagctttttcttggaaacgtgaaaccatccagaacatcaaattagtcttatcacatacctcctgcaatacatttttttgttctgaaaacaatgtcagagttaaaataagattgacttagcatctgagctgacttaccatcaaggcaaagatgtattcacagagcaatagcatgctcgctaccttggcagcttggcaagaaacctcatcatgtccacaggctgcttcgggatcaggagccgctgcgtgacgtcttcttgggtttggccgggaagaggcacgattacaacggaacattggactcgttggacggcacgagccctagg

SEQ ID NO: 15193 - DNA, 2901 bp, Zea Mays
cgaacggctcgccccacatctaccgcgtgccagccgccctcgctcccgttcagtccgtctcccccctctctccatccaaagcctacgcgccgccgccccgccaccgggcgcgccctcgttctcctacctagccgtgttctccaactgcccgctcgtcgccgcggtgctcaccttcgccatcgcgcaatccatcaaggtcctcaccacctggtataaggagaaccggtgggatgcgaagcagctggtgggctccggtgggatgccgtcctcgcactcggccaccgtcacagcgctcgccgtcgccgtcggcctgtaagaggggctcgccagctcgctgttcgccaccgccgtcgtctttgtctccgtggttggttaccctccccactccccctctccctttcgacaccaaaaaaacgcactgaccatctttggcaagctgtcgcccaccccaccccaaaaccctagctctattccatcgctcccgtactccctgttgcggcggttgagaacagtggcgacaagatctcatggagagaagctatgcggaccccaggaaaggtgaagtcgtcgtgcgatggtggagatggccgatgggaggctccaccaaccctagggtgcggccaacaagacgctactcgccactgcgtgggtcggcagtgagatctcagggagagaagccatgcaaccccatgaaaggcgaaactgtcgcacgatggtggagacgaccggcggtaggatgcaagtatgagcatttggcaaagagagtattcctccccatgctcccgctccctcctgcaccccacgctcgccgacgagccgctcgacctcgtcgcagcttgccgagccatcatgcgcctcggtgcggtggtcaacatcatccacgccgtcaatcgcttgttggtcctacgctcagtgcatgagtccttcaactggcggtggtggagcaaccgtactaccacagcgcatacacaggacgtagagaacaactccagaaggtgagccccagatctccgctgccgtcttctcgcctgaaaaaagaggggcatctctatcgccaccaaccactagcaggcggcggacgctgctcgcaggaggcacaataagccacttcaggcttcagtctgttctgtgatcagcagaacattatgggctctaaaacaggaggacttttgagatttacagagcttcaactaagtcaacttgttgagtcgcttgttacatatcttttgcatatgggaaaaaataatagataagaggtagtgtgagacacatattggcaactgaccaaatgacttcagatatttggggtctcatcgatgttcaaacagagaatgcacaaagtagtcagaaatggtaattatattgtcattgttgttgctggtagtgatgttacttgttctactatcacgaaggagaaatttgatccaattgatgcttgtcaattgtcaaacttattttggttggcttattttcaagattaaatgatctctggtaactgaggagaatgttgtagatgttgattttccttttaggaaggtgaagctctccgatgtggtagggggaatggaaaatgtgcatatatgcttctgattgcagtgagattagcctcgtccaagttatgggatctgccatgaactagacaagattataagtttacagaggccttacatcaagagagtacaagattgccataaggaagtaaagtctttgagaaaagtgaccttatgagaagcttgagaaaatcaacttgtgtgtgagaagttttgtctacttgtgctaattagtcatatgatatttttagtcatgaactagacaagatcagaagtttaaagaggttttacatcgagtacaagatcgccataaggaagtacaagtctttgaggaaagtgaccttatgaaaagtttgagcaaatcaacttgtgtgcgagaagttttgtctacttgtgctgatcagtcataccttggaatattgctgaattgttgcctttgttgctcattggcttcaatacttcatacaccatcaaatgagtcatgtgcaaaattcttcgaagcatcagttcttgctctagaagaacttcatcagttgctcactgctcaggttatagcgaagaacattgtcttagctggatacaaggagatgcagaagctctgagttttgaggatggatctatggatggttacactatcgcatttgggatcagaaatgtgacacacattgagaaagctctatcagaagcttacaggaaaagtttgctcagatgattcaggaagccggattccagagggtggaatatgaaaacctcctgagcggtgtagttgccattcattctggactgaaactgtagagctgaatacagatggttgttttttcatgggtgcaccgattctacaattagtagtatttgttgttttttaatgaattctataataggttcggtggcttgtaaaagcagctggtgctggctgtcagcatcatcacaatatgtagaataagtagtatttgctagaagtatgtgctggagcagtagcgtcagtggctattttggcttttaagccagctgacctcttccatttgtaaagctttttcttggaaacgtgaaaccatccagaacatcaaattagtcttatcacatacctcctgcaatacatttttttgttctgaaaacaatgtcagagttaaaataagattgacttagcatctgagctgacttaccatcaaggcaaagatgtattcacagagcaatagcatgctcgctaccttggcagcttggcaagaaacctcatcatgtccacaggctgcttcgggatcaggagccgctgcgtgacgtcttcttgggtttggccgggaagaggcacgattacaacggaacattggactcgttggacggcacgagccctagg

SEQ ID NO: 15194 - DNA, 2272 bp, Zea Mays
acggctcgccccacatctaccgcgtgccagccgccctcgctcccgttcagtccgtctcccccctctctccatccaaagcctacgcgccgccgccccgccaccgggcgcgccctcgttctcctacctagccgtgttctccaactgcccgctcgtcgccgcggtgctcaccttcgccatcgcgcaatccatcaaggtcctcaccacctggcacaataagccacttcaggcttcagtctgttctgtgatcagcagaacattatgggctctaaaacaggaggacttttgaggtattttgatgccaaaatttttagacataccatcattgaagttgctctgatctgtacaacatttacaagatttacagagcttcaactaagtcaacttgttgagtcgcttgttacatatcttttgcatatgggaaaaaataatagataagaggtagtgtgagacacatattggcaactgaccaaatgacttcagatatttggggtctcatcgatgttcaaacagagaatgcacaaagtagtcagaaatgatgcttgtcaattgtcaaacttattttggttggcttattttcaagattaaatgatctctggtaactgaggagaatgttgtagatgttgattttccttttaggaaggtgaagctctccgatgtggtagggggaatggaaaatgtgcatatatgcttctgattgcagtgagattagcctcgtccaagttatgggatctgccatgaactagacaagattataagtttacagaggccttacatcaagagagtacaagattgccataaggaagtaaagtctttgagaaaagtgaccttatgagaagcttgagaaaatcaacttgtgtgtgagaagttttgtctacttgtgctaattagtcatatgatatttttagtcatgaactagacaagatcagaagtttaaagaggttttacatcgagtacaagatcgccataaggaagtacaagtctttgaggaaagtgaccttatgaaaagtttgagcaaatcaacttgtgtgcgagaagttttgtctacttgtgctgatcagtcataccttggaatattgctgaattgttgcctttgttgctcattggcttcaatacttcatacaccatcaaatgagtcatgtgcaaaattcttcgaagcatcagttcttgctctagaagaacttcatcaggtgattactcttttgctttcctttattgaataattagcacatgtgcgttcaaaaaaattgccacatgaatgaaatgatatattctcgaattattctattgagtttttttgttttgatcacaacaccaccctggcgcgctagaggcggggtcgaatcagcaacgacggctgacatgacgctacccatccagttgctcactgctcaggttatagcgaagaacattgtcttagctggatacaaggagatgcagaagctctgagttttgaggatggatctatggatggttacactatcgcatttgggatcagaaatgtgacacacattgagaaagctctatcagaagcttacagttgatggttctaaagcaagggtggaggttcctatgcttggagttgagtcatgtggatgtccctatttttaaatagatgaaaagtttgctcagatgattcaggaagccggattccagagggtggaatatgaaaacctcctgagcggtgtagttgccattcattctggactgaaactgtagagctgaatacagatggttgttttttcatgggtgcaccgattctacaattagtagtatttgttgttttttaatgaattctataataggttcggtggcttgtaaaagcagctggtgctggctgtcagcatcatcacaatatgtagaataagtagtatttgctagaagtatgtgctggagcagtagcgtcagtggctattttggcttttaagccagctgacctcttccatttgtaaagctttttcttggaaacgtgaaaccatccagaacatcaaattagtcttatcacatacctcctgcaatacatttttttgttctgaaaacaatgtcagagttaaaataagattgacttagcatctgagctgacttaccatcaaggcaaagatgtattcacagagcaatagcatgctcgctaccttggcagcttggcaagaaacctcatcatgtccacaggctgcttcgggatcaggagccgctgcgtgacgtcttcttgggtttggccgggaagaggcacgattacaacggaacattggactcgttggacggcacgagccctagg

SEQ ID NO: 15195 - DNA, 3434 bp, Zea Mays
acggctcgccccacatctaccgcgtgccagccgccctcgctcccgttcagtccgtctcccccctctctccatccaaagcctacgcgccgccgccccgccaccgggcgcgccctcgttctcctacctagccgtgttctccaactgcccgctcgtcgccgcggtgctcaccttcgccatcgcgcaatccatcaaggtcctcaccacctggtataaggagaaccggtgggatgcgaagcagctggtgggctccggtgggatgccgtcctcgcactcggccaccgtcacagcgctcgccgtcgccgtcggcctgtaagaggggctcgccagctcgctgttcgccaccgccgtcgtctttgtctccgtgctctattccatcgctcccgtactccctgttgcggcggttgagaacagtggcgacaagatctcatggagagaagctatgcggaccccaggaaaggtgaagtcgtcgtgcgatggtggagatggccgatgggaggctccaccaaccctagggtgcggccaacaagacgctactcgccactgcgtgggtcggcagtgagatctcagggagagaagccatgcaaccccatgaaaggcgaaactgtcgcacgatggtggagacgaccggcggtaggatgcaagtatgagcatttggcaaagagagtattcctccccatgctcccgctccctcctgcaccccacgctcgccgacgagccgctcgacctcgtcgcagcttgccgagccatcatgcgcctcggtgcggtggtcaacatcatccacgccgtcaatcgcttgttggtcctacgctcagtgcatgagtccttcaactggcggtggtggagcaaccgtactaccacagcgcatacacaggacgtagagaacaactccagaaggtgagccccagatctccgctgccgtcttctcgcctgaaaaaagaggggcatctctatcgccaccaaccactagcaggcggcggacgctgctcgcaggaggtaacggcgtgcatcagggtaatatattgcaaacagtttagggtttcagtttcattcacgagtttagtacatgattactgtattttctcgttggattctgagctcccagcctgatgattagcgttgtttgcacaaagaaccgagatatgtcgtcgaagaccacctaattgtttctcatggcagacttgcttgcttgctctggcttggttcattgacaatttaccacttccttagttcctctgatcctctgttctatcagttatggtgtagttttcctctgtgagaagaaacctgtaaccacacatacacgcacatgcatgccactcattgtttggttcatttagttatcatttacttttggcataacaggcacaataagccacttcaggcttcagtctgttctgtgatcagcagaacattatgggctctaaaacaggaggacttttgaggtattttgatgccaaaatttttagacataccatcattgaagttgctctgatctgtacaacatttacaagatttacagagcttcaactaagtcaacttgttgagtcgcttgttacatatcttttgcatatgggaaaaaataatagataaggtacttggagttggcaaacaattgtttgatatacccttttcatatgcacttgttttttggttaccaacctgctagctaataacaagttttcactcatctctaccattttttggaatggcggcgtctcttcgctatatgtcaatcaaagaggtagtgtgagacacatattggcaactgaccaaatgacttcagatatttggggtctcatcgatgttcaaacagagaatgcacaaagtagtcagaaatgatgcttgtcaattgtcaaacttattttggttggcttattttcaagattaaatgatctctggtaactgaggagaatgttgtagatgttgattttccttttaggaaggtgaagctctccgatgtggtagggggaatggaaaatgtgcatatatgcttctgattgcagtgagattagcctcgtccaagttatgggatctgccatgaactagacaagattataagtttacagaggccttacatcaagagagtacaagattgccataaggaagtaaagtctttgagaaaagtgaccttatgagaagcttgagaaaatcaacttgtgtgtgagaagttttgtctacttgtgctaattagtcatatgatatttttagtcatgaactagacaagatcagaagtttaaagaggttttacatcgagtacaagatcgccataaggaagtacaagtctttgaggaaagtgaccttatgaaaagtttgagcaaatcaacttgtgtgcgagaagttttgtctacttgtgctgatcagtcataccttggaatattgctgaattgttgcctttgttgctcattggcttcaatacttcatacaccatcaaatgagtcatgtgcaaaattcttcgaagcatcagttcttgctctagaagaacttcatcagaggcggggtcgaatcagcaacgacggctgacatgacgctacccatccagttgctcactgctcaggttatagcgaagaacattgtcttagctggatacaaggagatgcagaagctctgagttttgaggatggatctatggatggttacactatcgcatttgggatcagaaatgtgacacacattgagaaagctctatcagaagcttacagttgatggttctaaagcaagggtggaggttcctatgcttggagttgagtcatgtggatgtccctatttttaaatagatgaaaagtttgctcagatgattcaggaagccggattccagagggtggaatatgaaaacctcctgagcggtgtagttgccattcattctggactgaaactgtagagctgaatacagatggttgttttttcatgggtgcaccgattctacaattagtagtatttgttgttttttaatgaattctataataggttcggtggcttgtaaaagcagctggtgctggctgtcagcatcatcacaatatgtagaataagtagtatttgctagaagtatgtgctggagcagtagcgtcagtggctattttggcttttaagccagctgacctcttccatttgtaaagctttttcttggaaacgtgaaaccatccagaacatcaaattagtcttatcacatacctcctgcaatacatttttttgttctgaaaacaatgtcagagttaaaataagattgacttagcatctgagctgacttaccatcaaggcaaagatgtattcacagagcaatagcatgctcgctaccttggcagcttggcaagaaacctcatcatgtccacaggctgcttcgggatcaggagccgctgcgtgacgtcttcttgggtttggccgggaagaggcacgattacaacggaacattggactcgttggacggcacgagccctagg

SEQ ID NO: 15196 - DNA, 3653 bp, Zea Mays
acggctcgccccacatctaccgcgtgccagccgccctcgctcccgttcagtccgtctcccccctctctccatccaaagcctacgcgccgccgccccgccaccgggcgcgccctcgttctcctacctagccgtgttctccaactgcccgctcgtcgccgcggtgctcaccttcgccatcgcgcaatccatcaaggtcctcaccacctggtataaggagaaccggtgggatgcgaagcagctggtgggctccggtgggatgccgtcctcgcactcggccaccgtcacagcgctcgccgtcgccgtcggcctgtaagaggggctcgccagctcgctgttcgccaccgccgtcgtctttgtctccgtgctctattccatcgctcccgtactccctgttgcggcggttgagaacagtggcgacaagatctcatggagagaagctatgcggaccccaggaaaggtgaagtcgtcgtgcgatggtggagatggccgatgggaggctccaccaaccctagggtgcggccaacaagacgctactcgccactgcgtgggtcggcagtgagatctcagggagagaagccatgcaaccccatgaaaggcgaaactgtcgcacgatggtggagacgaccggcggtaggatgcaagtatgagcatttggcaaagagagtattcctccccatgctcccgctccctcctgcaccccacgctcgccgacgagccgctcgacctcgtcgcagcttgccgagccatcatgcgcctcggtgcggtggtcaacatcatccacgccgtcaatcgcttgttggtcctacgctcagtgcatgagtccttcaactggcggtggtggagcaaccgtactaccacagcgcatacacaggacgtagagaacaactccagaaggtgagccccagatctccgctgccgtcttctcgcctgaaaaaagaggggcatctctatcgccaccaaccactagcaggcggcggacgctgctcgcaggaggtaacggcgtgcatcagggtaatatattgcaaacagtttagggtttcagtttcattcacgagtttagtacatgattactgtattttctcgttggattctgagctcccagcctgatgattagcgttgtttgcacaaagaaccgagatatgtcgtcgaagaccacctaattgtttctcatggcagacttgcttgcttgctctggcttggttcattgacaatttaccacttccttagttcctctgatcctctgttctatcagttatggtgtagttttcctctgtgagaagaaacctgtaaccacacatacacgcacatgcatgccactcattgtttggttcatttagttatcatttacttttggcataacaggcacaataagccacttcaggcttcagtctgttctgtgatcagcagaacattatgggctctaaaacaggaggacttttgaggtattttgatgccaaaatttttagacataccatcattgaagttgctctgatctgtacaacatttacaagatttacagagcttcaactaagtcaacttgttgagtcgcttgttacatatcttttgcatatgggaaaaaataatagataaggtacttggagttggcaaacaattgtttgatatacccttttcatatgcacttgttttttggttaccaacctgctagctaataacaagttttcactcatctctaccattttttggaatggcggcgtctcttcgctatatgtcaatcaaagaggtagtgtgagacacatattggcaactgaccaaatgacttcagatatttggggtctcatcgatgttcaaacagagaatgcacaaagtagtcagaaatggtaattatattgtcattgttgttgctggtagtgatgttacttgttctactatcacgaaggagaaatttgatccaattgatgcttgtcaattgtcaaacttattttggttggcttattttcaagattaaatgatctctggtaactgaggagaatgttgtagatgttgattttccttttaggaaggtgaagctctccgatgtggtagggggaatggaaaatgtgcatatatgcttctgattgcagtgagattagcctcgtccaagttatgggatctgccatgaactagacaagattataagtttacagaggccttacatcaagagagtacaagattgccataaggaagtaaagtctttgagaaaagtgaccttatgagaagcttgagaaaatcaacttgtgtgtgagaagttttgtctacttgtgctaattagtcatatgatatttttagtcatgaactagacaagatcagaagtttaaagaggttttacatcgagtacaagatcgccataaggaagtacaagtctttgaggaaagtgaccttatgaaaagtttgagcaaatcaacttgtgtgcgagaagttttgtctacttgtgctgatcagtcataccttggaatattgctgaattgttgcctttgttgctcattggcttcaatacttcatacaccatcaaatgagtcatgtgcaaaattcttcgaagcatcagttcttgctctagaagaacttcatcaggtgattactcttttgctttcctttattgaataattagcacatgtgcgttcaaaaaaattgccacatgaatgaaatgatatattctcgaattattctattgagtttttttgttttgatcacaacaccaccctggcgcgctagaggcggggtcgaatcagcaacgacggctgacatgacgctacccatccagttgctcactgctcaggttatagcgaagaacattgtcttagctggatacaaggagatgcagaagctctgagttttgaggatggatctatggatggttacactatcgcatttgggatcagaaatgtgacacacattgagaaagctctatcagaagcttacagttgatggttctaaagcaagggtggaggttcctatgcttggagttgagtcatgtggatgtccctatttttaaatagatgaaaagtttgctcagatgattcaggaagccggattccagagggtggaatatgaaaacctcctgagcggtgtagttgccattcattctggactgaaactgtagagctgaatacagatggttgttttttcatgggtgcaccgattctacaattagtagtatttgttgttttttaatgaattctataataggttcggtggcttgtaaaagcagctggtgctggctgtcagcatcatcacaatatgtagaataagtagtatttgctagaagtatgtgctggagcagtagcgtcagtggctattttggcttttaagccagctgacctcttccatttgtaaagctttttcttggaaacgtgaaaccatccagaacatcaaattagtcttatcacatacctcctgcaatacatttttttgttctgaaaacaatgtcagagttaaaataagattgacttagcatctgagctgacttaccatcaaggcaaagatgtattcacagagcaatagcatgctcgctaccttggcagcttggcaagaaacctcatcatgtccacaggctgcttcgggatcaggagccgctgcgtgacgtcttcttgggtttggccgggaagaggcacgattacaacggaacattggactcgttggacggcacgagccctagg

SEQ ID NO: 15197 - DNA, 2559 bp, Zea Mays
acggctcgccccacatctaccgcgtgccagccgccctcgctcccgttcagtccgtctcccccctctctccatccaaagcctacgcgccgccgccccgccaccgggcgcgccctcgttctcctacctagccgtgttctccaactgcccgctcgtcgccgcggtgctcaccttcgccatcgcgcaatccatcaaggtcctcaccacctggtataaggagaaccggtgggatgcgaagcagctggtgggctccggtgggatgccgtcctcgcactcggccaccgtcacagcgctcgccgtcgccgtcggcctgtaagaggggctcgccagctcgctgttcgccaccgccgtcgtctttgtctccgtggcacaataagccacttcaggcttcagtctgttctgtgatcagcagaacattatgggctctaaaacaggaggacttttgagatttacagagcttcaactaagtcaacttgttgagtcgcttgttacatatcttttgcatatgggaaaaaataatagataagaggtagtgtgagacacatattggcaactgaccaaatgacttcagatatttggggtctcatcgatgttcaaacagagaatgcacaaagtagtcagaaatgatgcttgtcaattgtcaaacttattttggttggcttattttcaagattaaatgatctctggtaactgaggagaatgttgtagatgttgattttccttttaggaaggtgaagctctccgatgtggtagggggaatggaaaatgtgcatatatgcttctgattgcagtgagattagcctcgtccaagttatgggatctgccatgaactagacaagattataagtttacagaggccttacatcaagagagtacaagattgccataaggaagtaaagtctttgagaaaagtgaccttatgagaagcttgagaaaatcaacttgtgtgtgagaagttttgtctacttgtgctaattagtcatatgatatttttagtcatgaactagacaagatcagaagtttaaagaggttttacatcgagtacaagatcgccataaggaagtacaagtctttgaggaaagtgaccttatgaaaagtttgagcaaatcaacttgtgtgcgagaagttttgtctacttgtgctgatcagtcataccttggaatattgctgaattgttgcctttgttgctcattggcttcaatacttcatacaccatcaaatgagtcatgtgcaaaattcttcgaagcatcagttcttgctctagaagaacttcatcagaggcggggtcgaatcagcaacgacggctgacatgacgctacccatccagttgctcactgctcaggttatagcgaagaacattgtcttagctggatacaaggagatgcagaagctctgagttttgaggatggatctatggatggttacactatcgcatttgggatcagaaatgtgacacacattgagaaagctctatcagaagcttacaggtcggctaatttagaaccctaacaattattattgctcatgtttaaattattactgtttgaacttcagtatatgtgtatattcttcgtgattaagttttttttgtcttcgtgtgcagtatcatggattaagcttttttatattttaccatgtttgtttagttgatggttctgaaatgtcattactgtcatatcaattggcatatttcaaaattttttttgcttagttgatggttctaaagcaagggtggaggttcctatgcttggagttgagtcatgtggatgtccctatttttaaatagatttatgatgcttactcgttttctatgattccggctattggagagctggttgatggtgatcggcagatagaagacaggcaacatgctaaccaggcctgtgaaccttaaaccttggcaggaaaagtttgctcagatgattcaggaagccggattccagagggtggaatatgaaaacctcctgagcggtgtagttgccattcattctggactgaaactgtagagctgaatacagatggttgttttttcatgggtgcaccgattctacaattagtagtatttgttgttttttaatgaattctataataggttcggtggcttgtaaaagcagctggtgctggctgtcagcatcatcacaatatgtagaataagtagtatttgctagaagtatgtgctggagcagtagcgtcagtggctattttggcttttaagccagctgacctcttccatttgtaaagctttttcttggaaacgtgaaaccatccagaacatcaaattagtcttatcacatacctcctgcaatacatttttttgttctgaaaacaatgtcagagttaaaataagattgacttagcatctgagctgacttaccatcaaggcaaagatgtattcacagagcaatagcatgctcgctaccttggcagcttggcaagaaacctcatcatgtccacaggctgcttcgggatcaggagccgctgcgtgacgtcttcttgggtttggccgggaagaggcacgattacaacggaacattggactcgttggacggcacgagccctagg

SEQ ID NO: 15198 - DNA, 2374 bp, Zea Mays
tacacgttcagtagtgaacaacgcgtgcgtttggggtggggagccgaagccgcttctagcggccacaatcggtataaaggcgaaacaaacgcagccgaagttgttcctcccgcaagctcccatccgcccgctaccccacgctctgcgcctctgcctagggttacgagcgacgctgcgccgtcggctggtgcattgacgagcgacgccgcgcggggttacgagcgacgccgtcggctggtgcgttactctcgtgtgcacagcaatggcgaatctccagagaggagaggaacccaagtgtacaagtgaaagaaatcaaaggattaaggtttaaggatgtcatcagaaactgcagctgcaccttctgaaactgaagcagctagagtgaatctcctaaaaagaaattcagatgatgttggatgggaatatggtgttcttgttgatgctaacaacaaagacaaggtgaagtgtaagttctgtgacaaggagatgaggggagggatttataggttgaaggagcatcttgcccatgttggaaagaatgtgaagaaatgcacgtctgcaacaccgcaggctctagaggctaaagagaagtgcaagaaagcaatagaggctgcaaaaaggaagagggaggagaagactgttcgtgagctagaacttagagaggaagtgaatgtatctagggttggagaggagtcagaagaagtcacttgtgttagaagctcacagcctcacaaattagggccaattgacaaatggacacgtgctattgatcctaccaaggctgattcattcaaacaacagcagctgaacaaggaattatggaaagaaagagagcatgaggtgcacaagtttattgcaagatgggcctataatcatggaatacctttcaatgcatgtgacaatgatgagttcaagcaaatgtgtgaagcaattggacaatttggaccaggacttacacctccaactcaagatgcctttcgaggtagtttgctggaagaagaatatgaaagaaccaagtgtttgttgcaggaacgtgaagccgagaagatgaaaaatgggtttgatgcaagtaccacgtgtttgatgcaagtagtcactgacaatgcctctaacaacatgggagcaaagaagctattgcttgagaagagaccacaaatattttggacctcttgtgcagctcacacaatcaacttgatgctccaaggaattggcaaattgcctcggttcaggaaagtgattgaccaagccttttggaaggatgtgaagctaatgttggctgtttttgagccattggtcaaagtcctccgtttggttgatggggatgtgaagccatccatgggtttcctttatggagagctactaaaggcaaaaagagagatcaaagaggcctttggcaatgttgagtttcgattcaaagatgttatggctgtaactgagaagaagatgaatggaagacttgattctccattgcatttgacagcttttttgctgaatccacactatagctatgctaacccatcaatatttgatgagcccaaaatgaatgaagccttcatatcttgtgtcgagcaattttattatcatgatgaggaccaacaagaacaggctgccaactttgaattgaaaaaatttcagaatagagaaggaccatttagcaagaagcttgcaagaacttttcaaaactatgattacaatccagcatcatggtggcagttatatggaactgaaacatcagctttacaaaagatggctacaaggatattatctttgacatcaagctcttctggttgtgaaagaaattggagtgggtttgaagggatacacactaagaagagaaataggctgactacaacccgcctcaacaagttggtctatattcagttcaataacaggctgatgaataacagagaaaagattaagtcaaagaaaatcactgatgttctcttgtctagtgatacaactgaagctcaaggttttctccaagagggtggagatgattgtgcacaagttgtctttagagatgaggaagatgagatggaaggtacagggataccttggtctgttattggagaggcagtgggagcagaagaacagcttgagccttgtagaagtgcaagagtgagagagctctatgaaggagaagagtttgagtctgaagaagaagagtatgaagatgaagatttgtgctatagtgaagatgaaatatgatctggaccatctccatctagtagtgaagccttttgtgatgccctggtcttatgaactgcagctgtgtcactttgtgtctgtgtgtcttcttttgtgtgagacctgaactaagaactatgtgcttgtgttgtcctttatttataaattgtgttctgcacttgtatta

SEQ ID NO: 15199 - DNA, 986 bp, Zea Mays
gccgcttctagcggccacaatcggtataaaggcgaaacaaacgcagccgaagttgttcctcccgcaagctcccatccgcccgctaccccacgctctgcgcctctgcctagggttacgagcgacgctgcgccgtcggctggtgcattgacgagcgacgccgcgcggggttacgagcgacgccgtcggctggtgcgttactctcgtgtgcacagcaatggcgaatctccagagaggagaggaacccaagaatagagaaggaccatttagcaagaagcttgcaagaacttttcaaaactatgattacaatccagcatcatggtggcagttatatggaactgaaacatcagctttacaaaagatggctacaaggatattatctttgacatcaagctcttctggttgtgaaagaaattggagtgggtttgaagggatacacactaagaagagaaataggctgactacaacccgcctcaacaagttggtctatattcagttcaataacaggctgatgaataacagagaaaagattaagtcaaagaaaatcactgatgttctcttgtctagtgatacaactgaagctcaaggttttctccaagagggtggagatgattgtgcacaagttgtctttagagatgaggaagatgagatggaaggtacagggataccttggtctgttattggagaggcagtgggagcagaagaacagcttgagccttgtagaagtgcaagagtgagagagctctatgaaggagaagagtttgagtctgaagaagaagagtatgaagatgaagatttgtgctatagtgaagatgaaatatgatctggaccatctccatctagtagtgaagccttttgtgatgccctggtcttatgaactgcagctgtgtcactttgtgtctgtgtgtcttcttttgtgtgagacctgaactaagaactatgtgcttgtgttgtcctttatttataaattgtgttctgcacttgtatta

SEQ ID NO: 15200 - DNA, 443 bp, Zea Mays
gcgaaacaaacgcagccgaagttgttcctcccgcaagctcccatccgcccgctaccccacgctctgcgcctctgcctagggttacgagcgacgctgcgccgtcggctggtgcattgacgagcgacgccgcgcggggttacgagcgacgccgtcggctggtgcgttactctcgtgtgcacagcaatggcgaatctccagagaggagaggaacccaagacactgtatttgcgagggatttgatcggtgcactggccgcaacagccgtggcaacatggaaggatggtgtcgtgatcccccttctgaagatgctccaagacaacatgttgcatttcggccgcggggacgatcaggtatctgtgtggtctaatgttcaaggattatatattctcttactcctaatgatgctgacatgttgtagttggcaattatgtgagctgttgtgc

SEQ ID NO: 15201 - DNA, 1541 bp, Zea Mays
gttgttcctcccgcaagctcccatccgcccgctaccccacgctctgcgcctctgcctagggttacgagcgacgctgcgccgtcggctggtgcattgacgagcgacgccgcgcggggttacgagcgacgccgtcggctggtgcgttactctcgtgtgcacagcaatggcgaatctccagagaggagaggaacccaaggaacgtgaagccgagaagatgaaaaatgggtttgatgcaagtaccacgtgtttgatgcaagtagtcactgacaatgcctctaacaacatgggagcaaagaagctattgcttgagaagagaccacaaatattttggacctcttgtgcagctcacacaatcaacttgatgctccaaggaattggcaaattgcctcggttcaggaaagtgattgaccaagccttttggaaggatgtgaagctaatgttggctgtttttgagccattggtcaaagtcctccgtttggttgatggggatgtgaagccatccatgggtttcctttatggagagctactaaaggcaaaaagagagatcaaagaggcctttggcaatgttgagtttcgattcaaagatgttatggctgtaactgagaagaagatgaatggaagacttgattctccattgcatttgacagcttttttgctgaatccacactatagctatgctaacccatcaatatttgatgagcccaaaatgaatgaagccttcatatcttgtgtcgagcaattttattatcatgatgaggaccaacaagaacaggctgccaactttgaattgaaaaaatttcagaatagagaaggaccatttagcaagaagcttgcaagaacttttcaaaactatgattacaatccagcatcatggtggcagttatatggaactgaaacatcagctttacaaaagatggctacaaggatattatctttgacatcaagctcttctggttgtgaaagaaattggagtgggtttgaagggatacacactaagaagagaaataggctgactacaacccgcctcaacaagttggtctatattcagttcaataacaggctgatgaataacagagaaaagattaagtcaaagaaaatcactgatgttctcttgtctagtgatacaactgaagctcaaggttttctccaagagggtggagatgattgtgcacaagttgtctttagagatgaggaagatgagatggaaggtacagggataccttggtctgttattggagaggcagtgggagcagaagaacagcttgagccttgtagaagtgcaagagtgagagagctctatgaaggagaagagtttgagtctgaagaagaagagtatgaagatgaagatttgtgctatagtgaagatgaaatatgatctggaccatctccatctagtagtgaagccttttgtgatgccctggtcttatgaactgcagctgtgtcactttgtgtctgtgtgtcttcttttgtgtgagacctgaactaagaactatgtgcttgtgttgtcctttatttataaattgtgttctgcacttgtatta

SEQ ID NO: 15202 - DNA, 2134 bp, Zea Mays
ctcatcccctcctgctgctcccccgccggctgctcccctccctgctcccccgccgtgtacaagtgaaagaaatcaaaggattaaggtttaaggatgtcatcagaaactgcagctgcaccttctgaaactgaagcagctagagtgaatctcctaaaaagaaattcagatgatgttggatgggaatatggtgttcttgttgatgctaacaacaaagacaaggtgaagtgtaagttctgtgacaaggagatgaggggagggatttataggttgaaggagcatcttgcccatgttggaaagaatgtgaagaaatgcacgtctgcaacaccgcaggctctagaggctaaagagaagtgcaagaaagcaatagaggctgcaaaaaggaagagggaggagaagactgttcgtgagctagaacttagagaggaagtgaatgtatctagggttggagaggagtcagaagaagtcacttgtgttagaagctcacagcctcacaaattagggccaattgacaaatggacacgtgctattgatcctaccaaggctgattcattcaaacaacagcagctgaacaaggaattatggaaagaaagagagcatgaggtgcacaagtttattgcaagatgggcctataatcatggaatacctttcaatgcatgtgacaatgatgagttcaagcaaatgtgtgaagcaattggacaatttggaccaggacttacacctccaactcaagatgcctttcgaggtagtttgctggaagaagaatatgaaagaaccaagtgtttgttgcaggaacgtgaagccgagaagatgaaaaatgggtttgatgcaagtaccacgtgtttgatgcaagtagtcactgacaatgcctctaacaacatgggagcaaagaagctattgcttgagaagagaccacaaatattttggacctcttgtgcagctcacacaatcaacttgatgctccaaggaattggcaaattgcctcggttcaggaaagtgattgaccaagccttttggaaggatgtgaagctaatgttggctgtttttgagccattggtcaaagtcctccgtttggttgatggggatgtgaagccatccatgggtttcctttatggagagctactaaaggcaaaaagagagatcaaagaggcctttggcaatgttgagtttcgattcaaagatgttatggctgtaactgagaagaagatgaatggaagacttgattctccattgcatttgacagcttttttgctgaatccacactatagctatgctaacccatcaatatttgatgagcccaaaatgaatgaagccttcatatcttgtgtcgagcaattttattatcatgatgaggaccaacaagaacaggctgccaactttgaattgaaaaaatttcagaatagagaaggaccatttagcaagaagcttgcaagaacttttcaaaactatgattacaatccagcatcatggtggcagttatatggaactgaaacatcagctttacaaaagatggctacaaggatattatctttgacatcaagctcttctggttgtgaaagaaattggagtgggtttgaagggatacacactaagaagagaaataggctgactacaacccgcctcaacaagttggtctatattcagttcaataacaggctgatgaataacagagaaaagattaagtcaaagaaaatcactgatgttctcttgtctagtgatacaactgaagctcaaggttttctccaagagggtggagatgattgtgcacaagttgtctttagagatgaggaagatgagatggaaggtacagggataccttggtctgttattggagaggcagtgggagcagaagaacagcttgagccttgtagaagtgcaagagtgagagagctctatgaaggagaagagtttgagtctgaagaagaagagtatgaagatgaagatttgtgctatagtgaagatgaaatatgatctggaccatctccatctagtagtgaagccttttgtgatgccctggtcttatgaactgcagctgtgtcactttgtgtctgtgtgtcttcttttgtgtgagacctgaactaagaactatgtgcttgtgttgtcctttatttataaattgtgttctgcacttgtatta

SEQ ID NO: 15203 - DNA, 1933 bp, Zea Mays
tagagatgtgctacattgcagtatgttgttcgcaataattatcttaccttcatctgtgatttttaattacttattcttttttttattcaggaagtgtggatatggcttagttccgcagagttcttggttgatgcctatttagtgctactgaggaagttagctcatggtcaaatggtgattcaggagaaaaaagtccacaagcttgctccccttcacaaacacaaaaggaaaaacgtttttcccctgaatggtgctctagcgctagaaaaaggaatagaaaaactgtcttccacgaaaacatttaccagtctctctattcattggattttaaggctacgcaaagtgattataatcatgaggtttgaagcaaactcttaagcccgtttacgtacaactcactcattctattttataacagttgcatcaaactcccactgataaagatgtgagtttccttagatcaatacgtgtagccaaagcacattaaagtcaacatccatgttgtttgttcatacgcaaaggtaagtcttttttacagcctaaggtcaaacacgctttaggaatatattgtattactattgttttgtaaaagggttaatattatgttttttatgtttcctgtccgcatatttttgtggcagaatttcatctaggcacgaggactaatatttgtgatccttcgagctttcatggccgagattagaatttcatctaagcatgaggaccaatacctttgatcctaagagcttccactgctgtggttctgtttatttctgcttttttgttgaaatatgtggaccagaacctccgatccttacatgcttcctcgatgaggtaattgacacttactttaacatgtcatcttcaccaagttcatgtgttccatgcgctttagttaccctttactttaagaagtaccacatttataattgtcctttcaaattagctttattagtaatgaaatgaattgtgctctgtttggtcctaacattttttcgatatgtttatgtgttgcatgtgcttcacgatgtgcttgtataactatgtgtgtatacccaaagatcactatataactgatctaggtaaacacttatacatatctaggtaaacttatgcaggagacctctcgatataatacaagactcctatacatattacatatgccataagtacaatcgatcttgtataactatgtatatatatcgaaagatcactatataactgatctaggtaaacatttatacatgagaccttttgacataagagaaaccattctatacatttttttgtttgccatacgtccaatccacatgaatcctgtgtagaaaactatcctatgtttgatctacgagattcttgtagagatatttgattatatgtctaaaccatacaattaatttacataatcttagtaaaatgcagcgtatgctgctaccataattttttggcagccacatttacaacgttgtatctaaaatgaagcatgttaattcaaatagcataaaaaagaagtgccttaatactcttatgagacacaccagttaaatgcagacactttttcccttccacaacacagattgtgatatgctcatgacaaattcgttgtgacagatcatagcaatccgttttgcgccccatcaactatacctcctagcaaacctcattgtacacgtagggagttattgaatgaatgaagattatcatcggcaggtagcacgatcagcacataattttctaagggtttctataaactgtattaggtgttggcacatctgctcaacaggctccaacattgcagtgtggtcgccttgacccagagtttgttaaaacctttgcttgtatttggtcccatagttatgtactcatgtcctgaataacgattattttgcatgtgcaaatgttcatgacacagtatcaagtcttagatatttat

SEQ ID NO: 15204 - DNA, 2544 bp, Zea Mays
cattagtttatcttgtatatttgttttacacatgaacttttatgttttattacttaattaggatgacttaatattgaacttctccattggttaattactcattgatgaggtgcaactaatcgattttgttttcgtcaattacttgaattaaagttcttatatgattgttgttcatcatatcatctatataacatcttggtgactttctttgtttaacagcctacatatgatgctcaagcaagtagtctgacatctttcatactaccatttcatttctaaacatgttctccatttattgaacatatcgcttcattgtttaaagtggtttaaaattatttaccacactaattcgtttttttaaaaaatgcagtcaccacaccccataaaaaagattcttactaccttttatttttaactgtctaccaaattgattttacggatcatattaatacctccttagtttcgcatgtggactcactattttggagcagcgctaaattcttcagtataggttgcagcccaaataagaacatgtgttatttccctagtcacacaccctgcttccttatttcaactgttttcaacaggtgattcaggagaaaaaagtccacaagcttgctccccttcacaaacacaaaaggaaaaacgtttttcccctgaatggtgctctagcgctagaaaaaggaatagaaaaactgtcttccacgaaaacatttaccagtctctctattcattggattttaaggctacgcaaagtgattataatcatgaggtttgaagcaaactcttaagcccgtttacgtacaactcactcattctattttataacagttgcatcaaactcccactgataaaggtaaaaagatcactgtcatcttatgtggtcgactggtcgtagattgttgcatgacctttttttggtacaatgacgataacatcttctacgattacttcttggagaaagagaagtaacacaaattcagttttcctcaatctagttttaatttcataacttctcgagttttgtttcctgtttttaacgtttgggttttactaaactgcttctgatttaatatctttctgttctcactcttagtcttcgttcgacctttgcaaaattagatacgattttctgctcgttccacacaattttcctcctctcttgttgttttagatgtgagtttccttagatcaatacgtgtagccaaagcacattaaagtcaacatccatgttgtttgttcatacgcaaagaatttcatctaggcacgaggactaatatttgtgatccttcgagctttcatggccgagattagaatttcatctaagcatgaggaccaatacctttgatcctaagagcttccactgctgtggttctgtttatttctgcttttttgttgaaatatgtggaccagaacctccgatccttacatgcttcctcgatgaggtaattgacacttactttaacatgtcatcttcaccaagttcatgtgttccatgcgctttagttaccctttactttaagaagtaccacatttataattgtcctttcaaattagctttattagtaatgaaatgaattgtgctctgtttggtcctaacattttttcgatatgtttatgtgttgcatgtgcttcacgatgtgcttgtataactatgtgtgtatacccaaagatcactatataactgatctaggtaaacacttatacatatctaggtaaacttatgcaggagacctctcgatataatacaagactcctatacatattacatatgccataagtacaatcgatcttgtataactatgtatatatatcgaaagatcactatataactgatctaggtaaacatttatacatgagaccttttgacataagagaaaccattctatacatttttttgtttgccatacgtccaatccacatgaatcctgtgtagaaaactatcctatgtttgatctacgagattcttgtagagatatttgattatatgtctaaaccatacaattaatttacataatcttagtaaaatgcagcgtatgctgctaccataattttttggcagccacatttacaacgttgtatctaaaatgaagcatgttaattcaaatagcataaaaaagaagtgccttaatactcttatgagacacaccagttaaatgcagacactttttcccttccacaacacagattgtgatatgctcatgacaaattcgttgtgacagatcatagcaatccgttttgcgccccatcaactatacctcctagcaaacctcattgtacacgtagggagttattgaatgaatgaagattatcatcggcaggtagcacgatcagcacataattttctaagggtttctataaactgtattaggtgttggcacatctgctcaacaggctccaacattgcagtgtggtcgccttgacccagagtttgttaaaacctttgcttgtatttggtcccatagttatgtactcatgtcctgaataacgattattttgcatgtgcaaatgttcatgacacagtatcaagtcttagatatttat

SEQ ID NO: 15205 - DNA, 2506 bp, Zea Mays
cattagtttatcttgtatatttgttttacacatgaacttttatgttttattacttaattaggatgacttaatattgaacttctccattggttaattactcattgatgaggtgcaactaatcgattttgttttcgtcaattacttgaattaaagttcttatatgattgttgttcatcatatcatctatataacatcttggtgactttctttgtttaacagcctacatatgatgctcaagcaagtagtctgacatctttcatactaccatttcatttctaaacatgttctccatttattgaacatatcgcttcattgtttaaagtggtttaaaattatttaccacactaattcgtttttttaaaaaatgcagtcaccacaccccataaaaaagattcttactaccttttatttttaactgtctaccaaattgattttacggatcatattaatacctccttagtttcgcatgtggactcactattttggagcagcgctaaattcttcagtataggttgcagcccaaataagaacatgtgttatttccctagtcacacaccctgcttccttatttcaactgttttcaacaggtgattcaggagaaaaaagtccacaagcttgctccccttcacaaacacaaaaggaaaaacgtttttcccctgaatggtgctctagcgctagaaaaaggaatagaaaaactgtcttccacatcactgtcatcttatgtggtcgactggtcgtagattgttgcatgacctttttttggtacaatgacgataacatcttctacgattacttcttggagaaagagaagtaacacaaattcagttttcctcaatctagttttaatttcataacttctcgagttttgtttcctgtttttaacgtttgggttttactaaactgcttctgatttaatatctttctgttctcactcttagtcttcgttcgacctttgcaaaattagatacgattttctgctcgttccacacaattttcctcctctcttgttgttttagatgtgagtttccttagatcaatacgtgtagccaaagcacattaaagtcaacatccatgttgtttgttcatacgcaaaggtaagtcttttttacagcctaaggtcaaacacgctttaggaatatattgtattactattgttttgtaaaagggttaatattatgttttttatgtttcctgtccgcatatttttgtggcagaatttcatctaggcacgaggactaatatttgtgatccttcgagctttcatggccgagattagaatttcatctaagcatgaggaccaatacctttgatcctaagagcttccactgctgtggttctgtttatttctgcttttttgttgaaatatgtggaccagaacctccgatccttacatgcttcctcgatgaggtaattgacacttactttaacatgtcatcttcaccaagttcatgtgttccatgcgctttagttaccctttactttaagaagtaccacatttataattgtcctttcaaattagctttattagtaatgaaatgaattgtgctctgtttggtcctaacattttttcgatatgtttatgtgttgcatgtgcttcacgatgtgcttgtataactatgtgtgtatacccaaagatcactatataactgatctaggtaaacacttatacatatctaggtaaacttatgcaggagacctctcgatataatacaagactcctatacatattacatatgccataagtacaatcgatcttgtataactatgtatatatatcgaaagatcactatataactgatctaggtaaacatttatacatgagaccttttgacataagagaaaccattctatacatttttttgtttgccatacgtccaatccacatgaatcctgtgtagaaaactatcctatgtttgatctacgagattcttgtagagatatttgattatatgtctaaaccatacaattaatttacataatcttagtaaaatgcagcgtatgctgctaccataattttttggcagccacatttacaacgttgtatctaaaatgaagcatgttaattcaaatagcataaaaaagaagtgccttaatactcttatgagacacaccagttaaatgcagacactttttcccttccacaacacagattgtgatatgctcatgacaaattcgttgtgacagatcatagcaatccgttttgcgccccatcaactatacctcctagcaaacctcattgtacacgtagggagttattgaatgaatgaagattatcatcggcaggtagcacgatcagcacataattttctaagggtttctataaactgtattaggtgttggcacatctgctcaacaggctccaacattgcagtgtggtcgccttgacccagagtttgttaaaacctttgcttgtatttggtcccatagttatgtactcatgtcctgaataacgattattttgcatgtgcaaatgttcatgacacagtatcaagtcttagatatttat

SEQ ID NO: 15206 - DNA, 1696 bp, Zea Mays
attttacacagaccacattttttactccatttcctaatgattggcctgattaataaaactatagattttatttcgcagatcactgtcatcttatgtggtcgactggtcgtagattgttgcatgacctttttttggtacaatgacgataacatcttctacgattacttcttggagaaagagaagtaacacaaattcagttttcctcaatctagttttaatttcataacttctcgagttttgtttcctgtttttaacgtttgggttttactaaactgcttctgatttaatatctttctgttctcactcttagtcttcgttcgacctttgcaaaattagatacgattttctgctcgttccacacaattttcctcctctcttgttgttttagatgtgagtttccttagatcaatacgtgtagccaaagcacattaaagtcaacatccatgttgtttgttcatacgcaaagaatttcatctaagcatgaggaccaatacctttgatcctaagagcttccactgctgtggttctgtttatttctgcttttttgttgaaatatgtggaccagaacctccgatccttacatgcttcctcgatgaggtaattgacacttactttaacatgtcatcttcaccaagttcatgtgttccatgcgctttagttaccctttactttaagaagtaccacatttataattgtcctttcaaattagctttattagtaatgaaatgaattgtgctctgtttggtcctaacattttttcgatatgtttatgtgttgcatgtgcttcacgatgtgcttgtataactatgtgtgtatacccaaagatcactatataactgatctaggtaaacacttatacatatctaggtaaacttatgcaggagacctctcgatataatacaagactcctatacatattacatatgccataagtacaatcgatcttgtataactatgtatatatatcgaaagatcactatataactgatctaggtaaacatttatacatgagaccttttgacataagagaaaccattctatacatttttttgtttgccatacgtccaatccacatgaatcctgtgtagaaaactatcctatgtttgatctacgagattcttgtagagatatttgattatatgtctaaaccatacaattaatttacataatcttagtaaaatgcagcgtatgctgctaccataattttttggcagccacatttacaacgttgtatctaaaatgaagcatgttaattcaaatagcataaaaaagaagtgccttaatactcttatgagacacaccagttaaatgcagacactttttcccttccacaacacagattgtgatatgctcatgacaaattcgttgtgacagatcatagcaatccgttttgcgccccatcaactatacctcctagcaaacctcattgtacacgtagggagttattgaatgaatgaagattatcatcggcaggtagcacgatcagcacataattttctaagggtttctataaactgtattaggtgttggcacatctgctcaacaggctccaacattgcagtgtggtcgccttgacccagagtttgttaaaacctttgcttgtatttggtcccatagttatgtactcatgtcctgaataacgattattttgcatgtgcaaatgttcatgacacagtatcaagtcttagatatttat

SEQ ID NO: 15207 - DNA, 8496 bp, Zea Mays
gagacaccaagatgcgaggaagagagtacggaggacgtgatcacttagagctggattggaaaatgattttaggtccggactccacgaatcgacacgcctgtgttccgccgtacgcgggaaacgcggggagcgccccaaacggggttaggttttaatagaacagatgcattgtactgttctaccgcaagtggacttctatttgtaaagaggaaaaagatttggaaaaattggaaccgatggaacctctacaaaaggagggacatctggaaaagagacatgtaccaaaagggtgttatacaaatgccttttggtaaatacggtggataaatttaatattgcttgtaacttaggtactaaggagcaaaaatagatgcattagaaactgtcaaacgaacatggaacaacccatggaagaattggacataaagatggataagaaatatatgattactcatgcatttcaataagtttaggtcgatttccacatgctttgtggcgctgatgctgcacgagtttagtggaggggtagacggtgctgacgttgtcgcagtagactacggtggcgcgctggagatgctgtcctccacacgaagaccacatgacttattccatcagattcagcccaattccttcagacgcccgtagttgttacacttgccccttcttcagatggtacttgcccccaaatacttagttcaggaaacaattgtacaatcacattccaatcctctccatccttcttgtctgaccactaaatgtgcacttggggaactgcttgattacccttccacacaagtcggtgctctagaatacgaactggtttcagtggcccttgatccagactagagatggcaatgggtacccgaatacccaatgggttttacccgatatgaaggcaggtacgggatgatttctctacccgcgggtatgttaatgggtaaaaacctctacccgttgggtagatgggtacgggtacgggttggtaatactcatacctacccatgagtaaaatatacccgcatcaatacccactataaccatctaatagagctcatcttacctgaaataaaacccttagctatcatttgtctagataccaagttatgtaatcatatgatttgttatatgtgaagttgaagttgtgtttgtatgtttatttaatatttttagtgattggtatattggcctaacgggtacgggttacccgacgtgtaaaaatacccgcgcggatatgggtatgggtaagattttatacctgcgagcatatatgggtaacccgacgggtagattttttttatgggtacaggtatggaatggtattacccgacgggtatgtactcgttgccatccctaccgccggatctgcgcccagcgtgagccttcccctgcgacgcacccgaccggtcgacccccaacgcagtcgcagtctatcttcctcccggcggctaccctctgttccaggccgtgcccgtgctcacgccagccctccctggcgccgccgcacctgggcccaacgcccccacgtgccaactcctggcgctgtcgcgcctgccactgacatacccacgttgccccctgccttggtcgcggtcctctcctctcttacaggatacgcgacactcttctccgtcgtgcgagcgccttctcctacatcccgacaacgccctgcacctcccttgtcacgcagacgctcccctccactaccctacgcaacatcgccatcaccttcaacctggacattggtgccctaagtgcagcccctggccctccggcgggcacctccttccactatgactagcacgactctaacgagttctaggcctcggactccactgtgtcgtcttgtctgcaacctcgttcgccccgagcaccgtcggtaacttccacccctgcacgaccacgcgcacgcccactggcgtcttcggtgctcccatggttgcgcgcctgcttagcatgtcggcgagccttccctcatctgcaaccccagtagctcccgatttcccccgcccgcacgcggccctgactattcatggcattccttttgctgtcgggggccctgcctttgccatggccgctttccctagtagcacgaccctcaaggacgatgcgagccttcttgcacttgctccctcgatgcccctccttcactccaccgtgtctcccgtgtctccctttacgatggccagcttctctgaggcacactcgcggtgttgatcgggtcatgatctctgttctccgtgactgcatcgaggtccacccataggagggccgccactctactgggttgcttgtgttccccagcgtcgcgatcgcctccatgacgatcgagaccttgtggtctccaccacccatgtcttcgctgtcccctcctcccatcgactgggttgccgactccggcgcctcattccacaccattcccgacccagagtcgtcactttaccccatccccatagccccacctttcctgcctctattattgtcggtaatgggtcaactctgcctatcacctcagtaggtgacacggtccttcctggttctttgtacgtcaacaacatccttgttgcccccaacatcatccaacaccttctctcagtctgtcgcttcacacaactgctgctctatggagttcgatccctaaggctcaccatactacatcttaccactcgtgctgtggttgctcgttgcgacaactcctgcccctataccacgttcgcttccccaccccaccttcctccgcccatgttgtccaaccctacgcccttgcctccacttgcccctgcctcgacttggcaccgccgccttggccacccagaccacgacgtcctctctcgactctcgaccacgccgtccattcctttcccttgcgacgacgccacctcgctttgccatgctgtcagcttgggcgtcatacttgcttgcccttctcttcctccatgtcccgagctactcaccccttcgacctcatccactgtgatctttggacatcccctgtccaagcattttcggttaccggtactttcatgtcatcctcgatgatttctctcattctttgaacttttcctccgcggctcaagtccgacacacttcttcacctgggtctccacccagttccgtcgtccggttcgtgccatccgatgcgacaacgaccaagagttcgacaactccaccactagtgccttctctctcccatggcgttcagttgtgactctcgtgcgtgtacacttccctcagaacgatcgggccaaacacattattcgcaccactactgtcatgatccgctgcctcctttttcagacgtccattcccgcccactattggcagaggccctgaacactactgctcatctcttcacccgtagtgacctggacacgacgtacctcctctacgtcgacgacatcgacttcacgccctcctcccccgaactctagcgacgcatcatctcctccctccattagaagttcgcgataaaagacctgggtgagccgcaccacttcctggggatcaccgtggagcgacggccacatggcctatttctccaccagcaccagtacatcgtcgacaacgtcaagtgcattggcatggccgaatgtaagccatgtactactccgatggacactcaaggcaagttctcctccgacaacggcgccccggtggccgatcccaccggctaccggagttttgtcggggccctgcaatacctcgtcttctcccgtcccgacatcgcctacgccgtccagtaggtgtgcctccatatgtacaccccgcgggagccacatctcaccgacatgaagcggatcatgtggtatctctagggcaccatcgacttcggaccccttcgatgctctgcaaccaccgacctcgtctacaccgaagccgactgggtcggctgtcctgacatgcaccgatccacctcaagctacgccatgttccttggcgacaacattttctcatggtcctcaaagcagcagctggtcgttccctgctccagtgccgaggccgagtaccgcattgtggctaacggcgtagctgaggcggcgtggctttgtcagctactttaggagctccacaatccgctaacacggagcactcttgtctactgcggagcactcttgtctactgtgacaacgtcagcgccatgtacctctccggggcaccttcgacttcggcctccttcgacgctctgcgaccaccaatctcatcgtcacaccgactggcctcgcgtcggtccacctctggctacttcagaagctccacagtccgctgacgcggagcactcttgtctactgcgacaacgtcagcgccatgtacctctccatcggagcgtgcgaagcatgtcgagatcgacctccactttgtccacgatcgtgtcgccgttggggatatgcgagttcttcatgtcctgactatttcttagtttgccgacgtcttcaccaaggacctccctacgacggtgtttgaggagtttcggtccagtgtcaacatttgtcatggctagaatttcgactgtgttagaggtactgtgtactaattagtgttatggtttgtgttgggtacattatgtgggtgctaactatgtaatgggcccaggcccaactacctctattattaatgcatctcccaaccctggttcgggttaggggttttcaatctccaacaacaacaaagtcttgaaactaagaaacattataaaaataacttttgaaacgttaaaattttaatggtggataatatgcaagacaaataacactacctgttgtgcggccttgaactgcgcctttatatcttctctatgagccacaacctatttccaaaaacaaagaaataaaaaaattatacagattttataccaaatatgaattgaccactaagaaatagagtgcactatatattcctatactttttcaggatctaagggtctgtaaaaagcagtgcaatgaatgtttatacccttgcaacttggttattagtgttgatccaaagtggatactaataagtaaacttactagctaagcaaagcacacaaggatacctaacaaccaatgttcaattaagcgcagataatcgcccgcctaatcgcgattaggcaatgtctggagatgtatctatagtgtgctgtgcatgattctcctagtatgtggaagtgttggttgcctttggcagaattctggtataacatgacttaccacattctttgggtggtttgtggatacgatcctcctgtggctactgctccacagttaccagttccagagtctgacgaaagggacagccggccggcatatctgccaggcgacagccatacactttctaacaattatattaaggagaataaaaaggtccaaaatagacttggacaatgaccaccaaataaaggtggttacaaagtatgctaaggggctgttacacagatgactatataaaagacgaccagacctgaactctccctgagttaagggcacaaccacaaacctttcagccctgcagcccctgctagacaccacatcttggcatcgtccctaatgtcttgagtaatcttagagatgtccggagtagccccatcaaagacacaagagtttctgtgtttctacaaccaccaggccactaggattacagctgaattgaatcctttcttttgtgccttttgaactatctttcctgacttatgccaccagtcttgaaaactatattccgcagttcctggagtgaggtgctacaacccaataagagacagggtatgaaaccaaacttccctagcaaaaacacattgtaacaaaatgtgttgcatggtttcatcttcctgatcacaaagaaggcattttgtgggatggtccaaacctcgacgagccaatcgatccgctgtccagcagcgatttaaaaaagccagccaaatgaaaaatttacatctcggagatgcccaacttttccagacccttgctgccggttcaaaggtgagcatctcctcaaagaaacgatgataaacagatttagaggagtattcccctgaggcagaaggggtccagtggtgttgatctgaaactcctgggtgaagttggaagccttgaatcagatcccagaccatgaagtactcagatagaaattgagttgatatgcttgctgagatatcatctacccggccattttcagtcaaggcgtcctttactgttctactttgtataaatcatttacccagcctttcgttggctagagaaacatgtgttggactattgataacctggagaagggggtcttgagcactcgggtagttgccatttttatgatcaagagagtgaaacggtgcagcacattctcacttactgtgtcttcacccaacagttctggtaccatctttttgctccttttggggtgggtcatctctgttcaagggtcgatgatgtttcctttgagtggtggaggaccaacaaaatagcgtaaggaaagataagagagaaaggggttcaacagtgctaccattttgggtgtttggtgtcttcggttatagagaaatcaagttgttctttgataaggatcgtccctccattcgaaaagtgtagcagcaattcctttatgagctagtgtgctcaatcaaggctggtgctaagcatccgagtgagctaggtctatctaactccaacttcatgagaaggatcgggtcgagtccttctgctataatgtaatcctacctgtgggtcttttccttttcttttttattcttttttcttctcttctcttttcttttttttggcttttgtcttgggcctaggctccatgtgtaagactctatttctttctctaatatataaagatgtggagctctcttgcgtgttcgagaaaaaaagtattgtcaggagccatggttctaacccttgactttggagggttcgtccaacacaactgtggctagtatatgaagcgacacaattgtactaatatccaaaggtgagcatgtgtgaagctaatggaatgtgatattatcaaagataggggatattaccttgtgtccatcaagtgcactctgcactagttctgaaatttcattgaatattgtttcctgtgaagctgtatggtcaaagactctatcacatgtgaaagaatattctgactctacataagaaaaagattaaaaatcaatccaacactttatttattatttaaatctcttattacaagcttaatcataaattataataaaaatatatgattaacctgaatgtgccaaacaaacacatcggccaatgcatccccttgtttcaggaaatgtgattctggcctatttgtgttctgtttgtagtaatggtcgcacacggcaaaagacacatatgcttttcgttagttcctgcatataaaataaaatcacaatttaaaattaaaaatggtaattacttttgtcagatctttgccggagaaacaagccagtgagttcttagcccaagtacgcacactcgaacacagatccaccaatctaccaaactaactactgcctagataaggtaagtctaagggtgtgtttgattcagctttctgaaccagattcgcttccaaaattctataatctcaaccaaacgtacaacaacagaatagattcctaaaaatctacatattcctttagttcaattcagaatcaccttctaaccaagattttctagattcttgttatctatgctaccaatctatcatgctcttacacaatctacaattgacagttgttttaaccaaacatattttaattttttcaaaatcgtcagctggcaacagcttttcacagctcaccgctacaatcagattttcagaaatctacacctaccctaaatctagcaccaatcaagcattatttcctaacaatctcctcttaagccttgtggtgtaaactgttagagtacccgttagggttttgagtgtttcctgtgtaattaccccctcgccccttctgtaatgggtttggcccaactaccgagtctattaatacaattcccaaccccactcaggggttagggtatcccacatggtattagagctaggactaatttctttccctctcacctttttcacgagctccacagcccccttcagcgtgccaccctcgtctactgcgacaacgttagtgccgtctacctctccaccaattccgtgcagcatcagcgcacgaagcatgtggagatcgacctgcacttcatccgggagagtgtcgctgcaagtgacgttcgggtcctcagcgtccccacaacgctggggttcgccgacatcttcaccaaggggctgccatcgagcgtattcctagactttcggtccagtctcaacatctgtacaggatagagttgcgattgcagggggtgttagagtactcgttacggttttgggtgtttcctgtgtaattacactctcgccccttttgtaatgggctcagcccaactaccgagtctattaatacaattcccaacccaacttagggttagggtttcccacataaactaccaatatcgatcagcccaatcttggaat

SEQ ID NO: 15208 - DNA, 863 bp, Zea Mays
aaaactcttttgaacacgtctaagaatgtacggacaaggacctgctctgtttctcggcgagtttttcccacttccacctctccgtccctgccgagctgcggcggccgcatcgactgttagggcgaaaatccgttctagtctctcggcgattttcggcaggcggaggcagcaggatctgcgggaaggatttcgtgtcgagatggctgggcgcaaggaaactgcactcgacctggcgaagttcgtcgacaagggcgtccaggtgaagctcaccggcggccgccaagtgacaggaactctaaagggatatgaccaactactcaacttagtgctagatgaagcagttgagaatgaaagaggtgtgcagaggcacggcagtcatgctggtctcaccgactgatgggactgatgagatcgccaaccctttcctcgcggacggagcatagcttgcacccctcggaacaatatgtccctgtgggaaaagaaccggtttctcgtgtatctgttgtatcgtgtgcagctgtgcggcttattagtggtgtttaaatgcactagatctaatagttagtgactaaaattagttggagacatccaaacatcctagctatgagttcaattattagctatttttagtaaattagttaataattagctatctatttgttagctagctaaatccactagtatttttttagccaactaactattaactatagtacatttaaacaccccttagaatttagggacaaaatcagatctcacgttagggttgtttgatagatatatttagcccgtaagtttaaggggctgtttgaattcaaagttttttaatactatggtattttgggtgtttggtttctaaggac

SEQ ID NO: 15209 - DNA, 1011 bp, Zea Mays
aaaactcttttgaacacgtctaagaatgtacggacaaggacctgctctgtttctcggcgagtttttcccacttccacctctccgtccctgccgagctgcggcggccgcatcgactgttagggcgaaaatccgttctagtctctcggcgattttcggcaggcggaggcagcaggatctgcgggaaggatttcgtgtcgagatggctgggcgcaaggaaactgcactcgacctggcgaagttcgtcgacaagggcgtccaggtgaagctcaccggcggccgccaagtcatttacacaacctcttggcgtgcaacttccttttgtgttggaatcgttcatctatccatcttaggcatacttgagctagttgctgatgaatgttgacaggaactctaaagggatatgaccaactactcaacttagtgctagatgaagcagttgagaatgaaagagagcaagatgatccattgaagctatcagggaaaactagacaacttggcctcattgtgtgcagaggcacggcagtcatgctggtctcaccgactgatgggactgatgagatcgccaaccctttcctcgcggacggagcatagcttgcacccctcggaacaatatgtccctgtgggaaaagaaccggtttctcgtgtatctgttgtatcgtgtgcagctgtgcggcttattagtggtgtttaaatgcactagatctaatagttagtgactaaaattagttggagacatccaaacatcctagctatgagttcaattattagctatttttagtaaattagttaataattagctatctatttgttagctagctaaatccactagtatttttttagccaactaactattaactatagtacatttaaacaccccttagaatttagggacaaaatcagatctcacgttagggttgtttgatagatatatttagcccgtaagtttaaggggctgtttgaattcaaagttttttaatactatggtattttgggtgtttggtttctaaggac

SEQ ID NO: 15210 - DNA, 2744 bp, Zea Mays
atagaggccatgcggccgccgccgtccgcatcaccatcaccacctatcgtcggagaaccacagaatccaccgcatcgcagagacgagtagaggttagatttaggctgaggtaagatggtgtgcatccggcaggcgaccatcgaagacctgctggcgatgcaggcgtgcaacctgatgtgcctgccggagaactaccagatgaagtactacttctaccacatgctctcgtggccgcagctcctcttcgtcgccgaggactacggaggcagcatcgtcggctacgtgctcgccaagatggaggaggacccctccgagccctgccacggccacatcacctccctcgcggtcctccgctcccaccgcaagctcgggctcgccactaagctcatgtccgccgcgcaggccgccatggaccaggtcttcggcgctgagtacgtgtcactccacgtccgccgatccaaccgcgctgccttcaacctctacacctctaccctcgggtaccagatccaggacatcgaggccaagtactatgccgatggggaggacgcgttcgacatgcgcaagctgctccggcagccacagcccaagaagcaccaccaccaccaccatcacggccccggtgggtgctgctcccacgacgcaccagttgcggcgactggttcttctccccagtcttctggttcacccgataagaaggctatcacttgatgtagggtaagccttttcctttcaagctctagatgttatgctctctactaacatattgctagtcaccaccgcgttttcggtgtgattatactgtgattttgtttgacagatcaaactagtagtttcgttgtagaatgtgtagtatgtaaatgtgcctctcctcacctttggtttcttgagaatgttcactctcaaggcagcccagtcatggaggcacatagcaattattggtgagtttaacgtggaagcttactgttttgttgtggtattgcttctaaaatctctcactaaatcagccaacgctgcggttgcttgtccttagcttgtttagtgttcgctggttattgttatgataagttattttcttcagctttcacttacctttgttattggcaacatacttctgtatgctccgcccttctggcttggtaggagttgcctgcacggagcctgcccaaacacgatcttagttggggttccacatgagtgcttttacgacattttgaactagatgcgtgatttattcttcttgacttaaattttcaatatttatatatttggcagatcatagatggaaaaatgtgcttaaaattttcttgcttttgatgatgtgttgcttaattgtgaggtgcagacaactccaagtcgctgctctccagggagaacctacttggagtcctacaatcaaatgagatctgaggcattttctgatatgtattttttgcgtgcactgtagttcttgtttaaattttcgctgatgttatgttcagctctttcttatctttcactgttacatttgaaagattgtgaaacttggacgccttcaattttcaccatcacagtagccaatgacgagttgtcccaacatgtgaggtgtaggtaactccaagccctgtttcagggagaacctacttggggtcctacattcaaatgagatacctgggcatttactgatgtttataaataaggcctaatgttttgtcttggtttgttgcatgcattattctgtttgagaattgttctttgatgactgatttagtatgcttaggtagctgtgtgttattgttcatgtaatgattatttgttgttgagatgtttatgccttttcttgtgtctagtgttttatcagcaaaacaaattactttgtggcactgccagtgatgatttgtctgcaaaatggatgtcctgtggactcaagtcccctgtttcagggagaacctactcgaggaaacatggtacataatatgacatcatctgattaaactgaggcattacagaagaaccttatttccttgtcagtttttgcttcgtgctctttccttgtattctgaaagtttttctgcttggtcataaagaatcgtaaagcttggttgatgtcatataacgatccaagcagttgtctttcagtgatgtttctgtctgcaaaatggatgtgctatgtatccaagtccctgttttaggcagaacctacttggagaaacagcatcgaatgtgacatgaatacagagactgagattgtagtgctgctttattgttatgttctatttctctctttcagttgaagtttcgtggaatcgtagttattttttgtcttgactatgcatcgtgcaatttaaatattgattgatgaacctggaattcatttttttgtgcacctaactagcttctgaaccttgcagactcgtatctacagagaggaatcaccaagccaattgtactcatctttcctctcactgggtatacaatatagtagttgtagcggtctttccgtagtagaacggagaaagacctgtgcagtgagtatttgtgtacttggccgatggctcgaatcgtctgacctaatcagcgagaatggcaaccaaatatgcttcgtacttgaaacctgtgttgtttttagacatgtgcgaattttcacagttcatttgattggtgatgcctgacaatttggtcagatctgataccgcggaatatataatgcaagtttgaaacctgtaatgcaattgttttgttattggatcacttacagaggaagagtg

SEQ ID NO: 15211 - DNA, 2300 bp, Zea Mays
atagaggccatgcggccgccgccgtccgcatcaccatcaccacctatcgtcggagaaccacagaatccaccgcatcgcagagacgagtagaggttagatttaggctgaggtaagatggtgtgcatccggcaggcgaccatcgaagacctgctggcgatgcaggcgtgcaacctgatgtgcctgccggagaactaccagatgaagtactacttctaccacatgctctcgtggccgcagctcctcttcgtcgccgaggactacggaggcagcatcgtcggctacgtgctcgccaagatggaggaggacccctccgagccctgccacggccacatcacctccctcgcggtcctccgctcccaccgcaagctcgggctcgccactaagctcatgtccgccgcgcaggccgccatggaccaggtcttcggcgctgagtacgtgtcactccacgtccgccgatccaaccgcgctgccttcaacctctacacctctaccctcgggtaccagatccaggacatcgaggccaagtactatgccgatggggaggacgcgttcgacatgcgcaagctgctccggcagccacagcccaagaagcaccaccaccaccaccatcacggccccggtgggtgctgctcccacgacgcaccagttgcggcgactggttcttctccccagtcttctggttcacccgataagaaggctatcacttgatgtagggtaagccttttcctttcaagctctagatgttatgctctctactaacatattgctagtcaccaccgcgttttcggtgtgattatactgtgattttgtttgacagatcaaactagtagtttcgttgtagaatgtgtagtatgtaaatgtgcctctcctcacctttggtttcttgagaatgttcactctcaaggcagcccagtcatggaggcacatagcaattattggtgagtttaacgtggaagcttactgttttgttgtggtattgcttctaaaatctctcactaaatcagccaacgctgcggttgcttgtccttagcttgtttagtgttcgctggttattgttatgataagttattttcttcagctttcacttacctttgttattggcaacatacttctgtatgctccgcccttctggcttggtaggagttgcctgcacggagcctgcccaaacacgatcttagttggggttccacatgagtgcttttacgacattttgaactagatgcgtgatttattcttcttgacttaaattttcaatatttatatatttggcagatcatagatggaaaaatgtgcttaaaattttcttgcttttgatgatgtgttgcttaattgtgaggtgcagacaactccaagtcgctgctctccagggagaacctacttggagtcctacaatcaaatgagatctgaggcattttctgatatgtattttttgcgtgcactgtagttcttgtttaaattttcgctgatgttatgttcagctctttcttatctttcactgttacatttgaaagattgtgaaacttggacgccttcaattttcaccatcacagtagccaatgacgagttgtcccaacatgtgaggtgtaggtaactccaagccctgtttcagggagaacctacttggggtcctacattcaaatgagatacctgggcatttactgatgtttataaataaggcctaatgttttgtcttggtttgttgcatgcattattctgtttgagaattgttctttgatgactgatttagtatgcttaggtagctgtgtgttattgttcatgtaatgattatttgttgttgagatgtttatgccttttcttgtgtctagtgttttatcagcaaaacaaattactttgtggcactgccagtgatgatttgtctgcaaaatggatgtcctgtggactcaagtcccctgtttcagggagaacctactcgaggaaacatgactcgtatctacagagaggaatcaccaagccaattgtactcatctttcctctcactgggtatacaatatagtagttgtagcggtctttccgtagtagaacggagaaagacctgtgcagtgagtatttgtgtacttggccgatggctcgaatcgtctgacctaatcagcgagaatggcaaccaaatatgcttcgtacttgaaacctgtgttgtttttagacatgtgcgaattttcacagttcatttgattggtgatgcctgacaatttggtcagatctgataccgcggaatatataatgcaagtttgaaacctgtaatgcaattgttttgttattggatcacttacagaggaagagtg

SEQ ID NO: 15212 - DNA, 2110 bp, Zea Mays
tagaggccatgcggccgccgccgtccgcatcaccatcaccacctatcgtcggagaaccacagaatccaccgcatcgcagagacgagtagaggttagatttaggctgaggtaagatggtgtgcatccggcaggcgaccatcgaagacctgctggcgatgcaggcgtgcaacctgatgtgcctgccggagaactaccagatgaagtactacttctaccacatgctctcgtggccgcagctcctcttcgtcgccgaggactacggaggcagcatcgtcggctacgtgctcgccaagatggaggaggacccctccgagccctgccacggccacatcacctccctcgcggtcctccgctcccaccgcaagctcgggctcgccactaagctcatgtccgccgcgcaggccgccatggaccaggtcttcggcgctgagtacgtgtcactccacgtccgccgatccaaccgcgctgccttcaacctctacacctctaccctcgggtaccagatccaggacatcgaggccaagtactatgccgatggggaggacgcgttcgacatgcgcaagctgctccggcagccacagcccaagaagcaccaccaccaccaccatcacggccccggtgggtgctgctcccacgacgcaccagttgcggcgactggttcttctccccagtcttctggttcacccgataagaaggctatcacttgatacaactccaagtcgctgctctccagggagaacctacttggagtcctacaatcaaatgagatctgaggcattttctgatatgtattttttgcgtgcactgtagttcttgtttaaattttcgctgatgttatgttcagctctttcttatctttcactgttacatttgaaagattgtgaaacttggacgccttcaattttcaccatcacagtagccaatgacgagttgtcccaacatgtgaggtgtaggtaactccaagccctgtttcagggagaacctacttggggtcctacattcaaatgagatacctgggcatttactgatgtttataaataaggcctaatgttttgtcttggtttgttgcatgcattattctgtttgagaattgttctttgatgactgatttagtatgcttaggtagctgtgtgttattgttcatgtaatgattatttgttgttgagatgtttatgccttttcttgtgtctagtgttttatcagcaaaacaaattactttgtggcactgccagtgatgatttgtctgcaaaatggatgtcctgtggactcaagtcccctgtttcagggagaacctactcgaggaaacatggtacataatatgacatcatctgattaaactgaggcattacagaagaaccttatttccttgtcagtttttgcttcgtgctctttccttgtattctgaaagtttttctgcttggtcataaagaatcgtaaagcttggttgatgtcatataacgatccaagcagttgtctttcagtgatgtttctgtctgcaaaatggatgtgctatgtatccaagtccctgttttaggcagaacctacttggagaaacagcatcgaatgtgacatgaatacagagactgagattgtagtgctgctttattgttatgttctatttctctctttcagttgaagtttcgtggaatcgtagttattttttgtcttgactatgcatcgtgcaatttaaatattgattgatgaacctggaattcatttttttgtgcacctaactagcttctgaaccttgcagactcgtatctacagagaggaatcaccaagccaattgtactcatctttcctctcactgggtatacaatatagtagttgtagcggtctttccgtagtagaacggagaaagacctgtgcagtgagtatttgtgtacttggccgatggctcgaatcgtctgacctaatcagcgagaatggcaaccaaatatgcttcgtacttgaaacctgtgttgtttttagacatgtgcgaattttcacagttcatttgattggtgatgcctgacaatttggtcagatctgataccgcggaatatataatgcaagtttgaaacctgtaatgcaattgttttgttattggatcacttacagaggaagagtg

SEQ ID NO: 15213 - DNA, 2105 bp, Zea Mays
gcggccgccgccgtccgcatcaccatcaccacctatcgtcggagaaccacagaatccaccgcatcgcagagacgagtagaggttagatttaggctgaggtaagatggtgtgcatccggcaggcgaccatcgaagacctgctggcgatgcaggcgtgcaacctgatgtgcctgccggagaactaccagatgaagtactacttctaccacatgctctcgtggccgcagctcctcttcgtcgccgaggactacggaggcagcatcgtcggctacgtgctcgccaagatggaggaggacccctccgagccctgccacggccacatcacctccctcgcggtcctccgctcccaccgcaagctcgggctcgccactaagctcatgtccgccgcgcaggccgccatggaccaggtcttcggcgctgagtacgtgtcactccacgtccgccgatccaaccgcgctgccttcaacctctacacctctaccctcgggtaccagatccaggacatcgaggccaagtactatgccgatggggaggacgcgttcgacatgcgcaagctgctccggcagccacagcccaagaagcaccaccaccaccaccatcacggccccggtgggtgctgctcccacgacgcaccagttgcggcgactggttcttctccccagtcttctggttcacccgataagaaggctatcacttgatgtaggacaactccaagtcgctgctctccagggagaacctacttggagtcctacaatcaaatgagatctgaggcattttctgatatgtattttttgcgtgcactgtagttcttgtttaaattttcgctgatgttatgttcagctctttcttatctttcactgttacatttgaaagattgtgaaacttggacgccttcaattttcaccatcacagtagccaatgacgagttgtcccaacatgtgaggtgtaggtaactccaagccctgtttcagggagaacctacttggggtcctacattcaaatgagatacctgggcatttactgatgtttataaataaggcctaatgttttgtcttggtttgttgcatgcattattctgtttgagaattgttctttgatgactgatttagtatgcttaggtagctgtgtgttattgttcatgtaatgattatttgttgttgagatgtttatgccttttcttgtgtctagtgttttatcagcaaaacaaattactttgtggcactgccagtgatgatttgtctgcaaaatggatgtcctgtggactcaagtcccctgtttcagggagaacctactcgaggaaacatggtacataatatgacatcatctgattaaactgaggcattacagaagaaccttatttccttgtcagtttttgcttcgtgctctttccttgtattctgaaagtttttctgcttggtcataaagaatcgtaaagcttggttgatgtcatataacgatccaagcagttgtctttcagtgatgtttctgtctgcaaaatggatgtgctatgtatccaagtccctgttttaggcagaacctacttggagaaacagcatcgaatgtgacatgaatacagagactgagattgtagtgctgctttattgttatgttctatttctctctttcagttgaagtttcgtggaatcgtagttattttttgtcttgactatgcatcgtgcaatttaaatattgattgatgaacctggaattcatttttttgtgcacctaactagcttctgaaccttgcagactcgtatctacagagaggaatcaccaagccaattgtactcatctttcctctcactgggtatacaatatagtagttgtagcggtctttccgtagtagaacggagaaagacctgtgcagtgagtatttgtgtacttggccgatggctcgaatcgtctgacctaatcagcgagaatggcaaccaaatatgcttcgtacttgaaacctgtgttgtttttagacatgtgcgaattttcacagttcatttgattggtgatgcctgacaatttggtcagatctgataccgcggaatatataatgcaagtttgaaacctgtaatgcaattgttttgttattggatcacttacagaggaagagtg

SEQ ID NO: 15214 - DNA, 1129 bp, Zea Mays
ccgccgtccgcatcaccatcaccacctatcgtcggagaaccacagaatccaccgcatcgcagagacgagtagaggttagatttaggctgaggtaagatggtgtgcatccggcaggcgaccatcgaagacctgctggcgatgcaggcgtgcaacctgatgtgcctgccggagaactaccagatgaagtactacttctaccacatgctctcgtggccgcagctcctcttcgtcgccgaggactacggaggcagcatcgtcggctacgtgctcgccaagatggaggaggacccctccgagccctgccacggccacatcacctccctcgcggtcctccgctcccaccgcaagctcgggctcgccactaagctcatgtccgccgcgcaggccgccatggaccaggtcttcggcgctgagtacgtgtcactccacgtccgccgatccaaccgcgctgccttcaacctctacacctctaccctcgggtaccagatccaggacatcgaggccaagtactatgccgatggggaggacgcgttcgacatgcgcaagctgctccggcagccacagcccaagaagcaccaccaccaccaccatcacggccccggtgggtgctgctcccacgacgcaccagttgcggcgactggttcttctccccagtcttctggttcacccgataagaaggctatcacttgatgtaggacaactccaagtcgctgctctccagggagaacctacttggagtcctacaatcaaatgagatctgaggcattttctgattcgtatctacagagaggaatcaccaagccaattgtactcatctttcctctcactgggtatacaatatagtagttgtagcggtctttccgtagtagaacggagaaagacctgtgcagtgagtatttgtgtacttggccgatggctcgaatcgtctgacctaatcagcgagaatggcaaccaaatatgcttcgtacttgaaacctgtgttgtttttagacatgtgcgaattttcacagttcatttgattggtgatgcctgacaatttggtcagatctgataccgcggaatatataatgcaagtttgaaacctgtaatgcaattgttttgttattggatcacttacagaggaagagtg

SEQ ID NO: 15215 - DNA, 5951 bp, Zea Mays
gtttttttcctttgattctccctttctctttctcaatgcttttccctattcatattgctgctgaaatccatcaaaaagttattttcttttaagaaatcctaattcttctccatgatgcaatccatctagatatcacggtttcattattataggaattatgtgccttttcggttgcttctccctctctctttcttaacattatttcactttcatattgccagtggagtccaaaaatcctaattttaattttagatacatacatacacattcacaaatgtaagactctgcaatttagctactaacttttttatagatttagtgttacttttatcttcataggacaactactcttacctacattgtataaaattatatatacgcactctccaaattcaagacaattaaagtttgcacatacgacataatatacgtgcaaccaacttgatgcatatcctccatactgaaattgctttctttgtacatgctagcggcttacctcttaaaatcactgtatggggacaaaaggcattggaatttcaactaacgccctgtttggatcattggtattgaattccattctaataataataatttaggtatatattaattaagctaattcagttttatgcaaaaatatatttgtacactattattagcaagatgtcggagatatttatgtgctatatcattcctgaagctcaacagtactatgacaggtaaaatacctcaaaaaaactttcttagatgcaatatattttatatacaatttgttccctgcatgacaatttgtataaaaacaaccatacttcttttagccagtgttgaccaacagacaatcatgctgcaactaccacctgctacaacacaagaattgtcatcttcacatcatgcagaagctgagcacaaaccattaagagaacttcttattattaacccatatggttttccagttagtataatgagctccatatttttacacattactttgaactaagcctatgtaaactgcatcagatattatttgtatatatcattcatctctttttaaaaataggatacatctgcattataaccatcactcaaatctgcacgaacactcgctggtggtttccttcatgcactaaatgcaacaaaacaacaactcctcaaagcacatgatacaaatgctacaaatgtaaatgagatggctacagattgaagtgagggacactacatacaaattgtactcaaactgctctaaaaacccttgaaaatattataaaatgttgtaagaatagttgttcatgtacaactattagttacaatattttataatacaaccccaaatcggtaaacgcagatgataaaaaatacattttcctaaacccttctacaatctcattaaccattccatattttataatacattttccttttttacatctacaatctcattaaccattccatatttcatcttctatacaagatgataaaaaattcacttatgacaacatcatgaatcctgaatagatgtacgtggtttccactacgtattacaaaatattgctaaacgaaacgtaatgaacccacaaccctatacaataacatatttgctgtcacatgcaagtcacctcccggcgaaaaacgtgcgcagtgcgcgcgcccttgactagtatccatgaaagaagagacaagctagagagcgaggaggatttgctcgcatgggcttgttgtttgattgtgatagatgtccattacaaaatctcagttctgaagatacggttaggttagctgctgtaggctgtcacatcaaagtcaacgattgtaatactactacatcagtgtaggaggaaaaaaatacgattttaatttataaatattcttgattaaatcaagtgttcaaagatcgatatgtctcatatataatactaaattcagtgatacaaatttataaatattctttgtttttttgtgatggaaggggtacaccacaagaaagctcaagtagctgaaatgatgaggttgtttacacgcaactaaacacaagtgtatacaatcatacacgtgtatacagcagagatctcaattaataaggagcatttttttacacgcaaggaactcaaagtacatacaacaagttcgatcatcatttaataataaggagcacaaacgcgtgcgtgtgtgtagttgttatccaaatcctgtgcacaaacgacgcgtgcatagttaagggccgggccgaagtcaaacgggatgaagaatgattctttcgttttgtgatggatcagcgacatcttcaccaccgagtttcgctccagcctcaacgtcagtagtggctagttgagtctgtgggggatcatatggtgtgatgtacttctcttcgagtcgagtctgtgaactccgctgcgatggaagttcagactacgggagtgttagagtatatggattaggtccatgaggtccgtgtatgaatactgtatagcaaccctctctagggctggcccaataatgaattccactctctccaacaagcttatcatagaaatccaacacagcagcatgcttctcatcttggtcggtgatcacccgatcaccaacctgcaactttgcaataaaattccctttcttccggtaccttgcatgctgatgaaaaaatgcagtattagcatcacctcgaatgtacagaattcgagaacactgctgggagagtctaagccgagccaatgcaatttgagcttcttccgcagccattcttccccgtcagcaagagctcaatggtaccttgtaatttcgagctgatgaagaacctccttagcaatgaccagctgcaccttgatatgacgaatttttctctcgctccacttatgtaaccccatattgagacatagtagtttgagaaaaaaaaagtctccaccgagcaaacagatgatatgcatgggggcattccaatttttggagagccgctgcgggcagatgtggagctccaagcccccacccatcttcagacagccacgagtctggcaagggcttatgagaggtgcgagaatgaagcagcaaaggagagatccttcaagggagggagtgttgggcctgcaccgccaaaatccgtggcaccagcactggcctagaagccgacaccaaaccccagatcaagcttcagaagaagaattggctgcgaaaggggtgagcggcgaatgctataactgcacgaagaagtacactgctgaccataattgtgcagcgaaaggggtcttctttctggagttagatgataaagaggaagaggaggaggtggctgcggaattgagaatttcactcgacgcactcactgtgggaaataccaggcaacttcaggtcattattcatggcacacccctaattgcccggtatatttcgagtcaaccaacactttcaaccaagagaatgtggcagctgcaggtggtcagccgaccaggtctatcagtgaaggtcgcaaatggtgacaagatcagtgatggcatttgccacaacattcagttctccattgatcagacatagtttgttctcacagcatatacattaccccttgctggatttgacatcattttaggtgtgcagtggcttcagccctcaggaccaatattgtggaacttcagagacctcgcaatgcagatttggcacaatggtcaggatctcatatggcagggagtgggcacaccagggacgcaatgcgcagcactagacacggcgactgatctgctgcaggccctactctcctcttttgcggacatcattgtggaaccacaggggctcccaccaccgagacgacagggccaccgcatcaggttgctgcccggttcagcccctatagcagtacgaccatatcgatatccctagatattgaaggacgagattgaacatcaatgcgatgtgatgttacaacaaggcatcataagggagtgcacatcagtgttctcttggtcaagaaggctgacggctcctgtaggttctgtgtcgactacagggagctgaccgcaaagactgatgctaagtactcaattctgatggtggatgaactgcaaggttcgcagtttttcgccaaactggaccttcgcagcgtgtatcacttattgaggacgcataaggccgatattgacaagacaacatttcgcactcagcaagggcccttcgattttttggtgatgtcctctagcctcatgaatgcgccataaacattttagtccttaatgaatgagatcctgaaacccttcattcgcaagttcgtccttgttttttccgatgatattctgatttttagctgttgttggtccactcatctacaatatgtcaggcaggtgtttcagattctcggattccatcagttggcactcaagcagtccaagtgctcttttgggcagacttcagtggcttgcttgggtcacatcccctcctgtgccctccaagcaggtgcccccctccagcagcagcagccatcagctagccgccgcctctctctcttcttctccctcctttttttgaaagcgtaggagaactgcgcgataatatattaaagaagaggggcagatacaagaacaaactggggccctacggtggccaataacaggcatacagaaacccatccacgactaaaaaactaacacaatgctagctaactagcagggaggcccggaatgggggcggtgagcaaagacaacttctttgcaccagccatctcccaaaggtcaacctccaacccaactcttctaatagcatcagcaatactggggctcttattgtcaaatacgtagccattgcgctgcttccataaggtccaaactcccagaatgactagagaattgaggccatccccttgcaattccagagaccttagtgcataacgttctccaccattcaagaaagacactatcctcagattggggggcaagaagctgaagaatcacttgaagaagcagtttgaaccaaaattctcgagcaaaaacacatccaatcaacatatggtccaacatttcttgatcctggtcacataatggacatctctccggatggtccatgcctcttttttgcagcctatctgctgtccaaaacttcctgtgtgcgaccaaccacataaaaaacttggtttttggaggagcccaagttttccatattctatgaaaaggctcaaactcagaagatcccataaagaaacccatatatgcttcctttaaggagaactttccgtttgcagctaggcggaaaaaatgcttgtcttcaacttgaagtcttagaacaattgagtcaattaaatcccacaaaatgagaaattcattgataattccaacagaaagagctccctgaatgtcagaaatccagctctgattagagatagcatccaccactgttctcttgttaacccttctcttaggaatgatcccaaataatcgaggggctaagtctgcaattctatgacccaatagccacctatcggtccagaaaaaggttgtagccccattaccaatctcagtttgcatagccattgagaagaaatctttcacttttttagggacttggatagcaagagaggcccatgggagagttggctcagttttagccagccatagccatcgcattctaagagaccaagtaagttcttttatgctggaaatgcctagaccacccaactcacgaggcctacaaacaattccccaagccacatgacagtgaccaccttttgcatctcttcggcctctccacagaaaacctcgacgaatcttatcaatggctttaagggcccaagctggaaggtcaacaaccatggccaagtagatgaccatccccgtgagaacatgctggacgtgcacttttcgatcagctttagtcaataactcagccttccatccagagagttgatttgcaatcttatcaataatgggttgaacttggattttttgaaagctttttaatggcaagcggtaaacctagataacgacaag

SEQ ID NO: 15216 - DNA, 560 bp, Zea Mays
gcggaatacctagtgtattcacccagatttatttatgtttttcagcagccgaggacttcttttctgctatgcttgattaaagggggctgtgtctgcacccagttctgcctgtggcttgggctagtgtattttcctactacgcttctctatttggctctctcttgagcttgtaccccggtattgtaataaatttatctgaactctgtactatttgaagtaaggaatgtgtttactagcctcctgggactagtaattgtatcacatttgagtcccaaaggatcgggacgcttcatcttctctcgtcgtcagcctgctgaaggatagaggggagactgggagtctgaccatcaaacacacatctattgcggtgattccaaatcatccaggcccccaaagagatcagagagctcaatcctttcttgaccattccttgaactgtttcagaagatgtctcccaccagtccaggaaggatgtcaggcccggctggggagcaaggttatccagcccaaactttctgagcagattataccagaaaatccttgcaaacacacatgagacc

SEQ ID NO: 15217 - DNA, 6748 bp, Zea Mays
aacgtcgcgcagttcgtcagccttcttgtaacaccgctggtgttacgtgaactaaaactctgacatgtcatcataagcatttgcattaacttgcttgttacaccaagaatgcatttactaggttaaaattttcgattcaaaagtgtgatgttgtgtgttgagtataggacttaggttgaaaaacttgcttggaattatggataaacaaaataattcctaaaccgaggacttgttgggaatgagctgcatatactaaagttggatcttagactagagagtaactttgttttgatggatggatcaaagggatgaatccctggaagaagctgaaacacaaatgaaactcatttgaaaccctaaaactagtccgaaagaggaattcaaaatctagaaataatttggcaaaaatccatatatcaaagttgtggagcttggaaaagtgaataaatttcttatttggaggtttccatgttttatagagaaatttagagtgattcacaaaagttcagtttgggttcagattaggatttctaaaaatcatatcaactagtcaactttggtcctttataacttctaatctataaacattttgaaggtggtcattgtaacaaagttatagagctacatgaggagtataagtttttttaagtcacctagctctaaacctatatggagcttggagaaaaactaatctaaagtaaagctgtcagaaattatggatttcagacttagcgaaattctgagtctgaatttcagcatttggagcaaactttgagctattgtagtttggaatccaagaggttttggttaatggtcactatataaaacttgtaaaggaactattggagtataagctttattaagcaacttgcactagaagcatttggaacccaagaaaaatagttattccatgtgatgctgctgtatttctgaattttcagattgaaaacagtaactagaactgagttgagtgtctgatagcagttttgggagcttgtttgtgactaatccctaaggatttgggttgagaggtccataaagggattgaataccataggttggggaacaactttctttaagtgtgtttggaatgatcctatacaaaaagtggagaaaaactttgccaaagttggattatcagattgttgttgacttagtttattcagagctgaaagtctgaaatcagcatttttagtgcagttttggagctggtttgtggctgttctataatgttttgtgctgtggtgtttataaaaaagtttaatcctatatgatggtgaacaagtttctttaagtgactttggcttgttcccacataaaaagtggagaaaaatgcccccaaagatcagctgctaggtatttctctaactgaatttggttcagtggctgaaacctgaaatcagtgaattgtgtctactttggagctcatttgtgattaatgcaagtggtttaagactaaagttgctatagctaagttggagaccatagtaatgagaacaagttttataaagtgggatggacttggttctacataaatctgggagtaaagtatgccccaacttcgtctgtcatatttaagaggtgtggatccagttaacccttgctgagagtttcagtgtgtttttacccaacttgggagctctatggtaattaatccatgcaagtttgggttaagcgtttgtagcgaagttggagactgttataaggtgaaaaagtttcatgtgaagggttgggctagttactgtgaagaaattggacaaagaaaaactacaaaactccctgtcagaattggtgtggagctgtttcagttaaactgaaactgagcttttcagtactttagccctaccttggtgccacatagcttttgttctgtgtggttttagcctgggggtgttatacaaaaatgatagagctatagttggagaatgtctttggttaagtatgtgagatctcttgccatatgaaattgtgagataacattcactaaacagagaggggtggagtggagcagcagtgctgtttcagtcgatttcagagattgggttggaaagtgaagaagatctttctctccctactgtgcttcacttctgtgctcaagttgagataagggtggagtgaatgactaaagatctagaggtctctcctatcagaaatatcaggtttggactgttgtgtgcctattaacaaatgcaaacttatctgtttgcccttgtctgagtaaaactgtccaggttcagagtgtggctgtgaacttgtatggagctgagcatgaatgccacatgtatgagccctgcactgctggcgttcccagaacatttccccactgagtcttatataagttcagagatggttgcccatgttcagttaccattaaggcatggtccagcgatggttttcctacccttgagtccagcctatgttcatcacaaaaggggatgtagctcttgagtttgagtcgatgtaaacccctccccggtctctggtatggtttacttcaaagcttgcacgccgtgacctgagtctggtgaccacaacctgtaattctcccgccctaccgtggcaaagatatctggagctactacacactcggaagaagaagatgaaattcaagaagtggtttctgaagaggagtctgcttcagtgcctgctcgtcaagtgatgggagccatctaactggggtttaatagagggatctagaactccgtctctgcaacaaaggcaagcccccggtgcatttgcctcttccttgtatttttaaaagacttttatacactttaattctagtgaaatgtgcattaagtttataggaattgtttaaaaactatttgatgcatcgactaccttgatatccattcctgttatagatacttctttggaagtatcaaatattgtttaaaaaatgcttagccctgcttagatcttgtggatagaggttgtcttttgcaataatgcctagcttaggggttatcctgaggaaggatgtcttctacctgcaagaatatttttattgggagcatggtgggatcttactgcaaagttccctataatgctcttttcatcctaagaaacacaaaacaatcctaaggatggaagtacttaaatcgagacttgggctaggaacaggtgatgctccacccaggttaattaaggattggatgcgtatgtaggcatgtatgatcaaggactatcttaactagccacatgccctggatatgggacagggtaagcttgaacccagctattccatacatgaaaagacaatcgcgcactgggagtggagagatggcgagagtggcatgtaccctcctgacaaaggaccgcctaaaaggggtggtgtcctctcgggtggcgcggacctattcatggagtggaggatccgtgggaatggtagacatatgcaagagttatgagaaacatatgtcgtgtggttagagatcctcagctaagtaaatcgattcggatcgccgttatatccccggacagtggagacttgatctccgacctgcaacctaagtcaggatgtaaacattatgaataaaaatgatgttgtattgatgagatggtgaaattagactagatgcaaccagagtctattaatatttaatctggcgttaaaatattgaaagtaaggactcactttagtaagctatttctacaaaaatatctaagttgattcttgctaaagccttttccttgaatcctatttaaccagcatatccttgagagtcatttttccttagtaaggtaagccttgcgaaagtacactccgtactcagggttttcaaacccatgttgtaggtgatgaggagtactctaagtgttcttgtggctagagggcgtttccagttctggaggaggactagctaggtttatgtatgagatttggagggtttctaccttcctgcttttgtattaagttatgcactttgagtatatcaggacttgtaataaatgtaactcttcctatgtaataaccttcagttttataaatgaaaagaatattttgtaaagtcttccgctcttatctcagaagtgtgtgtatcgaatgtgattactgtaatatgcatgtatggtgggagatccttgggatgatgagttaagttgttgaactattgatagccttattaagttacctggtacacgtgcatagccatctgaggccatcaagacaaggattggtgcacgtgggcccgataacttgggagggctgccacagattggtatcggagcgatcacccattagcatggatattaaagtaatcatttgatagacttcaaaaggattttaagtccaaattattttggaaaacttaagaatgaataagaaaatcctgatagccgaagtgcaaatagtatatggttaaggactataaggtggcttagtttaggatgctaaccactaacccacaactataatgcaattttctgcaggtacactaactaaaccctaggaaagtgcgactggtgataaatgacggagtaagtaggattgccaccgccatagaacgtgatagccactatgtgttggcaagaattgtgaggacgaataggacgagcatgaatcatgacatacaattttaagttaaaccctctatgtagtagcttagtacatgtttcatccatcctattcatgctacctatctttgcttttctatactaccttttcctattcgtgaagccttgagactcagttcatttggtggacctatagtttataaggtacagttgccaaagaatttttcaacagtgcacaacatgttctacatgtcctagttaaagaaatgtcttcgagtccccaagcatgttattaagatttcagatgttaaccttggaccagatttaacctacatggaatatcccataaaggtgttggatctaaaggatcaggtcactcgaaggaaagatatcaagttttactagatacagtagaaccaacacccggaagataaagccacttgggaatcgaaagagtatttagaaaaacatttcctgaattcctagtttcttctaagccttaagttttgtgtagctgtccctgacctgaactagcagtggcacactccctgccttgtaggagtaatggggaaataagccagtgacgcatttccttttccattatctagcctagagttttaaatctcgagatgagatttctttttaggggggaaggctgtaacacccctggtgttacatgaactaaaactctgacatgtcatcataagcatttgcattaacttgcttgttacacctagaatgcatttactaggttaaaattttcgattcaaaagtgtgatgttgtgtgttgagtatagaacttaggttgaaaaacttgcttggaattatggataaacaaaataattcctaaaccgaggacttgttgggaatgagcttcatatactaaagttggatcttggactggagagtaactttgttttgatgaatggatcaaagggatgaatccctggaagaagctgaaacacaaatgaaacttatttgaaaccctaaaactagcccaaaagaggaattcaaaatcaagaaagaatttggcaaaagtccatatatcaaagttgtggagcttggaaaagtgaataaatttcttatttggaggtttccatgttttatagagaaatctggagtgattcacaaaagttcagtttgggttcagattaggatttctgaaaatcatatgaactagtcaactttggtcctttataacttctgatctataaacattttgaaggtggtcattgtaacaaagttatagagttacatgaggaatataagtttttttaagtcacctagctctaaacctatatggagcttggagaaaaactaatctaaagtaaagctgtcataaattatggatttcagacttagcgaaattctgagtctgaatttcagcatttggagcaaactttggtctattatagtttggaatccaagaggttttggttaatggtcactatataaaacttgtagaggaactattggagtataagctttattaagcaacttgcattagaagcatttggaacccaagaaaaagagtggttccatgtgatgctgctgtatttctgaattttcagattgaaaacagtaactagaactaagttcagtgtttgataacagtaacagcttttgttgccaaagatgacagcattggcaaaattgacatcatcgaggcaacaaagttgctcgtagctcagaagttctctcctttgatgaaatgcagctggaggcatctctctatttgaagtgggagttgttggctcatatctgctggtttccctagtcaccttcaaaatttaaaatcgaagaagttaaaatatcaactaaaaagtaacagcagaaaggcaaaagtgagctacacttgtttgaaagcataggatgaacataatagcatgttttacatgttgtctgtatgcaaacataatgtcataacatcaacttatgcaaactagaataacgacgatggaattgactattagtggaagatcggaataagtggcctactgtggattttgcggagcttcgggtctgcattccagagtttcttgattgtgtctgcctttgtgttagaatacccgtttagggtttggggtcttccccatgtaatgaccatctcacccctctgtaatgggcctggcccagtttacccagcctattaatatatcacccaacccctgttagggttaggggttcacattccaatatggtatcagattaggtttttcccaccctcctctct

SEQ ID NO: 15218 - DNA, 2314 bp, Zea Mays
caggcaggcagatcaacaagtcgcagcgcagtcaagcaaggcacgtcggtccaagagcacgacgagcagacgacgctgccggcccggccgtgctgctcctctgagtccgagatctgaaggcgcggcaggaaggaaacgggcgggcgagaggatccagcagccctcccccacgcgcgcgcgacggttagcgcgtcccagatctcggtgcggcgcctcccgcccggccctgccggcgagagcgcggcccgatgaggcggcggccgttcctggaccagcggcggccttcgttcaagcgccggtggcagcagcgcccgtggtgggtgcgcctcgcgctttccctcctcctcgccctcgcatgcgtcctcctcctcgccgtcctcctcggctcccccgaccccggcgcctcgccgtccacctccgccgcgtcctccggatctgagaccacctcctcacctctcctccgtcagagaacttacctggagggaatcacggatgcgctcaacatgactgacgaaatgctgagcgcccgctcgttctcgaggcagctcatggaccagatttatctagccaaaacatatgtcgtcgttgccaaggaggccaacaacctgcagtttgtggcggagcttagtgcccaggtacggcgggcgcagagcatccttgcgcatgctgcagcctatgggggcacggtgatggagcaggaagcagagaaggcgatcagggatatgtcggtgctgctcttccaggcgcagcagcttcggtacgacagcagtatcacaatcatgaagttgaaaggccagattcagtccctagaggagaagtcgaaagttgaggtggagaaaagcacaaaatatggccagattgctgctgaggacctcccaaagggactttattgccttggtgtccggttaaccatggaatggtttaagagtcccgagcttcagaggaagttttcggataggagcccagcagtgcagagcaatctgagggataacagcctctatcatttttgtgtcttctcagacaacatccttgctgtttcagttgttgttaattctacggctataaactcgaggcaccctgacaaggttgtttttcacttagtgactgatgagttgaactatgctccgatgaaggcatggtttggcatgaatgactacagaggggtcactgtggagatacaaaaggtggaggactttacctggctcaatgcatcgtatgttcccgttcttaaacagctacagaatgctgctacacagaagttctacttctctggcagtggtagtcgtggaacaccaattaaattcaggaacccaaagtacttatcaatgcttaaccacttgaggttttatattccagaaatatatcctgaattgcagaaggtggtatttcttgatgatgatatcgttgttcagaaggacctatcagaattgtttactatcaacctcaatggcaatgtgatgggtgctgtagagacttgcatggagacattccacagatttcataagtatcttaaccattcccatcctctaatccgtgctcattttgaccctgatgcttgcggctgggcatttggtatgaacgtgcttgatctggttgaatggaggaacaagaatgtgacaggcatatatcattattggcaggagcgcaatgctgatcatactctatggaagcttgggtctttaccacctggacttcttgctttctatggcttggttgaagcattggatcccaaatggcatgtcttgggacttggctacacaaatgtggatcttgctactatcaaggaaggtgcagtactgcactacaatggaaatatgaagccatggctcaaaatcggaatggagaagtacaagagcttttgggataactatgtggactattcacaccctttgattcagcagtgcttcatgcgttgattgatgtgtatcaacattagaatttttgtaagcttcatggtagatatgttccgagcacatgctccaactgccacacggaaacattgtagttaaatcagttggcttttctctcaagttacaatctctgacaaaacatcagtggatgtctatagcatctgtagttgatggagcacaacaattgcatatctctagccacaggtacagaaccattggtgttttcagatttgtcaagtaccacaaggttagaagttgcattatcgtttctggcttccactacaatgctctcatcctgctggctgctatctgatggatttgtgttgatggagttttcctgttctgccagaacaggaatcgaatcactgtaactttcggatttgtcaagctcaggcccagcttct

SEQ ID NO: 15219 - DNA, 1784 bp, Zea Mays
cgccgtccacctccgccgcgtcctccggatctgagaccacctcctcacctctcctccgtcagagaacttacctggagggaatcacggatgcgctcaacatgactgacgaaatgctgagcgcccgctcgttctcgaggcagctcatggaccagatttatctagccaaaacatatgtcgtcgttgccaaggaggccaacaacctgcagtttgtggcggagcttagtgcccaggtacggcgggcgcagagcatccttgcgcatgctgcagcctatgggggcacggtgatggagcaggaagcagagaaggcgatcagggatatgtcggtgctgctcttccaggcgcagcagcttcggtacgacagcagtatcacaatcatgaagttgaaaggccagattcagtccctagaggagaagtcgaaagttgaggtggagaaaagcacaaaatatggccagattgctgctgaggacctcccaaagggactttattgccttggtgtccggttaaccatggaatggtttaagagtcccgagcttcagaggaagttttcggataggagcccagcagtgcagagcaatctgagggataacagcctctatcatttttgtgtcttctcagacaacatccttgctgtttcagttgttgttaattctacggctataaactcgaggcaccctgacaaggttgtttttcacttagtgactgatgagttgaactatgctccgatgaaggcatggtttggcatgaatgactacagaggggtcactgtggagatacaaaaggtggaggactttacctggctcaatgcatcgtatgttcccgttcttaaacagctacagaatgctgctacacagaagttctacttctctggcagtggtagtcgtggaacaccaattaaattcaggaacccaaagtacttatcaatgcttaaccacttgaggttttatattccagaaatatatcctgaattgcagaaggtggtatttcttgatgatgatatcgttgttcagaaggacctatcagaattgtttactatcaacctcaatggcaatgtgatgggtgctgtagagacttgcatggagacattccacagatttcataagtatcttaaccattcccatcctctaatccgtgctcattttgaccctgatgcttgcggctgggcatttggtatgaacgtgcttgatctggttgaatggaggaacaagaatgtgacaggcatatatcattattggcaggagcgcaatgctgatcatactctatggaagcttgggtctttaccacctggacttcttgctttctatggcttggttgaagcattggatcccaaatggcatgtcttgggacttggctacacaaatgtggatcttgctactatcaaggaaggtgcagtactgcactacaatggaaatatgaagccatggctcaaaatcggaatggagaagtacaagagcttttgggataactatgtggactattcacaccctttgattcagcagtgcttcatgcgttgattgatgtgtatcaacattagaatttttgtaagcttcatggtagatatgttccgagcacatgctccaactgccacacggaaacattgtagttaaatcagttggcttttctctcaagttacaatctctgacaaaacatcagtggatgtctatagcatctgtagttgatggagcacaacaattgcatatctctagccacagcactttactttctctgctgtggttgctggcctcatcttgagggttctccacctgtcttgtgctgtctgattcttc

SEQ ID NO: 15220 - DNA, 456 bp, Zea Mays
ttgagatgggggcaaatgctacccggtgccgtccagctgacggtgatgcatgcatgccgtccagctgtgcgggatgtggaatgacgatcgattaccctgctaataaagctagctagctatagcacttatttaatttatgcatgtggagagttggagacttcttgatccgtttgggctaatcacggtgttacggggcaccttttttgtgtaaatgacgatgggcgatgagtcgttacctagcgctagctagtgtgtgtgctgtggagaagatcgagatcctgatgatatgcatgatttttttttttttgaggtgtccgaagggtgttgcattgcactgtagggtactaggagtctaggatgcatgaacagcaggacaaggtctctgagacacgctatgtgttcgacccctttaatttaatttggtagatgtacgaggcttcttttggtaatttaaat

SEQ ID NO: 15221 - DNA, 3976 bp, Zea Mays
ggtccctgtctgtctccctttggcggccacggcacgagaggcggaggaggcacaaatacgtttcaggattccaggattccaccgttggcgctggcgtaaaccctgcctctccctatcccccaagtccgcggcgcccagctgcccctgcctcctcctaccgccgccgtttcgctccattcgcctcccggaggccgccgaatgcccgcgcccagcgccacccgccctcaaacctagactagacgtgtgcctcgcccgcgccgtgcggtctggtccaagacggcgccctgcgggctcggctgctgcggcgggggagcgaggggagggggcgggaggctgaggcggctcgtggggtccatggcagtggccggattggcgccctcaccggcgcccgcgctgctccggaggttcccgtgctctgcgcctccctgggcgccctcgcccttccgcccccgccgcccccgccgcggccgctccatgatgtcgccgttcactggcgccagaaggcaggagtactcccatagctcagtccttggaattcaagacaaccgagctcttaagcttccagtatgtgtcaactttaatctgcaaaacggcggcgcacaagaatgggctgacgagagcaggaggttatcattaagcaaagccggcaatagtaatggttccactcatctagggtctggtattttccatcatgaacccttggaagatttcaagagctccaaccaatctctattgcacagtgtaagacaaagaatggcaccaaattctcttgcgaataggcacgtcaacacggaattggcaaagcatcatgcgattaagcatgctgcagttgctgtgtcagcactgaccagtgttgttaatgatgaccttaaatcagtgaagaggcctaaggaatctgaagtggaggttcattggtctaatggccccaagtttcattctcatattccgaaaatctctgaagttgaaacaagcctgcgatttgatgaaaatgctacagatggctatgctaaagatgtgaatgaatgctcacctgaggagacagtacaaccctctcgaactagagcgccctcatcccaggagtctctagatgcacggaaggcactcagtaccatatatgacaaagttctggtggttgacaatgtcatgtcagctaggagtgttgttcaactgcttactacgaagtacagaaattatattcatgcatgtgacacagaggtagctaatattaatgttaaacaagagacaccagttggccatggaaaggtcacatgctttagcatttactctggcactaaaggtgctgaggctgattttggaaatggcaagacatgcatttgggtggatgtgctagatggtggaccagatgtactcatggagtttgtcccattttttgaggattcatcaatcaggaaggtttggcacaactatagttttgatagtcatgttatagagaactatggaattaaagttgctggatttcatgctgatacaatgcatcttgcacgactttgggattcttcaagaagaacagatggaggatattctcttgagggacttacaaatgatcatagggtcatgggtgttgttccaaaggaattacaaaagattgggaagagatcaatgaaaaccatctttggtcggaaaaaaataaagaaggatgggtcagaagggaagattactgcaattgagcctgttgaaattttacaaagagaagacagagaattgtggatctgctattcttcgttagattccatgagtaccttgaggctttatgagagcttgaaaagcaagcttgaaaggaagccctggacttttgacggttaccccagacccggaggttcattgtacgatttctacgaggagtattggtgtcctttcggtgctattcttgtaaaaatggaaacagctggaatgcttgttgaccgtgcttacctttcagagattgaaaaggttgctgttgcacagcgcgaatcagctgcagataaatttcggaagtgggcatctaagtattgccctgatgcaaaatacatgaatgttaatagtgacactcagattcgacaactcttcttcggtggtatagagaacatatacaaatctggtgattttttgccgaagagtaaagctattaaagtgcctaacaatgaaactgctgtttcagaaggcaagaaggttccaaagtatcgcacaattgaccttttcagcattgtggaagacctgaaaactgatatatttactgcaagtggttggccttcagttagtggggctgcattgagaaatttggctgggaaggttccatcagatcttgtttactcaacagatgatgtaaatgatgatgaatgtggtattcattctgaaatttcccattgtgatctagaagacacctcttcttatggtactgcatatgatgcatttgggggaggaaaggaaggaaaagaagcatgccatgccattgcagctttgtgtgagatctgttctattaactcgttaatatccaacttcattcttcctctacagggaaatcatatatcatgtaaggaagggcggattcactgttccttaaatatcaacacagagacaggacgtttatcggcaagggcaccaaatttacaggataggtataaaatccgccaagcttttgttgcagctccagggaacactcttattgttgctgattatggtcagctggaactcaggatcttggcgcatcttgctgattgcaaaagcatgttagatgcttttaaagctggcggcgacttccattccaggacagccatgaacatgtatcagcatattcgtgaggctgttgaagaagagaaagtaattcttgagtggcatcctcaacccggtcaagagaaacctcctgtgccgttgttgaaggatgcttttggtgctgagaggaggaaagctaagatgctaaatttctccattgcatatgggaaaacggctcatgggcttgctcgtgattggaaggtttctgttaaggaagcaaaagatacactgaaactctggtatagcgatagaaaggaagttctggcttggcaaatgaagcagaaacagctagcacatgagaagcgtgaagtttatactttgcttgggcgatcacgccgttttccaaatatggctcatgcaacttctggccaaaggggtcacattgagcgtgctgctatcaatgctcctgtacagggcagtgcagctgatgttgctatgtgtgcaatgcttgagatagacaggaatactcgtcttaaggagcttggttggacgctactcttgcaggtgcatgatgaagtgatactggaagggccttcagagtctgcggagctggccaagtccatagttgttgagtgcatgtctaagcccttctatggcaccaatatcctgaaggtcgaccttgctgttgatgccaagtgtgcacagaattggtatgcggccaaatagacctgttaagtgtcccagaagggcgtcaattccttcggtgaaactcggtggattttgaactggtatctgctggctgctgctagtagcctagtgagctcatctccacgtggatgccatgcactgattatttcgctgttgatctggacagtgaggggtcagcactgagcagcgaaggcactgtacactattccgtattccctataggtcgggtagcttcaccttccacactccctgttaggatctctcgatcattcatgcctgatgtagttggtcgtcctggatagcagtgaagactaagcatgccgtgttcataagatttatttagcatgctgatgtgttgagttgctgaccagttctgctgacgtctaacactgttgcacgcactgcaacaatgttttgatcacaagagaatgtagttgattgtgagcgttcttaatctccttatttctgctgttgaactgtgcgtcttgttaattgtatcttctctaagcattgtccgcacggcagggtgccagggttgggcaaatgtttcagttcgtca

SEQ ID NO: 15222 - DNA, 4364 bp, Zea Mays
ggcgctggcgtaaaccctgcctctccctatcccccaagtccgcggcgcccagctgcccctgcctcctcctaccgccgccgtttcgctccattcgcctcccggaggccgccgaatgcccgcgcccagcgccacccgccctcaaacctagactagacgtgtgcctcgcccgcgccgtgcggtctggtccaagacggcgccctgcgggctcggctgctgcggcgggggagcgaggggagggggcgggaggctgaggcggctcgtggggtccatggcagtggccggattggcgccctcaccggcgcccgcgctgctccggaggttcccgtgctctgcgcctccctgggcgccctcgcccttccgcccccgccgcccccgccgcggccgctccatgatgtcgccgttcactggcgccagaaggcaggagtactcccatagctcagtccttggaattcaagacaaccgagctcttaagcttccagtatgtgtcaactttaatctgcaaaacggcggcgcacaagaatgggctgacgagagcaggaggttatcattaagcaaagccggcaatagtaatggttccactcatctagggtctggtattttccatcatgaacccttggaagatttcaagagctccaaccaatctctattgcacagtgtaagacaaagaatggcaccaaattctcttgcgaataggcacgtcaacacggaattggcaaagcatcatgcgattaagcatgctgcagttgctgtgtcagcactgaccagtgttgttaatgatgaccttaaatcagtgaagaggcctaaggaatctgaagtggaggttcattggtctaatggccccaagtttcattctcatattccgaaaatctctgaagttgaaacaagcctgcgatttgatgaaaatgctacagatggctatgctaaagatgtgaatgaatgctcacctgaggagacagtacaaccctctcgaactagagcgccctcatcccaggagtctctagatgcacggaaggcactcagtaccatatatgacaaagttctggtggttgacaatgtcatgtcagctaggagtgttgttcaactgcttactacgaagtacagaaattatattcatgcatgtgacacagaggtagctaatattaatgttaaacaagagacaccagttggccatggaaaggtcacatgctttagcatttactctggcactaaaggtgctgaggctgattttggaaatggcaagacatgcatttgggtggatgtgctagatggtggaccagatgtactcatggagtttgtcccattttttgaggattcatcaatcaggaaggtttggcacaactatagttttgatagtcatgttatagagaactatggaattaaagttgctggatttcatgctgatacaatgcatcttgcacgactttgggattcttcaagaagaacagatggaggatattctcttgagggacttacaaatgatcatagggtcatgggtgttgttccaaaggaattacaaaagattgggaagagatcaatgaaaaccatctttggtcggaaaaaaataaagaaggatgggtcagaagggaagattactgcaattgagcctgttgaaattttacaaagagaagacagagaattgtggatctgctattcttcgttagattccatgagtaccttgaggctttatgagagcttgaaaagcaagcttgaaaggaagccctggacttttgacggttaccccagacccggaggttcattgtacgatttctacgaggagtattggtgtcctttcggtgctattcttgtaaaaatggaaacagctggaatgcttgttgaccgtgcttacctttcagagattgaaaaggttgctgttgcacagcgcgaatcagctgcagataaatttcggaagtgggcatctaagtattgccctgatgcaaaatacatgaatgttaatagtgacactcagattcgacaactcttcttcggtggtatagagaacatatacaaatctggtgattttttgccgaagagtaaagctattaaagtgcctaacaatgaaactgctgtttcagaaggcaagaaggttccaaagtatcgcacaattgaccttttcagcattgtggaagacctgaaaactgatatatttactgcaagtggttggccttcagttagtggggctgcattgagaaatttggctgggaaggttccatcagatcttgtttactcaacagatgatgtaaatgatgatgaatgtggtattcattctgaaatttcccattgtgatctagaagacacctcttcttatggtactgcatatgatgcatttgggggaggaaaggaaggaaaagaagcatgccatgccattgcagctttgtgtgagatctgttctattaactcgttaatatccaacttcattcttcctctacagggaaatcatatatcatgtaaggaagggcggattcactgttccttaaatatcaacacagagacaggacgtttatcggcaagggcaccaaatttacaggcaagcagtatcgtaggaggaaagggggccagcatagctaggagttgggcccagatgcacagctggaagataggggtcaggagatatttttttgaagggaaaggctgtagggaaaacccctacagcacgattttattaaataatgagaagaagggaacaagaaatggaccaagaaaagaaaaaaacaaaaaaacaaaaaacaaaaaaatcggctatcgagagtttagccaaagacaccctaagcctccaaacgctattaaacctaagcatttgcaacttgagcatgtcattgaagctgcccttccaagaaaggaaagaaggggccatgttcttgaagatgaagtcattcatctgcttccaaatgcaccatactaccactgccagaatatccatgaagaagttgtgcccaaaggcaccccttgcagcttcgataaaaagggcgtacccagtgccaaccaacctgcacttgaaaaggataggtataaaatccgccaagcttttgttgcagctccagggaacactcttattgttgctgattatggtcagctggaactcaggatcttggcgcatcttgctgattgcaaaagcatgttagatgcttttaaagctggcggcgacttccattccaggacagccatgaacatgtatcagcatattcgtgaggctgttgaagaagagaaagtaattcttgagtggcatcctcaacccggtcaagagaaacctcctgtgccgttgttgaaggatgcttttggtgctgagaggaggaaagctaagatgctaaatttctccattgcatatgggaaaacggctcatgggcttgctcgtgattggaaggtttctgttaaggaagcaaaagatacactgaaactctggtatagcgatagaaaggaagttctggcttggcaaatgaagcagaaacagctagcacatgagaagcgtgaagtttatactttgcttgggcgatcacgccgttttccaaatatggctcatgcaacttctggccaaaggggtcacattgagcgtgctgctatcaatgctcctgtacagggcagtgcagctgatgttgctatgtgtgcaatgcttgagatagacaggaatactcgtcttaaggagcttggttggacgctactcttgcaggtgcatgatgaagtgatactggaagggccttcagagtctgcggagctggccaagtccatagttgttgagtgcatgtctaagcccttctatggcaccaatatcctgaaggtcgaccttgctgttgatgccaagtgtgcacagaattggtatgcggccaaatagacctgttaagtgtcccagaagggcgtcaattccttcggtgaaactcggtggattttgaactggtatctgctggctgctgctagtagcctagtgagctcatctccacgtggatgccatgcactgattatttcgctgttgatctggacagtgaggggtcagcactgagcagcgaaggcactgtacactattccgtattccctataggtcgggtagcttcaccttccacactccctgttaggatctctcgatcattcatgcctgatgtagttggtcgtcctggatagcagtgaagactaagcatgccgtgttcataagatttatttagcatgctgatgtgttgagttgctgaccagttctgctgacgtctaacactgttgcacgcactgcaacaatgttttgatcacaagagaatgtagttgattgtgagcgttcttaatctccttatttctgctgttgaactgtgcgtcttgttaattgtatcttctctaagcattgtccgcacggcagggtgccagggttgggcaaatgtttcagttcgtca

SEQ ID NO: 15223 - DNA, 3789 bp, Zea Mays
gttcaatgctccttccggtgacgatgataaaacatttgactagatagaggtttgcactttggtttgctcgatggtgtgttgatattctggtgattactgtcgtgtcgtgggaaccttgcgtgtcgtgttctgacttgatgctagtaatgtaatctctatatatgaaccaatcagggggatgagtgagccaaatattgtctgttctgtaatttgcctctgcacccatagcccgcaggatggagctattgctttttggtggtggtgtttttgctgaacttcaatggctgattgccaggcaggagtactcccatagctcagtccttggaattcaagacaaccgagctcttaagcttccagtatgtgtcaactttaatctgcaaaacggcggcgcacaagaatgggctgacgagagcaggaggttatcattaagcaaagccggcaatagtaatggttccactcatctagggtctggtattttccatcatgaacccttggaagatttcaagagctccaaccaatctctattgcacagtgtaagacaaagaatggcaccaaattctcttgcgaataggcacgtcaacacggaattggcaaagcatcatgcgattaagcatgctgcagttgctgtgtcagcactgaccagtgttgttaatgatgaccttaaatcagtgaagaggcctaaggaatctgaagtggaggttcattggtctaatggccccaagtttcattctcatattccgaaaatctctgaagttgaaacaagcctgcgatttgatgaaaatgctacagatggctatgctaaagatgtgaatgaatgctcacctgaggagacagtacaaccctctcgaactagagcgccctcatcccaggagtctctagatgcacggaaggcactcagtaccatatatgacaaagttctggtggttgacaatgtcatgtcagctaggagtgttgttcaactgcttactacgaagtacagaaattatattcatgcatgtgacacagaggtagctaatattaatgttaaacaagagacaccagttggccatggaaaggtcacatgctttagcatttactctggcactaaaggtgctgaggctgattttggaaatggcaagacatgcatttgggtggatgtgctagatggtggaccagatgtactcatggagtttgtcccattttttgaggattcatcaatcaggaaggtttggcacaactatagttttgatagtcatgttatagagaactatggaattaaagttgctggatttcatgctgatacaatgcatcttgcacgactttgggattcttcaagaagaacagatggaggatattctcttgagggacttacaaatgatcatagggtcatgggtgttgttccaaaggaattacaaaagattgggaagagatcaatgaaaaccatctttggtcggaaaaaaataaagaaggatgggtcagaagggaagattactgcaattgagcctgttgaaattttacaaagagaagacagagaattgtggatctgctattcttcgttagattccatgagtaccttgaggctttatgagagcttgaaaagcaagcttgaaaggaagccctggacttttgacggttaccccagacccggaggttcattgtacgatttctacgaggagtattggtgtcctttcggtgctattcttgtaaaaatggaaacagctggaatgcttgttgaccgtgcttacctttcagagattgaaaaggttgctgttgcacagcgcgaatcagctgcagataaatttcggaagtgggcatctaagtattgccctgatgcaaaatacatgaatgttaatagtgacactcagattcgacaactcttcttcggtggtatagagaacatatacaaatctggtgattttttgccgaagagtaaagctattaaagtgcctaacaatgaaactgctgtttcagaaggcaagaaggttccaaagtatcgcacaattgaccttttcagcattgtggaagacctgaaaactgatatatttactgcaagtggttggccttcagttagtggggctgcattgagaaatttggctgggaaggttccatcagatcttgtttactcaacagatgatgtaaatgatgatgaatgtggtattcattctgaaatttcccattgtgatctagaagacacctcttcttatggtactgcatatgatgcatttgggggaggaaaggaaggaaaagaagcatgccatgccattgcagctttgtgtgagatctgttctattaactcgttaatatccaacttcattcttcctctacagggaaatcatatatcatgtaaggaagggcggattcactgttccttaaatatcaacacagagacaggacgtttatcggcaagggcaccaaatttacagaaccaacctgcacttgaaaaggataggtataaaatccgccaagcttttgttgcagctccagggaacactcttattgttgctgattatggtcagctggaactcaggatcttggcgcatcttgctgattgcaaaagcatgttagatgcttttaaagctggcggcgacttccattccaggacagccatgaacatgtatcagcatattcgtgaggctgttgaagaagagaaagtaattcttgagtggcatcctcaacccggtcaagagaaacctcctgtgccgttgttgaaggatgcttttggtgctgagaggaggaaagctaagatgctaaatttctccattgcatatgggaaaacggctcatgggcttgctcgtgattggaaggtttctgttaaggaagcaaaagatacactgaaactctggtatagcgatagaaaggaagttctggcttggcaaatgaagcagaaacagctagcacatgagaagcgtgaagtttatactttgcttgggcgatcacgccgttttccaaatatggctcatgcaacttctggccaaaggggtcacattgagcgtgctgctatcaatgctcctgtacagggcagtgcagctgatgttgctatgtgtgcaatgcttgagatagacaggaatactcgtcttaaggagcttggttggacgctactcttgcaggtgcatgatgaagtgatactggaagggccttcagagtctgcggagctggccaagtccatagttgttgagtgcatgtctaagcccttctatggcaccaatatcctgaaggtcgaccttgctgttgatgccaagtgtgcacagaattggtatgcggccaaatagacctgttaagtgtcccagaagggcgtcaattccttcggtgaaactcggtggattttgaactggtatctgctggctgctgctagtagcctagtgagctcatctccacgtggatgccatgcactgattatttcgctgttgatctggacagtgaggggtcagcactgagcagcgaaggcactgtacactattccgtattccctataggtcgggtagcttcaccttccacactccctgttaggatctctcgatcattcatgcctgatgtagttggtcgtcctggatagcagtgaagactaagcatgccgtgttcataagatttatttagcatgctgatgtgttgagttgctgaccagttctgctgacgtctaacactgttgcacgcactgcaacaatgttttgatcacaagagaatgtagttgattgtgagcgttcttaatctccttatttctgctgttgaactgtgcgtcttgttaattgtatcttctctaagcattgtccgcacggcagggtgccagggttgggcaaatgtttcagttcgtca

SEQ ID NO: 15224 - DNA, 3527 bp, Zea Mays
atggagctattgctttttggtggtggtgtttttgctgaacttcaatggctgattgccaggcaggagtactcccatagctcagtccttggaattcaagacaaccgagctcttaagcttccagtatgtgtcaactttaatctgcaaaacggcggcgcacaagaatgggctgacgagagcaggaggttatcattaagcaaagccggcaatagtaatggttccactcatctagggtctggtattttccatcatgaacccttggaagatttcaagagctccaaccaatctctattgcacagtgtaagacaaagaatggcaccaaattctcttgcgaataggcacgtcaacacggaattggcaaagcatcatgcgattaagcatgctgcagttgctgtgtcagcactgaccagtgttgttaatgatgaccttaaatcagtgaagaggcctaaggaatctgaagtggaggttcattggtctaatggccccaagtttcattctcatattccgaaaatctctgaagttgaaacaagcctgcgatttgatgaaaatgctacagatggctatgctaaagatgtgaatgaatgctcacctgaggagacagtacaaccctctcgaactagagcgccctcatcccaggagtctctagatgcacggaaggcactcagtaccatatatgacaaagttctggtggttgacaatgtcatgtcagctaggagtgttgttcaactgcttactacgaagtacagaaattatattcatgcatgtgacacagaggtagctaatattaatgttaaacaagagacaccagttggccatggaaaggtcacatgctttagcatttactctggcactaaaggtgctgaggctgattttggaaatggcaagacatgcatttgggtggatgtgctagatggtggaccagatgtactcatggagtttgtcccattttttgaggattcatcaatcaggaaggtttggcacaactatagttttgatagtcatgttatagagaactatggaattaaagttgctggatttcatgctgatacaatgcatcttgcacgactttgggattcttcaagaagaacagatggaggatattctcttgagggacttacaaatgatcatagggtcatgggtgttgttccaaaggaattacaaaagattgggaagagatcaatgaaaaccatctttggtcggaaaaaaataaagaaggatgggtcagaagggaagattactgcaattgagcctgttgaaattttacaaagagaagacagagaattgtggatctgctattcttcgttagattccatgagtaccttgaggctttatgagagcttgaaaagcaagcttgaaaggaagccctggacttttgacggttaccccagacccggaggttcattgtacgatttctacgaggagtattggtgtcctttcggtgctattcttgtaaaaatggaaacagctggaatgcttgttgaccgtgcttacctttcagagattgaaaaggttgctgttgcacagcgcgaatcagctgcagataaatttcggaagtgggcatctaagtattgccctgatgcaaaatacatgaatgttaatagtgacactcagattcgacaactcttcttcggtggtatagagaacatatacaaatctggtgattttttgccgaagagtaaagctattaaagtgcctaacaatgaaactgctgtttcagaaggcaagaaggttccaaagtatcgcacaattgaccttttcagcattgtggaagacctgaaaactgatatatttactgcaagtggttggccttcagttagtggggctgcattgagaaatttggctgggaaggttccatcagatcttgtttactcaacagatgatgtaaatgatgatgaatgtggtattcattctgaaatttcccattgtgatctagaagacacctcttcttatggtactgcatatgatgcatttgggggaggaaaggaaggaaaagaagcatgccatgccattgcagctttgtgtgagatctgttctattaactcgttaatatccaacttcattcttcctctacagggaaatcatatatcatgtaaggaagggcggattcactgttccttaaatatcaacacagagacaggacgtttatcggcaagggcaccaaatttacaggtataaaatccgccaagcttttgttgcagctccagggaacactcttattgttgctgattatggtcagctggaactcaggatcttggcgcatcttgctgattgcaaaagcatgttagatgcttttaaagctggcggcgacttccattccaggacagccatgaacatgtatcagcatattcgtgaggctgttgaagaagagaaagtaattcttgagtggcatcctcaacccggtcaagagaaacctcctgtgccgttgttgaaggatgcttttggtgctgagaggaggaaagctaagatgctaaatttctccattgcatatgggaaaacggctcatgggcttgctcgtgattggaaggtttctgttaaggaagcaaaagatacactgaaactctggtatagcgatagaaaggaagttctggcttggcaaatgaagcagaaacagctagcacatgagaagcgtgaagtttatactttgcttgggcgatcacgccgttttccaaatatggctcatgcaacttctggccaaaggggtcacattgagcgtgctgctatcaatgctcctgtacagggcagtgcagctgatgttgctatgtgtgcaatgcttgagatagacaggaatactcgtcttaaggagcttggttggacgctactcttgcaggtgcatgatgaagtgatactggaagggccttcagagtctgcggagctggccaagtccatagttgttgagtgcatgtctaagcccttctatggcaccaatatcctgaaggtcgaccttgctgttgatgccaagtgtgcacagaattggtatgcggccaaatagacctgttaagtgtcccagaagggcgtcaattccttcggtgaaactcggtggattttgaactggtatctgctggctgctgctagtagcctagtgagctcatctccacgtggatgccatgcactgattatttcgctgttgatctggacagtgaggggtcagcactgagcagcgaaggcactgtacactattccgtattccctataggtcgggtagcttcaccttccacactccctgttaggatctctcgatcattcatgcctgatgtagttggtcgtcctggatagcagtgaagactaagcatgccgtgttcataagatttatttagcatgctgatgtgttgagttgctgaccagttctgctgacgtctaacactgttgcacgcactgcaacaatgttttgatcacaagagaatgtagttgattgtgagcgttcttaatctccttatttctgctgttgaactgtgcgtcttgttaattgtatcttctctaagcattgtccgcacggcagggtgccagggttgggcaaatgtttcagttcgtca

SEQ ID NO: 15225 - DNA, 3443 bp, Zea Mays
atggagctattgctttttggtggtggtgtttttgctgaacttcaatggctgattgccaggcaggagtactcccatagctcagtccttggaattcaagacaaccgagctcttaagcttccagtatgtgtcaactttaatctgcaaaacggcggcgcacaagaatgggctgacgagagcaggaggttatcattaagcaaagccggcaatagtaatggttccactcatctagggtctggtattttccatcatgaacccttggaagatttcaagagctccaaccaatctctattgcacagtgtaagacaaagaatggcaccaaattctcttgcgaataggcacgtcaacacggaattggcaaagcatcatgcgattaagcatgctgcagttgctgtgtcagcactgaccagtgttgttaatgatgaccttaaatcagtgaagaggcctaaggaatctgaagtggaggttcattggtctaatggccccaagtttcattctcatattccgaaaatctctgaagttgaaacaagcctgcgatttgatgaaaatgctacagatggctatgctaaagatgtgaatgaatgctcacctgaggagacagtacaaccctctcgaactagagcgccctcatcccaggagtctctagatgcacggaaggcactcagtaccatatatgacaaagttctggtggttgacaatgtcatgtcagctaggagtgttgttcaactgcttactacgaagtacagaaattatattcatgcatgtgacacagaggtagctaatattaatgttaaacaagagacaccagttggccatggaaaggtcacatgctttagcatttactctggcactaaaggtgctgaggctgattttggaaatggcaagacatgcatttgggtggatgtgctagatggtggaccagatgtactcatggagtttgtcccattttttgaggattcatcaatcaggaagaagaacagatggaggatattctcttgagggacttacaaatgatcatagggtcatgggtgttgttccaaaggaattacaaaagattgggaagagatcaatgaaaaccatctttggtcggaaaaaaataaagaaggatgggtcagaagggaagattactgcaattgagcctgttgaaattttacaaagagaagacagagaattgtggatctgctattcttcgttagattccatgagtaccttgaggctttatgagagcttgaaaagcaagcttgaaaggaagccctggacttttgacggttaccccagacccggaggttcattgtacgatttctacgaggagtattggtgtcctttcggtgctattcttgtaaaaatggaaacagctggaatgcttgttgaccgtgcttacctttcagagattgaaaaggttgctgttgcacagcgcgaatcagctgcagataaatttcggaagtgggcatctaagtattgccctgatgcaaaatacatgaatgttaatagtgacactcagattcgacaactcttcttcggtggtatagagaacatatacaaatctggtgattttttgccgaagagtaaagctattaaagtgcctaacaatgaaactgctgtttcagaaggcaagaaggttccaaagtatcgcacaattgaccttttcagcattgtggaagacctgaaaactgatatatttactgcaagtggttggccttcagttagtggggctgcattgagaaatttggctgggaaggttccatcagatcttgtttactcaacagatgatgtaaatgatgatgaatgtggtattcattctgaaatttcccattgtgatctagaagacacctcttcttatggtactgcatatgatgcatttgggggaggaaaggaaggaaaagaagcatgccatgccattgcagctttgtgtgagatctgttctattaactcgttaatatccaacttcattcttcctctacagggaaatcatatatcatgtaaggaagggcggattcactgttccttaaatatcaacacagagacaggacgtttatcggcaagggcaccaaatttacagaaccaacctgcacttgaaaaggataggtataaaatccgccaagcttttgttgcagctccagggaacactcttattgttgctgattatggtcagctggaactcaggatcttggcgcatcttgctgattgcaaaagcatgttagatgcttttaaagctggcggcgacttccattccaggacagccatgaacatgtatcagcatattcgtgaggctgttgaagaagagaaagtaattcttgagtggcatcctcaacccggtcaagagaaacctcctgtgccgttgttgaaggatgcttttggtgctgagaggaggaaagctaagatgctaaatttctccattgcatatgggaaaacggctcatgggcttgctcgtgattggaaggtttctgttaaggaagcaaaagatacactgaaactctggtatagcgatagaaaggaagttctggcttggcaaatgaagcagaaacagctagcacatgagaagcgtgaagtttatactttgcttgggcgatcacgccgttttccaaatatggctcatgcaacttctggccaaaggggtcacattgagcgtgctgctatcaatgctcctgtacagggcagtgcagctgatgttgctatgtgtgcaatgcttgagatagacaggaatactcgtcttaaggagcttggttggacgctactcttgcaggtgcatgatgaagtgatactggaagggccttcagagtctgcggagctggccaagtccatagttgttgagtgcatgtctaagcccttctatggcaccaatatcctgaaggtcgaccttgctgttgatgccaagtgtgcacagaattggtatgcggccaaatagacctgttaagtgtcccagaagggcgtcaattccttcggtgaaactcggtggattttgaactggtatctgctggctgctgctagtagcctagtgagctcatctccacgtggatgccatgcactgattatttcgctgttgatctggacagtgaggggtcagcactgagcagcgaaggcactgtacactattccgtattccctataggtcgggtagcttcaccttccacactccctgttaggatctctcgatcattcatgcctgatgtagttggtcgtcctggatagcagtgaagactaagcatgccgtgttcataagatttatttagcatgctgatgtgttgagttgctgaccagttctgctgacgtctaacactgttgcacgcactgcaacaatgttttgatcacaagagaatgtagttgattgtgagcgttcttaatctccttatttctgctgttgaactgtgcgtcttgttaattgtatcttctctaagcattgtccgcacggcagggtgccagggttgggcaaatgtttcagttcgtca

SEQ ID NO: 15226 - DNA, 3532 bp, Zea Mays
atggagctattgctttttggtggtggtgtttttgctgaacttcaatggctgattgccaggcaggagtactcccatagctcagtccttggaattcaagacaaccgagctcttaagcttccagtatgtgtcaactttaatctgcaaaacggcggcgcacaagaatgggctgacgagagcaggaggttatcattaagcaaagccggcaatagtaatggttccactcatctagggtctggtattttccatcatgaacccttggaagatttcaagagctccaaccaatctctattgcacagtgtaagacaaagaatggcaccaaattctcttgcgaataggcacgtcaacacggaattggcaaagcatcatgcgattaagcatgctgcagttgctgtgtcagcactgaccagtgttgttaatgatgaccttaaatcagtgaagaggcctaaggaatctgaagtggaggttcattggtctaatggccccaagtttcattctcatattccgaaaatctctgaagttgaaacaagcctgcgatttgatgaaaatgctacagatggctatgctaaagatgtgaatgaatgctcacctgaggagacagtacaaccctctcgaactagagcgccctcatcccaggagtctctagatgcacggaaggcactcagtaccatatatgacaaagttctggtggttgacaatgtcatgtcagctaggagtgttgttcaactgcttactacgaagtacagaaattatattcatgcatgtgacacagaggtagctaatattaatgttaaacaagagacaccagttggccatggaaaggtcacatgctttagcatttactctggcactaaaggtgctgaggctgattttggaaatggcaagacatgcatttgggtggatgtgctagatggtggaccagatgtactcatggagtttgtcccattttttgaggattcatcaatcaggaaggtttggcacaactatagttttgatagtcatgttatagagaactatggaattaaagttgctggatttcatgctgatacaatgcatcttgcacgactttgggattcttcaagaagaacagatggaggatattctcttgagggacttacaaatgatcatagggtcatgggtgttgttccaaaggaattacaaaagattgggaagagatcaatgaaaaccatctttggtcggaaaaaaataaagaaggatgggtcagaagggaagattactgcaattgagcctgttgaaattttacaaagagaagacagagaattgtggatctgctattcttcgttagattccatgagtaccttgaggctttatgagagcttgaaaagcaagcttgaaaggaagccctggacttttgacggttaccccagacccggaggttcattgtacgatttctacgaggagtattggtgtcctttcggtgctattcttgtaaaaatggaaacagctggaatgcttgttgaccgtgcttacctttcagagattgaaaaggttgctgttgcacagcgcgaatcagctgcagataaatttcggaagtgggcatctaagtattgccctgatgcaaaatacatgaatgttaatagtgacactcagattcgacaactcttcttcggtggtatagagaacatatacaaatctggtgattttttgccgaagagtaaagctattaaagtgcctaacaatgaaactgctgtttcagaaggcaagaaggttccaaagtatcgcacaattgaccttttcagcattgtggaagacctgaaaactgatatatttactgcaagtggttggccttcagttagtggggctgcattgagaaatttggctgggaaggttccatcagatcttgtttactcaacagatgatgtaaatgatgatgaatgtggtattcattctgaaatttcccattgtgatctagaagacacctcttcttatggtactgcatatgatgcatttgggggaggaaaggaaggaaaagaagcatgccatgccattgcagctttgtgtgagatctgttctattaactcgttaatatccaacttcattcttcctctacagggaaatcatatatcatgtaaggaagggcggattcactgttccttaaatatcaacacagagacaggacgtttatcggcaagggcaccaaatttacaggataggtataaaatccgccaagcttttgttgcagctccagggaacactcttattgttgctgattatggtcagctggaactcaggatcttggcgcatcttgctgattgcaaaagcatgttagatgcttttaaagctggcggcgacttccattccaggacagccatgaacatgtatcagcatattcgtgaggctgttgaagaagagaaagtaattcttgagtggcatcctcaacccggtcaagagaaacctcctgtgccgttgttgaaggatgcttttggtgctgagaggaggaaagctaagatgctaaatttctccattgcatatgggaaaacggctcatgggcttgctcgtgattggaaggtttctgttaaggaagcaaaagatacactgaaactctggtatagcgatagaaaggaagttctggcttggcaaatgaagcagaaacagctagcacatgagaagcgtgaagtttatactttgcttgggcgatcacgccgttttccaaatatggctcatgcaacttctggccaaaggggtcacattgagcgtgctgctatcaatgctcctgtacagggcagtgcagctgatgttgctatgtgtgcaatgcttgagatagacaggaatactcgtcttaaggagcttggttggacgctactcttgcaggtgcatgatgaagtgatactggaagggccttcagagtctgcggagctggccaagtccatagttgttgagtgcatgtctaagcccttctatggcaccaatatcctgaaggtcgaccttgctgttgatgccaagtgtgcacagaattggtatgcggccaaatagacctgttaagtgtcccagaagggcgtcaattccttcggtgaaactcggtggattttgaactggtatctgctggctgctgctagtagcctagtgagctcatctccacgtggatgccatgcactgattatttcgctgttgatctggacagtgaggggtcagcactgagcagcgaaggcactgtacactattccgtattccctataggtcgggtagcttcaccttccacactccctgttaggatctctcgatcattcatgcctgatgtagttggtcgtcctggatagcagtgaagactaagcatgccgtgttcataagatttatttagcatgctgatgtgttgagttgctgaccagttctgctgacgtctaacactgttgcacgcactgcaacaatgttttgatcacaagagaatgtagttgattgtgagcgttcttaatctccttatttctgctgttgaactgtgcgtcttgttaattgtatcttctctaagcattgtccgcacggcagggtgccagggttgggcaaatgtttcagttcgtca

SEQ ID NO: 15227 - DNA, 3510 bp, Zea Mays
atggagctattgctttttggtggtggtgtttttgctgaacttcaatggctgattgccaggcaggagtactcccatagctcagtccttggaattcaagacaaccgagctcttaagcttccagtatgtgtcaactttaatctgcaaaacggcggcgcacaagaatgggctgacgagagcaggaggttatcattaagcaaagccggcaatagtaatggttccactcatctagggtctggtattttccatcatgaacccttggaagatttcaagagctccaaccaatctctattgcacagtgtaagacaaagaatggcaccaaattctcttgcgaataggcacgtcaacacggaattggcaaagcatcatgcgattaagcatgctgcagttgctgtgtcagcactgaccagtgttgttaatgatgaccttaaatcagtgaagaggcctaaggaatctgaagtggaggttcattggtctaatggccccaagtttcattctcatattccgaaaatctctgaagttgaaacaagcctgcgatttgatgaaaatgctacagatggctatgctaaagatgtgaatgaatgctcacctgaggagacagtacaaccctctcgaactagagcgccctcatcccaggagtctctagatgcacggaaggcactcagtaccatatatgacaaagttctggtggttgacaatgtcatgtcagctaggagtgttgttcaactgcttactacgaagtacagaaattatattcatgcatgtgacacagaggtagctaatattaatgttaaacaagagacaccagttggccatggaaaggtcacatgctttagcatttactctggcactaaaggtgctgaggctgattttggaaatggcaagacatgcatttgggtggatgtgctagatggtggaccagatgtactcatggagtttgtcccattttttgaggattcatcaatcaggaaggtttggcacaactatagttttgatagtcatgttatagagaactatggaattaaagttgctggatttcatgctgatacaatgcatcttgcacgactttgggattcttcaagaagaacagatggaggatattctcttgagggacttacaaatgatcatagggtcatgggtgttgttccaaaggaattacaaaagattgggaagagatcaatgaaaaccatctttggtcggaaaaaaataaagaaggatgggtcagaagggaagattactgcaattgagcctgttgaaattttacaaagagaagacagagaattgtggatctgctattcttcgttagattccatgagtaccttgaggctttatgagagcttgaaaagcaagcttgaaaggaagccctggacttttgacggttaccccagacccggaggttcattgtacgatttctacgaggagtattggtgtcctttcggtgctattcttgtaaaaatggaaacagctggaatgcttgttgaccgtgcttacctttcagagattgaaaaggttgctgttgcacagcgcgaatcagctgcagataaatttcggaagtgggcatctaagtattgccctgatgcaaaatacatgaatgttaatagtgacactcagattcgacaactcttcttcggtggtatagagaacatatacaaatctggtgattttttgccgaagagtaaagctattaaagtgcctaacaatgaaactgctgtttcagaaggcaagaaggttccaaagtatcgcacaattgaccttttcagcattgtggaagacctgaaaactgatatatttactgcaagtggttggccttcagttagtggggctgcattgagaaatttggctgggaaggttccatcagatcttgtttactcaacagatgatgtaaatgatgatgaatgtggtattcattctgaaatttcccattgtgatctagaagacacctcttcttatggtactgcatatgatgcatttgggggaggaaaggaaggaaaagaagcatgccatgccattgcagctttgtgtgagatctgttctattaactcgttaatatccaacttcattcttcctctacagggaaatcatatatcatgtaaggaagggcggattcactgttccttaaatatcaacacagagacaggacgtttatcggcaagggcaccaaatttacagcttttgttgcagctccagggaacactcttattgttgctgattatggtcagctggaactcaggatcttggcgcatcttgctgattgcaaaagcatgttagatgcttttaaagctggcggcgacttccattccaggacagccatgaacatgtatcagcatattcgtgaggctgttgaagaagagaaagtaattcttgagtggcatcctcaacccggtcaagagaaacctcctgtgccgttgttgaaggatgcttttggtgctgagaggaggaaagctaagatgctaaatttctccattgcatatgggaaaacggctcatgggcttgctcgtgattggaaggtttctgttaaggaagcaaaagatacactgaaactctggtatagcgatagaaaggaagttctggcttggcaaatgaagcagaaacagctagcacatgagaagcgtgaagtttatactttgcttgggcgatcacgccgttttccaaatatggctcatgcaacttctggccaaaggggtcacattgagcgtgctgctatcaatgctcctgtacagggcagtgcagctgatgttgctatgtgtgcaatgcttgagatagacaggaatactcgtcttaaggagcttggttggacgctactcttgcaggtgcatgatgaagtgatactggaagggccttcagagtctgcggagctggccaagtccatagttgttgagtgcatgtctaagcccttctatggcaccaatatcctgaaggtcgaccttgctgttgatgccaagtgtgcacagaattggtatgcggccaaatagacctgttaagtgtcccagaagggcgtcaattccttcggtgaaactcggtggattttgaactggtatctgctggctgctgctagtagcctagtgagctcatctccacgtggatgccatgcactgattatttcgctgttgatctggacagtgaggggtcagcactgagcagcgaaggcactgtacactattccgtattccctataggtcgggtagcttcaccttccacactccctgttaggatctctcgatcattcatgcctgatgtagttggtcgtcctggatagcagtgaagactaagcatgccgtgttcataagatttatttagcatgctgatgtgttgagttgctgaccagttctgctgacgtctaacactgttgcacgcactgcaacaatgttttgatcacaagagaatgtagttgattgtgagcgttcttaatctccttatttctgctgttgaactgtgcgtcttgttaattgtatcttctctaagcattgtccgcacggcagggtgccagggttgggcaaatgtttcagttcgtca

SEQ ID NO: 15228 - DNA, 4155 bp, Zea Mays
atggagctattgctttttggtggtggtgtttttgctgaacttcaatggctgattgccaggcaggagtactcccatagctcagtccttggaattcaagacaaccgagctcttaagcttccagtatgtgtcaactttaatctgcaaaacggcggcgcacaagaatgggctgacgagagcaggaggttatcattaagcaaagccggcaatagtaatggttccactcatctagggtctggtattttccatcatgaacccttggaagatttcaagagctccaaccaatctctattgcacagtgtaagacaaagaatggcaccaaattctcttgcgaataggcacgtcaacacggaattggcaaagcatcatgcgattaagcatgctgcagttgctgtgtcagcactgaccagtgttgttaatgatgaccttaaatcagtgaagaggcctaaggaatctgaagtggaggttcattggtctaatggccccaagtttcattctcatattccgaaaatctctgaagttgaaacaagcctgcgatttgatgaaaatgctacagatggctatgctaaagatgtgaatgaatgctcacctgaggagacagtacaaccctctcgaactagagcgccctcatcccaggagtctctagatgcacggaaggcactcagtaccatatatgacaaagttctggtggttgacaatgtcatgtcagctaggagtgttgttcaactgcttactacgaagtacagaaattatattcatgcatgtgacacagaggtagctaatattaatgttaaacaagagacaccagttggccatggaaaggtcacatgctttagcatttactctggcactaaaggtgctgaggctgattttggaaatggcaagacatgcatttgggtggatgtgctagatggtggaccagatgtactcatggagtttgtcccattttttgaggattcatcaatcaggaaggtttggcacaactatagttttgatagtcatgttatagagaactatggaattaaagttgctggatttcatgctgatacaatgcatcttgcacgactttgggattcttcaagaagaacagatggaggatattctcttgagggacttacaaatgatcatagggtcatgggtgttgttccaaaggaattacaaaagattgggaagagatcaatgaaaaccatctttggtcggaaaaaaataaagaaggatgggtcagaagggaagattactgcaattgagcctgttgaaattttacaaagagaagacagagaattgtggatctgctattcttcgttagattccatgagtaccttgaggctttatgagagcttgaaaagcaagcttgaaaggaagccctggacttttgacggttaccccagacccggaggttcattgtacgatttctacgaggagtattggtgtcctttcggtgctattcttgtaaaaatggaaacagctggaatgcttgttgaccgtgcttacctttcagagattgaaaaggttgctgttgcacagcgcgaatcagctgcagataaatttcggaagtgggcatctaagtattgccctgatgcaaaatacatgaatgttaatagtgacactcagattcgacaactcttcttcggtggtatagagaacatatacaaatctggtgattttttgccgaagagtaaagctattaaagtgcctaacaatgaaactgctgtttcagaaggcaagaaggttccaaagtatcgcacaattgaccttttcagcattgtggaagacctgaaaactgatatatttactgcaagtggttggccttcagttagtggggctgcattgagaaatttggctgggaaggttccatcagatcttgtttactcaacagatgatgtaaatgatgatgaatgtggtattcattctgaaatttcccattgtgatctagaagacacctcttcttatggtactgcatatgatgcatttgggggaggaaaggaaggaaaagaagcatgccatgccattgcagctttgtgtgagatctgttctattaactcgttaatatccaacttcattcttcctctacagggaaatcatatatcatgtaaggaagggcggattcactgttccttaaatatcaacacagagacaggacgtttatcggcaagggcaccaaatttacaggcaagcagtatcgtaggaggaaagggggccagcatagctaggagttgggcccagatgcacagctggaagataggggtcaggagatatttttttgaagggaaaggctgtagggaaaacccctacagcacgattttattaaataatgagaagaagggaacaagaaatggaccaagaaaagaaaaaaacaaaaaaacaaaaaacaaaaaaatcggctatcgagagtttagccaaagacaccctaagcctccaaacgctattaaacctaagcatttgcaacttgagcatgtcattgaagctgcccttccaagaaaggaaagaaggggccatgttcttgaagatgaagtcattcatctgcttccaaatgcaccatactaccactgccagaatatccatgaagaagttgtgcccaaaggcaccccttgcagcttcgataaaaagggcgtacccagtgccaaccaacctgcacttgaaaaggataggtataaaatccgccaagcttttgttgcagctccagggaacactcttattgttgctgattatggtcagctggaactcaggatcttggcgcatcttgctgattgcaaaagcatgttagatgcttttaaagctggcggcgacttccattccaggacagccatgaacatgtatcagcatattcgtgaggctgttgaagaagagaaagtaattcttgagtggcatcctcaacccggtcaagagaaacctcctgtgccgttgttgaaggatgcttttggtgctgagaggaggaaagctaagatgctaaatttctccattgcatatgggaaaacggctcatgggcttgctcgtgattggaaggtacaaacttgtcaaacaaacatagctataagttgataaggagcaatcaactttattgttcattacacttaaatctgagctttggcctttggattactggttttgtgacagtcagctagaaacctgaaaacaacacacttgctgagtaggtttctgttaaggaagcaaaagatacactgaaactctggtatagcgatagaaaggaagttctggcttggcaaatgaagcagaaacagctagcacatgagaagcgtgaagtttatactttgcttgggcgatcacgccgttttccaaatatggctcatgcaacttctggccaaaggggtcacattgagcgtgctgctatcaatgctcctgtacagggcagtgcagctgatgttgctatgtgtgcaatgcttgagatagacaggaatactcgtcttaaggagcttggttggacgctactcttgcaggtgcatgatgaagtgatactggaagggccttcagagtctgcggagctggccaagtccatagttgttgagtgcatgtctaagcccttctatggcaccaatatcctgaaggtcgaccttgctgttgatgccaagtgtgcacagaattggtatgcggccaaatagacctgttaagtgtcccagaagggcgtcaattccttcggtgaaactcggtggattttgaactggtatctgctggctgctgctagtagcctagtgagctcatctccacgtggatgccatgcactgattatttcgctgttgatctggacagtgaggggtcagcactgagcagcgaaggcactgtacactattccgtattccctataggtcgggtagcttcaccttccacactccctgttaggatctctcgatcattcatgcctgatgtagttggtcgtcctggatagcagtgaagactaagcatgccgtgttcataagatttatttagcatgctgatgtgttgagttgctgaccagttctgctgacgtctaacactgttgcacgcactgcaacaatgttttgatcacaagagaatgtagttgattgtgagcgttcttaatctccttatttctgctgttgaactgtgcgtcttgttaattgtatcttctctaagcattgtccgcacggcagggtgccagggttgggcaaatgtttcagttcgtca

SEQ ID NO: 15229 - DNA, 3498 bp, Zea Mays
atggagctattgctttttggtggtggtgtttttgctgaacttcaatggctgattgccaggcaggagtactcccatagctcagtccttggaattcaagacaaccgagctcttaagcttccagtatgtgtcaactttaatctgcaaaacggcggcgcacaagaatgggctgacgagagcaggaggttatcattaagcaaagccggcaatagtaatggttccactcatctagggtctggtattttccatcatgaacccttggaagatttcaagagctccaaccaatctctattgcacagtgtaagacaaagaatggcaccaaattctcttgcgaataggcacgtcaacacggaattggcaaagcatcatgcgattaagcatgctgcagttgctgtgtcagcactgaccagtgttgttaatgatgaccttaaatcagtgaagaggcctaaggaatctgaagtggaggttcattggtctaatggccccaagtttcattctcatattccgaaaatctctgaagttgaaacaagcctgcgatttgatgaaaatgctacagatggctatgctaaagatgtgaatgaatgctcacctgaggagacagtacaaccctctcgaactagagcgccctcatcccaggagtctctagatgcacggaaggcactcagtaccatatatgacaaagttctggtggttgacaatgtcatgtcagctaggagtgttgttcaactgcttactacgaagtacagaaattatattcatgcatgtgacacagaggtagctaatattaatgttaaacaagagacaccagttggccatggaaaggtcacatgctttagcatttactctggcactaaaggtgctgaggctgattttggaaatggcaagacatgcatttgggtggatgtgctagatggtggaccagatgtactcatggagtttgtcccattttttgaggattcatcaatcaggaaggtttggcacaactatagttttgatagtcatgttatagagaactatggaattaaagttgctggatttcatgctgatacaatgcatcttgcacgactttgggattcttcaagaagaacagatggaggatattctcttgagggacttacaaatgatcatagggtcatgggtgttgttccaaaggaattacaaaagattgggaagagatcaatgaaaaccatctttggtcggaaaaaaataaagaaggatgggtcagaagggaagattactgcaattgagcctgttgaaattttacaaagagaagacagagaattgtggatctgctattcttcgttagattccatgagtaccttgaggctttatgagagcttgaaaagcaagcttgaaaggaagccctggacttttgacggttaccccagacccggaggttcattgtacgatttctacgaggagtattggtgtcctttcggtgctattcttgtaaaaatggaaacagctggaatgcttgttgaccgtgcttacctttcagagattgaaaaggttgctgttgcacagcgcgaatcagctgcagataaatttcggaagtgggcatctaagtattgccctgatgcaaaatacatgaatgttaatagtgacactcagattcgacaactcttcttcggtggtatagagaacatatacaaatctggtgattttttgccgaagagtaaagctattaaagtgcctaacaatgaaactgctgtttcagaaggcaagaaggttccaaagtatcgcacaattgaccttttcagcattgtggaagacctgaaaactgatatatttactgcaagtggttggccttcagttagtggggctgcattgagaaatttggctgggaaggttccatcagatcttgtttactcaacagatgatgtaaatgatgatgaatgtggtattcattctgaaatttcccattgtgatctagaagacacctcttcttatggtactgcatatgatgcatttgggggaggaaaggaaggaaaagaagcatgccatgccattgcagctttgtgtgagatctgttctattaactcgttaatatccaacttcattcttcctctacagggaaatcatatatcatgtaaggaagggcggattcactgttccttaaatatcaacacagagacaggacgtttatcggcaagggcaccaaatttacagctccagggaacactcttattgttgctgattatggtcagctggaactcaggatcttggcgcatcttgctgattgcaaaagcatgttagatgcttttaaagctggcggcgacttccattccaggacagccatgaacatgtatcagcatattcgtgaggctgttgaagaagagaaagtaattcttgagtggcatcctcaacccggtcaagagaaacctcctgtgccgttgttgaaggatgcttttggtgctgagaggaggaaagctaagatgctaaatttctccattgcatatgggaaaacggctcatgggcttgctcgtgattggaaggtttctgttaaggaagcaaaagatacactgaaactctggtatagcgatagaaaggaagttctggcttggcaaatgaagcagaaacagctagcacatgagaagcgtgaagtttatactttgcttgggcgatcacgccgttttccaaatatggctcatgcaacttctggccaaaggggtcacattgagcgtgctgctatcaatgctcctgtacagggcagtgcagctgatgttgctatgtgtgcaatgcttgagatagacaggaatactcgtcttaaggagcttggttggacgctactcttgcaggtgcatgatgaagtgatactggaagggccttcagagtctgcggagctggccaagtccatagttgttgagtgcatgtctaagcccttctatggcaccaatatcctgaaggtcgaccttgctgttgatgccaagtgtgcacagaattggtatgcggccaaatagacctgttaagtgtcccagaagggcgtcaattccttcggtgaaactcggtggattttgaactggtatctgctggctgctgctagtagcctagtgagctcatctccacgtggatgccatgcactgattatttcgctgttgatctggacagtgaggggtcagcactgagcagcgaaggcactgtacactattccgtattccctataggtcgggtagcttcaccttccacactccctgttaggatctctcgatcattcatgcctgatgtagttggtcgtcctggatagcagtgaagactaagcatgccgtgttcataagatttatttagcatgctgatgtgttgagttgctgaccagttctgctgacgtctaacactgttgcacgcactgcaacaatgttttgatcacaagagaatgtagttgattgtgagcgttcttaatctccttatttctgctgttgaactgtgcgtcttgttaattgtatcttctctaagcattgtccgcacggcagggtgccagggttgggcaaatgtttcagttcgtca

SEQ ID NO: 15230 - DNA, 819 bp, Zea Mays
ggtcgtaatatgttggatgattgggaggagaatttggctattattactgcaaacagaacaaaaggtgacgttctagtaatcacccatcttggtgattgcctctggaaagaaaaaaatgaggttgcagctgcccattcatgctatttagttgctgaactaaacattgattcatactcggaaagtgcaaggttatgcctcattggtgcagaccatttgaagtgtcctcgaacatttgccagcccggaagccattcagaggatagaggtttacgaatatgcgaaggtgcttggtaattctcaatatatcctactatcctttcagccatataagctgatatatgcatacatgcttgtggaagtggggaaagtttctgattctttgaggtattgccaggcgtctataaaggtactgaaagcctctggtcgtgcccctgaattggaggtttggaaacaattattttcttcgctggaggagaggatacacactcaccagcagagattggaagagattggaagcaagacctgggggatcatgagaggagttatggcaatggcctcacaaaaggtcgaggaatatactgagcggctggggagaggattggcaacgcagcgagcagaacgttcttgggacgattgggacgaccaaggcaagaagggtgaacctgcgaaaccgcaccaaagcagttactcctgggctggctaggatgatgggaaggacgatggttttgatagtcctggttacaacaaccacaacagctctaacaaggggagcaaccacaacgggacttccggtggctcattttggaggcgaggcccattc

SEQ ID NO: 15231 - DNA, 2518 bp, Zea Mays
atggagctgttgaccaaggcgcccgtggtggactgcttcgggaagatgcagaagcagcagcaacgagagtccgtgctggactccctcgtcgtgggcgcgggtggatcccctacagccatgtccccggggattgagatgctatcattgggatcatttaaaaccggagccattctctcgaagttgaagcatgcagttgccagtgagaaaattcaaggtgtcatccctggaacaaatagctcagctccacagaaatataattcagagaacatccaacatgagaacaagatagtatcccagaatataaacagtgctggtgactgcattggagattgcaaaaacagctccaacgccttttcttcaagggaagaaaatacaatcgctgaaaccagatgtccaacggataactcgaactcctgtcagtttgcactgagcaatggttcgcccattctcaataaccacagtgctccacaggatagcctcacttatggagataatgatctaaagtacattgattggcctggcattgacaattttgaggatgttgatacattattcaggagatctgatttcacatatgatcaacagcagctggagaatacagatgggttatcttggcttccttcttcaaatgttgtttattcttcttatgttgctttgcagcaagggtttgactcgtcttattccgattatgatattctagatgatctctcagcattccaatgtgcaaaagataaatcactaccctcagttggtccttcatcagatttatgtgataaccaattcaatgatacctatctgttcagtgagcagaagaatatataccaagaggatgggatggagttgttgcccactgaccagatatgcagtggacatgaaaacattgatatggggattgagatgctgtcattgggatcatttaaaaccggagccattctctcgcttctgttttctactgcggatgatgcacggccattctccatgcttggccttggtgacattgtaatacctggtgatcttattgtattgggagctgatcttattgtaatggcaataagtgtagttgatggatggactaatgctgacactaaacttatggagcatgttttgcttgtggtgttaaagagggctaggatggagcgtatgaaggcattggagaagatgatgaattccaaatcagcatcttccattgcgaatctggtggctttgatcatttctgtcatcttttgcttcttcatactttggcaaggcgtagcagaaacgatcatccatttaacagactcgtacgtgtcacgagcccagggttctgcacgtcctttcatcgacgacgaagagcacagaagcagggaggtcggcatggcggaggtgcatctaggtctgccaggtccctgggcggcggattacagggagatggccgaccactacaccactaagatcggtggagtccctgattggccaactggtgatatgggcttcaagcccgagactcttcagtgcagcttatgtgggaccaagctttgtcttgttgctcagatccgtgatggcacaaaacgcttttggaaggttctaagagttcaaaaatgccataatgttatgcaaacagaaggtggtggtgatgaattaggtcaaccgaatggaccttcttctacaagtcttccagaagaacagaatgataaaaataaaattcctgagacaaatgatgacgattttgatctagatgccttagccgaagcacttgaacaagctgcaactttggcatcaaactcaaagaagaagaacaaatcgaagcatgctaatgctcctgtaaaacgtcctgtattgaaggagcaagcatgtgatctgagcatacctggtattcttatggtggcaagccactgttggctacaacaaaattacaagatcctggcacctgtaggctgtgtggttcaccacgccagtatgaactgcaattgatgtctcctttatcatactttctccatgaagctggagacggttcctcaaattatgcacccagcagctggacttggctgactgttataatatacacctgccccaagagctgctgcccgtcctcatgcggtggaaagccccagagctgttgttggggagcagcggaggaggagatcctgattcaggaggatgaagtcctttaggatctaaccagtgctggttgagaaactattcccgatttgaacatgtaatatgcagtttttttttgttctccaatggttagagttgtaaagctatctgaaattttgaagtgtgttttgttattgtgccctggtatactgcagaactgtcatacttcacacagtatcatatcagactagtaagatttttttttctttgtggctgttgttttccgctgcaaaatcatttttttctaggtgcctggattgtcaactccaatcaagggtggccatgttacgcttgagcatcaagggatatgatccgctgaacctggtttaatgttgggcctttcaagatgcagctcgagaaatttacaatctgcaacaacgag

SEQ ID NO: 15232 - DNA, 2816 bp, Zea Mays
atggagctgttgaccaaggcgcccgtggtggactgcttcgggaagatgcagaagcagcagcaacgagagtccgtgctggactccctcgtcgtgggcgcgggtggatcccctacagccatgtccccggggattgagatgctatcattgggatcatttaaaaccggagccattctctcgaagttgaagcatgcagttgccagtgagaaaattcaaggtgtcatccctggaacaaatagctcagctccacagaaatataattcagagaacatccaacatgagaacaagatagtatcccagaatataaacagtgctggtgactgcattggagattgcaaaaacagctccaacgccttttcttcaagggaagaaaatacaatcgctgaaaccagatgtccaacggataactcgaactcctgtcagtttgcactgagcaatggttcgcccattctcaataaccacagtgctccacaggatagcctcacttatggagataatgatctaaagtacattgattggcctggcattgacaattttgaggatgttgatacattattcaggagatctgatttcacatatgatcaacagcagctggagaatacagatgggttatcttggcttccttcttcaaatgttgtttattcttcttatgttgctttgcagcaagggtttgactcgtcttattccgattatgatattctagatgatctctcagcattccaatgtgcaaaagataaatcactaccctcagttggtccttcatcagatttatgtgataaccaattcaatgatacctatctgttcagtgagcagaagaatatataccaagaggatgggatggagttgttgcccactgaccagatatgcagtggacatgaaaacattgatatggggattgagatgctgtcattgggatcatttaaaaccggagccattctctcgcttctgttttctactgcggatgatgcacggccattctccatgcttggccttggtgacattgtaatacctggtgatcttattgtattgggagctgatcttattgtaatggcaataagtgtagttgatggatggactaatgctgacactaaacttatggagcatgttttgcttgtggtgttaaagagggctaggatggagcgtatgaaggcattggagaagatgatgaattccaaatcagcatcttccattgcgaatctggtggctttgatcatttctgtcatcttttgcttcttcatactttggcaaggcgtagcagaaacgatcatccatttaacagactcgtacgtgtcacgagcccagggttctgcacgtcctttcatcgacgacgaagagcacagaagcagggaggtcggcatggcggaggtgcatctaggtctgccaggtccctgggcggcggattacagggagatggccgaccactacaccactaagatcggtggagtccctgattggccaactggtgatatgggcttcaagcccgagactcttcagtgcagcttatgtgggaccaagctttgtcttgttgctcaggtacatgcgcctgtggcaaagctaaacattgaggagaggataatctatgtgcttgtttgcccgacaccagaatgtggacctaaacctcaaagttggaaggttctaagagttcaaaaatgccataatgttatgcaaacagaaggtggtggtgatgaattaggtcaaccgaatggaccttcttctacaagtcttccagaagaacagaatgataaaaataaaattcctgagacaaatgatgacgattttgatctagatgccttagccgaagcacttgaacaagctgcaactttggcatcaaactcaaagaagaagaacaaatcgaagcatgctaatgctcctgtaaaacgtcctgtattgaaggagcaagcatgtgatctgagcatacctgtccttccttgtttttacatacattataataaggaactatatgggggcaaaggcgctgtgggttcaagtagcagtgagttggttttggacaaagaaatcatggatgccgcaaatgacgaagaagaaaaatgggaaggagaaaagtatgagtacgatagagctattggtgctgacagaacttttttaaaattcaagaaacggctggatgcatatccccagcaatgctttaggtattcttatggtggcaagccactgttggctacaacaaaattacaagatcctggcacctgtaggctgtgtggttcaccacgccagtatgaactgcaattgatgtctcctttatcatactttctccatgaagctggagacggttcctcaaattatgcacccagcagctggacttggctgactgttataatatacacctgccccaagagctgctgcccgtcctcatgcggtggaaagccccagagctgttgttggggagcagcggaggaggagatcctgattcaggaggatgaagtcctttaggatctaaccagtgctggttgagaaactattcccgatttgaacatgtaatatgcagtttttttttgttctccaatggttagagttgtaaagctatctgaaattttgaagtgtgttttgttattgtgccctggtatactgcagaactgtcatacttcacacagtatcatatcagactagtaagatttttttttctttgtggctgttgttttccgctgcaaaatcatttttttctaggtgcctggattgtcaactccaatcaagggtggccatgttacgcttgagcatcaagggatatgatccgctgaacctggtttaatgttgggcctttcaagatgcagctcgagaaatttacaatctgcaacaacgag

SEQ ID NO: 15233 - DNA, 1470 bp, Zea Mays
ccccactccaactccaagcatgcagccccgctcggcttccgttgccaggctgccacgccgtcgccgtctcgccgcctaaaacctccctcccccccctcgcaccactccgctcacctctcttcacgccgccgtagccggcgagtagcagcgggtacgtgcctttgcggtgtaccttattggctgagccttccctttgccgaggaagagcacagaagcagggaggtcggcatggcggaggtgcatctaggtctgccaggtccctgggcggcggattacagggagatggccgaccactacaccactaagatcggtggagtccctgattggccaactggtgatatgggcttcaagcccgagactcttcagtgcagcttatgtgggaccaagctttgtcttgttgctcaggtacatgcgcctgtggcaaagctaaacattgaggagaggataatctatgtgcttgtttgcccgacaccagaatgtggacctaaacctcaaagttggaaggttctaagagttcaaaaatgccataatgttatgcaaacagaaggtggtggtgatgaattaggtcaaccgaatggaccttcttctacaagtcttccagaagaacagaatgataaaaataaaattcctgagacaaatgatgacgattttgatctagatgccttagccgaagcacttgaacaagctgcaactttggcatcaaactcaaagaagaagaacaaatcgaagcatgctaatgctcctgtaaaacgtcctgtattgaaggagcaagcatgtgatctgagcatacctgtccttccttgtttttacatacattataataaggaactatatgggggcaaaggcgctgtgggttcaagtagcagtgagttggttttggacaaagaaatcatggatgccgcaaatgacgaagaagaaaaatgggaaggagaaaagtatgagtacgatagagctattggtgctgacagaacttttttaaaattcaagaaacggctggatgcatatccccagcaatgctttaggtattcttatggtggcaagccactgttggctacaacaaaattacaagatcctggcacctgtaggctgtgtggttcaccacgccagtatgaactgcaattgatgtctcctttatcatactttctccatgaagctggagacggttcctcaaattatgcacccagcagctggacttggctgactgttataatatacacctgccccaagagctgctgcccgtcctcatgcggtggaaagccccagagctgttgttggggagcagcggaggaggagatcctgattcaggaggatgaagtcctttaggatctaaccagtgctggttgagaaactattcccgatttgaacatgtgcctggattgtcaactccaatcaagggtggccatgttacgcttgagcatcaagggatatgatccgatgcagctcgagaaatttacaatctgcaacaacgag

SEQ ID NO: 15234 - DNA, 1654 bp, Zea Mays
ccccactccaactccaagcatgcagccccgctcggcttccgttgccaggctgccacgccgtcgccgtctcgccgcctaaaacctccctcccccccctcgcaccactccgctcacctctcttcacgccgccgtagccggcgagtagcagcgggtacgtgcctttgcggtgtaccttattggctgagccttccctttgccgaggaagagcacagaagcagggaggtcggcatggcggaggtgcatctaggtctgccaggtccctgggcggcggattacagggagatggccgaccactacaccactaagatcggtggagtccctgattggccaactggtgatatgggcttcaagcccgagactcttcagtgcagcttatgtgggaccaagctttgtcttgttgctcaggtacatgcgcctgtggcaaagctaaacattgaggagaggataatctatgtgcttgtttgcccgacaccagaatgtggacctaaacctcaaagttggaaggttctaagagttcaaaaatgccataatgttatgcaaacagaaggtggtggtgatgaattaggtcaaccgaatggaccttcttctacaagtcttccagaagaacagaatgataaaaataaaattcctgagacaaatgatgacgattttgatctagatgccttagccgaagcacttgaacaagctgcaactttggcatcaaactcaaagaagaagaacaaatcgaagcatgctaatgctcctgtaaaacgtcctgtattgaaggagcaagcatgtgatctgagcatacctgtccttccttgtttttacatacattataataaggaactatatgggggcaaaggcgctgtgggttcaagtagcagtgagttggttttggacaaagaaatcatggatgccgcaaatgacgaagaagaaaaatgggaaggagaaaagtatgagtacgatagagctattggtgctgacagaacttttttaaaattcaagaaacggctggatgcatatccccagcaatgctttaggtattcttatggtggcaagccactgttggctacaacaaaattacaagatcctggcacctgtaggctgtgtggttcaccacgccagtatgaactgcaattgatgtctcctttatcatactttctccatgaagctggagacggttcctcaaattatgcacccagcagctggacttggctgactgttataatatacacctgccccaagagctgctgcccgtcctcatgcggtggaaagccccagagctgttgttggggagcagcggaggaggagatcctgattcaggaggatgaagtcctttaggatctaaccagtgctggttgagaaactattcccgatttgaacatgtaatatgcagtttttttttgttctccaatggttagagttgtaaagctatctgaaattttgaagtgtgttttgttattgtgccctggtatactgcagaactgtcatacttcacacagtatcatatcagactagtaagatttttttttctttgtggctgttgttttccgctgcaaaatcatttttttctaggtgcctggattgtcaactccaatcaagggtggccatgttacgcttgagcatcaagggatatgatccgctcgagaaatttacaatctgcaacaacgag

SEQ ID NO: 15235 - DNA, 1501 bp, Zea Mays
ccccactccaactccaagcatgcagccccgctcggcttccgttgccaggctgccacgccgtcgccgtctcgccgcctaaaacctccctcccccccctcgcaccactccgctcacctctcttcacgccgccgtagccggcgagtagcagcgggtacgtgcctttgcggtgtaccttattggctgagccttccctttgccgaggaagagcacagaagcagggaggtcggcatggcggaggtgcatctaggtctgccaggtccctgggcggcggattacagggagatggccgaccactacaccactaagatcggtggagtccctgattggccaactggtgatatgggcttcaagcccgagactcttcagtgcagcttatgtgggaccaagctttgtcttgttgctcaggtacatgcgcctgtggcaaagctaaacattgaggagaggataatctatgtgcttgtttgcccgacaccagaatgtggacctaaacctcaaagttggaaggttctaagagttcaaaaatgccataatgttatgcaaacagaaggtggtggtgatgaattaggtcaaccgaatggaccttcttctacaagtcttccagaagaacagaatgataaaaataaaattcctgagacaaatgatgacgattttgatctagatgccttagccgaagcacttgaacaagctgcaactttggcatcaaactcaaagaagaagaacaaatcgaagcatgctaatgctcctgtaaaacgtcctgtattgaaggagcaagcatgtgatctgagcatacctgtccttccttgtttttacatacattataataaggaactatatgggggcaaaggcgctgtgggttcaagtagcagtgagttggttttggacaaagaaatcatggatgccgcaaatgacgaagaagaaaaatgggaaggagaaaagtatgagtacgatagagctattggtgctgacagaacttttttaaaattcaagaaacggctggatgcatatccccagcaatgctttaggtattcttatggtggcaagccactgttggctacaacaaaattacaagatcctggcacctgtaggctgtgtggttcaccacgccagtatgaactgcaattgatgtctcctttatcatactttctccatgaagctggagacggttcctcaaattatgcacccagcagctggacttggctgactgttataatatacacctgccccaagagctgctgcccgtcctcatgcggtggaaagccccagagctgttgttggggagcagcggaggaggagatcctgattcaggaggatgaagtcctttaggatctaaccagtgctggttgagaaactattcccgatttgaacatgtgcctggattgtcaactccaatcaagggtggccatgttacgcttgagcatcaagggatatgatccgctgaacctggtttaatgttgggcctttcaagatgcagctcgagaaatttacaatctgcaacaacgag

SEQ ID NO: 15236 - DNA, 1691 bp, Zea Mays
ccccactccaactccaagcatgcagccccgctcggcttccgttgccaggctgccacgccgtcgccgtctcgccgcctaaaacctccctcccccccctcgcaccactccgctcacctctcttcacgccgccgtagccggcgagtagcagcgggtacgtgcctttgcggtgtaccttattggctgagccttccctttgccgaggaagagcacagaagcagggaggtcggcatggcggaggtgcatctaggtctgccaggtccctgggcggcggattacagggagatggccgaccactacaccactaagatcggtggagtccctgattggccaactggtgatatgggcttcaagcccgagactcttcagtgcagcttatgtgggaccaagctttgtcttgttgctcaggtacatgcgcctgtggcaaagctaaacattgaggagaggataatctatgtgcttgtttgcccgacaccagaatgtggacctaaacctcaaagttggaaggttctaagagttcaaaaatgccataatgttatgcaaacagaaggtggtggtgatgaattaggtcaaccgaatggaccttcttctacaagtcttccagaagaacagaatgataaaaataaaattcctgagacaaatgatgacgattttgatctagatgccttagccgaagcacttgaacaagctgcaactttggcatcaaactcaaagaagaagaacaaatcgaagcatgctaatgctcctgtaaaacgtcctgtattgaaggagcaagcatgtgatctgagcatacctggtgaggacaactttgaaacaactcgttaccatgaactatatgggggcaaaggcgctgtgggttcaagtagcagtgagttggttttggacaaagaaatcatggatgccgcaaatgacgaagaagaaaaatgggaaggagaaaagtatgagtacgatagagctattggtgctgacagaacttttttaaaattcaagaaacggctggatgcatatccccagcaatgctttaggtattcttatggtggcaagccactgttggctacaacaaaattacaagatcctggcacctgtaggctgtgtggttcaccacgccagtatgaactgcaattgatgtctcctttatcatactttctccatgaagctggagacggttcctcaaattatgcacccagcagctggacttggctgactgttataatatacacctgccccaagagctgctgcccgtcctcatgcggtggaaagccccagagctgttgttggggagcagcggaggaggagatcctgattcaggaggatgaagtcctttaggatctaaccagtgctggttgagaaactattcccgatttgaacatgtaatatgcagtttttttttgttctccaatggttagagttgtaaagctatctgaaattttgaagtgtgttttgttattgtgccctggtatactgcagaactgtcatacttcacacagtatcatatcagactagtaagatttttttttctttgtggctgttgttttccgctgcaaaatcatttttttctaggtgcctggattgtcaactccaatcaagggtggccatgttacgcttgagcatcaagggatatgatccgctgaacctggtttaatgttgggcctttcaagatgcagctcgagaaatttacaatctgcaacaacgag

SEQ ID NO: 15237 - DNA, 2889 bp, Zea Mays
ccccactccaactccaagcatgcagccccgctcggcttccgttgccaggctgccacgccgtcgccgtctcgccgcctaaaacctccctcccccccctcgcaccactccgctcacctctcttcacgccgccgtagccggcgagtagcagcgggtacgtgcctttgcggtgtaccttattggctgagccttccctttgccgaggaagagcacagaagcagggaggtcggcatggcggaggtgcatctaggtctgccaggtccctgggcggcggattacagggagatggccgaccactacaccactaagatcggtggagtccctgattggccaactggtgatatgggcttcaagcccgagactcttcagtgcagcttatgtgggaccaagctttgtcttgttgctcaggtacatgcgcctgtggcaaagctaaacattgaggagaggataatctatgtgcttgtttgcccgacaccagaatgtggacctaaacctcaaagttggaaggttctaagagttcaaaaatgccataatgttatgcaaacagaaggtggtggtgatgaattaggtcaaccgaatggaccttcttctacaagtcttccagaagaacagaatgataaaaataaaattcctgagacaaatgatgacgattttgatctagatgccttagccgaagcacttgaacaagctgcaactttggcatcaaactcaaagaagaagaacaaatcgaagcatgctaatgctcctgtaaaacgtcctgtattgaaggagcaagcatgtgatctgagcatacctgtccttccttgtttttacatacattataataaggaactatatgggggcaaaggcgctgtgggttcaagtagcagtgagttggttttggacaaagaaatcatggatgccgcaaatgacgaagaagaaaaatgggaaggagaaaagtatgagtacgatagagctattggtgctgacagaacttttttaaaattcaagaaacggctggatgcatatccccagcaatgctttaggtattcttatggtggcaagccactgttggctacaacaaaattacaagatcctggcacctgtaggctgtgtggttcaccacgccagtatgaactgcaattgatgtctcctttatcatactttctccatgaagctggagacggttcctcaaattatgcacccagcagctggacttggctgactgttataatatacacctgccccaagcaacaaggaaacaaggtgctgccacttctgttcgtgccaagatcaggagacttttgttttaatagaacatctccagacactgatggccaacagcatgagggaactggatgtgtgagcagaggagtcattagcgtcatccaaagaaatgcaggtttaacgggtgttggaaaggtgcaaggggtgcatcaggagtttgcatttctcatggcggtgggcagaggttgcaacaaaggtgctgagagtcggacaacattctgcaaggctcatggaggagggagacgatgccaagagttaggctgcaccaaaagcgtggcagggaagacagagttctgtatcgctcatggtggtgggcgctggtgtgggatcaaggaatgctcgagtgcggcaagggggaaatccggattctgcctaaaacacggtgaagggaaaaggtggaggatcgagggttgcactcgcggtgctgaaggtcattctgggctgtgcatctcacacggaggtggccgccggtgccagcacccgaactgcgagctacagaaagacagtgcgctaccatcaaatagctctgattctgagccagaagctatggaattggatgacaatggagcaggaaaatcccatagcatcgagggaaacagggattctcctatagacactgatgaaggccagccatctatggatgttgatattaagggaaaatcatctctcaacgatgatgttaatggaaagtcttcttctgagccattttccaatcctccaatcaacatgagtgtggaaagcctagagaagttttgcaaagaagcgtcgaggtccttctttgatgaagttggtctgattagccatcagataaattcctacaatgagtttgtctcgcatgggctccaggagctttttgattcgctgggtgaagtgattgttgaacctggctatgatccttcaaagaaaggatcaggtagctggaagcatgcaatcatcaagtttgggagagtgaagcttgaaaagcctgtgttttggactggcaaagatgaggtttctgttgattttaaaccttggcatgctcgtctccagaatatgacatatgcttcaagacttagagtagaagtgactattcaggtttattctttggagaaaagtgacaaatctaaaacagggaatgatggttttgttcaaaaaaggaacttcatgaatgaaactcactggatatttattggcctccttccagttatggtgaaatcaaacttatgtttgttgcatagtcttaaggaaagtgagtgcctgtttgatgcaggtggatactttttggtcaagggaatggagaaggtataactctgtgttctctgttgttaatgtattagtatgtaggaactttcaagtgtccttttgttgctggcatgggactatagctttcttagaacccattcagaaaacatgtacatgctcataagaggggggggggtccaaatatgattgtagctatgtaaaataggattctattgtatcgaaggatactttggcacagcatccgtttgagttggtctcctggtgccatatgccgcttcttgtgtttaaactatatataggtctaaatgccgaagtaccgatatgtgtatcagtattggaaggatatggatgcacggatacagcagtttttcaaaaaaaaaaaaa

SEQ ID NO: 15238 - DNA, 5847 bp, Zea Mays
ccccactccaactccaagcatgcagccccgctcggcttccgttgccaggctgccacgccgtcgccgtctcgccgcctaaaacctccctcccccccctcgcaccactccgctcacctctcttcacgccgccgtagccggcgagtagcagcgggtacgtgcctttgcggtgtaccttattggctgagccttccctttgccgaggaagagcacagaagcagggaggtcggcatggcggaggtgcatctaggtctgccaggtccctgggcggcggattacagggagatggccgaccactacaccactaagatcggtggagtccctgattggccaactggtgatatgggcttcaagcccgagactcttcagtgcagcttatgtgggaccaagctttgtcttgttgctcaggtacatgcgcctgtggcaaagctaaacattgaggagaggataatctatgtgcttgtttgcccgacaccagaatgtggacctaaacctcaaagttggaaggttctaagagttcaaaaatgccataatgttatgcaaacagaaggtggtggtgatgaattaggtcaaccgaatggaccttcttctacaagtcttccagaagaacagaatgataaaaataaaattcctgagacaaatgatgacgattttgatctagatgccttagccgaagcacttgaacaagctgcaactttggcatcaaactcaaagaagaagaacaaatcgaagcatgctaatgctcctgtaaaacgtcctgtattgaaggagcaagcatgtgatctgagcatacctgtccttccttgtttttacatacattataataaggaactatatgggggcaaaggcgctgtgggttcaagtagcagtgagttggttttggacaaagaaatcatggatgccgcaaatgacgaagaagaaaaatgggaaggagaaaagtatgagtacgatagagctattggtgctgacagaacttttttaaaattcaagaaacggctggatgcatatccccagcaatgctttaggtattcttatggtggcaagccactgttggctacaacaaaattacaagatcctggcacctgtaggctgtgtggttcaccacgccagtatgaactgcaattgatgtctcctttatcatactttctccatgaagctggagacggttcctcaaattatgcacccagcagctggacttggctgactgttataatatacacctgccccaagcaacaaggaaacaaggtgctgccacttctgttcgtgccaagatcaggagacttttgttttaatagaacatctccagacactgatggccaacagcatgagggaactggatgtgtgagcagaggagtcattagcgtcatccaaagaaatgcaggtttaacgggtgttggaaaggtgcaaggggtgcatcaggagtttgcatttctcatggcggtgggcagaggttgcaacaaaggtgctgagagtcggacaacattctgcaaggctcatggaggagggagacgatgccaagagttaggctgcaccaaaagcgtggcagggaagacagagttctgtatcgctcatggtggtgggcgctggtgtgggatcaaggaatgctcgagtgcggcaagggggaaatccggattctgcctaaaacacggtgaagggaaaaggtggaggatcgagggttgcactcgcggtgctgaaggtcattctgggctgtgcatctcacacggaggtggccgccggtgccagcacccgaactgcgagctacagaaagacagtgcgctaccatcaaatagctctgattctgagccagaagctatggaattggatgacaatggagcaggaaaatcccatagcatcgagggaaacagggattctcctatagacactgatgaaggccagccatctatggatgttgatattaagggaaaatcatctctcaacgatgatgttaatggaaagtcttcttctgagccattttccaatcctccaatcaacatgagtgtggaaagcctagagaagttttgcaaagaagcgtcgaggtccttctttgatgaagttggtctgattagccatcagataaattcctacaatgagtttgtctcgcatgggctccaggagctttttgattcgctgggtgaagtgattgttgaacctggctatgatccttcaaagaaaggatcaggtagctggaagcatgcaatcatcaagtttgggagagtgaagcttgaaaagcctgtgttttggactggcaaagatgaggtttctgttgattttaaaccttggcatgctcgtctccagaatatgacatatgcttcaagacttagagtagaagtgactattcaggtttattctttggagaaaagtgacaaatctaaaacagggaatgatggttttgttcaaaaaaggaacttcatgaatgaaactcactggatatttattggcctccttccagttatggtgaaatcaaacttatgtttgttgcatagtcttaaggaaagtgagtgcctgtttgatgcaggtggatactttttggtcaagggaatggagaaggtatttattgctcaagagctaagatgtctaaggaggctttggattagtgaccgtccttgctggactatctcttttatgtctgaaatgaagcgtagacgtatatatattaaactagttgaatctacaaggagtgaagatttcagtgggagcaaaatcatttccatttcctttttgtatgcgacaatgccagtttggttgttgttctttgcacttggaatatcgtcagataaggaagcctttgatgtgatagatatgcaagattgcgatgcttctgttatcaacacgatatctgcaactatcaaagaatctgatgagctgtgtggaggctttcgtaaatcagataaagctcgtcaatatgttgatgagttggtaaaaagttcgaaatttcctccagtggagtcctttgatgactatatcgctaagtttctgtttcctggtattagtggaaataggaacaaagcacttttcttagggtacatggtgaaatgtctgctaatggcttttactgggaagcgtaaatgtgataataaggatgatttcaggaacaagaggctggacctacctggtgaattgcttggaagggaacttagggcacatcttaggcaagcagagagacgcatggttaaggccattcaaagagatttaaacagtgaccgtgagttacaagatcttgaacgttatatagatgcatcgattgttactaatggtctaaatcgtgccttttccactggttcttggtgccatccctacaaaagagctgaacggtgctcaggaattgttgcaactctaaggagaactaatcctcttcaaatgatgtctgacttgaggaaaacccggcagcgggttgcttatgctgggaaagctggtgatgcaagatatccgaatccatcctattggggaaaactgtgttttatgtccactccggatggtgaaaactgtggacttgtaaaaaatctagctgttacttcaattgttagctcaaaggtggtgcagcccttgattgagagcttcatttcttgtggaatgaataagctgaatgacattcctactgagcacattcaaagaatggacaagatctttttgaatggcaattggctaggatcttgttctgattcagcttcatttgtatttcgattaaggtgcatgagacgcagcagtctgattgatcctcaggttgaaattaaaagggacaagcattacaaggaggttcgtctgttttcagatgcagggcgaatcctcagaccacttcttgtggttgagaaccttaataaaatcagaaagcccaagggacgctcattctctttccaggaattaatgcaacaagaaataattgaattcattggtgtcgaagaggaggaagatatacaatgtgcctggggaatcagacatttgtttgagagtgaaggagctatatctagttatactcactgtgagctggatccttcctttattctgggattaagctgtggtatcattccttttgcaaaccataattttgctcggagggtattgtaccaatctgaaaaacactcgcaacaagctattgggtactcaacctcaaatccacgcatcagagttgacactctttctcatcaactatattatcctcagaggcctcttttcaaaacagttatagccgactgtcttggcaggtcagactgcactacttttggaagaaaagatgacttcacgagaccagaatatttcaatggacaaaatgcaattgtagcagtcaatgttcatcaggggtttaatcaagaggattccctggttatgaatagagcttctcttgaacgaggtatgtttaggactgaacacctcaggagctataaggcagatgtagaaaacaaggatggaaccaagcgactgaaattgaaggaaaagatagactttgggaaaacggaaagcaaaagaggacgtgttgacaatcttgatgatgatggcttaccctacattggtgcaagtcttcagaccaatgacattgttattggaaaagtctcagaatctggagaagaccacagtattaagttgaagcatacagaaaagggaatggttcagaaagtattgctttcagcaaatgatgaagggaagaattttgctgtggttactctaagacaggtgaggacaccttgccttggagataagttttccagcatgcatggccaaaaaggtgttgttggttttctagaatctcaagagaacttcccatttactcacgacggtatagtcccagacatcgtgataaatccacatgccttcccaacacgtcaaactcccggacagctgcttgaagctgctcttgggaagggaatagcctgcaaaggtacaatgagatacgcaacaccattcaccacagcatcagttgatgttattgcagaacagttgcacaaggctggatattcacgatggggagccgagaacgttctaaatggtcgaactggtgaaagaatgaaatccttggttttcatgggccctaccttttaccagaggctgattcatatgtccgaagataaggtgaaataccgtaatactgggccggtccaccccctcacgaggcagcctgtcgctgacaggaaaaggttcggtggagtcaagtttggggaaatggagcgtgattgcctcctcgcccatgggtcagctgccaacctgcatgagcgcctcttcatgctgagtgacttctcccagatgcacatctgccagacgtgcgagcgcgtggctaatgttgtcatgaggtctgtccccggaggcaaaaagatccgtggcccctactgtgggttctgcaagtcttcggagaacattgtgagaatcaacgtgccctacggcgcgaagctgctctaccaggaactattcagcatggggatctgcctcaagtttgagaccgaagtctgctagagcttgtaggcttgcttgtatccagacatccagttattatgtacatagagttagcctatgacgatctcatgctggcagctatgtgaaatcgtgtgccgatgtgtgataccggcggcacagcaaggatgggcgagttcgatggagtgaaacggcagtgtcaggtgggtgtctcaaagctggtggggcaatctacctctgcttagagaataaactctgttgaaactagaaaccttgcagcgttttatatgctgttttcgtcctgcccatctgataaactatgttcatgtgaacgaacactcgtttcctgtttcctgcttggattgcgctggtgcatgcctttttgtttttaagattgtggttttgtggagcacctgtattgctttgtggggatcagggaatgttgctacttgg

SEQ ID NO: 15239 - DNA, 4496 bp, Zea Mays
catgatagatctctaaatcatcacgaggtttaacgggtgttggaaaggtgcaaggggtgcatcaggagtttgcatttctcatggcggtgggcagaggttgcaacaaaggtgctgagagtcggacaacattctgcaaggctcatggaggagggagacgatgccaagagttaggctgcaccaaaagcgtggcagggaagacagagttctgtatcgctcatggtggtgggcgctggtgtgggatcaaggaatgctcgagtgcggcaagggggaaatccggattctgcctaaaacacggtgaagggaaaaggtggaggatcgagggttgcactcgcggtgctgaaggtcattctgggctgtgcatctcacacggaggtggccgccggtgccagcacccgaactgcgagctacagaaagacagtgcgctaccatcaaatagctctgattctgagccagaagctatggaattggatgacaatggagcaggaaaatcccatagcatcgagggaaacagggattctcctatagacactgatgaaggccagccatctatggatgttgatattaagggaaaatcatctctcaacgatgatgttaatggaaagtcttcttctgagccattttccaatcctccaatcaacatgagtgtggaaagcctagagaagttttgcaaagaagcgtcgaggtccttctttgatgaagttggtctgattagccatcagataaattcctacaatgagtttgtctcgcatgggctccaggagctttttgattcgctgggtgaagtgattgttgaacctggctatgatccttcaaagaaaggatcaggtagctggaagcatgcaatcatcaagtttgggagagtgaagcttgaaaagcctgtgttttggactggcaaagatgaggtttctgttgattttaaaccttggcatgctcgtctccagaatatgacatatgcttcaagacttagagtagaagtgactattcaggtttattctttggagaaaagtgacaaatctaaaacagggaatgatggttttgttcaaaaaaggaacttcatgaatgaaactcactggatatttattggcctccttccagttatggtgaaatcaaacttatgtttgttgcatagtcttaaggaaagtgagtgcctgtttgatgcaggtggatactttttggtcaagggaatggagaaggtatttattgctcaagagctaagatgtctaaggaggctttggattagtgaccgtccttgctggactatctcttttatgtctgaaatgaagcgtagacgtatatatattaaactagttgaatctacaaggagtgaagatttcagtgggagcaaaatcatttccatttcctttttgtatgcgacaatgccagtttggttgttgttctttgcacttggaatatcgtcagataaggaagcctttgatgtgatagatatgcaagattgcgatgcttctgttatcaacacgatatctgcaactatcaaagaatctgatgagctgtgtggaggctttcgtaaatcagataaagctcgtcaatatgttgatgagttggtaaaaagttcgaaatttcctccagtggagtcctttgatgactatatcgctaagtttctgtttcctggtattagtggaaataggaacaaagcacttttcttagggtacatggtgaaatgtctgctaatggcttttactgggaagcgtaaatgtgataataaggatgatttcaggaacaagaggctggacctacctggtgaattgcttggaagggaacttagggcacatcttaggcaagcagagagacgcatggttaaggccattcaaagagatttaaacagtgaccgtgagttacaagatcttgaacgttatatagatgcatcgattgttactaatggtctaaatcgtgccttttccactggttcttggtgccatccctacaaaagagctgaacggtgctcaggaattgttgcaactctaaggagaactaatcctcttcaaatgatgtctgacttgaggaaaacccggcagcgggttgcttatgctgggaaagctggtgatgcaagatatccgaatccatcctattggggaaaactgtgttttatgtccactccggatggtgaaaactgtggacttgtaaaaaatctagctgttacttcaattgttagctcaaaggtggtgcagcccttgattgagagcttcatttcttgtggaatgaataagctgaatgacattcctactgagcacattcaaagaatggacaagatctttttgaatggcaattggctaggatcttgttctgattcagcttcatttgtatttcgattaaggtgcatgagacgcagcagtctgattgatcctcaggttgaaattaaaagggacaagcattacaaggaggttcgtctgttttcagatgcagggcgaatcctcagaccacttcttgtggttgagaaccttaataaaatcagaaagcccaagggacgctcattctctttccaggaattaatgcaacaagaaataattgaattcattggtgtcgaagaggaggaagatatacaatgtgcctggggaatcagacatttgtttgagagtgaaggagctatatctagttatactcactgtgagctggatccttcctttattctgggattaagctgtggtatcattccttttgcaaaccataattttgctcggagggtattgtaccaatctgaaaaacactcgcaacaagctattgggtactcaacctcaaatccacgcatcagagttgacactctttctcatcaactatattatcctcagaggcctcttttcaaaacagttatagccgactgtcttggcaggtcagactgcactacttttggaagaaaagatgacttcacgagaccagaatatttcaatggacaaaatgcaattgtagcagtcaatgttcatcaggggtttaatcaagaggattccctggttatgaatagagcttctcttgaacgaggtatgtttaggactgaacacctcaggagctataaggcagatgtagaaaacaaggatggaaccaagcgactgaaattgaaggaaaagatagactttgggaaaacggaaagcaaaagaggacgtgttgacaatcttgatgatgatggcttaccctacattggtgcaagtcttcagaccaatgacattgttattggaaaagtctcagaatctggagaagaccacagtattaagttgaagcatacagaaaagggaatggttcagaaagtattgctttcagcaaatgatgaagggaagaattttgctgtggttactctaagacaggtgaggacaccttgccttggagataagttttccagcatgcatggccaaaaaggtgttgttggttttctagaatctcaagagaacttcccatttactcacgacggtatagtcccagacatcgtgataaatccacatgccttcccaacacgtcaaactcccggacagctgcttgaagctgctcttgggaagggaatagcctgcaaaggtacaatgagatacgcaacaccattcaccacagcatcagttgatgttattgcagaacagttgcacaaggctggatattcacgatggggagccgagaacgttctaaatggtcgaactggtgaaagaatgaaatccttggttttcatgggccctaccttttaccagaggctgattcatatgtccgaagataaggtgaaataccgtaatactgggccggtccaccccctcacgaggcagcctgtcgctgacaggaaaaggttcggtggagtcaagtttggggaaatggagcgtgattgcctcctcgcccatgggtcagctgccaacctgcatgagcgcctcttcatgctgagtgacttctcccagatgcacatctgccagacgtgcgagcgcgtggctaatgttgtcatgaggtctgtccccggaggcaaaaagatccgtggcccctactgtgggttctgcaagtcttcggagaacattgtgagaatcaacgtgccctacggcgcgaagctgctctaccaggaactattcagcatggggatctgcctcaagtttgagaccgaagtctgctagagcttgtaggcttgcttgtatccagacatccagttattatgtacatagagttagcctatgacgatctcatgctggcagctatgtgaaatcgtgtgccgatgtgtgataccggcggcacagcaaggatgggcgagttcgatggagtgaaacggcagtgtcaggtgggtgtctcaaagctggtggggcaatctacctctgcttagagaataaactctgttgaaactagaaaccttgcagcgttttatatgctgttttcgtcctgcccatctgataaactatgttcatgtgaacgaacactcgtttcctgtttcctgcttggattgcgctggtgcatgcctttttgtttttaagattgtggttttgtggagcacctgtattgctttgtggggatcagggaatgttgctacttgg

SEQ ID NO: 15240 - DNA, 4587 bp, Zea Mays
cttttctcgttgccgttggttgggccgtctatccaaacctgtgctgtgataaaccgtgatctcgcacagaagatcacatgatgcccttgccctccttgatccccgctaaggtactcaccatgaaaagccgtatctgtctcggcggacaggacccgctcgtcactgagaccgggacccgcagagcattgcttgaccgctggcccgcctccgcctgttagaaccaccgggcatcgtcgacgccgccggttgcccattaaacccccgtccccgtctcgaggtgatcatcccgcagcgctacaacgcccgaactctccgtccctcactctcagtctccgacacattctacgaaccgcctcccactaccgctcattgccgccggtcgccggagacgcgctgcaccgccagctgtccgccttcgcccgccgaccccggcctgccgcagcttccccttcacccgccagggtataagctgccagtgcttgtgtcatggaagagctacagaaagacagtgcgctaccatcaaatagctctgattctgagccagaagctatggaattggatgacaatggagcaggaaaatcccatagcatcgagggaaacagggattctcctatagacactgatgaaggccagccatctatggatgttgatattaagggaaaatcatctctcaacgatgatgttaatggaaagtcttcttctgagccattttccaatcctccaatcaacatgagtgtggaaagcctagagaagttttgcaaagaagcgtcgaggtccttctttgatgaagttggtctgattagccatcagataaattcctacaatgagtttgtctcgcatgggctccaggagctttttgattcgctgggtgaagtgattgttgaacctggctatgatccttcaaagaaaggatcaggtagctggaagcatgcaatcatcaagtttgggagagtgaagcttgaaaagcctgtgttttggactggcaaagatgaggtttctgttgattttaaaccttggcatgctcgtctccagaatatgacatatgcttcaagacttagagtagaagtgactattcaggtttattctttggagaaaagtgacaaatctaaaacagggaatgatggttttgttcaaaaaaggaacttcatgaatgaaactcactggatatttattggcctccttccagttatggtgaaatcaaacttatgtttgttgcatagtcttaaggaaagtgagtgcctgtttgatgcaggtggatactttttggtcaagggaatggagaaggtatttattgctcaagagctaagatgtctaaggaggctttggattagtgaccgtccttgctggactatctcttttatgtctgaaatgaagcgtagacgtatatatattaaactagttgaatctacaaggagtgaagatttcagtgggagcaaaatcatttccatttcctttttgtatgcgacaatgccagtttggttgttgttctttgcacttggaatatcgtcagataaggaagcctttgatgtgatagatatgcaagattgcgatgcttctgttatcaacacgatatctgcaactatcaaagaatctgatgagctgtgtggaggctttcgtaaatcagataaagctcgtcaatatgttgatgagttggtaaaaagttcgaaatttcctccagtggagtcctttgatgactatatcgctaagtttctgtttcctggtattagtggaaataggaacaaagcacttttcttagggtacatggtgaaatgtctgctaatggcttttactgggaagcgtaaatgtgataataaggatgatttcaggaacaagaggctggacctacctggtgaattgcttggaagggaacttagggcacatcttaggcaagcagagagacgcatggttaaggccattcaaagagatttaaacagtgaccgtgagttacaagatcttgaacgttatatagatgcatcgattgttactaatggtctaaatcgtgccttttccactggttcttggtgccatccctacaaaagagctgaacggtgctcaggaattgttgcaactctaaggagaactaatcctcttcaaatgatgtctgacttgaggaaaacccggcagcgggttgcttatgctgggaaagctggtgatgcaagatatccgaatccatcctattggggaaaactgtgttttatgtccactccggatggtgaaaactgtggacttgtaaaaaatctagctgttacttcaattgttagctcaaaggtggtgcagcccttgattgagagcttcatttcttgtggaatgaataagctgaatgacattcctactgagcacattcaaagaatggacaagatctttttgaatggcaattggctaggatcttgttctgattcagcttcatttgtatttcgattaaggtgcatgagacgcagcagtctgattgatcctcaggttgaaattaaaagggacaagcattacaaggaggttcgtctgttttcagatgcagggcgaatcctcagaccacttcttgtggttgagaaccttaataaaatcagaaagcccaagggacgctcattctctttccaggaattaatgcaacaagaaataattgaattcattggtgtcgaagaggaggaagatatacaatgtgcctggggaatcagacatttgtttgagagtgaaggagctatatctagttatactcactgtgagctggatccttcctttattctgggattaagctgtggtatcattccttttgcaaaccataattttgctcggagggtattgtaccaatctgaaaaacactcgcaacaagctattgggtactcaacctcaaatccacgcatcagagttgacactctttctcatcaactatattatcctcagaggcctcttttcaaaacagttatagccgactgtcttggcaggtcagactgcactacttttggaagaaaagatgacttcacgagaccagaatatttcaatggacaaaatgcaattgtagcagtcaatgttcatcaggggtttaatcaagaggattccctggttatgaatagagcttctcttgaacgaggtatgtttaggactgaacacctcaggagctataaggcagatgtagaaaacaaggatggaaccaagcgactgaaattgaaggaaaagatagactttgggaaaacggaaagcaaaagaggacgtgttgacaatcttgatgatgatggcttaccctacattggtgcaagtcttcagaccaatgacattgttattggaaaagtctcagaatctggagaagaccacagtattaagttgaagcatacagaaaagggaatggttcagaaagtattgctttcagcaaatgatgaagggaagaattttgctgtggttactctaagacaggtgaggacaccttgccttggagataagttttccagcatgcatggccaaaaaggtgttgttggttttctagaatctcaagagaacttcccatttactcacgacggtatagtcccagacatcgtgataaatccacatgccttcccaacacgtcaaactcccggacagctgcttgaagctgctcttgggaagggaatagcctgcaaaggtacaatgagatacgcaacaccattcaccacagcatcagttgatgttattgcagaacagttgcacaaggctggatattcacgatggggagccgagaacgttctaaatggtcgaactggtgaaagaatgaaatccttggttttcatgggccctaccttttaccagaggctgattcatatgtccgaagataaggtgaaataccgtaatactgggccggtccaccccctcacgaggcagcctgtcgctgacaggaaaaggttcggtggagtcaagtttggggaaatggagcgtgattgcctcctcgcccatgggtcagctgccaacctgcatgagcgcctcttcatgctgagtgacttctcccagatgcacatctgccagacgtgcgagcgcgtggctaatgttgtcatgaggtctgtccccggaggcaaaaagatccgtggcccctactgtgggttctgcaagtcttcggagaacattgtgagaatcaacgtgccctacggcgcgaagctgctctaccaggaactattcagcatggggatctgcctcaagtttgagaccgaagtctgctagagcttgtaggcttgcttgtatccagacatccagttattatgtacatagagttagcctatgacgatctcatgctggcagctatgtgaaatcgtgtgccgatgtgtgataccggcggcacagcaaggatgggcgagttcgatggagtgaaacggcagtgtcaggtgggtgtctcaaagctggtggggcaatctacctctgcttagagaataaactctgttgaaactagaaaccttgcagcgttttatatgctgttttcgtcctgcccatctgataaactatgttcatgtgaacgaacactcgtttcctgtttcctgcttggattgcgctggtgcatgcctttttgtttttaagattgtggttttgtggagcacctgtattgctttgtggggatcagggaatgttgctacttgg

SEQ ID NO: 15241 - DNA, 1697 bp, Zea Mays
ataatagacccacccgccatttcgaattttgcgggtcccgtcgccgtccgtgtccccttgtcccaacgttcctcgctccagagagttttcaaatgcacgcgcgcttgatccccaaatctaccgtaccagacctggacgagcgccgccacctgctctcgctgggcgcggcgaccggccgacgaccgctgcacgtctcgatccagggcttcgtcatctgctcccactggaccttgcgtccgccggcggctgcacctcagaggtcggctttggtctgccagcgccatcctgcgtcacgatggacccaacgaatcagcggtcctcaggagcagggcgccgcagctccgtcgcggctaccatgggacgtggtggtgcatgcgtccatggtcagcagcatgtgccggcacctacgtcactccgttcgccctctttacctgagttgcaacaagcacaatctgcaatgccaccaaatccctcatggaacttttatccaccaaatggttttctgaatctcattaaccaaccgtacatgccaatgtcgtcgcaaccacttggagagaatttccactttgttggtctcacccagaatttcaacacatctccaccaccgccaccaagtgctaaaaggactaaaaaagcatccagacttgctaaagaaactattcagattggtggtgatggtgatgcagcaactgaggaatctaaggcagtcaataaaaggtattgggcacatgacgaggaagtgaggctggctagttcttggttgaactgttctcatgatccaatacatggcaatgacaagaaaggagaaactttctggaaggaaattgcagaatactttaacaagcatgctccagcagatcgtcaaagggacgtcaatcaattaaagatacactggacacggttgaagacagtgaccaacaatttcaatgggtgttggagcgcagtatcaaaaatgcatacaagtgggtactctgatgatcagttaatggatgaggcacaaaagatgtatgcaaatggtagtaacggcaaacctttcacgttagttcattggtggaaagctctcagaaatgaacctaaattttgtgcacaaatctcacagatgattaaggaaaaaggtcagagccataccattgacatcactaaagacaaagatcagcttcccttacaacgtcctataggaagagatgcagccaaggctcaaaggaatggtaagcgcaaggcagaagaggttttggatggtattgctcgccttggtgatagcataaacaaaattattgaagtgcaacatgaccgtaagcaagagcgtaaaaaggtggctgaaactcaactagaaatctcaaggttacaactcaaagctgcacaggagcagaaggaggtaaaattgcttgaagtatatagctcactactgcagcaagacactagccaattatctaatcaaggaaagataaaccgagagaaggcattgcaaaagatggagctgaaattatttggtgatagtgaaaatatgatgtgagctgaattatttggtgacattcaagggtgaagtcaagggtgaactgaaaggaaaatatgatgtgaattgaaatgaaagtgttcattttctgagtttgcattcaaatctatttgtgtgtcctgtatgaactgaaatgaaagtgtccatttttatttatatatggcagcacatttatctcaaggaa

SEQ ID NO: 15242 - DNA, 1773 bp, Zea Mays
cgtgtgcttggtgttgctatttctggcatggctgttttggaggcgcggctgcaggtcgacccccctccgtgaccgtctccgtccgccccccgccaccaccgcactcccatccagatgggagtgcgcaagaggagctttcggcattccggtctcgctcgaccaaccggatccccgtgagagtccccacccacaccccgagggcggcgtcgggtcgtcggggacagctgatttcacacgacgagccggcgagccggccggcatttcgtcgtcggatggcgccggcctcctcctcgtccgccggcgtcgcgtgcctcgtcctgctcctgctcctgctcctcgccggcgcctccgcggcgcacggctcgttccaggctaggcgtgctctgtcagtgcaaagatctctgcacgtatgccctgacgaccccgctcgtttccttgtacaaactgccgatcccagcgccgggtgcctgatcttgcacggcggcagcgacctgttccacgggagcaccatcaggaccgtcgagtacgtcttcgggcagggcaacctgacggtggaccacctgaggaacttcgccgacagcttggcggcggcgaaggacatcacgatcaaccagatcttcctcccggccgatgtccagcagaagatcgacgtcgtcgaggagaagctcaactcctccgcgggcgtcttctccactcgcctgcaggagaactccaggaagatcaagggagtgctgaaccacatggagcacgaactgtttgctgttgcagctgttatggctggcctatcaatactcggattcttgttctccgtactggggttgcggtttcttgtctccctactggtgatcgctgcttggatccttctcaccaataccatcatcagttctggtcttttcctcctcttgcacaacgtggtggcggacacgtgcgtcgcgatgggcgattgggtggcgcacccgcaggcgcacacggcgctggacgacatcctcccgtgcgtggacgtggccacggcgaacgagtcgctgtaccggagccaggaggtgacgtcgcagctggtggcgctggtgaacaacgtcgtcgtcaacatctctaaccggaacttcccgccggggctccgcccgctctacttcaaccagtcggggccgctcatgcccgtgctctgcaacccgttcaacccggacatgagcccccgccggtgcgcgcccggcgaggtcgacttcggcagcgcggcgcgggagtggaagcggttcgagtgccagaccacggggccgccggggtcggagctgtgcgccacgccggggcgcgtgacgcccgcggcgtacggccagatgacggcggcgacgagcgtcagcaaggggctctacgagttcagcccgttcctggtgcagctgcaggactgctccttcgtgcgagagacattcacgtccatcaccaactataactgccccggcctcgagcagtacagccgggacgtctacgtcggcctggtcgtcatctctgccggcgtcatgctgtccgtcgtcttctggatggttcacacacggcaccgacggcggcgcgccatgcgcaagcagctgtgactgagatcttgatggcgcgccaggccacgccacgattgagctttagctgttacaaccgtggtccacgcatccgtttcaaatttgtacaatactcactcggttctaaaattaatcgttgtcgtttaatttctaattctgaaggagtcaaatattttcagtttaattaaatatatacatattaatatctatgata

SEQ ID NO: 15243 - DNA, 1206 bp, Zea Mays
gcggagccatgtggacaaacaatataatagcatagcatagggacatgacgacgagctgtgcggcatcttcgatcgtgtcaccactggcgatggacatggcggcgagcggcgcgctccccgtggtggacctggcgccgttcttcacggacggcgacgagggcggcgcttcccgcgccagagccaccgaagccgtgcgccaggcgtgccggacgcatggcttcttccgcgtcgtcaaccacggcgtgccggcacacctcatggcgcgcgcgctcgagctgtcgtccgctttcttcgcgctgccggacgacgacaaggccagggctcgggcgcccgagggctccgaagcaccgctccccgcgggctacgcgcggcagccggcgcactcggcggacaagaacgagtacctcctggtgtttggtcccaagcttgggttcaacgtgtaccccgccgagccatcaggattcagcgaccgcagcttcgacttcttggcggcgttgcgctacttcccggcgacggaggaggaggacaacggcatcagcgcgcacgaggacgggaactgcatcaccttcgtcatccaggacggcgtcgggggcctcgaggtcctcaacgacgacggcgactgggtcccggcggagcccgtcgagggcagcatcatcgtcaacctaggcgacgtcatacaggtgctgagtaacaacaagctcaagagcgcgacgcaccgggtggtgaggaagcccgtgcacaggcactcgttcgtgttcttcttcaacatccacggggccaagtggatcgagccgctgccggagttcacggccaagatcggcgaagcggcgcggtacagagggttcgtgtacaacgagtacatgcagctgcggatgaggaacaagacccatccaccggcgaggcccgaggacgtcgtccacataacccactacgccatctagcttgctaggcgcagaaactgcataaacaagcaacctgcacacaaatggctgtgtctactcttgttaagattgttgtagtctggccatcgcacgcaccatgcttgctatcattaaaatcgagattaaataaacaacaaatccagctacgcactgtcgtcgttgtttccgcttttccctaggcataattcttgcggttattatcgatttttgtcgattctctgattcttaattacaagttttattttcgattcccaagaatattatg

SEQ ID NO: 15244 - DNA, 1262 bp, Zea Mays
gcggagccatgtggacaaacaatataatagcatagcatagggacatgacgacgagctgtgcggcatcttcgatcgtgtcaccactggcgatggacatggcggcgagcggcgcgctccccgtggtggacctggcgccgttcttcacggacggcgacgagggcggcgcttcccgcgccagagccaccgaagccgtgcgccaggcgtgccggacgcatggcttcttccgcgtcgtcaaccacggcgtgccggcacacctcatggcgcgcgcgctcgagctgtcgtccgctttcttcgcgctgccggacgacgacaaggccagggctcgggcgcccgagggctccgaagcaccgctccccgcgggctacgcgcggcagccggcgcactcggcggacaagaacgagtacctcctggtgtttggtcccaagcttgggttcaacgtgtaccccgccgagccatcaggattcaggaggtcctgaacgagtgcatggacctcccgccgggcttcctcacggactacaacagcgaccgcagcttcgacttcttggcggcgttgcgctacttcccggcgacggaggaggaggacaacggcatcagcgcgcacgaggacgggaactgcatcaccttcgtcatccaggacggcgtcgggggcctcgaggtcctcaacgacgacggcgactgggtcccggcggagcccgtcgagggcagcatcatcgtcaacctaggcgacgtcatacaggtgctgagtaacaacaagctcaagagcgcgacgcaccgggtggtgaggaagcccgtgcacaggcactcgttcgtgttcttcttcaacatccacggggccaagtggatcgagccgctgccggagttcacggccaagatcggcgaagcggcgcggtacagagggttcgtgtacaacgagtacatgcagctgcggatgaggaacaagacccatccaccggcgaggcccgaggacgtcgtccacataacccactacgccatctagcttgctaggcgcagaaactgcataaacaagcaacctgcacacaaatggctgtgtctactcttgttaagattgttgtagtctggccatcgcacgcaccatgcttgctatcattaaaatcgagattaaataaacaacaaatccagctacgcactgtcgtcgttgtttccgcttttccctaggcataattcttgcggttattatcgatttttgtcgattctctgattcttaattacaagttttattttcgattcccaagaatattatg

SEQ ID NO: 15245 - DNA, 311 bp, Zea Mays
cttccactcttcctctcctagatctcttcagcctcttctatcgttgccgcctcaatagacccagtggatgtcctcctctccatccagctttaatctcggatacagagtgacagcagtgacatgtagaaatccggtgtaggagccagttcccaaccaatattgaatgcacaatccgcagcagagagtgcactcgctcaatcagcgtgcatgttgactatgccagctgcttaacgggttagaagcatacaggaagatatattacaaaaagttaaattggcggaatctactgtcaatgttgaagccattcaggt

SEQ ID NO: 15246 - DNA, 1050 bp, Zea Mays
cttgattcttctttcatggaagatgcgctagagcaagaagtaaaaaggcataatggacagtgtttctgcgacaaagatacatacgcgctacctgcttcaatgaaacgctcagccaaaacagcattttgacaagtaaattcaccaaagagtggccatctgcattggaaatgaagcattgttagcgtgtagtcatatactcatatagggtagggttgattgtcctgctgcacatgcaatctgtgtcagaggggcaaagcttttgccgcttcttttagaaaatactgtaagtggaatttttcatgttctagtagaggttgggtgggtgaggagagcccattttatgggccctataagtttgtccaagaccagatctggtgtactagcaaattaatgtgtattaagtgtaaggagctaagataagaagaaataactgactttagctgctgaaacaatccagggactggagaagaaactgtaagaggactgttaaggattgctaatttaaggactttgcttgagttattgagtgcccacgtcagcccataagaaccaacaagaaagccctgcaatgaaatgaaagaaagaaaattctatatgtgaaatgaagatttttatataccttggttttcatgaaagttacacatttgtacctggacaactaagaagaagggctcggtgatatttagagtaccaagaagatcatcaaatgccttgtgaaattcgtcctctacaaatgatacaatatacctaagtcttcatagcaaattcctttacggggcgtttggatcccttcattttaaaggaattggaattcactcaataaagtaacttatttagtttggaatttggcattccaccactttccaaagttcagatataagtctatctcaaattcatagggtggagaataggaaatgattttatgcatgattagaatttgtttctaatctgtaacttacatgacactcttcgttctactcctctatagtaaaaatatagcacataaatatctagaacatcttgctaataatagtatgcaaatatattttg

SEQ ID NO: 15247 - DNA, 548 bp, Zea Mays
ttctatatatggttccctgctctgtaatcagaagacgaagaagtcaagtagacaaagcgaggcatataaggcattacgtagagcatctggccgacattgccgtcctcggcgggaaccgcgggcagctggatggcgctgcggctggaggggttgtccgtcacgaacccgaacggattgaacgccggggcgtcgtcttctcccttctcccctccagccgtgccgccgctcccgccgtccttgctgcctgccgcgactgtcgcttgcccgcgcctcggcccgccgccgcaccgcagcttgctccgaccaacagcagcgctgaaggcgccaccgctgccgctcctgcaggaagaggagtcggggatagaagggaggaagaagggcgcggtggaggaggaggcactcgcgcaggggcagcagtgagacatggcgggccgcggcagccggtgtgtgtccctaactccctgcgatggtggtgcactggtggctggtgctccggtggctcggtgggcggatcccggcccggcgaataattgtggttgtggccgcga

SEQ ID NO: 15248 - DNA, 1443 bp, Zea Mays
cagcccgtcgcctccactcgtgaaccgggacacacgtacgttgaacaaacacccaaggcctgacgagacgagatccggacctccgtcctcccaactagggcgcgcgcgcgacctcggcaccggcggcctcgatccatcgttctctcggatccccgccagtgcatgccctggaacggacggacggaatggcagcgtcgccggaccacctcttcggcctgcgcaacagcttctacgtcggcgcataccacgccgtcatcaccagcagccagtccctccccgcgcacgcgctctcccccgacgacctcgtcgagcgcgacgccctcatgtaccgctcctacatcgccatcggctcctaccagctggtgatcggcgagatcgggcccagcgcggccacgccgctccaggccgtcaagctgctcgccgtgtacctctccggcgacggcgggaacagggaatcggtggtctcgaggcttcgtgagctcctgtcagacgcggcggtcgggagcaatccgattctccgggtgatggccggcaccgtcttcatgcacgaacgcgattacgccgaggctctcaagcacaccaactccggtggcagcatggagctgcttgcgctgaatgttcagatataccttcaaatgaacaggacggaccacgcagagaagcagctcagggtgatgcagcagctggacgaagaccacacgctgacgcagctcgccaacgcatgggtcgaccttgtgctgggtggttccaagatccaagaagcgcgcctcatcttccaggacctgtccgagaagtacccgacgacctgcacgattcttaacgggaaagccctgtgctcgatgcacatgggcaacttcgaggacgcggaggggttgctgctcgagtcactgaacaaggacgccaaggatactgagactctcgccaacctcacggtgtgcagcctgaacctggggaaacccgcaacgcgctacctcaaccagctgaagctcgcacacccggaccacgcgctggtgaagcgaatgtcctccgctgcagagagcttcgacagagcctgccaagcaatggcgtgaacctcgtttgcgaaaattacatttgttttccctaggatgagtcggaataacatcgtgatctactctgaagcaaagcagctagtgcatggctttctcatgggcagcttggactccaccgtcggcatgcttttccactggtctcggatagtacattcggcctcgctggtgcgctggaaaggcccaggtgtttcctttaccttttgggctatgctctctctctctctgacgccttgttgcgatgggagtgactgaggggaagcaatccttgaaatcctaaacaggagatagcatgaaacagtatttggttcaggacactaaaaaaatgctactattgaagattcaataacacggccagtaaggaaagccattcatg

SEQ ID NO: 15249 - DNA, 6265 bp, Zea Mays
gatgcgagcacccctcccccgtcgcggtggctggcaacgtggggcctcgcatcggacgctaccggcgcggcggaacgagaggccaggatggcgctggaatccgtgggtctgatgagatgagatcccacgcaggccagcctcacatcctatatcctctccagtctccaccctcgcggcgcgccccctcaagttctcattccttctcctcgctcgctcgcctcctcctctcctctcctctcctctgcggtgggaactgcggcggcggcttaaaccctcgcgccggcggcttccggcgctccatcagcgccgcgctcgaaggccgcccgtcgctggtcgagcgcgcgaggcagcaggcaccggctaggcaggcagccaataatggcccccaaggccgggcgtggcaagggcaggggcggcggcggcagaggcggcgacaggaggaagaaggaagagaaagtggtgcccagcgtggtggacgtcacggtcgtcaccccctacgaatcccaggtgacactcaaggggatatcgacggaccgtgtgctggacgtgcggaggctgctggggtcgaacgtggaaacgtgccacctgacaaactattcactctcccatgtggcgcgcgggcaccggctggaggacggcgtggaggtcgtggcgctcaagccctgcgctctccggatcgtcgaagaggagtacgcgacggcggagcaggcggaggcgcacgtgcgccgcctgctggacatcctcgcctgcaccaccgcgttcgccaagccccgggacggcgccgccaagcacaggccgtccaagcacggccgtcccgcgtcgcccggggcccatggcgccgtcagcggcgaggccgccgcgccgccgccgatatcggaggcgcacgacatggccgccatccggccgccgccgaagctgggggagttctacgacttcctctccttcgcgcatctcaccccgcccgtccaccttatcaggaggaaggaggcgagcggcgcttctcgggaaggcgtctacttcgaaatcgaggtgaaggtttgcaacgggaagcttctgcacgtagttgcttcacgaaagggtttctacttggcagggaagccacaaaacgtaagccactccctggtggacctgctgcaacagctcagcaacgcgtttgctaacgcatatgaggcgttgatgaaagcttttgtggaccacaataagtttgggaatttgccatatgggttccgtgcaaacacgtggcttattcctccaatatatgttgatcccgccacaaagtgcccagcactgccagttgaggatgagaattggggtggaaatgggggtggctgtggtcgtgatggaagatatgatcgcagatgctggtcaaaagagttctctgttctgtctagaatgccatgcaaatctgacgaagaacgggtgatcagagaccggaaagcttttcttttacacaatctgtttgtagatacagcaatttttagagctgcatcaacaatacggcgactcattgatcagtctatgaactcaattggttcccgtggtactactcatggttcaaacgtatttgaggaacatatcggcgacatgaatataactgtgaagaaagatgaggctgatgctagttcaaaggtggacgacaaggttgatggtgttgccttctgtaaaacaggtgctatggatattgcacaaaagaatcttctgaaaggtttaacttctgatgaaaatgttcttattaaggattcttccacactcggagtggtgattgtcaagcattgtggatatacagcaactgtgaaggtttctggacgtgcaaaggacagtaatgatgttaaacaaacacatgacgtctctgataattttgatggaatgctgaacattgatgtgcctgaccatccagatggaggttctaatgccttgaatgtcaacagtctaaggataccactccaaagtgttacgcatccagaaactgttgttggtaagcagaaccctagcccaaagtctcatgcttataaccccgcaaggaaactggcatgcaaaatacttgaggacagcttggtaaagcttgatagcatgcctagcataaattctagaattatcagatgggaacttgggtcctcctggctacaacagttacagaaaaaggattctccggcatctgagaatgttaagcggaatgcaacaaaggctgataaagaatcagctgtcaaaggtcttggaaagcattttgaacaattaaagaaaattaaaaagaaagaatgcaacattgacggttccagttctgagaaggaagaatgtaacagtaactgctcgtcaatgaatggtatgcaagtatcagataagatatctgttgatgaaacgaataagggagctgatgtaagcaagttaatgtcagaggatgctttctttcgcttgaagagtttgggagctggccttcatgaaaagtccctcgaagagctcacaaagatggcccataatttctatgatgagactgcactcccaaagctggtggctgatttcgcgtcccttgagctttctcctgtggatggaagaaccatgaccgatttcatgcatacaaggggacttaatatgtcctctttaggtcgtgtggtagagctagcagagaagctcccacacatccagtctatatgcattcatgaaatggttattagatcctttaagcacatcgtccgagctgttattgctgctgttgatgacatgcaaaatatttctgcagctatagctgaaactctaaacatattacttggatctcccagacttgaaaatggtgctgacacagatgcccatattgacaataatttgcgtttgaaatgggtagagagcttcctttcaaaaaagattctgctggaaactgaaagatgaatttgcacacttacggaaatttatcattctgagaggtctctgcagtaaggttggactggagctagttgcaagagattatgatatgaatagccctaacccatttgacaaatctgacattgtcagcattgttcctgtatgcaagcatgtggtctactcatctattgatggtcgaaacttactggaatcatcgaagatggcattggataaaggaaaattagatgatgctgtgagctatggaacaaaggcattgtccaaaattatagctgtttgtggtccataccatcgactgacggctaatgcatacagccttcttgctgtggtgctttatcatactggagattttaatcaggcaactgtatatcaacagaaggcacttgatatcaatgaaagggagcttggtcttgatcatccggaaactatgaagagttatggggatttatctgtcttctattatcgccttcaacacattgaaatggctctaaagtatgtcaaccgtgcactatatctgcttcagttctcgtgtgggctttcacacccgaattcagctgccacctacataaatgtggctatgatggaagaaggcatgggaaatgttcatgttgctcttcgatacttgcatgaagccctgaagtgcaacaagaggttgctaggagctgatcacatccagactgctgcaagctaccatgccatagccatagccctttcaatgatggacgcgtactccctaagcgtgcaacatgaacaaacaaccttgcagatacttcaggagaaactagggcaagatgacctccgaactcaggatgctgctgcatggctagaatattttgagtcaaaagcattagaacaacaagaggcggctcgaagaggcatgccaaaacctgattcatctattgcaagtaaaggacatcttagatcttcttgacttcataagcccagaccaggaaagaaaagaaagggatatgcaaaggaaatgcaggcgtgcaaagaataatatcagagctcatcatggtgaatcagttgaagagaaggagaattttcagcttgtttcaggatctcctcttgaagcaagcaaagacagttttcaagaagaaaaactggatgtgcatcctcctgctgtattagaagaaaattatgctgcccatgatgagcataagcaatgtgatgttttatcaccagaagaatattctgatgaagggtggcaagcagctagtatgagaggaagatctgcaaatgtaaggaagaaaagcagtcgcaggaaaccggctcttatgaaattaatggttgatcattttgaaggtagtcatacaggttctgtgtataggactggtttacaacctcaaacaaaaggagacaaagaagattctgtaagtgctcctagccagctttcatttggaagttttttgaaaaccgacaagttgaatggggattccagcattgctgaagataagacgtgcaatggtagcgctaaccaagaacaacggacaaagctaacaggaattaacaggccaaccagtatcgcttccaaattcatatcatacaaagatgtggctgtttcgccccctggcacagtattgaaacccattttggagaagaaggaagcaaaggagaaagatagtggacgtgatattgacctagcactgtcatccgaggaagaagataaaaagtttacagaaaaagagaaagaaaagccaagtgaggacagtagcaaagagattctttcaattcagcgagatttagagagtcatgcagaaatacctcctgacagcaacagtgatgaaggcccatctgcagctagtaaagcgtctggaagcaaactgtcagcttcagctcctccattcaatccaggatcagtgttatcaatgtcccagccatacagcacggtggcagtatatgatgccagtgctatccttcaggcaataccaagtcaagcaatggagattctcccttctgccattgacactagagtgcctcgtggtcctcggtccaccttgtactatcgtactgggcattccttccaaaggaaacaaggttacacgcacagccagagcactattgtaaggggtagctactcccccacaaccatgaatccacatgctgctgaatttgtgcctggaaaaacttcgcaacaatctgatgtggctgacagagaacccagtcctgctaatcctgtggccaattctgatctggatgttgtatcgcagaccacagatgaagcgagggccgaaacgcctgccacagaaaaggcaggtcaggttgagaaagtcgtttcaggtaaaggaaaggaaaacagggggaaagacatcgtgagaaactcatacaaaacagaacttgcaaggcaaattttactcagtttcattgtgaagtcggtgcacgacagtttaggtccctcccgggctgaaccagagaggaagccaagtggatcagatgaagctagtaatgaacagaccagcgtcttaggcaagaacgcttctggttctggtcgcaaagatccagataaacaagagaaagcgacggaggttactaagggcctgaaggatacagagggattcactgtcgtttcaaaacgccgaaggcgtccccagccgttcatgaaccccataaatggcctatattctcagccgtctatttgcacctctgtcagttaaggtcattgcgttttcgaagacctgcaatattttgagagatggacctttgccttcgcctttgcctttgcttagaggattggtagcagagattttccctatccaagtgagctgtgagcagcgagcatttagttaaactgtacaaaaggtttccgggataccctttttgtaataaaagaaactgatgtattccgcagtagctgtagcgctggatataatgttcctttgtatgttatatatgacagaatcataggaaatagcagatgttaagttaatccgatattcagtggagcgcccttgtgctttatgatgttcctcatgttgtgagccccagttaatcattgcaatttgcaaatatgctgccagactgccagagcagaagaaactgaatcttctaggcgccaagagttcgaaatcttattcatggaggcatgtctttggataccttgccagcgggtgagcagcacttcactgagaagcaattgcagctgcagacccaccagatcaccagaccaccggggcccggacaggcgtgaactggtcgatcggcagttttaagctgttgcagcttatactgtaggagtgtagtagctacgtaggagcagcctgtactgtagctgctgagaccacacaaaaactgaatcagttacaaacttgaaactttcattaattgctgtgaaccaatatccgatcgagattgttgtgaatacgctacatatacatattttatgacttattttgcg

SEQ ID NO: 15250 - DNA, 6041 bp, Zea Mays
cgcaggccagcctcacatcctatatcctctccagtctccaccctcgcggcgcgccccctcaagttctcattccttctcctcgctcgctcgcctcctcctctcctctcctctcctctgcggtgggaactgcggcggcggcttaaaccctcgcgccggcggcttccggcgctccatcagcgccgcgctcgaaggccgcccgtcgctggtcgagcgcgcgaggcagcaggcaccggctaggcaggcagccaataatggcccccaaggccgggcgtggcaagggcaggggcggcggcggcagaggcggcgacaggaggaagaaggaagagaaagtggtgcccagcgtggtggacgtcacggtcgtcaccccctacgaatcccaggtgacactcaaggggatatcgacggaccgtgtgctggacgtgcggaggctgctggggtcgaacgtggaaacgtgccacctgacaaactattcactctcccatgtggcgcgcgggcaccggctggaggacggcgtggaggtcgtggcgctcaagccctgcgctctccggatcgtcgaagaggagtacgcgacggcggagcaggcggaggcgcacgtgcgccgcctgctggacatcctcgcctgcaccaccgcgttcgccaagccccgggacggcgccgccaagcacaggccgtccaagcacggccgtcccgcgtcgcccggggcccatggcgccgtcagcggcgaggccgccgcgccgccgccgatatcggaggcgcacgacatggccgccatccggccgccgccgaagctgggggagttctacgacttcctctccttcgcgcatctcaccccgcccgtccaccttatcaggaggaaggaggcgagcggcgcttctcgggaaggcgtctacttcgaaatcgaggtgaaggtttgcaacgggaagcttctgcacgtagttgcttcacgaaagggtttctacttggcagggaagccacaaaacgtaagccactccctggtggacctgctgcaacagctcagcaacgcgtttgctaacgcatatgaggcgttgatgaaagcttttgtggaccacaataagtttgggaatttgccatatgggttccgtgcaaacacgtggcttattcctccaatatatgttgatcccgccacaaagtgcccagcactgccagttgaggatgagaattggggtggaaatgggggtggctgtggtcgtgatggaagatatgatcgcagatgctggtcaaaagagttctctgttctgtctagaatgccatgcaaatctgacgaagaacgggtgatcagagaccggaaagcttttcttttacacaatctgtttgtagatacagcaatttttagagctgcatcaacaatacggcgactcattgatcagtctatgaactcaattggttcccgtggtactactcatggttcaaacgtatttgaggaacatatcggcgacatgaatataactgtgaagaaagatgaggctgatgctagttcaaaggtggacgacaaggttgatggtgttgccttctgtaaaacaggtgctatggatattgcacaaaagaatcttctgaaaggtttaacttctgatgaaaatgttcttattaaggattcttccacactcggagtggtgattgtcaagcattgtggatatacagcaactgtgaaggtttctggacgtgcaaaggacagtaatgatgttaaacaaacacatgacgtctctgataattttgatggaatgctgaacattgatgtgcctgaccatccagatggaggttctaatgccttgaatgtcaacagtctaaggataccactccaaagtgttacgcatccagaaactgttgttggtaagcagaaccctagcccaaagtctcatgcttataaccccgcaaggaaactggcatgcaaaatacttgaggacagcttggtaaagcttgatagcatgcctagcataaattctagaattatcagatgggaacttgggtcctcctggctacaacagttacagaaaaaggattctccggcatctgagaatgttaagcggaatgcaacaaaggctgataaagaatcagctgtcaaaggtcttggaaagcattttgaacaattaaagaaaattaaaaagaaagaatgcaacattgacggttccagttctgagaaggaagaatgtaacagtaactgctcgtcaatgaatggtatgcaagtatcagataagatatctgttgatgaaacgaataagggagctgatgtaagcaagttaatgtcagaggatgctttctttcgcttgaagagtttgggagctggccttcatgaaaagtccctcgaagagctcacaaagatggcccataatttctatgatgagactgcactcccaaagctggtggctgatttcgcgtcccttgagctttctcctgtggatggaagaaccatgaccgatttcatgcatacaaggggacttaatatgtcctctttaggtcgtgtggtagagctagcagagaagctcccacacatccagtctatatgcattcatgaaatggttattagatcctttaagcacatcgtccgagctgttattgctgctgttgatgacatgcaaaatatttctgcagctatagctgaaactctaaacatattacttggatctcccagacttgaaaatggtgctgacacagatgcccatattgacaataatttgcgtttgaaatgggttggactggagctagttgcaagagattatgatatgaatagccctaacccatttgacaaatctgacattgtcagcattgttcctgtatgcaagcatgtggtctactcatctattgatggtcgaaacttactggaatcatcgaagatggcattggataaaggaaaattagatgatgctgtgagctatggaacaaaggcattgtccaaaattatagctgtttgtggtccataccatcgactgacggctaatgcatacagccttcttgctgtggtgctttatcatactggagattttaatcaggcaactgtatatcaacagaaggcacttgatatcaatgaaagggagcttggtcttgatcatccggaaactatgaagagttatggggatttatctgtcttctattatcgccttcaacacattgaaatggctctaaagtatgtcaaccgtgcactatatctgcttcagttctcgtgtgggctttcacacccgaattcagctgccacctacataaatgtggctatgatggaagaaggcatgggaaatgttcatgttgctcttcgatacttgcatgaagccctgaagtgcaacaagaggttgctaggagctgatcacatccagactgctgcaagctaccatgccatagccatagccctttcaatgatggacgcgtactccctaagcgtgcaacatgaacaaacaaccttgcagatacttcaggagaaactagggcaagatgacctccgaactcaggatgctgctgcatggctagaatattttgagtcaaaagcattagaacaacaagaggcggctcgaagaggcatgccaaaacctgattcatctattgcaagtaaaggacatcttagatcttcttgacttcataagcccagaccaggaaagaaaagaaagggatatgcaaaggaaatgcaggcgtgcaaagaataatatcagagctcatcatggtgaatcagttgaagagaaggagaattttcagcttgtttcaggatctcctcttgaagcaagcaaagacagttttcaagaagaaaaactggatgtgcatcctcctgctgtattagaagaaaattatgctgcccatgatgagcataagcaatgtgatgttttatcaccagaagaatattctgatgaagggtggcaagcagctagtatgagaggaagatctgcaaatgtaaggaagaaaagcagtcgcaggaaaccggctcttatgaaattaatggttgatcattttgaaggtagtcatacaggttctgtgtataggactggtttacaacctcaaacaaaaggagacaaagaagattctgtaagtgctcctagccagctttcatttggaagttttttgaaaaccgacaagttgaatggggattccagcattgctgaagataagacgtgcaatggtagcgctaaccaagaacaacggacaaagctaacaggaattaacaggccaaccagtatcgcttccaaattcatatcatacaaagatgtggctgtttcgccccctggcacagtattgaaacccattttggagaagaaggaagcaaaggagaaagatagtggacgtgatattgacctagcactgtcatccgaggaagaagataaaaagtttacagaaaaagagaaagaaaagccaagtgaggacagtagcaaagagattctttcaattcagcgagatttagagagtcatgcagaaatacctcctgacagcaacagtgatgaaggcccatctgcagctagtaaagcgtctggaagcaaactgtcagcttcagctcctccattcaatccaggatcagtgttatcaatgtcccagccatacagcacggtggcagtatatgatgccagtgctatccttcaggcaataccaagtcaagcaatggagattctcccttctgccattgacactagagtgcctcgtggtcctcggtccaccttgtactatcgtactgggcattccttccaaaggaaacaaggttacacgcacagccagagcactattgtaaggggtagctactcccccacaaccatgaatccacatgctgctgaatttgtgcctggaaaaacttcgcaacaatctgatgtggctgacagagaacccagtcctgctaatcctgtggccaattctgatctggatgttgtatcgcagaccacagatgaagcgagggccgaaacgcctgccacagaaaaggcaggtcaggttgagaaagtcgtttcaggtaaaggaaaggaaaacagggggaaagacatcgtgagaaactcatacaaaacagaacttgcaaggcaaattttactcagtttcattgtgaagtcggtgcacgacagtttaggtccctcccgggctgaaccagagaggaagccaagtggatcagatgaagctagtaatgaacagaccagcgtcttaggcaagaacgcttctggttctggtcgcaaagatccagataaacaagagaaagcgacggaggttactaagggcctgaaggatacagagggattcactgtcgtttcaaaacgccgaaggcgtccccagccgttcatgaaccccataaatggcctatattctcagccgtctatttgcacctctgtcagttaaggtcattgcgttttcgaagacctgcaatattttgagagatggacctttgccttcgcctttgcctttgcttagaggattggtagcagagattttccctatccaagtgagctgtgagcagcgagcatttagttaaactgtacaaaaggtttccgggataccctttttgtaataaaagaaactgatgtattccgcagtagctgtagcgctggatataatgttcctttgtatgttatatatgacagaatcataggaaatagcagatgttaagttaatccgatattcagtggagcgcccttgtgctttatgatgttcctcatgttgtgagccccagttaatcattgcaatttgcaaatatgctgccagactgccagagcagaagaaactgaatcttctaggcgccaagagttcgaaatcttattcatggaggcatgtctttggataccttgccagcgggtgagcagcacttcactgagaagcaattgcagctgcagacccaccagatcaccagaccaccggggcccggacaggcgtgaactggtcgatcggcagttttaagctgttgcagcttatactgtaggagtgtagtagctacgtaggagcagcctgtactgtagctgctgagaccacacaaaaactgaatcagttacaaacttgaaactttcattaattgctgtgaaccaatatccgatcgagattgttgtgaatacgctacatatacatattttatgacttattttgcg

SEQ ID NO: 15251 - DNA, 6049 bp, Zea Mays
cgcaggccagcctcacatcctatatcctctccagtctccaccctcgcggcgcgccccctcaagttctcattccttctcctcgctcgctcgcctcctcctctcctctcctctcctctgcggtgggaactgcggcggcggcttaaaccctcgcgccggcggcttccggcgctccatcagcgccgcgctcgaaggccgcccgtcgctggtcgagcgcgcgaggcagcaggcaccggctaggcaggcagccaataatggcccccaaggccgggcgtggcaagggcaggggcggcggcggcagaggcggcgacaggaggaagaaggaagagaaagtggtgcccagcgtggtggacgtcacggtcgtcaccccctacgaatcccaggtgacactcaaggggatatcgacggaccgtgtgctggacgtgcggaggctgctggggtcgaacgtggaaacgtgccacctgacaaactattcactctcccatgtggcgcgcgggcaccggctggaggacggcgtggaggtcgtggcgctcaagccctgcgctctccggatcgtcgaagaggagtacgcgacggcggagcaggcggaggcgcacgtgcgccgcctgctggacatcctcgcctgcaccaccgcgttcgccaagccccgggacggcgccgccaagcacaggccgtccaagcacggccgtcccgcgtcgcccggggcccatggcgccgtcagcggcgaggccgccgcgccgccgccgatatcggaggcgcacgacatggccgccatccggccgccgccgaagctgggggagttctacgacttcctctccttcgcgcatctcaccccgcccgtccaccttatcaggaggaaggaggcgagcggcgcttctcgggaaggcgtctacttcgaaatcgaggtgaaggtttgcaacgggaagcttctgcacgtagttgcttcacgaaagggtttctacttggcagggaagccacaaaacgtaagccactccctggtggacctgctgcaacagctcagcaacgcgtttgctaacgcatatgaggcgttgatgaaagcttttgtggaccacaataagtttgggaatttgccatatgggttccgtgcaaacacgtggcttattcctccaatatatgttgatcccgccacaaagtgcccagcactgccagttgaggatgagaattggggtggaaatgggggtggctgtggtcgtgatggaagatatgatcgcagatgctggtcaaaagagttctctgttctgtctagaatgccatgcaaatctgacgaagaacgggtgatcagagaccggaaagcttttcttttacacaatctgtttgtagatacagcaatttttagagctgcatcaacaatacggcgactcattgatcagtctatgaactcaattggttcccgtggtactactcatggttcaaacgtatttgaggaacatatcggcgacatgaatataactgtgaagaaagatgaggctgatgctagttcaaaggtggacgacaaggttgatggtgttgccttctgtaaaacaggtgctatggatattgcacaaaagaatcttctgaaaggtttaacttctgatgaaaatgttcttattaaggattcttccacactcggagtggtgattgtcaagcattgtggatatacagcaactgtgaaggtttctggacgtgcaaaggacagtaatgatgttaaacaaacacatgacgtctctgataattttgatggaatgctgaacattgatgtgcctgaccatccagatggaggttctaatgccttgaatgtcaacagtctaaggataccactccaaagtgttacgcatccagaaactgttgttggtaagcagaaccctagcccaaagtctcatgcttataaccccgcaaggaaactggcatgcaaaatacttgaggacagcttggtaaagcttgatagcatgcctagcataaattctagaattatcagatgggaacttgggtcctcctggctacaacagttacagaaaaaggattctccggcatctgagaatgttaagcggaatgcaacaaaggctgataaagaatcagctgtcaaaggtcttggaaagcattttgaacaattaaagaaaattaaaaagaaagaatgcaacattgacggttccagttctgagaaggaagaatgtaacagtaactgctcgtcaatgaatggtatgcaagtatcagataagatatctgttgatgaaacgaataagggagctgatgtaagcaagttaatgtcagaggatgctttctttcgcttgaagagtttgggagctggccttcatgaaaagtccctcgaagagctcacaaagatggcccataatttctatgatgagactgcactcccaaagctggtggctgatttcgcgtcccttgagctttctcctgtggatggaagaaccatgaccgatttcatgcatacaaggggacttaatatgtcctctttaggtcgtgtggtagagctagcagagaagctcccacacatccagtctatatgcattcatgaaatggttattagatcctttaagcacatcgtccgagctgttattgctgctgttgatgacatgcaaaatatttctgcagctatagctgaaactctaaacatattacttggatctcccagacttgaaaatggtgctgacacagatgcccatattgacaataatttgcgtttgaaatgggttggactggagctagttgcaagagattatgatatgaatagccctaacccatttgacaaatctgacattgtcagcattgttcctgtatgcaagcatgtggtctactcatctattgatggtcgaaacttactggaatcatcgaagatggcattggataaaggaaaattagatgatgctgtgagctatggaacaaaggcattgtccaaaattatagctgtttgtggtccataccatcgactgacggctaatgcatacagccttcttgctgtggtgctttatcatactggagattttaatcaggcaactgtatatcaacagaaggcacttgatatcaatgaaagggagcttggtcttgatcatccggaaactatgaagagttatggggatttatctgtcttctattatcgccttcaacacattgaaatggctctaaagtatgtcaaccgtgcactatatctgcttcagttctcgtgtgggctttcacacccgaattcagctgccacctacataaatgtggctatgatggaagaaggcatgggaaatgttcatgttgctcttcgatacttgcatgaagccctgaagtgcaacaagaggttgctaggagctgatcacatccagactgctgcaagctaccatgccatagccatagccctttcaatgatggacgcgtactccctaagcgtgcaacatgaacaaacaaccttgcagatacttcaggagaaactagggcaagatgacctccgaactcaggatgctgctgcatggctagaatattttgagtcaaaagcattagaacaacaagaggcggctcgaagaggcatgccaaaacctgattcatctattgcaagtaaaggacatcttagtgtatcagatcttcttgacttcataagcccagaccaggaaagaaaagaaagggatatgcaaaggaaatgcaggcgtgcaaagaataatatcagagctcatcatggtgaatcagttgaagagaaggagaattttcagcttgtttcaggatctcctcttgaagcaagcaaagacagttttcaagaagaaaaactggatgtgcatcctcctgctgtattagaagaaaattatgctgcccatgatgagcataagcaatgtgatgttttatcaccagaagaatattctgatgaagggtggcaagcagctagtatgagaggaagatctgcaaatgtaaggaagaaaagcagtcgcaggaaaccggctcttatgaaattaatggttgatcattttgaaggtagtcatacaggttctgtgtataggactggtttacaacctcaaacaaaaggagacaaagaagattctgtaagtgctcctagccagctttcatttggaagttttttgaaaaccgacaagttgaatggggattccagcattgctgaagataagacgtgcaatggtagcgctaaccaagaacaacggacaaagctaacaggaattaacaggccaaccagtatcgcttccaaattcatatcatacaaagatgtggctgtttcgccccctggcacagtattgaaacccattttggagaagaaggaagcaaaggagaaagatagtggacgtgatattgacctagcactgtcatccgaggaagaagataaaaagtttacagaaaaagagaaagaaaagccaagtgaggacagtagcaaagagattctttcaattcagcgagatttagagagtcatgcagaaatacctcctgacagcaacagtgatgaaggcccatctgcagctagtaaagcgtctggaagcaaactgtcagcttcagctcctccattcaatccaggatcagtgttatcaatgtcccagccatacagcacggtggcagtatatgatgccagtgctatccttcaggcaataccaagtcaagcaatggagattctcccttctgccattgacactagagtgcctcgtggtcctcggtccaccttgtactatcgtactgggcattccttccaaaggaaacaaggttacacgcacagccagagcactattgtaaggggtagctactcccccacaaccatgaatccacatgctgctgaatttgtgcctggaaaaacttcgcaacaatctgatgtggctgacagagaacccagtcctgctaatcctgtggccaattctgatctggatgttgtatcgcagaccacagatgaagcgagggccgaaacgcctgccacagaaaaggcaggtcaggttgagaaagtcgtttcaggtaaaggaaaggaaaacagggggaaagacatcgtgagaaactcatacaaaacagaacttgcaaggcaaattttactcagtttcattgtgaagtcggtgcacgacagtttaggtccctcccgggctgaaccagagaggaagccaagtggatcagatgaagctagtaatgaacagaccagcgtcttaggcaagaacgcttctggttctggtcgcaaagatccagataaacaagagaaagcgacggaggttactaagggcctgaaggatacagagggattcactgtcgtttcaaaacgccgaaggcgtccccagccgttcatgaaccccataaatggcctatattctcagccgtctatttgcacctctgtcagttaaggtcattgcgttttcgaagacctgcaatattttgagagatggacctttgccttcgcctttgcctttgcttagaggattggtagcagagattttccctatccaagtgagctgtgagcagcgagcatttagttaaactgtacaaaaggtttccgggataccctttttgtaataaaagaaactgatgtattccgcagtagctgtagcgctggatataatgttcctttgtatgttatatatgacagaatcataggaaatagcagatgttaagttaatccgatattcagtggagcgcccttgtgctttatgatgttcctcatgttgtgagccccagttaatcattgcaatttgcaaatatgctgccagactgccagagcagaagaaactgaatcttctaggcgccaagagttcgaaatcttattcatggaggcatgtctttggataccttgccagcgggtgagcagcacttcactgagaagcaattgcagctgcagacccaccagatcaccagaccaccggggcccggacaggcgtgaactggtcgatcggcagttttaagctgttgcagcttatactgtaggagtgtagtagctacgtaggagcagcctgtactgtagctgctgagaccacacaaaaactgaatcagttacaaacttgaaactttcattaattgctgtgaaccaatatccgatcgagattgttgtgaatacgctacatatacatattttatgacttattttgcg

SEQ ID NO: 15252 - DNA, 6306 bp, Zea Mays
ctcacatcctatatcctctccagtctccaccctcgcggcgcgccccctcaagttctcattccttctcctcgctcgctcgcctcctcctctcctctcctctcctctgcggtgggaactgcggcggcggcttaaaccctcgcgccggcggcttccggcgctccatcagcgccgcgctcgaaggccgcccgtcgctggtcgagcgcgcgaggcagcaggcaccggctaggcaggcagccaataatggcccccaaggccgggcgtggcaagggcaggggcggcggcggcagaggcggcgacaggaggaagaaggaagagaaagtggtgcccagcgtggtggacgtcacggtcgtcaccccctacgaatcccaggtgacactcaaggggatatcgacggaccgtgtgctggacgtgcggaggctgctggggtcgaacgtggaaacgtgccacctgacaaactattcactctcccatgtggcgcgcgggcaccggctggaggacggcgtggaggtcgtggcgctcaagccctgcgctctccggatcgtcgaagaggagtacgcgacggcggagcaggcggaggcgcacgtgcgccgcctgctggacatcctcgcctgcaccaccgcgttcgccaagccccgggacggcgccgccaagcacaggccgtccaagcacggccgtcccgcgtcgcccggggcccatggcgccgtcagcggcgaggccgccgcgccgccgccgatatcggaggcgcacgacatggccgccatccggccgccgccgaagctgggggagttctacgacttcctctccttcgcgcatctcaccccgcccgtccaccttatcaggaggaaggaggcgagcggcgcttctcgggaaggcgtctacttcgaaatcgagtggctaatccaatttgatttgcgctttagtgttaaatcacaaccgtgcaatagccaatctactaggcgtgtaggtatgagcatacgcctaatgaaggagttcatctgtgcccaggtgaaggtttgcaacgggaagcttctgcacgtagttgcttcacgaaagggtttctacttggcagggaagccacaaaacgtaagccactccctggtggacctgctgcaacagctcagcaacgcgtttgctaacgcatatgaggcgttgatgaaagcttttgtggaccacaataagtttgggaatttgccatatgggttccgtgcaaacacgtggcttattcctccaatatatgttgatcccgccacaaagtgcccagcactgccagttgaggatgagaattggggtggaaatgggggtggctgtggtcgtgatggaagatatgatcgcagatgctggtcaaaagagttctctgttctgtctagaatgccatgcaaatctgacgaagaacgggtgatcagagaccggaaagcttttcttttacacaatctgtttgtagatacagcaatttttagagctgcatcaacaatacggcgactcattgatcagtctatgaactcaattggttcccgtggtactactcatggttcaaacgtatttgaggaacatatcggcgacatgaatataactgtgaagaaagatgaggctgatgctagttcaaaggtggacgacaaggttgatggtgttgccttctgtaaaacaggtgctatggatattgcacaaaagaatcttctgaaaggtttaacttctgatgaaaatgttcttattaaggattcttccacactcggagtggtgattgtcaagcattgtggatatacagcaactgtgaaggtttctggacgtgcaaaggacagtaatgatgttaaacaaacacatgacgtctctgataattttgatggaatgctgaacattgatgtgcctgaccatccagatggaggttctaatgccttgaatgtcaacagtctaaggataccactccaaagtgttacgcatccagaaactgttgttggtaagcagaaccctagcccaaagtctcatgcttataaccccgcaaggaaactggcatgcaaaatacttgaggacagcttggtaaagcttgatagcatgcctagcataaattctagaattatcagatgggaacttgggtcctcctggctacaacagttacagaaaaaggattctccggcatctgagaatgttaagcggaatgcaacaaaggctgataaagaatcagctgtcaaaggtcttggaaagcattttgaacaattaaagaaaattaaaaagaaagaatgcaacattgacggttccagttctgagaaggaagaatgtaacagtaactgctcgtcaatgaatggtatgcaagtatcagataagatatctgttgatgaaacgaataagggagctgatgtaagcaagttaatgtcagaggatgctttctttcgcttgaagagtttgggagctggccttcatgaaaagtccctcgaagagctcacaaagatggcccataatttctatgatgagactgcactcccaaagctggtggctgatttcgcgtcccttgagctttctcctgtggatggaagaaccatgaccgatttcatgcatacaaggggacttaatatgtcctctttaggtcgtgtggtagagctagcagagaagctcccacacatccagtctatatgcattcatgaaatggttattagatcctttaagcacatcgtccgagctgttattgctgctgttgatgacatgcaaaatatttctgcagctatagctgaaactctaaacatattacttggatctcccagacttgaaaatggtgctgacacagatgcccatattgacaataatttgcgtttgaaatgggtagagagcttcctttcaaaaaagattctgctggaaactgaaagatgaatttgcacacttacggaaatttatcattctgagaggtctctgcagtaaggttggactggagctagttgcaagagattatgatatgaatagccctaacccatttgacaaatctgacattgtcagcattgttcctgtatgcaagcatgtggtctactcatctattgatggtcgaaacttactggaatcatcgaagatggcattggataaaggaaaattagatgatgctgtgagctatggaacaaagctgtttgtggtccataccatcgactgacggctaatgcatacagccttcttgctgtggtgctttatcatactggagattttaatcaggcaactgtatatcaacagaaggcacttgatatcaatgaaagggagcttggtcttgatcatccggaaactatgaagagttatggggatttatctgtcttctattatcgccttcaacacattgaaatggctctaaagtatgtcaaccgtgcactatatctgcttcagttctcgtgtgggctttcacacccgaattcagctgccacctacataaatgtggctatgatggaagaaggcatgggaaatgttcatgttgctcttcgatacttgcatgaagccctgaagtgcaacaagaggttgctaggagctgatcacatccagactgctgcaagctaccatgccatagccatagccctttcaatgatggacgcgtactccctaagcgtgcaacatgaacaaacaaccttgcagatacttcaggagaaactagggcaagatgacctccgaactcaggatgctgctgcatggctagaatattttgagtcaaaagcattagaacaacaagaggcggctcgaagaggcatgccaaaacctgattcatctattgcaagtaaaggacatcttaggtatgaaactacgaataatctgtgaagtttcatttataaaatatttgtatttagattgaaacatatatctttccagtgtatcagatcttcttgacttcataagcccagaccaggaaagaaaagaaagggatatgcaaaggaaatgcaggcgtgcaaagaataatatcagagctcatcatggtgaatcagttgaagagaaggagaattttcagcttgtttcaggatctcctcttgaagcaagcaaagacagttttcaagaagaaaaactggatgtgcatcctcctgctgtattagaagaaaattatgctgcccatgatgagcataagcaatgtgatgttttatcaccagaagaatattctgatgaagggtggcaagcagctagtatgagaggaagatctgcaaatgtaaggaagaaaagcagtcgcaggaaaccggctcttatgaaattaatggttgatcattttgaaggtagtcatacaggttctgtgtataggactggtttacaacctcaaacaaaaggagacaaagaagattctgtaagtgctcctagccagctttcatttggaagttttttgaaaaccgacaagttgaatggggattccagcattgctgaagataagacgtgcaatggtagcgctaaccaagaacaacggacaaagctaacaggaattaacaggccaaccagtatcgcttccaaattcatatcatacaaagatgtggctgtttcgccccctggcacagtattgaaacccattttggagaagaaggaagcaaaggagaaagatagtggacgtgatattgacctagcactgtcatccgaggaagaagataaaaagtttacagaaaaagagaaagaaaagccaagtgaggacagtagcaaagagattctttcaattcagcgagatttagagagtcatgcagaaatacctcctgacagcaacagtgatgaaggcccatctgcagctagtaaagcgtctggaagcaaactgtcagcttcagctcctccattcaatccaggatcagtgttatcaatgtcccagccatacagcacggtggcagtatatgatgccagtgctatccttcaggcaataccaagtcaagcaatggagattctcccttctgccattgacactagagtgcctcgtggtcctcggtccaccttgtactatcgtactgggcattccttccaaaggaaacaaggttacacgcacagccagagcactattgtaaggggtagctactcccccacaaccatgaatccacatgctgctgaatttgtgcctggaaaaacttcgcaacaatctgatgtggctgacagagaacccagtcctgctaatcctgtggccaattctgatctggatgttgtatcgcagaccacagatgaagcgagggccgaaacgcctgccacagaaaaggcaggtcaggttgagaaagtcgtttcaggtaaaggaaaggaaaacagggggaaagacatcgtgagaaactcatacaaaacagaacttgcaaggcaaattttactcagtttcattgtgaagtcggtgcacgacagtttaggtccctcccgggctgaaccagagaggaagccaagtggatcagatgaagctagtaatgaacagaccagcgtcttaggcaagaacgcttctggttctggtcgcaaagatccagataaacaagagaaagcgacggaggttactaagggcctgaaggatacagagggattcactgtcgtttcaaaacgccgaaggcgtccccagccgttcatgaaccccataaatggcctatattctcagccgtctatttgcacctctgtcagttaaggtcattgcgttttcgaagacctgcaatattttgagagatggacctttgccttcgcctttgcctttgcttagaggattggtagcagagattttccctatccaagtgagctgtgagcagcgagcatttagttaaactgtacaaaaggtttccgggataccctttttgtaataaaagaaactgatgtattccgcagtagctgtagcgctggatataatgttcctttgtatgttatatatgacagaatcataggaaatagcagatgttaagttaatccgatattcagtggagcgcccttgtgctttatgatgttcctcatgttgtgagccccagttaatcattgcaatttgcaaatatgctgccagactgccagagcagaagaaactgaatcttctaggcgccaagagttcgaaatcttattcatggaggcatgtctttggataccttgccagcgggtgagcagcacttcactgagaagcaattgcagctgcagacccaccagatcaccagaccaccggggcccggacaggcgtgaactggtcgatcggcagttttaagctgttgcagcttatactgtaggagtgtagtagctacgtaggagcagcctgtactgtagctgctgagaccacacaaaaactgaatcagttacaaacttgaaactttcattaattgctgtgaaccaatatccgatcgagattgttgtgaatacgctacatatacatattttatgacttattttgcg

SEQ ID NO: 15253 - DNA, 6106 bp, Zea Mays
ctcacatcctatatcctctccagtctccaccctcgcggcgcgccccctcaagttctcattccttctcctcgctcgctcgcctcctcctctcctctcctctcctctgcggtgggaactgcggcggcggcttaaaccctcgcgccggcggcttccggcgctccatcagcgccgcgctcgaaggccgcccgtcgctggtcgagcgcgcgaggcagcaggcaccggctaggcaggcagccaataatggcccccaaggccgggcgtggcaagggcaggggcggcggcggcagaggcggcgacaggaggaagaaggaagagaaagtggtgcccagcgtggtggacgtcacggtcgtcaccccctacgaatcccaggtgacactcaaggggatatcgacggaccgtgtgctggacgtgcggaggctgctggggtcgaacgtggaaacgtgccacctgacaaactattcactctcccatgtggcgcgcgggcaccggctggaggacggcgtggaggtcgtggcgctcaagccctgcgctctccggatcgtcgaagaggagtacgcgacggcggagcaggcggaggcgcacgtgcgccgcctgctggacatcctcgcctgcaccaccgcgttcgccaagccccgggacggcgccgccaagcacaggccgtccaagcacggccgtcccgcgtcgcccggggcccatggcgccgtcagcggcgaggccgccgcgccgccgccgatatcggaggcgcacgacatggccgccatccggccgccgccgaagctgggggagttctacgacttcctctccttcgcgcatctcaccccgcccgtccaccttatcaggaggaaggaggcgagcggcgcttctcgggaaggcgtctacttcgaaatcgagtggctaatccaatttgatttgcgctttagtgttaaatcacaaccgtgcaatagccaatctactaggcgtgtaggtatgagcatacgcctaatgaaggagttcatctgtgcccaggtgaaggtttgcaacgggaagcttctgcacgtagttgcttcacgaaagggtttctacttggcagggaagccacaaaacgcatatgaggcgttgatgaaagcttttgtggaccacaataagtttgggaatttgccatatgggttccgtgcaaacacgtggcttattcctccaatatatgttgatcccgccacaaagtgcccagcactgccagttgaggatgagaattggggtggaaatgggggtggctgtggtcgtgatggaagatatgatcgcagatgctggtcaaaagagttctctgttctgtctagaatgccatgcaaatctgacgaagaacgggtgatcagagaccggaaagcttttcttttacacaatctgtttgtagatacagcaatttttagagctgcatcaacaatacggcgactcattgatcagtctatgaactcaattggttcccgtggtactactcatggttcaaacgtatttgaggaacatatcggcgacatgaatataactgtgaagaaagatgaggctgatgctagttcaaaggtggacgacaaggttgatggtgttgccttctgtaaaacaggtgctatggatattgcacaaaagaatcttctgaaaggtttaacttctgatgaaaatgttcttattaaggattcttccacactcggagtggtgattgtcaagcattgtggatatacagcaactgtgaaggtttctggacgtgcaaaggacagtaatgatgttaaacaaacacatgacgtctctgataattttgatggaatgctgaacattgatgtgcctgaccatccagatggaggttctaatgccttgaatgtcaacagtctaaggataccactccaaagtgttacgcatccagaaactgttgttggtaagcagaaccctagcccaaagtctcatgcttataaccccgcaaggaaactggcatgcaaaatacttgaggacagcttggtaaagcttgatagcatgcctagcataaattctagaattatcagatgggaacttgggtcctcctggctacaacagttacagaaaaaggattctccggcatctgagaatgttaagcggaatgcaacaaaggctgataaagaatcagctgtcaaaggtcttggaaagcattttgaacaattaaagaaaattaaaaagaaagaatgcaacattgacggttccagttctgagaaggaagaatgtaacagtaactgctcgtcaatgaatggtatgcaagtatcagataagatatctgttgatgaaacgaataagggagctgatgtaagcaagttaatgtcagaggatgctttctttcgcttgaagagtttgggagctggccttcatgaaaaggtagagctagcagagaagctcccacacatccagtctatatgcattcatgaaatggttattagatcctttaagcacatcgtccgagctgttattgctgctgttgatgacatgcaaaatatttctgcagctatagctgaaactctaaacatattacttggatctcccagacttgaaaatggtgctgacacagatgcccatattgacaataatttgcgtttgaaatgggtagagagcttcctttcaaaaaagattctgctggaaactgaaagatgaatttgcacacttacggaaatttatcattctgagaggtctctgcagtaaggttggactggagctagttgcaagagattatgatatgaatagccctaacccatttgacaaatctgacattgtcagcattgttcctgtatgcaagcatgtggtctactcatctattgatggtcgaaacttactggaatcatcgaagatggcattggataaaggaaaattagatgatgctgtgagctatggaacaaaggcattgtccaaaattatagctgtttgtggtccataccatcgactgacggctaatgcatacagccttcttgctgtggtgctttatcatactggagattttaatcaggcaactgtatatcaacagaaggcacttgatatcaatgaaagggagcttggtcttgatcatccggaaactatgaagagttatggggatttatctgtcttctattatcgccttcaacacattgaaatggctctaaagtatgtcaaccgtgcactatatctgcttcagttctcgtgtgggctttcacacccgaattcagctgccacctacataaatgtggctatgatggaagaaggcatgggaaatgttcatgttgctcttcgatacttgcatgaagccctgaagtgcaacaagaggttgctaggagctgatcacatccagactgctgcaagctaccatgccatagccatagccctttcaatgatggacgcgtactccctaagcgtgcaacatgaacaaacaaccttgcagatacttcaggagaaactagggcaagatgacctccgaactcaggatgctgctgcatggctagaatattttgagtcaaaagcattagaacaacaagaggcggctcgaagaggcatgccaaaacctgattcatctattgcaagtaaaggacatcttaggtatgaaactacgaataatctgtgaagtttcatttataaaatatttgtatttagattgaaacatatatctttccagtgtatcagatcttcttgacttcataagcccagaccaggaaagaaaagaaagggatatgcaaaggaaatgcaggcgtgcaaagaataatatcagagctcatcatggtgaatcagttgaagagaaggagaattttcagcttgtttcaggatctcctcttgaagcaagcaaagacagttttcaagaagaaaaactggatgtgcatcctcctgctgtattagaagaaaattatgctgcccatgatgagcataagcaatgtgatgttttatcaccagaagaatattctgatgaagggtggcaagcagctagtatgagaggaagatctgcaaatgtaaggaagaaaagcagtcgcaggaaaccggctcttatgaaattaatggttgatcattttgaaggtagtcatacaggttctgtgtataggactggtttacaacctcaaacaaaaggagacaaagaagattctgtaagtgctcctagccagctttcatttggaagttttttgaaaaccgacaagttgaatggggattccagcattgctgaagataagacgtgcaatggtagcgctaaccaagaacaacggacaaagctaacaggaattaacaggccaaccagtatcgcttccaaattcatatcatacaaagatgtggctgtttcgccccctggcacagtattgaaacccattttggagaagaaggaagcaaaggagaaagatagtggacgtgatattgacctagcactgtcatccgaggaagaagataaaaagtttacagaaaaagagaaagaaaagccaagtgaggacagtagcaaagagattctttcaattcagcgagatttagagagtcatgcagaaatacctcctgacagcaacagtgatgaaggcccatctgcagctagtaaagcgtctggaagcaaactgtcagcttcagctcctccattcaatccaggatcagtgttatcaatgtcccagccatacagcacggtggcagtatatgatgccagtgctatccttcaggcaataccaagtcaagcaatggagattctcccttctgccattgacactagagtgcctcgtggtcctcggtccaccttgtactatcgtactgggcattccttccaaaggaaacaaggttacacgcacagccagagcactattgtaaggggtagctactcccccacaaccatgaatccacatgctgctgaatttgtgcctggaaaaacttcgcaacaatctgatgtggctgacagagaacccagtcctgctaatcctgtggccaattctgatctggatgttgtatcgcagaccacagatgaagcgagggccgaaacgcctgccacagaaaaggcaggtcaggttgagaaagtcgtttcaggtaaaggaaaggaaaacagggggaaagacatcgtgagaaactcatacaaaacagaacttgcaaggcaaattttactcagtttcattgtgaagtcggtgcacgacagtttaggtccctcccgggctgaaccagagaggaagccaagtggatcagatgaagctagtaatgaacagaccagcgtcttaggcaagaacgcttctggttctggtcgcaaagatccagataaacaagagaaagcgacggaggttactaagggcctgaaggatacagagggattcactgtcgtttcaaaacgccgaaggcgtccccagccgttcatgaaccccataaatggcctatattctcagccgtctatttgcacctctgtcagttaaggtcattgcgttttcgaagacctgcaatattttgagagatggacctttgccttcgcctttgcctttgcttagaggattggtagcagagattttccctatccaagtgagctgtgagcagcgagcatttagttaaactgtacaaaaggtttccgggataccctttttgtaataaaagaaactgatgtattccgcagtagctgtagcgctggatataatgttcctttgtatgttatatatgacagaatcataggaaatagcagatgttaagttaatccgatattcagtggagcgcccttgtgctttatgatgttcctcatgttgtgagccccagttaatcattgcaatttgcaaatatgctgccagactgccagagcagaagaaactgaatcttctaggcgccaagagttcgaaatcttattcatggaggcatgtctttggataccttgccagcgggtgagcagcacttcactgagaagcaattgcagctgcagacccaccagatcaccagaccaccggggcccggacaggcgtgaactggtcgatcggcagttttaagctgttgcagcttatactgtaggagtgtagtagctacgtaggagcagcctgtactgtagctgctgagaccacacaaaaactgaatcagttacaaacttgaaactttcattaattgctgtgaaccaatatccgatcgagattgttgtgaatacgctacatatacatattttatgacttattttgcg

SEQ ID NO: 15254 - DNA, 6092 bp, Zea Mays
ctcacatcctatatcctctccagtctccaccctcgcggcgcgccccctcaagttctcattccttctcctcgctcgctcgcctcctcctctcctctcctctcctctgcggtgggaactgcggcggcggcttaaaccctcgcgccggcggcttccggcgctccatcagcgccgcgctcgaaggccgcccgtcgctggtcgagcgcgcgaggcagcaggcaccggctaggcaggcagccaataatggcccccaaggccgggcgtggcaagggcaggggcggcggcggcagaggcggcgacaggaggaagaaggaagagaaagtggtgcccagcgtggtggacgtcacggtcgtcaccccctacgaatcccaggtgacactcaaggggatatcgacggaccgtgtgctggacgtgcggaggctgctggggtcgaacgtggaaacgtgccacctgacaaactattcactctcccatgtggcgcgcgggcaccggctggaggacggcgtggaggtcgtggcgctcaagccctgcgctctccggatcgtcgaagaggagtacgcgacggcggagcaggcggaggcgcacgtgcgccgcctgctggacatcctcgcctgcaccaccgcgttcgccaagccccgggacggcgccgccaagcacaggccgtccaagcacggccgtcccgcgtcgcccggggcccatggcgccgtcagcggcgaggccgccgcgccgccgccgatatcggaggcgcacgacatggccgccatccggccgccgccgaagctgggggagttctacgacttcctctccttcgcgcatctcaccccgcccgtccaccttatcaggaggaaggaggcgagcggcgcttctcgggaaggcgtctacttcgaaatcgaggtgaaggtttgcaacgggaagcttctgcacgtagttgcttcacgaaagggtttctacttggcagggaagccacaaaacgtaagccactccctggtggacctgctgcaacagctcagcaacgcgtttgctaacgcatatgaggcgttgatgaaagcttttgtggaccacaataagtttgggaatttgccatatgggttccgtgcaaacacgtggcttattcctccaatatatgttgatcccgccacaaagtgcccagcactgccagttgaggatgagaattggggtggaaatgggggtggctgtggtcgtgatggaagatatgatcgcagatgctggtcaaaagagttctctgttctgtctagaatgccatgcaaatctgacgaagaacgggtgatcagagaccggaaagcttttcttttacacaatctgtttgtagatacagcaatttttagagctgcatcaacaatacggcgactcattgatcagtctatgaactcaattggttcccgtggtactactcatggttcaaacgtatttgaggaacatatcggcgacatgaatataactgtgaagaaagatgaggctgatgctagttcaaaggtggacgacaaggttgatggtgttgccttctgtaaaacaggtgctatggatattgcacaaaagaatcttctgaaaggtttaacttctgatgaaaatgttcttattaaggattcttccacactcggagtggtgattgtcaagcattgtggatatacagcaactgtgaaggtttctggacgtgcaaaggacagtaatgatgttaaacaaacacatgacgtctctgataattttgatggaatgctgaacattgatgtgcctgaccatccagatggaggttctaatgccttgaatgtcaacagtctaaggataccactccaaagtgttacgcatccagaaactgttgttggtaagcagaaccctagcccaaagtctcatgcttataaccccgcaaggaaactggcatgcaaaatacttgaggacagcttggtaaagcttgatagcatgcctagcataaattctagaattatcagatgggaacttgggtcctcctggctacaacagttacagaaaaaggattctccggcatctgagaatgttaagcggaatgcaacaaaggctgataaagaatcagctgtcaaaggtcttggaaagcattttgaacaattaaagaaaattaaaaagaaagaatgcaacattgacggttccagttctgagaaggaagaatgtaacagtaactgctcgtcaatgaatggtatgcaagtatcagataagatatctgttgatgaaacgaataagggagctgattccctcgaagagctcacaaagatggcccataatttctatgatgagactgcactcccaaagctggtggctgatttcgcgtcccttgagctttctcctgtggatggaagaaccatgaccgatttcatgcatacaaggggacttaatatgtcctctttaggtcgtgtggtagagctagcagagaagctcccacacatccagtctatatgcattcatgaaatggttattagatcctttaagcacatcgtccgagctgttattgctgctgttgatgacatgcaaaatatttctgcagctatagctgaaactctaaacatattacttggatctcccagacttgaaaatggtgctgacacagatgcccatattgacaataatttgcgtttgaaatgggtagagagcttcctttcaaaaaagattctgctggaaactgaaagatgaatttgcacacttacggaaatttatcattctgagaggtctctgcagtaaggttggactggagctagttgcaagagattatgatatgaatagccctaacccatttgacaaatctgacattgtcagcattgttcctgtatgcaagcatgtggtctactcatctattgatggtcgaaacttactggaatcatcgaagatggcattggataaaggaaaattagatgatgctgtgagctatggaacaaagctgtttgtggtccataccatcgactgacggctaatgcatacagccttcttgctgtggtgctttatcatactggagattttaatcaggcaactgtatatcaacagaaggcacttgatatcaatgaaagggagcttggtcttgatcatccggaaactatgaagagttatggggatttatctgtcttctattatcgccttcaacacattgaaatggctctaaattctcgtgtgggctttcacacccgaattcagctgccacctacataaatgtggctatgatggaagaaggcatgggaaatgttcatgttgctcttcgatacttgcatgaagccctgaagtgcaacaagaggttgctaggagctgatcacatccagactgctgcaagctaccatgccatagccatagccctttcaatgatggacgcgtactccctaagcgtgcaacatgaacaaacaaccttgcagatacttcaggagaaactagggcaagatgacctccgaactcaggatgctgctgcatggctagaatattttgagtcaaaagcattagaacaacaagaggcggctcgaagaggcatgccaaaacctgattcatctattgcaagtaaaggacatcttaggtatgaaactacgaataatctgtgaagtttcatttataaaatatttgtatttagattgaaacatatatctttccagtgtatcagatcttcttgacttcataagcccagaccaggaaagaaaagaaagggatatgcaaaggaaatgcaggcgtgcaaagaataatatcagagctcatcatggtgaatcagttgaagagaaggagaattttcagcttgtttcaggatctcctcttgaagcaagcaaagacagttttcaagaagaaaaactggatgtgcatcctcctgctgtattagaagaaaattatgctgcccatgatgagcataagcaatgtgatgttttatcaccagaagaatattctgatgaagggtggcaagcagctagtatgagaggaagatctgcaaatgtaaggaagaaaagcagtcgcaggaaaccggctcttatgaaattaatggttgatcattttgaaggtagtcatacaggttctgtgtataggactggtttacaacctcaaacaaaaggagacaaagaagattctgtaagtgctcctagccagctttcatttggaagttttttgaaaaccgacaagttgaatggggattccagcattgctgaagataagacgtgcaatggtagcgctaaccaagaacaacggacaaagctaacaggaattaacaggccaaccagtatcgcttccaaattcatatcatacaaagatgtggctgtttcgccccctggcacagtattgaaacccattttggagaagaaggaagcaaaggagaaagatagtggacgtgatattgacctagcactgtcatccgaggaagaagataaaaagtttacagaaaaagagaaagaaaagccaagtgaggacagtagcaaagagattctttcaattcagcgagatttagagagtcatgcagaaatacctcctgacagcaacagtgatgaaggcccatctgcagctagtaaagcgtctggaagcaaactgtcagcttcagctcctccattcaatccaggatcagtgttatcaatgtcccagccatacagcacggtggcagtatatgatgccagtgctatccttcaggcaataccaagtcaagcaatggagattctcccttctgccattgacactagagtgcctcgtggtcctcggtccaccttgtactatcgtactgggcattccttccaaaggaaacaaggttacacgcacagccagagcactattgtaaggggtagctactcccccacaaccatgaatccacatgctgctgaatttgtgcctggaaaaacttcgcaacaatctgatgtggctgacagagaacccagtcctgctaatcctgtggccaattctgatctggatgttgtatcgcagaccacagatgaagcgagggccgaaacgcctgccacagaaaaggcaggtcaggttgagaaagtcgtttcaggtaaaggaaaggaaaacagggggaaagacatcgtgagaaactcatacaaaacagaacttgcaaggcaaattttactcagtttcattgtgaagtcggtgcacgacagtttaggtccctcccgggctgaaccagagaggaagccaagtggatcagatgaagctagtaatgaacagaccagcgtcttaggcaagaacgcttctggttctggtcgcaaagatccagataaacaagagaaagcgacggaggttactaagggcctgaaggatacagagggattcactgtcgtttcaaaacgccgaaggcgtccccagccgttcatgaaccccataaatggcctatattctcagccgtctatttgcacctctgtcagttaaggtcattgcgttttcgaagacctgcaatattttgagagatggacctttgccttcgcctttgcctttgcttagaggattggtagcagagattttccctatccaagtgagctgtgagcagcgagcatttagttaaactgtacaaaaggtttccgggataccctttttgtaataaaagaaactgatgtattccgcagtagctgtagcgctggatataatgttcctttgtatgttatatatgacagaatcataggaaatagcagatgttaagttaatccgatattcagtggagcgcccttgtgctttatgatgttcctcatgttgtgagccccagttaatcattgcaatttgcaaatatgctgccagactgccagagcagaagaaactgaatcttctaggcgccaagagttcgaaatcttattcatggaggcatgtctttggataccttgccagcgggtgagcagcacttcactgagaagcaattgcagctgcagacccaccagatcaccagaccaccggggcccggacaggcgtgaactggtcgatcggcagttttaagctgttgcagcttatactgtaggagtgtagtagctacgtaggagcagcctgtactgtagctgctgagaccacacaaaaactgaatcagttacaaacttgaaactttcattaattgctgtgaaccaatatccgatcgagattgttgtgaatacgctacatatacatattttatgacttattttgcg

SEQ ID NO: 15255 - DNA, 5850 bp, Zea Mays
ctcacatcctatatcctctccagtctccaccctcgcggcgcgccccctcaagttctcattccttctcctcgctcgctcgcctcctcctctcctctcctctcctctgcggtgggaactgcggcggcggcttaaaccctcgcgccggcggcttccggcgctccatcagcgccgcgctcgaaggccgcccgtcgctggtcgagcgcgcgaggcagcaggcaccggctaggcaggcagccaataatggcccccaaggccgggcgtggcaagggcaggggcggcggcggcagaggcggcgacaggaggaagaaggaagagaaagtggtgcccagcgtggtggacgtcacggtcgtcaccccctacgaatcccaggtgacactcaaggggatatcgacggaccgtgtgctggacgtgcggaggctgctggggtcgaacgtggaaacgtgccacctgacaaactattcactctcccatgtggcgcgcgggcaccggctggaggacggcgtggaggtcgtggcgctcaagccctgcgctctccggatcgtcgaagttatcaggaggaaggaggcgagcggcgcttctcgggaaggcgtctacttcgaaatcgaggtgaaggtttgcaacgggaagcttctgcacgtagttgcttcacgaaagggtttctacttggcagggaagccacaaaacgtaagccactccctggtggacctgctgcaacagctcagcaacgcgtttgctaacgcatatgaggcgttgatgaaagcttttgtggaccacaataagtttgggaatttgccatatgggttccgtgcaaacacgtggcttattcctccaatatatgttgatcccgccacaaagtgcccagcactgccagttgaggatgagaattggggtggaaatgggggtggctgtggtcgtgatggaagatatgatcgcagatgctggtcaaaagagttctctgttctgtctagaatgccatgcaaatctgacgaagaacgggtgatcagagaccggaaagcttttcttttacacaatctgtttgtagatacagcaatttttagagctgcatcaacaatacggcgactcattgatcagtctatgaactcaattggttcccgtggtactactcatggttcaaacgtatttgaggaacatatcggcgacatgaatataactgtgaagaaagatgaggctgatgctagttcaaaggtggacgacaaggttgatggtgttgccttctgtaaaacaggtgctatggatattgcacaaaagaatcttctgaaaggtttaacttctgatgaaaatgttcttattaaggattcttccacactcggagtggtgattgtcaagcattgtggatatacagcaactgtgaaggtttctggacgtgcaaaggacagtaatgatgttaaacaaacacatgacgtctctgataattttgatggaatgctgaacattgatgtgcctgaccatccagatggaggttctaatgccttgaatgtcaacagtctaaggataccactccaaagtgttacgcatccagaaactgttgttggtaagcagaaccctagcccaaagtctcatgcttataaccccgcaaggaaactggcatgcaaaatacttgaggacagcttggtaaagcttgatagcatgcctagcataaattctagaattatcagatgggaacttgggtcctcctggctacaacagttacagaaaaaggattctccggcatctgagaatgttaagcggaatgcaacaaaggctgataaagaatcagctgtcaaaggtcttggaaagcattttgaacaattaaagaaaattaaaaagaaagaatgcaacattgacggttccagttctgagaaggaagaatgtaacagtaactgctcgtcaatgaatggtatgcaagtatcagataagatatctgttgatgaaacgaataagggagctgatgtaagcaagttaatgtcagaggatgctttctttcgcttgaagagtttgggagctggccttcatgaaaagtccctcgaagagctcacaaagatggcccataatttctatgatgagactgcactcccaaagctggtggctgatttcgcgtcccttgagctttctcctgtggatggaagaaccatgaccgatttcatgcatacaaggggacttaatatgtcctctttaggtcgtgtggtagagctagcagagaagctcccacacatccagtctatatgcattcatgaaatggttattagatcctttaagcacatcgtccgagctgttattgctgctgttgatgacatgcaaaatatttctgcagctatagctgaaactctaaacatattacttggatctcccagacttgaaaatggtgctgacacagatgcccatattgacaataatttgcgtttgaaatgggtagagagcttcctttcaaaaaagattctgctggaaactgaaagatgaatttgcacacttacggaaatttatcattctgagaggtctctgcagtaaggttggactggagctagttgcaagagattatgatatgaatagccctaacccatttgacaaatctgacattgtcagcattgttcctgtatgcaagcatgtggtctactcatctattgatggtcgaaacttactggaatcatcgaagatggcattggataaaggaaaattagatgatgctgtgagctatggaacaaaggcattgtccaaaattatagctgtttgtggtccataccatcgactgacggctaatgcatacagccttcttgctgtggtgctttatcatactggagattttaatcaggcaactgtatatcaacagaaggcacttgatatcaatgaaagggagcttggtcttgatcatccggaaactatgaagagttatggggatttatctgtcttctattatcgccttcaacacattgaaatggctctaaagtatgtcaaccgtgcactatatctgcttcagttctcgtgtgggctttcacacccgaattcagctgccacctacataaatgtggctatgatggaagaaggcatgggaaatgttcatgttgctcttcgatacttgcatgaagccctgaagtgcaacaagaggttgctaggagctgatcacatccagactgctgcaagctaccatgccatagccatagccctttcaatgatggacgcgtactccctaagcgtgcaacatgaacaaacaaccttgcagatacttcaggagaaactagggcaagatgacctccgaactcaggatgctgctgcatggctagaatattttgagtcaaaagcattagaacaacaagaggcggctcgaagaggcatgccaaaacctgattcatctattgcaagtaaaggacatcttagtgtatcagatcttcttgacttcataagcccagaccaggaaagaaaagaaagggatatgcaaaggaaatgcaggcgtgcaaagaataatatcagagctcatcatggtgaatcagttgaagagaaggagaattttcagcttgtttcaggatctcctcttgaagcaagcaaagacagttttcaagaagaaaaactggatgtgcatcctcctgctgtattagaagaaaattatgctgcccatgatgagcataagcaatgtgatgttttatcaccagaagaatattctgatgaagggtggcaagcagctagtatgagaggaagatctgcaaatgtaaggaagaaaagcagtcgcaggaaaccggctcttatgaaattaatggttgatcattttgaaggtagtcatacaggttctgtgtataggactggtttacaacctcaaacaaaaggagacaaagaagattctgtaagtgctcctagccagctttcatttggaagttttttgaaaaccgacaagttgaatggggattccagcattgctgaagataagacgtgcaatggtagcgctaaccaagaacaacggacaaagctaacaggaattaacaggccaaccagtatcgcttccaaattcatatcatacaaagatgtggctgtttcgccccctggcacagtattgaaacccattttggagaagaaggaagcaaaggagaaagatagtggacgtgatattgacctagcactgtcatccgaggaagaagataaaaagtttacagaaaaagagaaagaaaagccaagtgaggacagtagcaaagagattctttcaattcagcgagatttagagagtcatgcagaaatacctcctgacagcaacagtgatgaaggcccatctgcagctagtaaagcgtctggaagcaaactgtcagcttcagctcctccattcaatccaggatcagtgttatcaatgtcccagccatacagcacggtggcagtatatgatgccagtgctatccttcaggcaataccaagtcaagcaatggagattctcccttctgccattgacactagagtgcctcgtggtcctcggtccaccttgtactatcgtactgggcattccttccaaaggaaacaaggttacacgcacagccagagcactattgtaaggggtagctactcccccacaaccatgaatccacatgctgctgaatttgtgcctggaaaaacttcgcaacaatctgatgtggctgacagagaacccagtcctgctaatcctgtggccaattctgatctggatgttgtatcgcagaccacagatgaagcgagggccgaaacgcctgccacagaaaaggcaggtcaggttgagaaagtcgtttcaggtaaaggaaaggaaaacagggggaaagacatcgtgagaaactcatacaaaacagaacttgcaaggcaaattttactcagtttcattgtgaagtcggtgcacgacagtttaggtccctcccgggctgaaccagagaggaagccaagtggatcagatgaagctagtaatgaacagaccagcgtcttaggcaagaacgcttctggttctggtcgcaaagatccagataaacaagagaaagcgacggaggttactaagggcctgaaggatacagagggattcactgtcgtttcaaaacgccgaaggcgtccccagccgttcatgaaccccataaatggcctatattctcagccgtctatttgcacctctgtcagttaaggtcattgcgttttcgaagacctgcaatattttgagagatggacctttgccttcgcctttgcctttgcttagaggattggtagcagagattttccctatccaagtgagctgtgagcagcgagcatttagttaaactgtacaaaaggtttccgggataccctttttgtaataaaagaaactgatgtattccgcagtagctgtagcgctggatataatgttcctttgtatgttatatatgacagaatcataggaaatagcagatgttaagttaatccgatattcagtggagcgcccttgtgctttatgatgttcctcatgttgtgagccccagttaatcattgcaatttgcaaatatgctgccagactgccagagcagaagaaactgaatcttctaggcgccaagagttcgaaatcttattcatggaggcatgtctttggataccttgccagcgggtgagcagcacttcactgagaagcaattgcagctgcagacccaccagatcaccagaccaccggggcccggacaggcgtgaactggtcgatcggcagttttaagctgttgcagcttatactgtaggagtgtagtagctacgtaggagcagcctgtactgtagctgctgagaccacacaaaaactgaatcagttacaaacttgaaactttcattaattgctgtgaaccaatatccgatcgagattgttgtgaatacgctacatatacatattttatgacttattttgcg

SEQ ID NO: 15256 - DNA, 5907 bp, Zea Mays
ctcacatcctatatcctctccagtctccaccctcgcggcgcgccccctcaagttctcattccttctcctcgctcgctcgcctcctcctctcctctcctctcctctgcggtgggaactgcggcggcggcttaaaccctcgcgccggcggcttccggcgctccatcagcgccgcgctcgaaggccgcccgtcgctggtcgagcgcgcgaggcagcaggcaccggctaggcaggcagccaataatggcccccaaggccgggcgtggcaagggcaggggcggcggcggcagaggcggcgacaggaggaagaaggaagagaaagtggtgcccagcgtggtggacgtcacggtcgtcaccccctacgaatcccaggtgacactcaaggggatatcgacggaccgtgtgctggacgtgcggaggctgctggggtcgaacgtggaaacgtgccacctgacaaactattcactctcccatgtggcgcgcgggcaccggctggaggacggcgtggaggtcgtggcgctcaagccctgcgctctccggatcgtcgaagaggagtacgcgacggcggagcaggcggaggcgcacgtgcgccgcctgctggacatcctcgcctgcaccaccgcgttcgccaagccccgggacggcgccgccaagcacaggccgtccaagcacggccgtcccgcgtcgcccggggcccatggcgccgtcagcggcgaggccgccgcgccgccgccgatatcggaggcgcacgacatggccgccatccggccgccgccgaagctgggggagttctacgacttcctctccttcgcgcatctcaccccgcccgtccaccttatcaggaggaaggaggcgagcggcgcttctcgggaaggcgtctacttcgaaatcgaggtgaaggtttgcaacgggaagcttctgcacgtagttgcttcacgaaagggtttctacttggcagggaagccacaaaacgcatatgaggcgttgatgaaagcttttgtggaccacaataagtttgggaatttgccatatgggttccgtgcaaacacgtggcttattcctccaatatatgttgatcccgccacaaagtgcccagcactgccagttgaggatgagaattggggtggaaatgggggtggctgtggtcgtgatggaagatatgatcgcagatgctggtcaaaagagttctctgttctgtctagaatgccatgcaaatctgacgaagaacgggtgatcagagaccggaaagcttttcttttacacaatctgtttgtagatacagcaatttttagagctgcatcaacaatacggcgactcattgatcagtctatgaactcaattggttcccgtggtactactcatggttcaaacgtatttgaggaacatatcggcgacatgaatataactgtgaagaaagatgaggctgatgctagttcaaaggtggacgacaaggttgatggtgttgccttctgtaaaacaggtgctatggatattgcacaaaagaatcttctgaaaggtttaacttctgatgaaaatgttcttattaaggattcttccacactcggagtggtgattgtcaagcattgtggatatacagcaactgtgaaggtttctggacgtgcaaaggacagtaatgatgttaaacaaacacatgacgtctctgataattttgatggaatgctgaacattgatgtgcctgaccatccagatggaggttctaatgccttgaatgtcaacagtctaaggataccactccaaagtgttacgcatccagaaactgttgttggtaagcagaaccctagcccaaagtctcatgcttataaccccgcaaggaaactggcatgcaaaatacttgaggacagcttggtaaagcttgatagcatgcctagcataaattctagaattatcagatgggaacttgggtcctcctggctacaacagttacagaaaaaggattctccggcatctgagaatgttaagcggaatgcaacaaaggctgataaagaatcagctgtcaaaggtcttggaaagcattttgaacaattaaagaaaattaaaaagaaagaatgcaacattgacggttccagttctgagaaggaagaatgtaacagtaactgctcgtcaatgaatggtatgcaagtatcagataagatatctgttgatgaaacgaataagggagctgattccctcgaagagctcacaaagatggcccataatttctatgatgagactgcactcccaaagctggtggctgatttcgcgtcccttgagctttctcctgtggatggaagaaccatgaccgatttcatgcatacaaggggacttaatatgtcctctttaggtcgtgtggtagagctagcagagaagctcccacacatccagtctatatgcattcatgaaatggttattagatcctttaagcacatcgtccgagctgttattgctgctgttgatgacatgcaaaatatttctgcagctatagctgaaactctaaacatattacttggatctcccagacttgaaaatggtgctgacacagatgcccatattgacaataatttgcgtttgaaatgggttggactggagctagttgcaagagattatgatatgaatagccctaacccatttgacaaatctgacattgtcagcattgttcctgtatgcaagcatgtggtctactcatctattgatggtcgaaacttactggaatcatcgaagatggcattggataaaggaaaattagatgatgctgtgagctatggaacaaaggcattgtccaaaattatagctgtttgtggtccataccatcgactgacggctaatgcatacagccttcttgctgtggtgctttatcatactggagattttaatcaggcaactgtatatcaacagaaggcacttgatatcaatgaaagggagcttggtcttgatcatccggaaactatgaagagttatggggatttatctgtcttctattatcgccttcaacacattgaaatggctctaaagtatgtcaaccgtgcactatatctgcttcagttctcgtgtgggctttcacacccgaattcagctgccacctacataaatgtggctatgatggaagaaggcatgggaaatgttcatgttgctcttcgatacttgcatgaagccctgaagtgcaacaagaggttgctaggagctgatcacatccagactgctgcaagctaccatgccatagccatagccctttcaatgatggacgcgtactccctaagcgtgcaacatgaacaaacaaccttgcagatacttcaggagaaactagggcaagatgacctccgaactcaggatgctgctgcatggctagaatattttgagtcaaaagcattagaacaacaagaggcggctcgaagaggcatgccaaaacctgattcatctattgcaagtaaaggacatcttagatcttcttgacttcataagcccagaccaggaaagaaaagaaagggatatgcaaaggaaatgcaggcgtgcaaagaataatatcagagctcatcatggtgaatcagttgaagagaaggagaattttcagcttgtttcaggatctcctcttgaagcaagcaaagacagttttcaagaagaaaaactggatgtgcatcctcctgctgtattagaagaaaattatgctgcccatgatgagcataagcaatgtgatgttttatcaccagaagaatattctgatgaagggtggcaagcagctagtatgagaggaagatctgcaaatgtaaggaagaaaagcagtcgcaggaaaccggctcttatgaaattaatggttgatcattttgaaggtagtcatacaggttctgtgtataggactggtttacaacctcaaacaaaaggagacaaagaagattctgtaagtgctcctagccagctttcatttggaagttttttgaaaaccgacaagttgaatggggattccagcattgctgaagataagacgtgcaatggtagcgctaaccaagaacaacggacaaagctaacaggaattaacaggccaaccagtatcgcttccaaattcatatcatacaaagatgtggctgtttcgccccctggcacagtattgaaacccattttggagaagaaggaagcaaaggagaaagatagtggacgtgatattgacctagcactgtcatccgaggaagaagataaaaagtttacagaaaaagagaaagaaaagccaagtgaggacagtagcaaagagattctttcaattcagcgagatttagagagtcatgcagaaatacctcctgacagcaacagtgatgaaggcccatctgcagctagtaaagcgtctggaagcaaactgtcagcttcagctcctccattcaatccaggatcagtgttatcaatgtcccagccatacagcacggtggcagtatatgatgccagtgctatccttcaggcaataccaagtcaagcaatggagattctcccttctgccattgacactagagtgcctcgtggtcctcggtccaccttgtactatcgtactgggcattccttccaaaggaaacaaggttacacgcacagccagagcactattgtaaggggtagctactcccccacaaccatgaatccacatgctgctgaatttgtgcctggaaaaacttcgcaacaatctgatgtggctgacagagaacccagtcctgctaatcctgtggccaattctgatctggatgttgtatcgcagaccacagatgaagcgagggccgaaacgcctgccacagaaaaggcaggtcaggttgagaaagtcgtttcaggtaaaggaaaggaaaacagggggaaagacatcgtgagaaactcatacaaaacagaacttgcaaggcaaattttactcagtttcattgtgaagtcggtgcacgacagtttaggtccctcccgggctgaaccagagaggaagccaagtggatcagatgaagctagtaatgaacagaccagcgtcttaggcaagaacgcttctggttctggtcgcaaagatccagataaacaagagaaagcgacggaggttactaagggcctgaaggatacagagggattcactgtcgtttcaaaacgccgaaggcgtccccagccgttcatgaaccccataaatggcctatattctcagccgtctatttgcacctctgtcagttaaggtcattgcgttttcgaagacctgcaatattttgagagatggacctttgccttcgcctttgcctttgcttagaggattggtagcagagattttccctatccaagtgagctgtgagcagcgagcatttagttaaactgtacaaaaggtttccgggataccctttttgtaataaaagaaactgatgtattccgcagtagctgtagcgctggatataatgttcctttgtatgttatatatgacagaatcataggaaatagcagatgttaagttaatccgatattcagtggagcgcccttgtgctttatgatgttcctcatgttgtgagccccagttaatcattgcaatttgcaaatatgctgccagactgccagagcagaagaaactgaatcttctaggcgccaagagttcgaaatcttattcatggaggcatgtctttggataccttgccagcgggtgagcagcacttcactgagaagcaattgcagctgcagacccaccagatcaccagaccaccggggcccggacaggcgtgaactggtcgatcggcagttttaagctgttgcagcttatactgtaggagtgtagtagctacgtaggagcagcctgtactgtagctgctgagaccacacaaaaactgaatcagttacaaacttgaaactttcattaattgctgtgaaccaatatccgatcgagattgttgtgaatacgctacatatacatattttatgacttattttgcg

SEQ ID NO: 15257 - DNA, 6123 bp, Zea Mays
ctcacatcctatatcctctccagtctccaccctcgcggcgcgccccctcaagttctcattccttctcctcgctcgctcgcctcctcctctcctctcctctcctctgcggtgggaactgcggcggcggcttaaaccctcgcgccggcggcttccggcgctccatcagcgccgcgctcgaaggccgcccgtcgctggtcgagcgcgcgaggcagcaggcaccggctaggcaggcagccaataatggcccccaaggccgggcgtggcaagggcaggggcggcggcggcagaggcggcgacaggaggaagaaggaagagaaagtggtgcccagcgtggtggacgtcacggtcgtcaccccctacgaatcccaggtgacactcaaggggatatcgacggaccgtgtgctggacgtgcggaggctgctggggtcgaacgtggaaacgtgccacctgacaaactattcactctcccatgtggcgcgcgggcaccggctggaggacggcgtggaggtcgtggcgctcaagccctgcgctctccggatcgtcgaagaggagtacgcgacggcggagcaggcggaggcgcacgtgcgccgcctgctggacatcctcgcctgcaccaccgcgttcgccaagccccgggacggcgccgccaagcacaggccgtccaagcacggccgtcccgcgtcgcccggggcccatggcgccgtcagcggcgaggccgccgcgccgccgccgatatcggaggcgcacgacatggccgccatccggccgccgccgaagctgggggagttctacgacttcctctccttcgcgcatctcaccccgcccgtccaccttatcaggaggaaggaggcgagcggcgcttctcgggaaggcgtctacttcgaaatcgagtggctaatccaatttgatttgcgctttagtgttaaatcacaaccgtgcaatagccaatctactaggcgtgtaggtatgagcatacgcctaatgaaggagttcatctgtgcccaggtgaaggtttgcaacgggaagcttctgcacgtagttgcttcacgaaagggtttctacttggcagggaagccacaaaacgcatatgaggcgttgatgaaagcttttgtggaccacaataagtttgggaatttgccatatgggttccgtgcaaacacgtggcttattcctccaatatatgttgatcccgccacaaagtgcccagcactgccagttgaggatgagaattggggtggaaatgggggtggctgtggtcgtgatggaagatatgatcgcagatgctggtcaaaagagttctctgttctgtctagaatgccatgcaaatctgacgaagaacgggtgatcagagaccggaaagcttttcttttacacaatctgtttgtagatacagcaatttttagagctgcatcaacaatacggcgactcattgatcagtctatgaactcaattggttcccgtggtactactcatggttcaaacgtatttgaggaacatatcggcgacatgaatataactgtgaagaaagatgaggctgatgctagttcaaaggtggacgacaaggttgatggtgttgccttctgtaaaacaggtgctatggatattgcacaaaagaatcttctgaaaggtttaacttctgatgaaaatgttcttattaaggattcttccacactcggagtggtgattgtcaagcattgtggatatacagcaactgtgaaggtttctggacgtgcaaaggacagtaatgatgttaaacaaacacatgacgtctctgataattttgatggaatgctgaacattgatgtgcctgaccatccagatggaggttctaatgccttgaatgtcaacagtctaaggataccactccaaagtgttacgcatccagaaactgttgttggtaagcagaaccctagcccaaagtctcatgcttataaccccgcaaggaaactggcatgcaaaatacttgaggacagcttggtaaagcttgatagcatgcctagcataaattctagaattatcagatgggaacttgggtcctcctggctacaacagttacagaaaaaggattctccggcatctgagaatgttaagcggaatgcaacaaaggctgataaagaatcagctgtcaaaggtcttggaaagcattttgaacaattaaagaaaattaaaaagaaagaatgcaacattgacggttccagttctgagaaggaagaatgtaacagtaactgctcgtcaatgaatgaggatgctttctttcgcttgaagagtttgggagctggccttcatgaaaagtccctcgaagagctcacaaagatggcccataatttctatgatgagactgcactcccaaagctggtggctgatttcgcgtcccttgagctttctcctgtggatggaagaaccatgaccgatttcatgcatacaaggggacttaatatgtcctctttaggtcgtgtggtagagctagcagagaagctcccacacatccagtctatatgcattcatgaaatggttattagatcctttaagcacatcgtccgagctgttattgctgctgttgatgacatgcaaaatatttctgcagctatagctgaaactctaaacatattacttggatctcccagacttgaaaatggtgctgacacagatgcccatattgacaataatttgcgtttgaaatgggtagagagcttcctttcaaaaaagattctgctggaaactgaaagatgaatttgcacacttacggaaatttatcattctgagaggtctctgcagtaaggttggactggagctagttgcaagagattatgatatgaatagccctaacccatttgacaaatctgacattgtcagcattgttcctgtatgcaagcatgtggtctactcatctattgatggtcgaaacttactggaatcatcgaagatggcattggataaaggaaaattagatgatgctgtgagctatggaacaaaggcattgtccaaaattatagctgtttgtggtccataccatcgactgacggctaatgcatacagccttcttgctgtggtgctttatcatactggagattttaatcaggcaactgtatatcaacagaaggcacttgatatcaatgaaagggagcttggtcttgatcatccggaaactatgaagagttatggggatttatctgtcttctattatcgccttcaacacattgaaatggctctaaagtatgtcaaccgtgcactatatctgcttcagttctcgtgtgggctttcacacccgaattcagctgccacctacataaatgtggctatgatggaagaaggcatgggaaatgttcatgttgctcttcgatacttgcatgaagccctgaagtgcaacaagaggttgctaggagctgatcacatccagactgctgcaagctaccatgccatagccatagccctttcaatgatggacgcgtactccctaagcgtgcaacatgaacaaacaaccttgcagatacttcaggagaaactagggcaagatgacctccgaactcaggatgctgctgcatggctagaatattttgagtcaaaagcattagaacaacaagaggcggctcgaagaggcatgccaaaacctgattcatctattgcaagtaaaggacatcttagtgtatcagatcttcttgacttcataagcccagaccaggaaagaaaagaaagggatatgcaaaggaaatgcaggcgtgcaaagaataatatcagagctcatcatggtgaatcagttgaagagaaggagaattttcagcttgtttcaggatctcctcttgaagcaagcaaagacagttttcaagaagaaaaactggatgtgcatcctcctgctgtattagaagaaaattatgctgcccatgatgagcataagcaatgtgatgttttatcaccagaagaatattctgatgaagggtggcaagcagctagtatgagaggaagatctgcaaatgtaaggaagaaaagcagtcgcaggaaaccggctcttatgaaattaatggttgatcattttgaaggtagtcatacaggttctgtgtataggactggtttacaacctcaaacaaaaggagacaaagaagattctgtaagtgctcctagccagctttcatttggaagttttttgaaaaccgacaagttgaatggggattccagcattgctgaagataagacgtgcaatggtagcgctaaccaagaacaacggacaaagctaacaggaattaacaggccaaccagtatcgcttccaaattcatatcatacaaagatgtggctgtttcgccccctggcacagtattgaaacccattttggagaagaaggaagcaaaggagaaagatagtggacgtgatattgacctagcactgtcatccgaggaagaagataaaaagtttacagaaaaagagaaagaaaagccaagtgaggacagtagcaaagagattctttcaattcagcgagatttagagagtcatgcagaaatacctcctgacagcaacagtgatgaaggcccatctgcagctagtaaagcgtctggaagcaaactgtcagcttcagctcctccattcaatccaggatcagtgttatcaatgtcccagccatacagcacggtggcagtatatgatgccagtgctatccttcaggcaataccaagtcaagcaatggagattctcccttctgccattgacactagagtgcctcgtggtcctcggtccaccttgtactatcgtactgggcattccttccaaaggaaacaaggttacacgcacagccagagcactattgtaaggggtagctactcccccacaaccatgaatccacatgctgctgaatttgtgcctggaaaaacttcgcaacaatctgatgtggctgacagagaacccagtcctgctaatcctgtggccaattctgatctggatgttgtatcgcagaccacagatgaagcgagggccgaaacgcctgccacagaaaaggcaggtcaggttgagaaagtcgtttcaggtaaaggaaaggaaaacagggggaaagacatcgtgagaaactcatacaaaacagaacttgcaaggcaaattttactcagtttcattgtgaagtcggtgcacgacagtttaggtccctcccgggctgaaccagagaggaagccaagtggatcagatgaagctagtaatgaacagaccagcgtcttaggcaagaacgcttctggttctggtcgcaaagatccagataaacaagagaaagcgacggaggttactaagggcctgaaggatacagagggattcactgtcgtttcaaaacgccgaaggcgtccccagccgttcatgaaccccataaatggcctatattctcagccgtctatttgcacctctgtcagttaaggtcattgcgttttcgaagacctgcaatattttgagagatggacctttgccttcgcctttgcctttgcttagaggattggtagcagagattttccctatccaagtgagctgtgagcagcgagcatttagttaaactgtacaaaaggtttccgggataccctttttgtaataaaagaaactgatgtattccgcagtagctgtagcgctggatataatgttcctttgtatgttatatatgacagaatcataggaaatagcagatgttaagttaatccgatattcagtggagcgcccttgtgctttatgatgttcctcatgttgtgagccccagttaatcattgcaatttgcaaatatgctgccagactgccagagcagaagaaactgaatcttctaggcgccaagagttcgaaatcttattcatggaggcatgtctttggataccttgccagcgggtgagcagcacttcactgagaagcaattgcagctgcagacccaccagatcaccagaccaccggggcccggacaggcgtgaactggtcgatcggcagttttaagctgttgcagcttatactgtaggagtgtagtagctacgtaggagcagcctgtactgtagctgctgagaccacacaaaaactgaatcagttacaaacttgaaactttcattaattgctgtgaaccaatatccgatcgagattgttgtgaatacgctacatatacatattttatgacttattttgcg

SEQ ID NO: 15258 - DNA, 6066 bp, Zea Mays
ctcacatcctatatcctctccagtctccaccctcgcggcgcgccccctcaagttctcattccttctcctcgctcgctcgcctcctcctctcctctcctctcctctgcggtgggaactgcggcggcggcttaaaccctcgcgccggcggcttccggcgctccatcagcgccgcgctcgaaggccgcccgtcgctggtcgagcgcgcgaggcagcaggcaccggctaggcaggcagccaataatggcccccaaggccgggcgtggcaagggcaggggcggcggcggcagaggcggcgacaggaggaagaaggaagagaaagtggtgcccagcgtggtggacgtcacggtcgtcaccccctacgaatcccaggtgacactcaaggggatatcgacggaccgtgtgctggacgtgcggaggctgctggggtcgaacgtggaaacgtgccacctgacaaactattcactctcccatgtggcgcgcgggcaccggctggaggacggcgtggaggtcgtggcgctcaagccctgcgctctccggatcgtcgaagaggagtacgcgacggcggagcaggcggaggcgcacgtgcgccgcctgctggacatcctcgcctgcaccaccgcgttcgccaagccccgggacggcgccgccaagcacaggccgtccaagcacggccgtcccgcgtcgcccggggcccatggcgccgtcagcggcgaggccgccgcgccgccgccgatatcggaggcgcacgacatggccgccatccggccgccgccgaagctgggggagttctacgacttcctctccttcgcgcatctcaccccgcccgtccaccttatcaggaggaaggaggcgagcggcgcttctcgggaaggcgtctacttcgaaatcgaggtgaaggtttgcaacgggaagcttctgcacgtagttgcttcacgaaagggtttctacttggcagggaagccacaaaacgtaagccactccctggtggacctgctgcaacagctcagcaacgcgtttgctaacgcatatgaggcgttgatgaaagcttttgtggaccacaataagtttgggaatttgccatatgggttccgtgcaaacacgtggcttattcctccaatatatgttgatcccgccacaaagtgcccagcactgccagttgaggatgagaattggggtggaaatgggggtggctgtggtcgtgatggaagatatgatcgcagatgctggtcaaaagagttctctgttctgtctagaatgccatgcaaatctgacgaagaacgggtgatcagagaccggaaagcttttcttttacacaatctgtttgtagatacagcaatttttagagctgcatcaacaatacggcgactcattgatcagtctatgaactcaattggttcccgtggtactactcatggttcaaacgtatttgaggaacatatcggcgacatgaatataactgtgaagaaagatgaggctgatgctagttcaaaggtggacgacaaggttgatggtgttgccttctgtaaaacaggtgctatggatattgcacaaaagaatcttctgaaaggtttaacttctgatgaaaatgttcttattaaggattcttccacactcggagtggtgattgtcaagcattgtggatatacagcaactgtgaaggtttctggacgtgcaaaggacagtaatgatgttaaacaaacacatgacgtctctgataattttgatggaatgctgaacattgatgtgcctgaccatccagatggaggttctaatgccttgaatgtcaacagtctaaggataccactccaaagtgttacgcatccagaaactgttgttggtaagcagaaccctagcccaaagtctcatgcttataaccccgcaaggaaactggcatgcaaaatacttgaggacagcttggtaaagcttgatagcatgcctagcataaattctagaattatcagatgggaacttgggtcctcctggctacaacagttacagaaaaaggattctccggcatctgagaatgttaagcggaatgcaacaaaggctgataaagaatcagctgtcaaaggtcttggaaagcattttgaacaattaaagaaaattaaaaagaaagaatgcaacattgacggttccagttctgagaaggaagaatgtaacagtaactgctcgtcaatgaatggtatgcaagtatcagataagatatctgttgatgaaacgaataagggagctgattccctcgaagagctcacaaagatggcccataatttctatgatgagactgcactcccaaagctggtggctgatttcgcgtcccttgagctttctcctgtggatggaagaaccatgaccgatttcatgcatacaaggggacttaatatgtcctctttaggtcgtgtggtagagctagcagagaagctcccacacatccagtctatatgcattcatgaaatggttattagatcctttaagcacatcgtccgagctgttattgctgctgttgatgacatgcaaaatatttctgcagctatagctgaaactctaaacatattacttggatctcccagacttgaaaatggtgctgacacagatgcccatattgacaataatttgcgtttgaaatgggtagagagcttcctttcaaaaaagattctgctggaaactgaaagatgaatttgcacacttacggaaatttatcattctgagaggtctctgcagtaaggttggactggagctagttgcaagagattatgatatgaatagccctaacccatttgacaaatctgacattgtcagcattgttcctgtatgcaagcatgtggtctactcatctattgatggtcgaaacttactggaatcatcgaagatggcattggataaaggaaaattagatgatgctgtgagctatggaacaaaggcattgtccaaaattatagctgtttgtggtccataccatcgactgacggctaatgcatacagccttcttgctgtggtgctttatcatactggagattttaatcaggcaactgtatatcaacagaaggcacttgatatcaatgaaagggagcttggtcttgatcatccggaaactatgaagagttatggggatttatctgtcttctattatcgccttcaacacattgaaatggctctaaagtatgtcaaccgtgcactatatctgcttcagttctcgtgtgggctttcacacccgaattcagctgccacctacataaatgtggctatgatggaagaaggcatgggaaatgttcatgttgctcttcgatacttgcatgaagccctgaagtgcaacaagaggttgctaggagctgatcacatccagactgctgcaagctaccatgccatagccatagccctttcaatgatggacgcgtactccctaagcgtgcaacatgaacaaacaaccttgcagatacttcaggagaaactagggcaagatgacctccgaactcaggatgctgctgcatggctagaatattttgagtcaaaagcattagaacaacaagaggcggctcgaagaggcatgccaaaacctgattcatctattgcaagtaaaggacatcttagtgtatcagatcttcttgacttcataagcccagaccaggaaagaaaagaaagggatatgcaaaggaaatgcaggcgtgcaaagaataatatcagagctcatcatggtgaatcagttgaagagaaggagaattttcagcttgtttcaggatctcctcttgaagcaagcaaagacagttttcaagaagaaaaactggatgtgcatcctcctgctgtattagaagaaaattatgctgcccatgatgagcataagcaatgtgatgttttatcaccagaagaatattctgatgaagggtggcaagcagctagtatgagaggaagatctgcaaatgtaaggaagaaaagcagtcgcaggaaaccggctcttatgaaattaatggttgatcattttgaaggtagtcatacaggttctgtgtataggactggtttacaacctcaaacaaaaggagacaaagaagattctgtaagtgctcctagccagctttcatttggaagttttttgaaaaccgacaagttgaatggggattccagcattgctgaagataagacgtgcaatggtagcgctaaccaagaacaacggacaaagctaacaggaattaacaggccaaccagtatcgcttccaaattcatatcatacaaagatgtggctgtttcgccccctggcacagtattgaaacccattttggagaagaaggaagcaaaggagaaagatagtggacgtgatattgacctagcactgtcatccgaggaagaagataaaaagtttacagaaaaagagaaagaaaagccaagtgaggacagtagcaaagagattctttcaattcagcgagatttagagagtcatgcagaaatacctcctgacagcaacagtgatgaaggcccatctgcagctagtaaagcgtctggaagcaaactgtcagcttcagctcctccattcaatccaggatcagtgttatcaatgtcccagccatacagcacggtggcagtatatgatgccagtgctatccttcaggcaataccaagtcaagcaatggagattctcccttctgccattgacactagagtgcctcgtggtcctcggtccaccttgtactatcgtactgggcattccttccaaaggaaacaaggttacacgcacagccagagcactattgtaaggggtagctactcccccacaaccatgaatccacatgctgctgaatttgtgcctggaaaaacttcgcaacaatctgatgtggctgacagagaacccagtcctgctaatcctgtggccaattctgatctggatgttgtatcgcagaccacagatgaagcgagggccgaaacgcctgccacagaaaaggcaggtcaggttgagaaagtcgtttcaggtaaaggaaaggaaaacagggggaaagacatcgtgagaaactcatacaaaacagaacttgcaaggcaaattttactcagtttcattgtgaagtcggtgcacgacagtttaggtccctcccgggctgaaccagagaggaagccaagtggatcagatgaagctagtaatgaacagaccagcgtcttaggcaagaacgcttctggttctggtcgcaaagatccagataaacaagagaaagcgacggaggttactaagggcctgaaggatacagagggattcactgtcgtttcaaaacgccgaaggcgtccccagccgttcatgaaccccataaatggcctatattctcagccgtctatttgcacctctgtcagttaaggtcattgcgttttcgaagacctgcaatattttgagagatggacctttgccttcgcctttgcctttgcttagaggattggtagcagagattttccctatccaagtgagctgtgagcagcgagcatttagttaaactgtacaaaaggtttccgggataccctttttgtaataaaagaaactgatgtattccgcagtagctgtagcgctggatataatgttcctttgtatgttatatatgacagaatcataggaaatagcagatgttaagttaatccgatattcagtggagcgcccttgtgctttatgatgttcctcatgttgtgagccccagttaatcattgcaatttgcaaatatgctgccagactgccagagcagaagaaactgaatcttctaggcgccaagagttcgaaatcttattcatggaggcatgtctttggataccttgccagcgggtgagcagcacttcactgagaagcaattgcagctgcagacccaccagatcaccagaccaccggggcccggacaggcgtgaactggtcgatcggcagttttaagctgttgcagcttatactgtaggagtgtagtagctacgtaggagcagcctgtactgtagctgctgagaccacacaaaaactgaatcagttacaaacttgaaactttcattaattgctgtgaaccaatatccgatcgagattgttgtgaatacgctacatatacatattttatgacttattttgcg

SEQ ID NO: 15259 - DNA, 6081 bp, Zea Mays
ctcacatcctatatcctctccagtctccaccctcgcggcgcgccccctcaagttctcattccttctcctcgctcgctcgcctcctcctctcctctcctctcctctgcggtgggaactgcggcggcggcttaaaccctcgcgccggcggcttccggcgctccatcagcgccgcgctcgaaggccgcccgtcgctggtcgagcgcgcgaggcagcaggcaccggctaggcaggcagccaataatggcccccaaggccgggcgtggcaagggcaggggcggcggcggcagaggcggcgacaggaggaagaaggaagagaaagtggtgcccagcgtggtggacgtcacggtcgtcaccccctacgaatcccaggtgacactcaaggggatatcgacggaccgtgtgctggacgtgcggaggctgctggggtcgaacgtggaaacgtgccacctgacaaactattcactctcccatgtggcgcgcgggcaccggctggaggacggcgtggaggtcgtggcgctcaagccctgcgctctccggatcgtcgaagaggagtacgcgacggcggagcaggcggaggcgcacgtgcgccgcctgctggacatcctcgcctgcaccaccgcgttcgccaagccccgggacggcgccgccaagcacaggccgtccaagcacggccgtcccgcgtcgcccggggcccatggcgccgtcagcggcgaggccgccgcgccgccgccgatatcggaggcgcacgacatggccgccatccggccgccgccgaagctgggggagttctacgacttcctctccttcgcgcatctcaccccgcccgtccaccttatcaggaggaaggaggcgagcggcgcttctcgggaaggcgtctacttcgaaatcgaggtgaaggtttgcaacgggaagcttctgcacgtagttgcttcacgaaagggtttctacttggcagggaagccacaaaacgcatatgaggcgttgatgaaagcttttgtggaccacaataagtttgggaatttgccatatgggttccgtgcaaacacgtggcttattcctccaatatatgttgatcccgccacaaagtgcccagcactgccagttgaggatgagaattggggtggaaatgggggtggctgtggtcgtgatggaagatatgatcgcagatgctggtcaaaagagttctctgttctgtctagaatgccatgcaaatctgacgaagaacgggtgatcagagaccggaaagcttttcttttacacaatctgtttgtagatacagcaatttttagagctgcatcaacaatacggcgactcattgatcagtctatgaactcaattggttcccgtggtactactcatggttcaaacgtatttgaggaacatatcggcgacatgaatataactgtgaagaaagatgaggctgatgctagttcaaaggtggacgacaaggttgatggtgttgccttctgtaaaacaggtgctatggatattgcacaaaagaatcttctgaaaggtttaacttctgatgaaaatgttcttattaaggattcttccacactcggagtggtgattgtcaagcattgtggatatacagcaactgtgaaggtttctggacgtgcaaaggacagtaatgatgttaaacaaacacatgacgtctctgataattttgatggaatgctgaacattgatgtgcctgaccatccagatggaggttctaatgccttgaatgtcaacagtctaaggataccactccaaagtgttacgcatccagaaactgttgttggtaagcagaaccctagcccaaagtctcatgcttataaccccgcaaggaaactggcatgcaaaatacttgaggacagcttggtaaagcttgatagcatgcctagcataaattctagaattatcagatgggaacttgggtcctcctggctacaacagttacagaaaaaggattctccggcatctgagaatgttaagcggaatgcaacaaaggctgataaagaatcagctgtcaaaggtcttggaaagcattttgaacaattaaagaaaattaaaaagaaagaatgcaacattgacggttccagttctgagaaggaagaatgtaacagtaactgctcgtcaatgaatggtatgcaagtatcagataagatatctgttgatgaaacgaataagggagctgatgtaagcaagttaatgtcagaggatgctttctttcgcttgaagagtttgggagctggccttcatgaaaagtccctcgaagagctcacaaagatggcccataatttctatgatgagactgcactcccaaagctggtggctgatttcgcgtcccttgagctttctcctgtggatggaagaaccatgaccgatttcatgcatacaaggggacttaatatgtcctctttaggtcgtgtggtagagctagcagagaagctcccacacatccagtctatatgcattcatgaaatggttattagatcctttaagcacatcgtccgagctgttattgctgctgttgatgacatgcaaaatatttctgcagctatagctgaaactctaaacatattacttggatctcccagacttgaaaatggtgctgacacagatgcccatattgacaataatttgcgtttgaaatgggtagagagcttcctttcaaaaaagattctgctggaaactgaaagatgaatttgcacacttacggaaatttatcattctgagaggtctctgcagtaaggttggactggagctagttgcaagagattatgatatgaatagccctaacccatttgacaaatctgacattgtcagcattgttcctgtatgcaagcatgtggtctactcatctattgatggtcgaaacttactggaatcatcgaagatggcattggataaaggaaaattagatgatgctgtgagctatggaacaaaggcattgtccaaaattatagctgtttgtggtccataccatcgactgacggctaatgcatacagccttcttgctgtggtgctttatcatactggagattttaatcaggcaactgtatatcaacagaaggcacttgatatcaatgaaagggagcttggtcttgatcatccggaaactatgaagagttatggggatttatctgtcttctattatcgccttcaacacattgaaatggctctaaagtatgtcaaccgtgcactatatctgcttcagttctcgtgtgggctttcacacccgaattcagctgccacctacataaatgtggctatgatggaagaaggcatgggaaatgttcatgttgctcttcgatacttgcatgaagccctgaagtgcaacaagaggttgctaggagctgatcacatccagactgctgcaagctaccatgccatagccatagccctttcaatgatggacgcgtactccctaagcgtgcaacatgaacaaacaaccttgcagatacttcaggagaaactagggcaagatgacctccgaactcaggatgctgctgcatggctagaatattttgagtcaaaagcattagaacaacaagaggcggctcgaagaggcatgccaaaacctgattcatctattgcaagtaaaggacatcttagtgtatcagatcttcttgacttcataagcccagaccaggaaagaaaagaaagggatatgcaaaggaaatgcaggcgtgcaaagaataatatcagagctcatcatggtgaatcagttgaagagaaggagaattttcagcttgtttcaggatctcctcttgaagcaagcaaagacagttttcaagaagaaaaactggatgtgcatcctcctgctgtattagaagaaaattatgctgcccatgatgagcataagcaatgtgatgttttatcaccagaagaatattctgatgaagggtggcaagcagctagtatgagaggaagatctgcaaatgtaaggaagaaaagcagtcgcaggaaaccggctcttatgaaattaatggttgatcattttgaaggtagtcatacaggttctgtgtataggactggtttacaacctcaaacaaaaggagacaaagaagattctgtaagtgctcctagccagctttcatttggaagttttttgaaaaccgacaagttgaatggggattccagcattgctgaagataagacgtgcaatggtagcgctaaccaagaacaacggacaaagctaacaggaattaacaggccaaccagtatcgcttccaaattcatatcatacaaagatgtggctgtttcgccccctggcacagtattgaaacccattttggagaagaaggaagcaaaggagaaagatagtggacgtgatattgacctagcactgtcatccgaggaagaagataaaaagtttacagaaaaagagaaagaaaagccaagtgaggacagtagcaaagagattctttcaattcagcgagatttagagagtcatgcagaaatacctcctgacagcaacagtgatgaaggcccatctgcagctagtaaagcgtctggaagcaaactgtcagcttcagctcctccattcaatccaggatcagtgttatcaatgtcccagccatacagcacggtggcagtatatgatgccagtgctatccttcaggcaataccaagtcaagcaatggagattctcccttctgccattgacactagagtgcctcgtggtcctcggtccaccttgtactatcgtactgggcattccttccaaaggaaacaaggttacacgcacagccagagcactattgtaaggggtagctactcccccacaaccatgaatccacatgctgctgaatttgtgcctggaaaaacttcgcaacaatctgatgtggctgacagagaacccagtcctgctaatcctgtggccaattctgatctggatgttgtatcgcagaccacagatgaagcgagggccgaaacgcctgccacagaaaaggcaggtcaggttgagaaagtcgtttcaggtaaaggaaaggaaaacagggggaaagacatcgtgagaaactcatacaaaacagaacttgcaaggcaaattttactcagtttcattgtgaagtcggtgcacgacagtttaggtccctcccgggctgaaccagagaggaagccaagtggatcagatgaagctagtaatgaacagaccagcgtcttaggcaagaacgcttctggttctggtcgcaaagatccagataaacaagagaaagcgacggaggttactaagggcctgaaggatacagagggattcactgtcgtttcaaaacgccgaaggcgtccccagccgttcatgaaccccataaatggcctatattctcagccgtctatttgcacctctgtcagttaaggtcattgcgttttcgaagacctgcaatattttgagagatggacctttgccttcgcctttgcctttgcttagaggattggtagcagagattttccctatccaagtgagctgtgagcagcgagcatttagttaaactgtacaaaaggtttccgggataccctttttgtaataaaagaaactgatgtattccgcagtagctgtagcgctggatataatgttcctttgtatgttatatatgacagaatcataggaaatagcagatgttaagttaatccgatattcagtggagcgcccttgtgctttatgatgttcctcatgttgtgagccccagttaatcattgcaatttgcaaatatgctgccagactgccagagcagaagaaactgaatcttctaggcgccaagagttcgaaatcttattcatggaggcatgtctttggataccttgccagcgggtgagcagcacttcactgagaagcaattgcagctgcagacccaccagatcaccagaccaccggggcccggacaggcgtgaactggtcgatcggcagttttaagctgttgcagcttatactgtaggagtgtagtagctacgtaggagcagcctgtactgtagctgctgagaccacacaaaaactgaatcagttacaaacttgaaactttcattaattgctgtgaaccaatatccgatcgagattgttgtgaatacgctacatatacatattttatgacttattttgcg

SEQ ID NO: 15260 - DNA, 6177 bp, Zea Mays
ctcacatcctatatcctctccagtctccaccctcgcggcgcgccccctcaagttctcattccttctcctcgctcgctcgcctcctcctctcctctcctctcctctgcggtgggaactgcggcggcggcttaaaccctcgcgccggcggcttccggcgctccatcagcgccgcgctcgaaggccgcccgtcgctggtcgagcgcgcgaggcagcaggcaccggctaggcaggcagccaataatggcccccaaggccgggcgtggcaagggcaggggcggcggcggcagaggcggcgacaggaggaagaaggaagagaaagtggtgcccagcgtggtggacgtcacggtcgtcaccccctacgaatcccaggtgacactcaaggggatatcgacggaccgtgtgctggacgtgcggaggctgctggggtcgaacgtggaaacgtgccacctgacaaactattcactctcccatgtggcgcgcgggcaccggctggaggacggcgtggaggtcgtggcgctcaagccctgcgctctccggatcgtcgaagaggagtacgcgacggcggagcaggcggaggcgcacgtgcgccgcctgctggacatcctcgcctgcaccaccgcgttcgccaagccccgggacggcgccgccaagcacaggccgtccaagcacggccgtcccgcgtcgcccggggcccatggcgccgtcagcggcgaggccgccgcgccgccgccgatatcggaggcgcacgacatggccgccatccggccgccgccgaagctgggggagttctacgacttcctctccttcgcgcatctcaccccgcccgtccaccttatcaggaggaaggaggcgagcggcgcttctcgggaaggcgtctacttcgaaatcgagtggctaatccaatttgatttgcgctttagtgttaaatcacaaccgtgcaatagccaatctactaggcgtgtaggtatgagcatacgcctaatgaaggagttcatctgtgcccaggtgaaggtttgcaacgggaagcttctgcacgtagttgcttcacgaaagggtttctacttggcagggaagccacaaaacgtaagccactccctggtggacctgctgcaacagctcagcaacgcgtttgctaacgcatatgaggcgttgatgaaagcttttgtggaccacaataagtttgggaatttgccatatgggttccgtgcaaacacgtggcttattcctccaatatatgttgatcccgccacaaagtgcccagcactgccagttgaggatgagaattggggtggaaatgggggtggctgtggtcgtgatggaagatatgatcgcagatgctggtcaaaagagttctctgttctgtctagaatgccatgcaaatctgacgaagaacgggtgatcagagaccggaaagcttttcttttacacaatctgtttgtagatacagcaatttttagagctgcatcaacaatacggcgactcattgatcagtctatgaactcaattggttcccgtggtactactcatggttcaaacgtatttgaggaacatatcggcgacatgaatataactgtgaagaaagatgaggctgatgctagttcaaaggtggacgacaaggttgatggtgttgccttctgtaaaacaggtgctatggatattgcacaaaagaatcttctgaaaggtttaacttctgatgaaaatgttcttattaaggattcttccacactcggagtggtgattgtcaagcattgtggatatacagcaactgtgaaggtttctggacgtgcaaaggacagtaatgatgttaaacaaacacatgacgtctctgataattttgatggaatgctgaacattgatgtgcctgaccatccagatggaggttctaatgccttgaatgtcaacagtctaaggataccactccaaagtgttacgcatccagaaactgttgttggtaagcagaaccctagcccaaagtctcatgcttataaccccgcaaggaaactggcatgcaaaatacttgaggacagcttggtaaagcttgatagcatgcctagcataaattctagaattatcagatgggaacttgggtcctcctggctacaacagttacagaaaaaggattctccggcatctgagaatgttaagcggaatgcaacaaaggctgataaagaatcagctgtcaaaggtcttggaaagcattttgaacaattaaagaaaattaaaaagaaagaatgcaacattgacggttccagttctgagaaggaagaatgtaacagtaactgctcgtcaatgaatgaggatgctttctttcgcttgaagagtttgggagctggccttcatgaaaagtccctcgaagagctcacaaagatggcccataatttctatgatgagactgcactcccaaagctggtggctgatttcgcgtcccttgagctttctcctgtggatggaagaaccatgaccgatttcatgcatacaaggggacttaatatgtcctctttaggtcgtgtggtagagctagcagagaagctcccacacatccagtctatatgcattcatgaaatggttattagatcctttaagcacatcgtccgagctgttattgctgctgttgatgacatgcaaaatatttctgcagctatagctgaaactctaaacatattacttggatctcccagacttgaaaatggtgctgacacagatgcccatattgacaataatttgcgtttgaaatgggtagagagcttcctttcaaaaaagattctgctggaaactgaaagatgaatttgcacacttacggaaatttatcattctgagaggtctctgcagtaaggttggactggagctagttgcaagagattatgatatgaatagccctaacccatttgacaaatctgacattgtcagcattgttcctgtatgcaagcatgtggtctactcatctattgatggtcgaaacttactggaatcatcgaagatggcattggataaaggaaaattagatgatgctgtgagctatggaacaaaggcattgtccaaaattatagctgtttgtggtccataccatcgactgacggctaatgcatacagccttcttgctgtggtgctttatcatactggagattttaatcaggcaactgtatatcaacagaaggcacttgatatcaatgaaagggagcttggtcttgatcatccggaaactatgaagagttatggggatttatctgtcttctattatcgccttcaacacattgaaatggctctaaagtatgtcaaccgtgcactatatctgcttcagttctcgtgtgggctttcacacccgaattcagctgccacctacataaatgtggctatgatggaagaaggcatgggaaatgttcatgttgctcttcgatacttgcatgaagccctgaagtgcaacaagaggttgctaggagctgatcacatccagactgctgcaagctaccatgccatagccatagccctttcaatgatggacgcgtactccctaagcgtgcaacatgaacaaacaaccttgcagatacttcaggagaaactagggcaagatgacctccgaactcaggatgctgctgcatggctagaatattttgagtcaaaagcattagaacaacaagaggcggctcgaagaggcatgccaaaacctgattcatctattgcaagtaaaggacatcttagtgtatcagatcttcttgacttcataagcccagaccaggaaagaaaagaaagggatatgcaaaggaaatgcaggcgtgcaaagaataatatcagagctcatcatggtgaatcagttgaagagaaggagaattttcagcttgtttcaggatctcctcttgaagcaagcaaagacagttttcaagaagaaaaactggatgtgcatcctcctgctgtattagaagaaaattatgctgcccatgatgagcataagcaatgtgatgttttatcaccagaagaatattctgatgaagggtggcaagcagctagtatgagaggaagatctgcaaatgtaaggaagaaaagcagtcgcaggaaaccggctcttatgaaattaatggttgatcattttgaaggtagtcatacaggttctgtgtataggactggtttacaacctcaaacaaaaggagacaaagaagattctgtaagtgctcctagccagctttcatttggaagttttttgaaaaccgacaagttgaatggggattccagcattgctgaagataagacgtgcaatggtagcgctaaccaagaacaacggacaaagctaacaggaattaacaggccaaccagtatcgcttccaaattcatatcatacaaagatgtggctgtttcgccccctggcacagtattgaaacccattttggagaagaaggaagcaaaggagaaagatagtggacgtgatattgacctagcactgtcatccgaggaagaagataaaaagtttacagaaaaagagaaagaaaagccaagtgaggacagtagcaaagagattctttcaattcagcgagatttagagagtcatgcagaaatacctcctgacagcaacagtgatgaaggcccatctgcagctagtaaagcgtctggaagcaaactgtcagcttcagctcctccattcaatccaggatcagtgttatcaatgtcccagccatacagcacggtggcagtatatgatgccagtgctatccttcaggcaataccaagtcaagcaatggagattctcccttctgccattgacactagagtgcctcgtggtcctcggtccaccttgtactatcgtactgggcattccttccaaaggaaacaaggttacacgcacagccagagcactattgtaaggggtagctactcccccacaaccatgaatccacatgctgctgaatttgtgcctggaaaaacttcgcaacaatctgatgtggctgacagagaacccagtcctgctaatcctgtggccaattctgatctggatgttgtatcgcagaccacagatgaagcgagggccgaaacgcctgccacagaaaaggcaggtcaggttgagaaagtcgtttcaggtaaaggaaaggaaaacagggggaaagacatcgtgagaaactcatacaaaacagaacttgcaaggcaaattttactcagtttcattgtgaagtcggtgcacgacagtttaggtccctcccgggctgaaccagagaggaagccaagtggatcagatgaagctagtaatgaacagaccagcgtcttaggcaagaacgcttctggttctggtcgcaaagatccagataaacaagagaaagcgacggaggttactaagggcctgaaggatacagagggattcactgtcgtttcaaaacgccgaaggcgtccccagccgttcatgaaccccataaatggcctatattctcagccgtctatttgcacctctgtcagttaaggtcattgcgttttcgaagacctgcaatattttgagagatggacctttgccttcgcctttgcctttgcttagaggattggtagcagagattttccctatccaagtgagctgtgagcagcgagcatttagttaaactgtacaaaaggtttccgggataccctttttgtaataaaagaaactgatgtattccgcagtagctgtagcgctggatataatgttcctttgtatgttatatatgacagaatcataggaaatagcagatgttaagttaatccgatattcagtggagcgcccttgtgctttatgatgttcctcatgttgtgagccccagttaatcattgcaatttgcaaatatgctgccagactgccagagcagaagaaactgaatcttctaggcgccaagagttcgaaatcttattcatggaggcatgtctttggataccttgccagcgggtgagcagcacttcactgagaagcaattgcagctgcagacccaccagatcaccagaccaccggggcccggacaggcgtgaactggtcgatcggcagttttaagctgttgcagcttatactgtaggagtgtagtagctacgtaggagcagcctgtactgtagctgctgagaccacacaaaaactgaatcagttacaaacttgaaactttcattaattgctgtgaaccaatatccgatcgagattgttgtgaatacgctacatatacatattttatgacttattttgcg

SEQ ID NO: 15261 - DNA, 5684 bp, Zea Mays
ctcacatcctatatcctctccagtctccaccctcgcggcgcgccccctcaagttctcattccttctcctcgctcgctcgcctcctcctctcctctcctctcctctgcggtgggaactgcggcggcggcttaaaccctcgcgccggcggcttccggcgctccatcagcgccgcgctcgaaggccgcccgtcgctggtcgagcgcgcgaggcagcaggcaccggctaggcaggcagccaataatggcccccaaggccgggcgtggcaagggcaggggcggcggcggcagaggcggcgacaggaggaagaaggaagagaaagtggtgcccagcgtggtggacgtcacggtcgtcaccccctacgaatcccaggtgacactcaaggggatatcgacggaccgtgtgctggacgtgcggaggctgctggggtcgaacgtggaaacgtgccacctgacaaactattcactctcccatgtggcgcgcgggcaccggctggaggacggcgtggaggtcgtggcgctcaagccctgcgctctccggatcgtcgaagttatcaggaggaaggaggcgagcggcgcttctcgggaaggcgtctacttcgaaatcgaggtgaaggtttgcaacgggaagcttctgcacgtagttgcttcacgaaagggtttctacttggcagggaagccacaaaacgtaagccactccctggtggacctgctgcaacagctcagcaacgcgtttgctaacgcatatgaggcgttgatgaaagcttttgtggaccacaataagtttgggaatttgccatatgggttccgtgcaaacacgtggcttattcctccaatatatgttgatcccgccacaaagtgcccagcactgccagttgaggatgagaattggggtggaaatgggggtggctgtggtcgtgatggaagatatgatcgcagatgctggtcaaaagagttctctgttctgtctagaatgccatgcaaatctgacgaagaacgggtgatcagagaccggaaagcttttcttttacacaatctgtttgtagatacagcaatttttagagctgcatcaacaatacggcgactcattgatcagtctatgaactcaattggttcccgtggtactactcatggttcaaacgtatttgaggaacatatcggcgacatgaatataactgtgaagaaagatgaggctgatgctagttcaaaggtggacgacaaggttgatggtgttgccttctgtaaaacaggtgctatggatattgcacaaaagaatcttctgaaaggtttaacttctgatgaaaatgttcttattaaggattcttccacactcggagtggtgattgtcaagcattgtggatatacagcaactgtgaaggtttctggacgtgcaaaggacagtaatgatgttaaacaaacacatgacgtctctgataattttgatggaatgctgaacattgatgtgcctgaccatccagatggaggttctaatgccttgaatgtcaacagtctaaggataccactccaaagtgttacgcatccagaaactgttgttggtaagcagaaccctagcccaaagtctcatgcttataaccccgcaaggaaactggcatgcaaaatacttgaggacagcttggtaaagcttgatagcatgcctagcataaattctagaattatcagatgggaacttgggtcctcctggctacaacagttacagaaaaaggattctccggcatctgagaatgttaagcggaatgcaacaaaggctgataaagaatcagctgtcaaaggtcttggaaagcattttgaacaattaaagaaaattaaaaagaaagaatgcaacattgacggttccagttctgagaaggaagaatgtaacagtaactgctcgtcaatgaatggtatgcaagtatcagataagatatctgttgatgaaacgaataagggagctgattccctcgaagagctcacaaagatggcccataatttctatgatgagactgcactcccaaagctggtggctgatttcgcgtcccttgagctttctcctgtggatggaagaaccatgaccgatttcatgcatacaaggggacttaatatgtcctctttaggtcgtgtggtagagctagcagagaagctcccacacatccagtctatatgcattcatgaaatggttattagatcctttaagcacatcgtccgagctgttattgctgctgttgatgacatgcaaaatatttctgcagctatagctgaaactctaaacatattacttggatctcccagacttgaaaatggtgctgacacagatgcccatattgacaataatttgcgtttgaaatgggttggactggagctagttgcaagagattatgatatgaatagccctaacccatttgacaaatctgacattgtcagcattgttcctgtatgcaagcatgtggtctactcatctattgatggtcgaaacttactggaatcatcgaagatggcattggataaaggaaaattagatgatgctgtgagctatggaacaaaggcattgtccaaaattatagctgtttgtggtccataccatcgactgacggctaatgcatacagccttcttgctgtggtgctttatcatactggagattttaatcaggcaactgtatatcaacagaaggcacttgatatcaatgaaagggagcttggtcttgatcatccggaaactatgaagagttatggggatttatctgtcttctattatcgccttcaacacattgaaatggctctaaagtatgtcaaccgtgcactatatctgcttcagttctcgtgtgggctttcacacccgaattcagctgccacctacataaatgtggctatgatggaagaaggcatgggaaatgttcatgttgctcttcgatacttgcatgaagccctgaagtgcaacaagaggttgctaggagctgatcacatccagactgctgcaagctaccatgccatagccatagccctttcaatgatggacgcgtactccctaagcgtgcaacatgaacaaacaaccttgcagatacttcaggagaaactagggcaagatgacctccgaactcaggatgctgctgcatggctagaatattttgagtcaaaagcattagaacaacaagaggcggctcgaagaggcatgccaaaacctgattcatctattgcaagtaaaggacatcttagtgtatcagatcttcttgacttcataagcccagaccaggaaagaaaagaaagggatatgcaaaggaaatgcaggcgtgcaaagaataatatcagagctcatcatggtgaatcagttgaagagaaggagaattttcagcttgtttcaggatctcctcttgaagcaagcaaagacagttttcaagaagaaaaactggatgtgcatcctcctgctgtattagaagaaaattatgctgcccatgatgagcataagcaatgtgatgttttatcaccagaagaatattctgatgaagggtggcaagcagctagtatgagaggaagatctgcaaatgtaaggaagaaaagcagtcgcaggaaaccggctcttatgaaattaatggttgatcattttgaaggtagtcatacaggttctgtgtataggactggtttacaacctcaaacaaaaggagacaaagaagattctgtaagtgctcctagccagctttcatttggaagttttttgaaaaccgacaagttgaatggggattccagcattgctgaagataagacgtgcaatggtagcgctaaccaagaacaacggacaaagctaacaggaattaacaggccaaccagtatcgcttccaaattcatatcatacaaagatgtggctgtttcgccccctggcacagtattgaaacccattttggagaagaaggaagcaaaggagaaagatagtggacgtgatattgacctagcactgtcatccgaggaagaagataaaaagtttacagaaaaagagaaagaaaagccaagtgaggacagtagcaaagagattctttcaattcagcgagatttagagagtcatgcagaaatacctcctgacagcaacagtgatgaaggcccatctgcagctagtaaagcgtctggaagcaaactgtcagcttcagctcctccattcaatccaggatcagtgttatcaatgtcccagccatacagcacggtggcagtatatgatgccagtgctatccttcaggcaataccaagtcaagcaatggagattctcccttctgccattgacactagagtgcctcgtggtcctcggtccaccttgtactatcgtactgggcattccttccaaaggaaacaaggttacacgcacagccagagcactattgtaaggggtagctactcccccacaaccatgaatccacatgctgctgaatttgtgcctggaaaaacttcgcaacaatctgatgtggctgacagagaacccagtcctgctaatcctgtggccaattctgatctggatgttgtatcgcagaccacagatgaagcgagggccgaaacgcctgccacagaaaaggcaggtcaggttgagaaagtcgtttcaggtaaaggaaaggaaaacagggggaaagacatcgtgagaaactcatacaaaacagaacttgcaaggcaaattttactcagtttcattgtgaagtcggtgcacgacagtttaggtccctcccgggctgaaccagagaggaagccaagtggatcagatgaagctagtaatgaacagaccagcgtcttaggcaagaacgcttctggttctggtcgcaaagatccagataaacaagagaaagcgacggaggttactaagggcctgaaggatacagagggattcactgtcgtttcaaaacgccgaaggcgtccccagccgttcatgaaccccataaatggcctatattctcagccgtctatttgcacctctgtcagttaaggtcattgcgttttcgaagacctgcaatattttgagagatggacctttgccttcgcctttgcctttgcttagaggattggtagcagagattttccctatccaagtgagctgtgagcagcgagcatttagttaaactgtacaaaaggtttccgggataccctttttgtaataaaagaaactgatgtattccgcagtagctgtagcgctggatataatgttcctttgtatgttatatatgacagaatcataggaaatagcagatgttaagttaatccgatattcagtggagcgcccttgtgctttatgatgttcctcatgttgtgagccccagttaatcattgcaatttgcaaatatgctgccagactgccagagcagaagaaactgaatcttctaggcgccaagagttcgaaatcttattcatggaggcatgtctttggataccttgccagcgggtgagcagcacttcactgagaagcaattgcagctgcagacccaccagatcaccagaccaccggggcccggacaggcgtgaactggtcgatcggcagttttaagctgttgcagcttatactgtaggagtgtagtagctacgtaggagcagcctgtactgtagctgctgagaccacacaaaaactgaatcagttacaaacttgaaactttcattaattgctgtgaaccaatatccgatcgagattgttgtgaatacgctacatatacatattttatgacttattttgcg

SEQ ID NO: 15262 - DNA, 2973 bp, Zea Mays
atatagcctgtagtataaaacattgctttatatgtttttacacaagtccatctagtgatcttatactcctgctaattctaatgggggcgcatttaaggggtttttattagtggggaggaaaaggacccttgcaaaggcctagaagagagagagagagtgagtgcctggatgtggggaagagggagaaataaataaacccgaattcagccaaacctctctctcccacctcctgtcaccaccaccacacccctcctcctcccctgtctttctccctctccctcttgacaaaatttcctccacccattctcttcctcctcttcttccccaccgactccaccgatccacctctttctatctgaatttcctctcgtcttgcccaccgctccatctgtctgttgcctctctctctcgcaaccaatcggttcttgtttcctccgtctgctgggttgattctctctctcttcctctccgtggagaggagaggatcgagaaacaggagacaggaaagaagagaaatcagaacggagcctgttcttttgcctggattgcggttctcgcgagttgttcagaaactctgggccagtttctggtcctttaaaatactggaacgaggaaccatcagagatgctaaggcaacagaccaattgatgttatctcgctaccctagtttggatcatcacaatgcaaggacagaggaattctgtggagcattttgctgatgtttttggattcgacattgcatctagttcaggcaaccctgtgatggatcagcagtcatattggaacaatgttcttggatcagtagaatcgcagaatcttcaaggttatcagatgaatcacagtgatgctgccatgccatatgggaatgagacacagcaagatggtacatttcttggtttctgggaatcaggcgaagcaagtgcaagtggcagctctaacaatgccaaaacagagcatcttagtattggcggtggtctgaggattggtgaaaggcgactggtagctgacaatggcatttctctggatgtggatatcaaccttaacgccaacgttaacgatctatgtggtcaaagttcaaatgttaactgtacatctcagggccctgagcactatggtggcggtgatcgtagtgttgtaaattctcagccaactgacctgagattacacccatacaggactttcctactagatgcagagcaagcagattcttttactttgaaccctagtgaaaaccctttgtgtgatttttcactgatgcaagaaagcattgaccaaagacccggtagttccctggatggacgccggctagcctgcaagagaaaaaatgttgaaggacccaatggccagagttcagcaggtgctagcactagtttttcccacaggaacgacaatgctttccataacattgcttcttcaagttacaatcctgcacctatcagaaatccgtcctcacccaattgcttgccggttccaagttctatcgatgatcaactcccacgatatggaactaatgcagggctctcagccggtacctatgaccttaatggaggggtcaacaatgctgggaattcgcagagaagtttccgggcaagaattactacgtctcaacagattgctccctgtagtgtatggccctcttcaaatgctatcagacttcctaattcatggaatcatcagccacctcattttcaaagtgcatttgatgatacccaggaggttattcctgtggtcagcagcctcaacttgcaataccagcatccagtgaatgtttctagtgtgccaccggctgcaaaccgtttcactggccatggagcttcatcatcgagagctggcagtttggagaacagaattcttggtagtcaagaggctcctacaaggaatgtggtgcctgccaactactctgatttagttcccccgtctgtagtagacccgagacgtttgctgccagaaccatctaattggagttctgatgtccgaggcactgcaatatcaggaagtattcctcctgtatcaagagctaataacagtgcaactgttaatccgccagcaggattcagtcaccaaaacctcacccggcgccatcctcgaaatttatcagaggagattggtcggctatctggagcacttcgcggccatcaacccccacgcttaaggccggggtttctgttggagcgccagggcgatggtgtttggggtgttcctttatcaacaaggggtagagaaggaagaaggttaatggagattcggaatgcacttgaaatgatccatagaggggagaatgtaaggcttgagtctatcttctatggcggtgttgacattcacgatagacacagggacatgcgccttgacattgacaatatgtcctatgaggagctattagcactcgaggaaagaataggaaatgtcggcactggcctcagcgaggaagctgtgataaggttgctcaaacaaaggaaattttcatcttggacactaaaagcatctttggaccctgaaccatgttgtatctgccaggaggagtacgctgatggagacgacctcgggaagctggactgcgggcacgacttccacgctggctgcatcaagcaatggctggtggtgaagaacgtgtgccccatctgcaagagcaccgcattgaagaagacctgaaacccgaacaaaggctcgtgtcagagacatcccccatgtttctatgttcactcgatggttcgcgagatcatttgccgattcgtattgctacgcttttttttttttggtcgggaaaattttgccagccaccttttggttaatgtctttcctgcttgatgtagtgaatttggactatgcctgatagttgtccttgacctgaatcaggttggtgtgtgggtgtttcatgtttggttgctgtgatagctggtacgaacaatgtatttctgttatgcaagtaatagaaatgaagtttctccggtcaaaaaaaaaaggtggaggaacgat

SEQ ID NO: 15263 - DNA, 2716 bp, Zea Mays
acctcctgtcaccaccaccacacccctcctcctcccctgtctttctccctctccctcttgacaaaatttcctccacccattctcttcctcctcttcttccccaccgactccaccgatccacctctttctatctgaatttcctctcgtcttgcccaccgctccatctgtctgttgcctctctctctcgcaaccaatcggttcttgtttcctccgtctgctgggttgattctctctctcttcctctccgtggagaggagaggatcgagaaacaggagacaggaaagaagagaaatcagaacggagcctgttcttttgcctggattgcggttctcgcgagttgttcagaaactctgggccagtttctgagatgctaaggcaacagaccaattgatgttatctcgctaccctagtttggatcatcacaatgcaaggacagaggaattctgtggagcattttgctgatgtttttggattcgacattgcatctagttcaggcaaccctgtgatggatcagcagtcatattggaacaatgttcttggatcagtagaatcgcagaatcttcaaggttatcagatgaatcacagtgatgctgccatgccatatgggaatgagacacagcaagatggtacatttcttggtttctgggaatcaggcgaagcaagtgcaagtggcagctctaacaatgccaaaacagagcatcttagtattggcggtggtctgaggattggtgaaaggcgactggtagctgacaatggcatttctctggatgtggatatcaaccttaacgccaacgttaacgatctatgtggtcaaagttcaaatgttaactgtacatctcagggccctgagcactatggtggcggtgatcgtagtgttgtaaattctcagccaactgacctgagattacacccatacaggactttcctactagatgcagagcaagcagattcttttactttgaaccctagtgaaaaccctttgtgtgatttttcactgatgcaagaaagcattgaccaaagacccggtagttccctggatggacgccggctagcctgcaagagaaaaaatgttgaaggacccaatggccagagttcagcaggtgctagcactagtttttcccacaggaacgacaatgctttccataacattgcttcttcaagttacaatcctgcacctatcagaaatccgtcctcacccaattgcttgccggttccaagttctatcgatgatcaactcccacgatatggaactaatgcagggctctcagccggtacctatgaccttaatggaggggtcaacaatgctgggaattcgcagagaagtttccgggcaagaattactacgtctcaacagattgctccctgtagtgtatggccctcttcaaatgctatcagacttcctaattcatggaatcatcagccacctcattttcaaagtgcatttgatgatacccaggaggttattcctgtggtcagcagcctcaacttgcaataccagcatccagtgaatgtttctagtgtgccaccggctgcaaaccgtttcactggccatggagcttcatcatcgagagctggcagtttggagaacagaattcttggtagtcaagaggctcctacaaggaatgtggtgcctgccaactactctgatttagttcccccgtctgtagtagacccgagacgtttgctgccagaaccatctaattggagttctgatgtccgaggcactgcaatatcaggaagtattcctcctgtatcaagagctaataacagtgcaactgttaatccgccagcaggattcagtcaccaaaacctcacccggcgccatcctcgaaatttatcagaggagattggtcggctatctggagcacttcgcggccatcaacccccacgcttaaggccggggtttctgttggagcgccagggcgatggtgtttggggtgttcctttatcaacaaggggtagagaaggaagaaggttaatggagattcggaatgcacttgaaatgatccatagaggggagaatgtaaggcttgagtctatcttctatggcggtgttgacattcacgatagacacagggacatgcgccttgacattgacaatatgtcctatgaggagctattagcactcgaggaaagaataggaaatgtcggcactggcctcagcgaggaagctgtgataaggttgctcaaacaaaggaaattttcatcttggacactaaaagcatctttggaccctgaaccatgttgtatctgccaggaggagtacgctgatggagacgacctcgggaagctggactgcgggcacgacttccacgctggctgcatcaagcaatggctggtggtgaagaacgtgtgccccatctgcaagagcaccgcattgaagaagacctgaaacccgaacaaaggctcgtgtcagagacatcccccatgtttctatgttcactcgatggttcgcgagatcatttgccgattcgtattgctacgcttttttttttttggtcgggaaaattttgccagccaccttttggttaatgtctttcctgcttgatgtagtgaatttggactatgcctgatagttgtccttgacctgaatcaggttggtgtgtgggtgtttcatgtttggttgctgtgatagctggtacgaacaatgtatttctgttatgcaagtaatagaaatgaagtttctccggtcaaaaaaaaaaggtggaggaacgat

SEQ ID NO: 15264 - DNA, 2796 bp, Zea Mays
acctcctgtcaccaccaccacacccctcctcctcccctgtctttctccctctccctcttgacaaaatttcctccacccattctcttcctcctcttcttccccaccgactccaccgatccacctctttctatctgaatttcctctcgtcttgcccaccgctccatctgtctgttgcctctctctctcgcaaccaatcggttcttgtttcctccgtctgctgggttgattctctctctcttcctctccgtggagaggagaggatcgagaaacaggagacaggaaagaagagaaatcagaacggagcctgttcttttgcctggattgcggttctcgcgagttgttcagaaactctgggccagtttctggtcctttaaaatactggaacgaggaaccatcagagatgctaaggcaacagaccaattgatgttatctcgctaccctagtttggatcatcacaatgcaaggacagaggaattctgtggagcattttgctgatgtttttggattcgacattgcatctagttcaggcaaccctgtgatggatcagcagtcatattggaacaatgttcttggatcagtagaatcgcagaatcttcaaggttatcagatgaatcacagtgatgctgccatgccatatgggaatgagacacagcaagatggtacatttcttggtttctgggaatcaggcgaagcaagtgcaagtggcagctctaacaatgccaaaacagagcatcttagtattggcggtggtctgaggattggtgaaaggcgactggtagctgacaatggcatttctctggatgtggatatcaaccttaacgccaacgttaacgatctatgtggtcaaagttcaaatgttaactgtacatctcagggccctgagcactatggtggcggtgatcgtagtgttgtaaattctcagccaactgacctgagattacacccatacaggactttcctactagatgcagagcaagcagattcttttactttgaaccctagtgaaaaccctttgtgtgatttttcactgatgcaagaaagcattgaccaaagacccggtagttccctggatggacgccggctagcctgcaagagaaaaaatgttgaaggacccaatggccagagttcagcaggtgctagcactagtttttcccacaggaacgacaatgctttccataacattgcttcttcaagttacaatcctgcacctatcagaaatccgtcctcacccaattgcttgccggttccaagttctatcgatgatcaactcccacgatatggaactaatgcagggctctcagccggtacctatgaccttaatggaggggtcaacaatgctgggaattcgcagagaagtttccgggcaagaattactacgtctcaacagattgctccctgtagtgtatggccctcttcaaatgctatcagacttcctaattcatggaatcatcagccacctcattttcaaagtgcatttgatgatacccaggaggttattcctgtggtcagcagcctcaacttgcaataccagcatccagtgaatgtttctagtgtgccaccggctgcaaaccgtttcactggccatggagcttcatcatcgagagctggcagtttggagaacagaattcttggtagtcaagaggctcctacaaggaatgtggtgcctgccaactactctgatttagttcccccgtctgtagtagacccgagacgtttgctgccagaaccatctaattggagttctgatgtccgaggcactgcaatatcaggaagtattcctcctgtatcaagagctaataacagtgcaactgttaatccgccagcaggattcagtcaccaaaacctcacccggcgccatcctcgaaatttatcagaggagattggtcggctatctggagcacttcgcggccatcaacccccacgcttaaggccggggtttctgttggagcgccagggcgatggtgtttggggtgttcctttatcaacaaggggtagagaaggaagaaggttaatggaggtgcatggttccttgtcttatgacaatccaagtttacttgtcaacagattcggaatgcacttgaaatgatccatagaggggagaatgtaaggcttgagtctatcttctatggcggtgttgacattcacgatagacacagggacatgcgccttgacattgacaatatgtcctatgaggagctattagcactcgaggaaagaataggaaatgtcggcactggcctcagcgaggaagctgtgataaggttgctcaaacaaaggaaattttcatcttggacactaaaagcatctttggaccctgaaccatgttgtatctgccaggaggagtacgctgatggagacgacctcgggaagctggactgcgggcacgacttccacgctggctgcatcaagcaatggctggtggtgaagaacgtgtgccccatctgcaagagcaccgcattgaagaagacctgaaacccgaacaaaggctcgtgtcagagacatcccccatgtttctatgttcactcgatggttcgcgagatcatttgccgattcgtattgctacgcttttttttttttggtcgggaaaattttgccagccaccttttggttaatgtctttcctgcttgatgtagtgaatttggactatgcctgatagttgtccttgacctgaatcaggttggtgtgtgggtgtttcatgtttggttgctgtgatagctggtacgaacaatgtatttctgttatgcaagtaatagaaatgaagtttctccggtcaaaaaaaaaaggtggaggaacgat

SEQ ID NO: 15265 - DNA, 3353 bp, Zea Mays
acctcctgtcaccaccaccacacccctcctcctcccctgtctttctccctctccctcttgacaaaatttcctccacccattctcttcctcctcttcttccccaccgactccaccgatccacctctttctatctgaatttcctctcgtcttgcccaccgctccatctgtctgttgcctctctctctcgcaaccaatcggttcttgtttcctccgtctgctgggttgattctctctctcttcctctccgtggagaggagaggatcgagaaacaggagacaggaaagaagagaaatcagaacggagcctgttcttttgcctggattgcggttctcgcgagttgttcagaaactctgggccagtttctggtcctttaaaatactggaacgaggaaccatcagagatgctaaggcaacagaccaattgatgttatctcgctaccctagtttggatcatcacaatgcaaggacagaggaattctgtggagcattttgctgatgtttttggattcgacattgcatctagttcaggcaaccctgtgatggatcagcagtcatattggaacaatgttcttggatcagtagaatcgcagaatcttcaaggttatcagatgaatcacagtgatgctgccatgccatatgggaatgagacacagcaagatggtacatttcttggtttctgggaatcaggcgaagcaagtgcaagtggcagctctaacaatgccaaaacagagcatcttagtattggcggtggtctgaggattggtgaaaggcgactggtagctgacaatggcatttctctggatgtggatatcaaccttaacgccaacgttaacgatctatgtggtcaaagttcaaatgttaactgtacatctcagggccctgagcactatggtggcggtgatcgtagtgttgtaaattctcagccaactgacctgagattacacccatacaggactttcctactagatgcagagcaagcagattcttttactttgaaccctagtgaaaaccctttgtgtgatttttcactgatgcaagaaagcattgaccaaagacccggtagttccctggatggacgccggctagcctgcaagagaaaaaatgttgaaggacccaatggccagagttcagcaggtgctagcactagtttttcccacaggaacgacaatgctttccataacattgcttcttcaagttacaatcctgcacctatcagaaatccgtcctcacccaattgcttgccggttccaagttctatcgatgatcaactcccacgatatggaactaatgcagggctctcagccggtacctatgaccttaatggaggggtcaacaatgctgggaattcgcagagaagtttccgggcaagaattactacgtctcaacagattgctccctgtagtgtatggccctcttcaaatgctatcagacttcctaattcatggaatcatcagccacctcattttcaaagtgcatttgatgatacccaggaggttattcctgtggtcagcagcctcaacttgcaataccagcatccagtgaatgtttctagtgtgccaccggctgcaaaccgtttcactggccatggagcttcatcatcgagagctggcagtttggagaacagaattcttggtagtcaagaggctcctacaaggaatgtggtgcctgccaactactctgatttagttcccccgtctgtagtagacccgagacgtttgctgccagaaccatctaattggagttctgatgtccgaggcactgcaatatcaggaagtattcctcctgtatcaagagctaataacagtgcaactgttaatccgccagcaggattcagtcaccaaaacctcacccggcgccatcctcgaaatttatcagaggagattggtcggctatctggagcacttcgcggccatcaacccccacgcttaaggccggggtttctgttggagcgccagggcgatggtgtttggggtgttcctttatcaacaaggggtagagaaggaagaaggttaatggaggtaagatgatcggttctgttcaaaaaaatggtttttagcatccacttggaaacataaaagtccatcattattaggtgttttttgtgtggcagcaaagattacactaaatcatcctctaatttatgaatttatgcttgcaaaggccccccttgttttcagttatccttgtcatctttgtgtttgcctatctaagcaaattaccctattctattcccacaccaaattggtagaactgctctactcgaaatgctttatttcattttgtttgtgcacttcataatccctaatttgatctagcatgcttcttcatgcccctgcaactcttgaaatactgaaatttttttatcatttatttccacatattatcacactgccggttgttgtatcttttactttttttctaagatattttcactagtattgttatagagaaacttgaaccttaatgatatgtttcaccttatgtttttatgcaaaatactgcactattttatcctttttgttccctagccttgcttgttcttgcttgcgttaactactgtgaccatcatgtaaaggtgcatggttccttgtcttatgacaatccaagtttacttgtcaacagattcggaatgcacttgaaatgatccatagaggggagaatgtaaggcttgagtctatcttctatggcggtgttgacattcacgatagacacagggacatgcgccttgacattgacaatatgtcctatgaggagctattagcactcgaggaaagaataggaaatgtcggcactggcctcagcgaggaagctgtgataaggttgctcaaacaaaggaaattttcatcttggacactaaaagcatctttggaccctgaaccatgttgtatctgccaggaggagtacgctgatggagacgacctcgggaagctggactgcgggcacgacttccacgctggctgcatcaagcaatggctggtggtgaagaacgtgtgccccatctgcaagagcaccgcattgaagaagacctgaaacccgaacaaaggctcgtgtcagagacatcccccatgtttctatgttcactcgatggttcgcgagatcatttgccgattcgtattgctacgcttttttttttttggtcgggaaaattttgccagccaccttttggttaatgtctttcctgcttgatgtagtgaatttggactatgcctgatagttgtccttgacctgaatcaggttggtgtgtgggtgtttcatgtttggttgctgtgatagctggtacgaacaatgtatttctgttatgcaagtaatagaaatgaagtttctccggtcaaaaaaaaaaggtggaggaacgat

SEQ ID NO: 15266 - DNA, 2570 bp, Zea Mays
ccgcgataaaaaagagtacgtaggatttgtgatgaggtgctgctaagtgctgatggatttgtgatgactggtgcctgttggccgacgcccgacgccgccccctcggcgtcgctcattccactctgtcctgcccggaactagtggcaacttgcagccgcggcaaccttggcacacagcgcaagcagctgagcctatccgcgggcgggcgggcgggtgcttttggcctcctctgctctcctaggttggaagagtctttgccaaggggatagcaaaagagaaagtacttgcatgccccaacaaggcaacagcgcctgcttttggctggggtcctctccctcttcacatcacccgagttgtagtgcgaggcaagaaggagaccgagcagaggagggtgtgcacaggcacacacaagcatcgtactcgtcgtaccagcaagagaggaagaccagcgcctagcctcctagccatgtgggaccttaacgactcgccggccgccgaggctgccccgccgtccccatctgccgacgactccggcgcgtccttctcgtcggcggccgcgctagtcgacatacccgacgacgactccgccgccgccgccgtcgtcacgcgccagttcttcgtcctggccccggcggccaccatcggcgcggcgcccggctcgtcgaacgcgcgcgcgggctggctccgccgggccgccgcgccggccggcggccccgctgcggtgcaggcggcggctggcaagaagagccggcgcgggccgcggtcgcgcagctcgcagtaccgcggcgtcacgttctaccgccggacggggcggtgggagtcgcacatatgggcgtacgatcgagcggcgatcaagttccgcggcgtggaggccgacatcaatttcagcttggaggattaccaagacgacatgaagcagatgtgccacctgagcaaggaggagttcgttcacgtgctccggcggcagagcacggggttcccccggggcagctccaagtacaggggcgtgacgctccacaagtgcgggcggtgggaggcgcgcatgggccagttcctcggcaagaagtacgtctacttgggcctgttcgacaccgaggaggaagccgccagggcgtacgaccgcgcggccatcaagtgcaacggcaaggacgcggtgacaaacttcgatcccagcatttacgccgaggaggaggtcgcgccggcggcggcgacgggcggcgccgccggcgacgagcacaacctggacctgtcgctgggaagctcggcggggaacaaaaggggcagccttgacggcggcggcggcggcggcggcgacgacaagtcctcggaccagcgcgtccccatggcgttcgacatcgactggcagacggccgcacgtcggagcaccaaggcaaagctcctgagcaacggcgatccggggaccgcggcgggaggcctttccctggcgatcggcggcggaggcgggcactggcctccgcagctgcagcatcagcagcagcagcagaggctccacggcgccaggaacaacggcggcggcacgagctggccgccgccgccgcacccgtgcccgccgccagtaccggccgccgccgcgaccgcagctgcagcatcatcacgattccatccctacgttgttacgagtacgacgcaaagcccggccggctgggtccagaagaatgggttccattcgctggccaggcccacgtagaccaagaaccaggactgggcgttcgtccttcgatcgtattccacggcgaaggtccatcatttgacccaagggcaaacggctcgtcgatccaccgatttacaccccctccccctttctttcccttttccattctctgtgttcttgattgggtgagacatggatccgaggatggatgggcctgctgcccccctgctgtaaatgaggagtttccgggaagaagacgagtgctttggtaggcgactaggcgtcgcgtcaggcagtgcgtccttttgccgctttttgttctctctcccccccttctgcattcactcaccaatcaccattggcaagcaccgatgaatggtggcatggggtgtcaacatcgcagctcattttgtttggtctcatgttgcatcactcgctgctgcacgcacgatgatggcctgctgcactgtcgtctgctgagctgctactgtcttcgatacgtgtgggtctcgcgctcgtgtaaaccttgtttctaattcgggcactgcaataactgtgggagaagagaagacgacccgggggaggccgaccggcggttaccttcctcgccggatgggacgagaccgtaccccacgccgtcatcttcatactatgtggatggatggctacattgccggcaagtgcggccactgtgcgcacagctcgcgcgcaggaagaaaagttgctagataatgctccatcgcgcgcaggaagaaaagttgctagataatgcccgcgcgcttaatttgctcgtctatctacttcactgttcctcacggcgtggcgtggcggcaggagatgaattgctcgtgtcgctccgccgtgtgctgtaggtgtgagcatgaatataatatgggtg

SEQ ID NO: 15267 - DNA, 1806 bp, Zea Mays
cgcacatatgggattgcggcaagcaggtctatctgggcggatttgacaccgcccatgcggctgctcgggcgtacgatcgagcggcgatcaagttccgcggcgtggaggccgacatcaatttcagcttggaggattaccaagacgacatgaagcagatgtgccacctgagcaaggaggagttcgttcacgtgctccggcggcagagcacggggttcccccggggcagctccaagtacaggggcgtgacgctccacaagtgcgggcggtgggaggcgcgcatgggccagttcctcggcaagaagtacgtctacttgggcctgttcgacaccgaggaggaagccgccagggcgtacgaccgcgcggccatcaagtgcaacggcaaggacgcggtgacaaacttcgatcccagcatttacgccgaggaggaggtcgcgccggcggcggcgacgggcggcgccgccggcgacgagcacaacctggacctgtcgctgggaagctcggcggggaacaaaaggggcagccttgacggcggcggcggcggcggcggcgacgacaagtcctcggaccagcgcgtccccatggcgttcgacatcgactggcagacggccgcacgtcggagcaccaaggcaaagctcctgagcaacggcgatccggggaccgcggcgggaggcctttccctggcgatcggcggcggaggcgggcactggcctccgcagctgcagcatcagcagcagcagcagaggctccacggcgccaggaacaacggcggcggcacgagctggccgccgccgccgcacccgtgcccgccgccagtaccggccgccgccgcgaccgcagctgcagcatcatcacgattccatccctacgttgttacgagtacgacgcaaagcccggccggctgggtccagaagaatgggttccattcgctggccaggcccacgtagaccaagaaccaggactgggcgttcgtccttcgatcgtattccacggcgaaggtccatcatttgacccaagggcaaacggctcgtcgatccaccgatttacaccccctccccctttctttcccttttccattctctgtgttcttgattgggtgagacatggatccgaggatggatgggcctgctgcccccctgctgtaaatgaggagtttccgggaagaagacgagtgctttggtaggcgactaggcgtcgcgtcaggcagtgcgtccttttgccgctttttgttctctctcccccccttctgcattcactcaccaatcaccattggcaagcaccgatgaatggtggcatggggtgtcaacatcgcagctcattttgtttggtctcatgttgcatcactcgctgctgcacgcacgatgatggcctgctgcactgtcgtctgctgagctgctactgtcttcgatacgtgtgggtctcgcgctcgtgtaaaccttgtttctaattcgggcactgcaataactgtgggagaagagaagacgacccgggggaggccgaccggcggttaccttcctcgccggatgggacgagaccgtaccccacgccgtcatcttcatactatgtggatggatggctacattgccggcaagtgcggccactgtgcgcacagctcgcgcgcaggaagaaaagttgctagataatgctccatcgcgcgcaggaagaaaagttgctagataatgcccgcgcgcttaatttgctcgtctatctacttcactgttcctcacggcgtggcgtggcggcaggagatgaattgctcgtgtcgctccgccgtgtgctgtaggtgtgagcatgaatataatatgggtg

SEQ ID NO: 15268 - DNA, 2670 bp, Zea Mays
cgcacatatgggattgcggcaagcaggtctatctgggtaagtttcttgcacgtccatgagtccatccattccatacgcatccatgcttggaagacgatagataccgcccaatccgaggcgtttttggttccggactcgggactcctcacaaaaatggcttgtggcgacttgcaggcggatttgacaccgcccatgcggctgctcgggcgtacgatcgagcggcgatcaagttccgcggcgtggaggccgacatcaatttcagcttggaggattaccaagacgacatgaagcagatgtgccacctgagcaaggaggagttcgttcacgtgctccggcggcagagcacggggttcccccggggcagctccaagtacaggggcgtgacgctccacaagtgcgggcggtgggaggcgcgcatgggccagttcctcggcaagaagtatgccggtcgtccgtccatctcccttctcctcgccttccttcccttcttgcccaaccacttcatgtcttcctcttcccaatccctccccatccctggtccctgtatctgcatcggcatcagcccatcctttctttgtcgttgcgcctcacattattcattcatggctgtcacttccggtctgtgtcgctgcactgcaggtacgtctacttgggcctgttcgacaccgaggaggaagccgccaggtaaaataattggaccgcactgtgtgctcgcctggcggcggttctcggagccccgctaccccctgggccgcgaaactgactgatggatgccccgtgtctctctccctttctctctctctgtgcgcgcgcgcgcagggcgtacgaccgcgcggccatcaagtgcaacggcaaggacgcggtgacaaacttcgatcccagcatttacgccgaggaggaggtcgcgccggcgggttcgtctatccccgcccgcgctctgcaacgatcacccccctcgtcgctgtgcggcggtttgctacaacctatatggacaggaagcaatctctgacgacggtccgctgtttcgccgtgcatgcagcggcgacgggcggcgccgccggcgacgagcacaacctggacctgtcgctgggaagctcggcggggaacaaaaggggcagccttgacggcggcggcggcggcggcggcgacgacaagtcctcggaccagcgcgtccccatggcgttcgacatcgactggcagacggccgcacgtcggagcaccaaggcaaaggtatccgttttggtttggtcccgcccgcgttcagcgttctctgaatcaaacgaggtgtgcgtttaaaatcttgcttaataaaagcaagcttgtcacgtttcaaccaccgggtggcatggcagctccagctcgacgcgagcgccgccatgcatgatgcaaccccacctgccgccgtacagccccaggcatccgcaagtgggtaccgactacgtaccgagctaactggctgacgctttgtttgttctgtgcaatgcaaatcgcggcagctcctgagcaacggcgatccggggaccgcggcgggaggcctttccctggcgatcggcggcggaggcgggcactggcctccgcagctgcagcatcagcagcagcagcagaggctccacggcgccaggaacaacggcggcggcacgagctggccgccgccgccgcacccgtgcccgccgccagtaccggccgccgccgcgaccgcagctgcagcatcatcacgattccatccctacgttgttacgagtacgacgcaaagcccggccggctgggtccagaagaatgggttccattcgctggccaggcccacgtagaccaagaaccaggactgggcgttcgtccttcgatcgtattccacggcgaaggtccatcatttgacccaagggcaaacggctcgtcgatccaccgatttacaccccctccccctttctttcccttttccattctctgtgttcttgattgggtgagacatggatccgaggatggatgggcctgctgcccccctgctgtaaatgaggagtttccgggaagaagacgagtgctttggtaggcgactaggcgtcgcgtcaggcagtgcgtccttttgccgctttttgttctctctcccccccttctgcattcactcaccaatcaccattggcaagcaccgatgaatggtggcatggggtgtcaacatcgcagctcattttgtttggtctcatgttgcatcactcgctgctgcacgcacgatgatggcctgctgcactgtcgtctgctgagctgctactgtcttcgatacgtgtgggtctcgcgctcgtgtaaaccttgtttctaattcgggcactgcaataactgtgggagaagagaagacgacccgggggaggccgaccggcggttaccttcctcgccggatgggacgagaccgtaccccacgccgtcatcttcatactatgtggatggatggctacattgccggcaagtgcggccactgtgcgcacagctcgcgcgcaggaagaaaagttgctagataatgctccatcgcgcgcaggaagaaaagttgctagataatgcccgcgcgcttaatttgctcgtctatctacttcactgttcctcacggcgtggcgtggcggcaggagatgaattgctcgtgtcgctccgccgtgtgctgtaggtgtgagcatgaatataatatgggtg

SEQ ID NO: 15269 - DNA, 1544 bp, Zea Mays
atgcctaggctctccctcaccgtcactgacgacgccgctgccatgccctttgcgcttcggcttggtggttccccagcgcttcgcccgggctcgcagtccccatcgtggctgcgctttggcggcagggccggggtgcggaaggcgctgttctgctccgccgaggacgctaggcggtgtggctcggacggaggggaacgggagcacatgccgagggcgtgctacggcgagaggctgcgcggcggtggtctctgtatccaccgggaggccatcgactggatttggaaggcttacacacactacagcttccatcctctcactgcctacttggcagtgaactatctcaatcgtttcctctcactgtctgagtgtctgagctactggaacaaggactggatgacgcaactcctctcggtggcgtgtgttttacactttcgctttcgctggctgccaaagatggaggaaatccccgtcatgcaatctctggaccttcaggtgggagatgtgtgttatgtgtttgaggcgaagacggtccatagaatggagctccttgttctaaccaccctcaactggaggatgaaggccatcacacctttctcctacatggattacttcctgaacaagctcaatggtggaaacacgaacatgattgtcattttattgagggagattggaaccggctgcttagggtttcggccgtctgagattgctgccgcagttgcagccacagtggccggagaagtggacgcgacaggcatcgagaacgcctatgctcacatagataaggagcctattgatgaaacacatgttcctgaggtcataaatgaagtgccgaagaagttccaatttcatctccccctgtaccactggaggagacaccaaagaagtcatatgcttcaattgtttggacgcgactggaagaagatcgaggagcatgtcggcaccaagacgacggtccagatacggagccacgcccagaaatacttcgtcaaggtccagaagcttgggctggctgttgggctgccgccgatgtacccgaggcgccacttcgccatgcagcagcagcagcagagctcggtagccggtggtagcagcgcggccgccatgccgctgctgcacggccggcaacctacttgcgcgccggtcgccatgccaggtctggccgagcccgacgccgtcgcccatcacggttccatcggatggagcagccccagtgtggtcgtccccgcggccagcagcgacggcgggatgcaaggcttggacttggagtgggtggcaggcgcttcggttccaggggcaaatatttggttttacacatgcaggtggatgtgttctcttttgggatagttttatggaagatcttgactggtgaggaaccgtatgcaaatatgcattgtggtgctatcatagctgcttctgatgagatcctcgcagttgacactccttcagaaggaggcgatgctgttattgtcagtagcagtgacaattctacatctactccatcagcttgtaaccttgcccggttcattgggcaaggttacaagcag

SEQ ID NO: 15270 - DNA, 1808 bp, Zea Mays
ccttccacagccgctattgttgagaaagcccagcaactccctggaaaagataaacatatatcagattccagtaccaatatgttatcaatattattgtttagtcatccacgtcgattaaaaaaggcggacaagtaacaagtcagagttataaactccaaagagtgaaagttaacctgcaatagagtggaaaacatcattatcactttagacctagtttaggtactatagtaatgagaaaatcggagtggattaagatgtattgtgagtgtttttttatctattgcggatgtaaatactctctaatccctccaaaccacttcaatattagagtactcaaactagacactttatggacatagcattttttttaagagaataattttttggttgtgaccggtgaatagggtgtggaccaatagaaacgtgaaacggtcacaagagccgtgaatccgtgatgaaagtcgtctccaagagcctactatctggaatcatgaatgaagtgagcatattggcccagccaccttgtcagctagacagcgactgctagtgtaaatatctttcttggttgctccttccaggaaggtcactgcctcgcaaggtttaaaggtgatgtccatgttcgatgaacctacctacatagtatgtgtcccccttcatgcaaggcaataaagatcaaatacacggatcacttttccaccttccgtagcgaaaatcgttctactaatatttgtcacgcccacgcacaagacacagaaccagtaccagtaccagtaccaaatggaatatttttaaatagttttatttgttagtgtgtctcgaattcaagtgcatgctaatctatatacgcgtggcatctgcgcaaccacccacccgttttggtgcccggctaacgaatcgcagaacgtgaagctgagcgttgaccttcagctagtcccctgctctctctctctctctctctctctctctctctctctctgttcatgtggataacagtaacaaactaccgcaagttgtggatgagcagacttgacagttttccccatgttctatctagaattattcttgattcagaagcaggagagggataaaaaaaagaagaaagtggaagggcggagatcgatatggaagctcaccgcagctgccctggtccttgacctccgcgacggcgcccttggcccgccagtcgacggactccggcaggtcctcgttgtcgccggccaggtacctgtcaccgagcctcctctccctctgcggcctgctcctgacgccgaggtaggtggcgcggtactcgtcgttggtgaggtcggcgaagcggttgagcccgaggcggaaggagtggacgcccgcgtcggcggcggcgttgtgggcgtcgacgtagcggaggttgtccctgaacacctcgaacctgcgctcctcctcgccgacggcgttgtaggtccggccgtgcgccgccatccactcggcgtacatccgccgcgcctcctcctcgctccgctcgccgtaggagacgatcgacatgctgtccgccgccgcggcgagcggcgcgagcagcagcagaagcagcgccgccgccgacgcgagcggcgtggtggaggcgcccatctccgccgcgatgcaggaacgggaaggctagctagatagggggaggaaggagcggaacggaccggagcagagcagatggatgagagttgagatggaggcccttccttttaatacaagtgggcgagggagcggtgggcccagattccgtgatccccttgtttttttaaattcattcgcatctaatctactggaccagtcagctgtac

SEQ ID NO: 15271 - DNA, 922 bp, Zea Mays
ctgcgaccgcctctcctcactcttgccatctcgtccctcctcctcctcgctccatccgcatcttccatcttcaagttgcttcatcttccatcgtttcgtccttacgacatcatccgctctgagaaattcgtcgctttcttcatcggctccgcttcttcctcgagttgtcaaattagaaaaaaggttcgcttttctttttccccaagttgtgtgcttgcggcggatctgccttcttccgcttcggctgtctccccaatttcccatcttcttattccctcgacaccccacggccccacattccctttgggcagcacaccagctccacacatctgacctgttgggtttgtgttctattcggtgtttgccaagtcccattacccattttcacttatcccaaatcggccagaggataggttctgtgctttcctttttattttccccaatttctgcatttcccctccttctatagtctccttagatcaggtttctgcagacaaaagcaccagaaaatgaacatccaagcaactcattgacaaacgaaactgaactttcttcgtttttaaccatgttgagaagtacccttgctccttaaggactacaccagcgaggtccctcatccacttgaaggacgtcggcattggttcactaatgaaaacattgtgtatgaaaatggcgactactctactccgcagcctaaaacctcaagatatgttggcaaccatcaaagtacaggtttcaagaaaatgggaattccatgaaaatacaaacaccgggcccatattacacaatgatatggtttaagctgacaaagagggcaaagactttttaccatccaatactcctgaaagttccgccaacacattagaaagccctgcaaaaaggctcaaacagacctcccccaaaatgttttagggaaacaaag

SEQ ID NO: 15272 - DNA, 1350 bp, Zea Mays
tcactcttgccatctcgtccctcctcctcctcgctccatccgcatcttccatcttcaagttgcttcatcttccatcgtttcgtccttacgacatcatccgctctgagaaattcgtcgctttcttcatcggctccgcttcttcctcgagttgtcaaattagaaaaaaggttcgcttttctttttccccaagttgtgtgcttgcggcggatctgccttcttccgcttcggctgtctccccaatttcccatcttcttattccctcgacaccccacggccccacattccctttgggcagcacaccagctccacacatctgacctgttgggtttgtgttctattcggtgtttgccaagtcccattacccattttcacttatcccaaatcggccagaggataggttctgtgctttcctttttattttccccaatttctgcatttcccctccttctatagtctccttagatcaggtttctgcagacaaaagcaccagaaaatgaacatccaagcaactcattgacaaacgaaactgaactttcttcgtttttaaccatgttgagaagtacccttgctccttaaggactacaccagcgaggtccctcatccacttgaaggacgtcggcattggttcactaatgaaaacattgtgtatgcagaaaatggcgactactctactccgcagcctaaaacctcaagatatgttggcaaccatcaaagtacaggtttcaagaaaatgggaattccatgaaaatacaaacaccgggcccatattacacaatgatatggtttaagctgacaaagagggcaaagactttttaccatccaatactcctgaaagttccgccaacacattagaaagccctgcaaaaaggctcaaacagacctcccccaaaatgttttagggaaacaaagaaccatgtatcatatgaaattactctccgccaaatacaacgattacagtttttttagaaatggtaatttcattaacatatgttattagtgggtacttccaatacatgtcctttaattatggatggttgacagtctcgaagacgtttttagctcagcgtggactggccttgataggttgctaaatctattgcatttttagatgatgtcaataccatgtaagtgtatttacattacattttttcatctcactattacgtgcttctagatactcttatttagtagcattcacttttgtgttacaaaagcataaatcaataaaaaaactcaaacagatgctaaatcttcacattaggtatgctttatgaacttaatacaacaagttcatattccaccatacttaattgttcaatcaagcctcatcgtaggccacaggtattttac

SEQ ID NO: 15273 - DNA, 503 bp, Zea Mays
ttcaagccctgggccggcttggtgatgttctgtgcatgctctgaaaggcgttcggcccggctgaaagggcccgtcgaggcccagcaggaatttctcggcccctttcacacaccaaaaaaaaaaccaggtgaggaatctaccaattgattttcttcacccgtccacctcgtcttgcgctcctctgtctcggcgacgactgtgctaccgccgccgccgccgcaagacttcgtcgggcactttgccggcgacgatttcccaccagctatttctactcggatccgatctatttacaagcccaacaggatcagaggaggtgatggcgaggagtgacagctgcctggcgcgcgtgggtgccggaattgctatcggtggcgcggtcggcggagccgtcggtgcttgctatggaacttttgaggcgttcagatacaaggaaaataaaaaactggaataggtcggtagtctggtcctggaagactcaaaagcatagtggaaggatatcctac

SEQ ID NO: 15274 - DNA, 4324 bp, Zea Mays
gttctgtgcatgctctgaaaggcgttcggcccggctgaaagggcccgtcgaggcccagcaggaatttctcggcccctttcacacaccaaaaaaaaaaccaggtgaggaatctaccaattgattttcttcacccgtccacctcgtcttgcgctcctctgtctcggcgacgactgtgctaccgccgccgccgccgcaagacttcgtcgggcactttgccggcgacgatttcccaccagctatttctactcggatccgatctatttacaagcccaacaggatcagaggaggtgatggcgaggagtgacagctgcctggcgcgcgtgggtgccggaattgctatcggtggcgcggtcggcggagccgtcggtgcttgctatggaacttttgaggcgttcagatacaagatccctggattgctaaagatcagatacattgggcaaaccaccgttggcagcgctgcgatttttgggcttttcttgggggctgggagcttgattcactgtggaaaatcctactagtttgtttccctttttttttctgaagtctgaacacacctttgtcgatgggcttcagtgaaaactattcaatgcctgtttcatgtaacagctaatagctcagggttggaaaagaacaatcaagttatgtcctagttttggtgtggatggaaatagaatcaacgttcatctgcacgagaatcgtcaatttctcatctagcgtcttatgttctcatctcattttctttaaaaacgtaaggaattctttactcaccatatactttagctcggcagggcgccgcgaagcgcgcaactttttgtttactagtacttattagcagccggtgaagtaataaaagtgcgtacagcttttgctttactttttgtttacctattgcatccctactttggctctgaagtgtcctgccagcggcctgcgtacttaggcctaatttgataggccatgagtatgtggccagctgagtggcgcgcaggccataaatgcgctgcagtcagaggggctacttctaccgtcgcgagtactgcaccgcgtgcgcgtcctccacgaccagacacgtgtcccgccagtcctcgaccgcgccggcaacacggttcactccaccacgtcctcgcgcgagtgcgtgtctcaggtgttagccacgacgactggccacccggctgctccggtccgtcagttaagacccagcactcgtccttcatcgctctcggtccatcagcacgagcccgtatgaccttcacctcggccgtcgaccaccatccctatgctccacacctacacaccacaagccgaccgatatggttgcacaaaacataatctcacactctggtcagtccacagactaccacagagtgctattcgttgataatcactcatcatcaacccgaaccacaagggaagagacaaatcaaccttgtgttcgcacttttccaaccctatttctccacaagccgaccacaaaggtcaaggcaaatcctttccttaaacttgctcaacgagcgggagatacaaacttcttggggtcttccacaagttggagactcccaagcacacacaaaccgtcaaggaaccaaagttccaagagtaataaattcgcacaagtgaagtttgcaaaacgagctcaagtgagggagagggaggaggagagtgaaaaaccaacaacaaatcaacgaacgtcacctcacaccgaagatcctccaaccgttggaagaggatgcgatttgaggtgtgggagatagagttagagcgcttgttttgagtttggtgagcagtaaagtcagggagagtggctgaagtaaatgaggagagagagggaaaggggagtatatataggtgtccctctctcagggcagaagatttgaaaaatctgtgcaaaggtcggttgaaccgcacccagggccggttcaaccgtctgataggtcagacctatcagaacggccttctgactaaaggtcggttgaaccgcaccctagggccggttcaaccgctattttccagagaggtctgagtataaagtccggttgaaccagccaacagggcgaggttcaaccgcattttgtcagagaggtttgcgaggccggttcaaccgctttttaccagagacttccggaacagagtccggttgaaccgcaccctagggccggttcaaccacacttttccagagacttcttttggagaagtcaggttgaattgcccctgaggtaggttcaacctttcttcctagagagggtatcaaatgcaaattctctggagcggattgaacttttgcaaaccaaattcgaaatgcggttttcaaaatagattttgaagagtagagattttgagctcttgcaaacattttatacctttgtgcgaatccctcttgattgtacggtgaatcctatgactcaagaaaaagtaaatttcgaagagccttctcttggaaacaccagaaacacagtgcgatgtatgaaccaagttttagtagttatcgccttgatccgtgtttcttcctcttttaaaatgtattctgtttatctacctaatttgcaataactaaatatacacttggagcaaacttgttagacaccttatttgttttgtcatttaatgaccaaaaccttcaaaaaggttgattgtacttacaccttcggcggttgcgcagaggaaagcggttgcccgacagcgctcctctcgcatgtacgtatcgagcaagtctgtgaacgacgcggctttggcggcgaagggggcgccccgtcccctcgggtcctcttactgccggcgccggatggggcggctcctttcgctgtcgccttcgtcccaccagctgaggcggcgactgctcctcgcgtggcagacgctccagcctccttggtcgtcctggaggtgccaggagtggttgcccctggtgcggccttctttgagccgccgccttctgcacctggcccggggcaggtttcggtcgccgaggaagtcgttgtcggcgcgcgctcggtggcggcagggtcggtcgccggtctgccgccgccgcccccgccccgtgaagggggttctgggttggcgctgttgcccgcggaggtcgccgcgccctaggtgccaccgccgcctgccgctattgccttgacttccgcaggtgccgcggtacccatgggatctgaggaaatccacggggggcttcccctctccctccctgaaggacggggggcagaggcagaagagtggcagcggaccgagtcagcctcgtctcgggccaactcgagcttagaaactatcgagcgcatgttcggtagcttcgaggaggcgatttcgattgcttgggcgtcgatgacgcgggatctgattccttttggttagcgcctccttatgcggtcggtggctcgagaggaagcgctactagccgcccaacaggaggtggagcagttgcgtgctggggccattcggctcagggagtgggagcgcgagctcaccaccctttgttctgaggctgtccggcttcggagcgagacgccgctcctacgcgtggagcatgacgatgcttagggcaacatggatcacctacgggaggaggggtcccgactctaagaggccctcgatgggatgagccttggggccgagggggccacgccgaaccttggggaggtcgacgcctgtctaggggaggcaaactcggagctccaaagggaacgcaatgcaactggagagctctaaaagatgatttcccaagctgaggtcgccaggaaggcagcagaagaggcgaagacggtggcagaaggaaggatacgagagctctcgcttgcttgtgatggcaccgttgtttcgagactccaggcggagacctcactttcggagcggagcgccgagctccaagtgcttcacccgatcgtcggctcggtgtgcactcacctttcttctccaccgccgatcgaggtccctctaatcaatcggctgcgagcgctgtccgatcatgtggagcacgtggtcgtcgagggagcatatcacgggagcatccttgccctgggacagatggtctcccatttcgatgaaatcgactctggtgtgatcgcggaaggcttcgccgccggttgaagtgacgaggagctgggtgccattgaggtgcaggtccatccccacgcccggtcgatcgtgggccgggtcaatgtgaagttcctcctgatcgacccctggagcctgggaccactcgccggtggtccgtccacccattcttagtcggcgttcattgtaatgttttgtaatgactatctttagatgtcctgactgtgatcttatgtataatattatctgttttaaactctgcatccttcctttttcctt

SEQ ID NO: 15275 - DNA, 4293 bp, Zea Mays
ttctcggcccctttcacacaccaaaaaaaaaaccaggtgaggaatctaccaattgattttcttcacccgtccacctcgtcttgcgctcctctgtctcggcgacgactgtgctaccgccgccgccgccgcaagacttcgtcgggcactttgccggcgacgatttcccaccagcccaacaggatcagaggaggtgatggcgaggagtgacagctgcctggcgcgcgtgggtgccggaattgctatcggtggcgcggtcggcggagccgtcggtgcttgctatggaacttttgaggcgttcagatacaagatccctggattgctaaagatcagatacattgggcaaaccaccgttggcagcgctgcgatttttgggcttttcttgggggctgggagcttgattcactgtggaaaatcctactagtttgtttccctttttttttctgaagtctgaacacacctttgtcgatgggcttcagtgaaaactattcaatgcctgtttcatgtaacagctaatagctcagggttggaaaagaacaatcaagttatgtcctagttttggtgtggatggaaatagaatcaacgttcatctgcacgagaatcgtcaatttctcatctagcgtcttatgttctcatctcattttctttaaaaacgtaaggaattctttactcaccatatactttagctcggcagggcgccgcgaagcgcgcaactttttgtttactagtacttattagcagccggtgaagtaataaaagtgcgtacagcttttgctttactttttgtttacctattgcatccctactttggctctgaagtgtcctgccagcggcctgcgtacttaggcctaatttgataggccatgagtatgtggccagctgagtggcgcgcaggccataaatgcgctgcagtcagaggggctacttctaccgtcgcgagtactgcaccgcgtgcgcgtcctccacgaccagacacgtgtcccgccagtcctcgaccgcgccggcaacacggttcactccaccacgtcctcgcgcgagtgcgtgtctcaggtgttagccacgacgactggccacccggctgctccggtccgtcagttaagacccagcactcgtccttcatcgctctcggtccatcagcacgagcccgtatgaccttcacctcggccgtcgaccaccatccctatgctccacacctacacaccacaagccgaccgatatggttgcacaaaacataatctcacactctggtcagtccacagactaccacagagtgctattcgttgataatcactcatcatcaacccgaaccacaagggaagagacaaatcaaccttgtgttcgcacttttccaaccctatttctccacaagccgaccacaaaggtcaaggcaaatcctttccttaaacttgctcaacgagcgggagatacaaacttcttggggtcttccacaagttggagactcccaagcacacacaaaccgtcaaggaaccaaagttccaagagtaataaattcgcacaagtgaagtttgcaaaacgagctcaagtgagggagagggaggaggagagtgaaaaaccaacaacaaatcaacgaacgtcacctcacaccgaagatcctccaaccgttggaagaggatgcgatttgaggtgtgggagatagagttagagcgcttgttttgagtttggtgagcagtaaagtcagggagagtggctgaagtaaatgaggagagagagggaaaggggagtatatataggtgtccctctctcagggcagaagatttgaaaaatctgtgcaaaggtcggttgaaccgcacccagggccggttcaaccgtctgataggtcagacctatcagaacggccttctgactaaaggtcggttgaaccgcaccctagggccggttcaaccgctattttccagagaggtctgagtataaagtccggttgaaccagccaacagggcgaggttcaaccgcattttgtcagagaggtttgcgaggccggttcaaccgctttttaccagagacttccggaacagagtccggttgaaccgcaccctagggccggttcaaccacacttttccagagacttcttttggagaagtcaggttgaattgcccctgaggtaggttcaacctttcttcctagagagggtatcaaatgcaaattctctggagcggattgaacttttgcaaaccaaattcgaaatgcggttttcaaaatagattttgaagagtagagattttgagctcttgcaaacattttatacctttgtgcgaatccctcttgattgtacggtgaatcctatgactcaagaaaaagtaaatttcgaagagccttctcttggaaacaccagaaacacagtgcgatgtatgaaccaagttttagtagttatcgccttgatccgtgtttcttcctcttttaaaatgtattctgtttatctacctaatttgcaataactaaatatacacttggagcaaacttgttagacaccttatttgttttgtcatttaatgaccaaaaccttcaaaaaggttgattgtacttacaccttcggcggttgcgcagaggaaagcggttgcccgacagcgctcctctcggtatgttgggcttctgcttctccttcgcattcggctctttcccttgttccatgtttttttgagattcctctggttagcatgtacgtatcgagcaagtctgtgaacgacgcggctttggcggcgaagggggcgccccgtcccctcgggtcctcttactgccggcgccggatggggcggctcctttcgctgtcgccttcgtcccaccagctgaggcggcgactgctcctcgcgtggcagacgctccagcctccttggtcgtcctggaggtgccaggagtggttgcccctggtgcggccttctttgagccgccgccttctgcacctggcccggggcaggtttcggtcgccgaggaagtcgttgtcggcgcgcgctcggtggcggcagggtcggtcgccggtctgccgccgccgcccccgccccgtgaagggggttctgggttggcgctgttgcccgcggaggtcgccgcgccctaggtgccaccgccgcctgccgctattgccttgacttccgcaggtgccgcggtacccatgggatctgaggaaatccacggggggcttcccctctccctccctgaaggacggggggcagaggcagaagagtggcagcggaccgagtcagcctcgtctcgggccaactcgagcttagaaactatcgagcgcatgttcggtagcttcgaggaggcgatttcgattgcttgggcgtcgatgacgcgggatctgattccttttggttagcgcctccttatgcggtcggtggctcgagaggaagcgctactagccgcccaacaggaggtggagcagttgcgtgctggggccattcggctcagggagtgggagcgcgagctcaccaccctttgttctgaggctgtccggcttcggagcgagacgccgctcctacgcgtggagcatgacgatgcttagggcaacatggatcacctacgggaggaggggtcccgactctaagaggccctcgatgggatgagccttggggccgagggggccacgccgaaccttggggaggtcgacgcctgtctaggggaggcaaactcggagctccaaagggaacgcaatgcaactggagatgatttcccaagctgaggtcgccaggaaggcagcagaagaggcgaagacggtggcagaaggaaggatacgagagctctcgcttgcttgtgatggcaccgttgtttcgagactccaggcggagacctcactttcggagcggagcgccgagctccaagtgcttcacccgatcgtcggctcggtgtgcactcacctttcttctccaccgccgatcgaggtccctctaatcaatcggctgcgagcgctgtccgatcatgtggagcacgtggtcgtcgagggagcatatcacgggagcatccttgccctgggacagatggtctcccatttcgatgaaatcgactctggtgtgatcgcggaaggcttcgccgccggttgaagtgacgaggagctgggtgccattgaggtgcaggtccatccccacgcccggtcgatcgtgggccgggtcaatgtgaagttcctcctgatcgacccctggagcctgggaccactcgccggtggtccgtccacccattcttagtcggcgttcattgtaatgttttgtaatgactatctttagatgtcctgactgtgatcttatgtataatattatctgttttaaactctgcatccttcctttttcctt

SEQ ID NO: 15276 - DNA, 1628 bp, Zea Mays
accaattgattttcttcacccgtccacctcgtcttgcgctcctctgtctcggcgacgactgtgctaccgccgccgccgccgcaagacttcgtcgggcactttgccggcgacgatttcccaccagcccaacaggatcagaggaggtgatggcgaggagtgacagctgcctggcgcgcgtgggtgccggaattgctatcggtggcgcggtcggcggagccgtcggtaaccttcgtccctaaacccctaaacactaggcttgcagcatcaatccgtccgtgcgagccgcttcacccgtcggtgtttttttttttggttggaagtagattagtgtgcgatttcaggaatcttctcgagctagctagtagctacatccctggtttgtgtggttagctagcggcagatgtaataactaggtggcttttgttaagagttactagtgcttaggtagcatcatctggaggtggaagatatcgatgctcgagttggagtttgtttgcccccaattgcttgtgctctaagggctgttgctgattcggtctgccgtggtttggttaacttcctgctggtgcttagaacttgggatggaaaatgtaagattttgtatttgcctttgatttgactgaatgaatgacttctaatgtcaaaggcttgttcaatgccactttggaatgtaccgattagtatattcctgatttggattccattgtagcgtcaagatgacagcatttggaattgtctgtatgtcgagttactggtatttgctgtcataaagttatccttccgcttggtgattttgtacttagctcgtggagagagtaccggtcacaaggacttaagggtcagatatggtcgtgtattaggctaccagtctctgactgtcttatcttgatagtcattactcgggttttgtaagtcagaaaagatgtgcctgtggaaagttacttttgttgatatttttacgggatctgtgttgaccagtgcttcaaggatgtacctaacatgcttggcttgcttctttcgtgcaataactcttatgcaattgttgctttcaagatgtatctcaaacagagttgcttatattccctctgctcactagaaagtgtttaagggagcctaattagcatgcatgcagtcttttctgtcctaaatctcattcttgtatgagggagttggtagatctcaaagtgctcttgtacccacgtgcttcctaggatatgaatgtcacagaaataaatggtatatttttccttctttctgacgccatagcatgagtaccaagttactaagggggtgtttgaatgcactaggactaatagttagttggctaaaaatttgctagtggaattagctaactaacaaatagctagctaactattaactaatttactaaaaatagctaatagctgaactattagctagggtgtttggatgtctccaactaattttagccgctaactgttatctccactgcattcaaacaccccctaattggcatgtttttcctccttcctctgcaggtgcttgctatggaacttttgaggcgttcagatacaaggaaaataaaaaactggaataggtcggtagtctggtcctggaagactcaaaagcatagtggaaggatatcctac

SEQ ID NO: 15277 - DNA, 325 bp, Zea Mays
accaattgattttcttcacccgtccacctcgtcttgcgctcctctgtctcggcgacgactgtgctaccgccgccgccgccgcaagacttcgtcgggcactttgccggcgacgatttcccaccaggatcagaggaggtgatggcgaggagtgacagctgcctggcgcgcgtgggtgccggaattgctatcggtggcgcggtcggcggagccgtcggtgcttgctatggaacttttgaggcgttcagatacaaggaaaataaaaaactggaataggtcggtagtctggtcctggaagactcaaaagcatagtggaaggatatcctac

SEQ ID NO: 15278 - DNA, 4180 bp, Zea Mays
accaattgattttcttcacccgtccacctcgtcttgcgctcctctgtctcggcgacgactgtgctaccgccgccgccgccgcaagacttcgtcgggcactttgccggcgacgatttcccaccagcccaacaggatcagaggaggtgatggcgaggagtgacagctgcctggcgcgcgtgggtgccggaattgctatcggtggcgcggtcggcggagccgtcggtgcttgctatggaacttttgaggcgttcagatacaagatccctggattgctaaagatcagatacattgggcaaaccaccgttggcagcgctgcgatttttgggcttttcttgggggctgggagcttgattcactgtggaaaatcctactagtttgtttccctttttttttctgaagtctgaacacacctttgtcgatgggcttcagtgaaaactattcaatgcctgtttcatgtaacagctaatagctcagggttggaaaagaacaatcaagttatgtcctagttttggtgtggatggaaatagaatcaacgttcatctgcacgagaatcgtcaatttctcatctagcgtcttatgttctcatctcattttctttaaaaacgtaaggaattctttactcaccatatactttagctcggcagggcgccgcgaagcgcgcaactttttgtttactagtacttattagcagccggtgaagtaataaaagtgcgtacagcttttgctttactttttgtttacctattgcatccctactttggctctgaagtgtcctgccagcggcctgcgtacttaggcctaatttgataggccatgagtatgtggccagctgagtggcgcgcaggccataaatgcgctgcagtcagaggggctacttctaccgtcgcgagtactgcaccgcgtgcgcgtcctccacgaccagacacgtgtcccgccagtcctcgaccgcgccggcaacacggttcactccaccacgtcctcgcgcgagtgcgtgtctcaggtgttagccacgacgactggccacccggctgctccggtccgtcagttaagacccagcactcgtccttcatcgctctcggtccatcagcacgagcccgtatgaccttcacctcggccgtcgaccaccatccctatgctccacacctacacaccacaagccgaccgatatggttgcacaaaacataatctcacactctggtcagtccacagactaccacagagtgctattcgttgataatcactcatcatcaacccgaaccacaagggaagagacaaatcaaccttgtgttcgcacttttccaaccctatttctccacaagccgaccacaaaggtcaaggcaaatcctttccttaaacttgctcaacgagcgggagatacaaacttcttggggtcttccacaagttggagactcccaagcacacacaaaccgtcaaggaaccaaagttccaagagtaataaattcgcacaagtgaagtttgcaaaacgagctcaagtgagggagagggaggaggagagtgaaaaaccaacaacaaatcaacgaacgtcacctcacaccgaagatcctccaaccgttggaagaggatgcgatttgaggtgtgggagatagagttagagcgcttgttttgagtttggtgagcagtaaagtcagggagagtggctgaagtaaatgaggagagagagggaaaggggagtatatataggtgtccctctctcagggcagaagatttgaaaaatctgtgcaaaggtcggttgaaccgcacccagggccggttcaaccgtctgataggtcagacctatcagaacggccttctgactaaaggtcggttgaaccgcaccctagggccggttcaaccgctattttccagagaggtctgagtataaagtccggttgaaccagccaacagggcgaggttcaaccgcattttgtcagagaggtttgcgaggccggttcaaccgctttttaccagagacttccggaacagagtccggttgaaccgcaccctagggccggttcaaccacacttttccagagacttcttttggagaagtcaggttgaattgcccctgaggtaggttcaacctttcttcctagagagggtatcaaatgcaaattctctggagcggattgaacttttgcaaaccaaattcgaaatgcggttttcaaaatagattttgaagagtagagattttgagctcttgcaaacattttatacctttgtgcgaatccctcttgattgtacggtgaatcctatgactcaagaaaaagtaaatttcgaagagccttctcttggaaacaccagaaacacagtgcgatgtatgaaccaagttttagtagttatcgccttgatccgtgtttcttcctcttttaaaatgtattctgtttatctacctaatttgcaataactaaatatacacttggagcaaacttgttagacaccttatttgttttgtcatttaatgaccaaaaccttcaaaaaggttgattgtacttacaccttcggcggttgcgcagaggaaagcggttgcccgacagcgctcctctcgcatgtacgtatcgagcaagtctgtgaacgacgcggctttggcggcgaagggggcgccccgtcccctcgggtcctcttactgccggcgccggatggggcggctcctttcgctgtcgccttcgtcccaccagctgaggcggcgactgctcctcgcgtggcagacgctccagcctccttggtcgtcctggaggtgccaggagtggttgcccctggtgcggccttctttgagccgccgccttctgcacctggcccggggcaggtttcggtcgccgaggaagtcgttgtcggcgcgcgctcggtggcggcagggtcggtcgccggtctgccgccgccgcccccgccccgtgaagggggttctgggttggcgctgttgcccgcggaggtcgccgcgccctaggtgccaccgccgcctgccgctattgccttgacttccgcaggtgccgcggtacccatgggatctgaggaaatccacggggggcttcccctctccctccctgaaggacggggggcagaggcagaagagtggcagcggaccgagtcagcctcgtctcgggccaactcgagcttagaaactatcgagcgcatgttcggtagcttcgaggaggcgatttcgattgcttgggcgtcgatgacgcgggatctgattccttttggttagcgcctccttatgcggtcggtggctcgagaggaagcgctactagccgcccaacaggaggtggagcagttgcgtgctggggccattcggctcagggagtgggagcgcgagctcaccaccctttgttctgaggctgtccggcttcggagcgagacgccgctcctacgcgtggagcatgacgatgcttagggcaacatggatcacctacgggaggaggggtcccgactctaagaggccctcgatgggatgagccttggggccgagggggccacgccgaaccttggggaggtcgacgcctgtctaggggaggcaaactcggagctccaaagggaacgcaatgcaactggagagctctaaaagatgatttcccaagctgaggtcgccaggaaggcagcagaagaggcgaagacggtggcagaaggaaggatacgagagctctcgcttgcttgtgatggcaccgttgtttcgagactccaggcggagacctcactttcggagcggagcgccgagctccaagtgcttcacccgatcgtcggctcggtgtgcactcacctttcttctccaccgccgatcgaggtccctctaatcaatcggctgcgagcgctgtccgatcatgtggagcacgtggtcgtcgagggagcatatcacgggagcatccttgccctgggacagatggtctcccatttcgatgaaatcgactctggtgtgatcgcggaaggcttcgccgccggttgaagtgacgaggagctgggtgccattgaggtgcaggtccatccccacgcccggtcgatcgtgggccgggtcaatgtgaagttcctcctgatcgacccctggagcctgggaccactcgccggtggtccgtccacccattcttagtcggcgttcattgtaatgttttgtaatgactatctttagatgtcctgactgtgatcttatgtataatattatctgttttaaactctgcatccttcctttttcctt

SEQ ID NO: 15279 - DNA, 5573 bp, Zea Mays
accaattgattttcttcacccgtccacctcgtcttgcgctcctctgtctcggcgacgactgtgctaccgccgccgccgccgcaagacttcgtcgggcactttgccggcgacgatttcccaccagctatttctactcggatccgatctatttacaagcccaacaggatcagaggaggtgatggcgaggagtgacagctgcctggcgcgcgtgggtgccggaattgctatcggtggcgcggtcggcggagccgtcggtaaccttcgtccctaaacccctaaacactaggcttgcagcatcaatccgtccgtgcgagccgcttcacccgtcggtgtttttttttttggttggaagtagattagtgtgcgatttcaggaatcttctcgagctagctagtagctacatccctggtttgtgtggttagctagcggcagatgtaataactaggtggcttttgttaagagttactagtgcttaggtagcatcatctggaggtggaagatatcgatgctcgagttggagtttgtttgcccccaattgcttgtgctctaagggctgttgctgattcggtctgccgtggtttggttaacttcctgctggtgcttagaacttgggatggaaaatgtaagattttgtatttgcctttgatttgactgaatgaatgacttctaatgtcaaaggcttgttcaatgccactttggaatgtaccgattagtatattcctgatttggattccattgtagcgtcaagatgacagcatttggaattgtctgtatgtcgagttactggtatttgctgtcataaagttatccttccgcttggtgattttgtacttagctcgtggagagagtaccggtcacaaggacttaagggtcagatatggtcgtgtattaggctaccagtctctgactgtcttatcttgatagtcattactcgggttttgtaagtcagaaaagatgtgcctgtggaaagttacttttgttgatatttttacgggatctgtgttgaccagtgcttcaaggatgtacctaacatgcttggcttgcttctttcgtgcaataactcttatgcaattgttgctttcaagatgtatctcaaacagagttgcttatattccctctgctcactagaaagtgtttaagggagcctaattagcatgcatgcagtcttttctgtcctaaatctcattcttgtatgagggagttggtagatctcaaagtgctcttgtacccacgtgcttcctaggatatgaatgtcacagaaataaatggtatatttttccttctttctgacgccatagcatgagtaccaagttactaagggggtgtttgaatgcactaggactaatagttagttggctaaaaatttgctagtggaattagctaactaacaaatagctagctaactattaactaatttactaaaaatagctaatagctgaactattagctagggtgtttggatgtctccaactaattttagccgctaactgttatctccactgcattcaaacaccccctaattggcatgtttttcctccttcctctgcaggtgcttgctatggaacttttgaggcgttcagatacaagatccctggattgctaaagatcagatacattgggcaaaccaccgttggcagcgctgcgatttttgggcttttcttgggggctgggagcttgattcactgtggaaaatcctactagtttgtttccctttttttttctgaagtctgaacacacctttgtcgatgggcttcagtgaaaactattcaatgcctgtttcatgtaacagctaatagctcagggttggaaaagaacaatcaagttatgtcctagttttggtgtggatggaaatagaatcaacgttcatctgcacgagaatcgtcaatttctcatctagcgtcttatgttctcatctcattttctttaaaaacgtaaggaattctttactcaccatatactttagctcggcagggcgccgcgaagcgcgcaactttttgtttactagtacttattagcagccggtgaagtaataaaagtgcgtacagcttttgctttactttttgtttacctattgcatccctactttggctctgaagtgtcctgccagcggcctgcgtacttaggcctaatttgataggccatgagtatgtggccagctgagtggcgcgcaggccataaatgcgctgcagtcagaggggctacttctaccgtcgcgagtactgcaccgcgtgcgcgtcctccacgaccagacacgtgtcccgccagtcctcgaccgcgccggcaacacggttcactccaccacgtcctcgcgcgagtgcgtgtctcaggtgttagccacgacgactggccacccggctgctccggtccgtcagttaagacccagcactcgtccttcatcgctctcggtccatcagcacgagcccgtatgaccttcacctcggccgtcgaccaccatccctatgctccacacctacacaccacaagccgaccgatatggttgcacaaaacataatctcacactctggtcagtccacagactaccacagagtgctattcgttgataatcactcatcatcaacccgaaccacaagggaagagacaaatcaaccttgtgttcgcacttttccaaccctatttctccacaagccgaccacaaaggtcaaggcaaatcctttccttaaacttgctcaacgagcgggagatacaaacttcttggggtcttccacaagttggagactcccaagcacacacaaaccgtcaaggaaccaaagttccaagagtaataaattcgcacaagtgaagtttgcaaaacgagctcaagtgagggagagggaggaggagagtgaaaaaccaacaacaaatcaacgaacgtcacctcacaccgaagatcctccaaccgttggaagaggatgcgatttgaggtgtgggagatagagttagagcgcttgttttgagtttggtgagcagtaaagtcagggagagtggctgaagtaaatgaggagagagagggaaaggggagtatatataggtgtccctctctcagggcagaagatttgaaaaatctgtgcaaaggtcggttgaaccgcacccagggccggttcaaccgtctgataggtcagacctatcagaacggccttctgactaaaggtcggttgaaccgcaccctagggccggttcaaccgctattttccagagaggtctgagtataaagtccggttgaaccagccaacagggcgaggttcaaccgcattttgtcagagaggtttgcgaggccggttcaaccgctttttaccagagacttccggaacagagtccggttgaaccgcaccctagggccggttcaaccacacttttccagagacttcttttggagaagtcaggttgaattgcccctgaggtaggttcaacctttcttcctagagagggtatcaaatgcaaattctctggagcggattgaacttttgcaaaccaaattcgaaatgcggttttcaaaatagattttgaagagtagagattttgagctcttgcaaacattttatacctttgtgcgaatccctcttgattgtacggtgaatcctatgactcaagaaaaagtaaatttcgaagagccttctcttggaaacaccagaaacacagtgcgatgtatgaaccaagttttagtagttatcgccttgatccgtgtttcttcctcttttaaaatgtattctgtttatctacctaatttgcaataactaaatatacacttggagcaaacttgttagacaccttatttgttttgtcatttaatgaccaaaaccttcaaaaaggttgattgtacttacaccttcggcggttgcgcagaggaaagcggttgcccgacagcgctcctctcggtatgttgggcttctgcttctccttcgcattcggctctttcccttgttccatgtttttttgagattcctctggttagcatgtacgtatcgagcaagtctgtgaacgacgcggctttggcggcgaagggggcgccccgtcccctcgggtcctcttactgccggcgccggatggggcggctcctttcgctgtcgccttcgtcccaccagctgaggcggcgactgctcctcgcgtggcagacgctccagcctccttggtcgtcctggaggtgccaggagtggttgcccctggtgcggccttctttgagccgccgccttctgcacctggcccggggcaggtttcggtcgccgaggaagtcgttgtcggcgcgcgctcggtggcggcagggtcggtcgccggtctgccgccgccgcccccgccccgtgaagggggttctgggttggcgctgttgcccgcggaggtcgccgcgccctaggtgccaccgccgcctgccgctattgccttgacttccgcaggtgccgcggtacccatgggatctgaggaaatccacggggggcttcccctctccctccctgaaggacggggggcagaggcagaagagtggcagcggaccgagtcagcctcgtctcgggccaactcgagcttagaaactatcgagcgcatgttcggtagcttcgaggaggcgatttcgattgcttgggcgtcgatgacgcgggatctgattccttttggttagcgcctccttatgcggtcggtggctcgagaggaagcgctactagccgcccaacaggaggtggagcagttgcgtgctggggccattcggctcagggagtgggagcgcgagctcaccaccctttgttctgaggctgtccggcttcggagcgagacgccgctcctacgcgtggagcatgacgatgcttagggcaacatggatcacctacgggaggaggggtcccgactctaagaggccctcgatgggatgagccttggggccgagggggccacgccgaaccttggggaggtcgacgcctgtctaggggaggcaaactcggagctccaaagggaacgcaatgcaactggagatgatttcccaagctgaggtcgccaggaaggcagcagaagaggcgaagacggtggcagaaggaaggatacgagagctctcgcttgcttgtgatggcaccgttgtttcgagactccaggcggagacctcactttcggagcggagcgccgagctccaagtgcttcacccgatcgtcggctcggtgtgcactcacctttcttctccaccgccgatcgaggtccctctaatcaatcggctgcgagcgctgtccgatcatgtggagcacgtggtcgtcgagggagcatatcacgggagcatccttgccctgggacagatggtctcccatttcgatgaaatcgactctggtgtgatcgcggaaggcttcgccgccggttgaagtgacgaggagctgggtgccattgaggtgcaggtccatccccacgcccggtcgatcgtgggccgggtcaatgtgaagttcctcctgatcgacccctggagcctgggaccactcgccggtggtccgtccacccattcttagtcggcgttcattgtaatgttttgtaatgactatctttagatgtcctgactgtgatcttatgtataatattatctgttttaaactctgcatccttcctttttcctt

SEQ ID NO: 15280 - DNA, 4155 bp, Zea Mays
accaattgattttcttcacccgtccacctcgtcttgcgctcctctgtctcggcgacgactgtgctaccgccgccgccgccgcaagacttcgtcgggcactttgccggcgacgatttcccaccagaggaggtgatggcgaggagtgacagctgcctggcgcgcgtgggtgccggaattgctatcggtggcgcggtcggcggagccgtcggtgcttgctatggaacttttgaggcgttcagatacaagatccctggattgctaaagatcagatacattgggcaaaccaccgttggcagcgctgcgatttttgggcttttcttgggggctgggagcttgattcactgtggaaaatcctactagtttgtttccctttttttttctgaagtctgaacacacctttgtcgatgggcttcagtgaaaactattcaatgcctgtttcatgtaacagctaatagctcagggttggaaaagaacaatcaagttatgtcctagttttggtgtggatggaaatagaatcaacgttcatctgcacgagaatcgtcaatttctcatctagcgtcttatgttctcatctcattttctttaaaaacgtaaggaattctttactcaccatatactttagctcggcagggcgccgcgaagcgcgcaactttttgtttactagtacttattagcagccggtgaagtaataaaagtgcgtacagcttttgctttactttttgtttacctattgcatccctactttggctctgaagtgtcctgccagcggcctgcgtacttaggcctaatttgataggccatgagtatgtggccagctgagtggcgcgcaggccataaatgcgctgcagtcagaggggctacttctaccgtcgcgagtactgcaccgcgtgcgcgtcctccacgaccagacacgtgtcccgccagtcctcgaccgcgccggcaacacggttcactccaccacgtcctcgcgcgagtgcgtgtctcaggtgttagccacgacgactggccacccggctgctccggtccgtcagttaagacccagcactcgtccttcatcgctctcggtccatcagcacgagcccgtatgaccttcacctcggccgtcgaccaccatccctatgctccacacctacacaccacaagccgaccgatatggttgcacaaaacataatctcacactctggtcagtccacagactaccacagagtgctattcgttgataatcactcatcatcaacccgaaccacaagggaagagacaaatcaaccttgtgttcgcacttttccaaccctatttctccacaagccgaccacaaaggtcaaggcaaatcctttccttaaacttgctcaacgagcgggagatacaaacttcttggggtcttccacaagttggagactcccaagcacacacaaaccgtcaaggaaccaaagttccaagagtaataaattcgcacaagtgaagtttgcaaaacgagctcaagtgagggagagggaggaggagagtgaaaaaccaacaacaaatcaacgaacgtcacctcacaccgaagatcctccaaccgttggaagaggatgcgatttgaggtgtgggagatagagttagagcgcttgttttgagtttggtgagcagtaaagtcagggagagtggctgaagtaaatgaggagagagagggaaaggggagtatatataggtgtccctctctcagggcagaagatttgaaaaatctgtgcaaaggtcggttgaaccgcacccagggccggttcaaccgtctgataggtcagacctatcagaacggccttctgactaaaggtcggttgaaccgcaccctagggccggttcaaccgctattttccagagaggtctgagtataaagtccggttgaaccagccaacagggcgaggttcaaccgcattttgtcagagaggtttgcgaggccggttcaaccgctttttaccagagacttccggaacagagtccggttgaaccgcaccctagggccggttcaaccacacttttccagagacttcttttggagaagtcaggttgaattgcccctgaggtaggttcaacctttcttcctagagagggtatcaaatgcaaattctctggagcggattgaacttttgcaaaccaaattcgaaatgcggttttcaaaatagattttgaagagtagagattttgagctcttgcaaacattttatacctttgtgcgaatccctcttgattgtacggtgaatcctatgactcaagaaaaagtaaatttcgaagagccttctcttggaaacaccagaaacacagtgcgatgtatgaaccaagttttagtagttatcgccttgatccgtgtttcttcctcttttaaaatgtattctgtttatctacctaatttgcaataactaaatatacacttggagcaaacttgttagacaccttatttgttttgtcatttaatgaccaaaaccttcaaaaaggttgattgtacttacaccttcggcggttgcgcagaggaaagcggttgcccgacagcgctcctctcgcatgtacgtatcgagcaagtctgtgaacgacgcggctttggcggcgaagggggcgccccgtcccctcgggtcctcttactgccggcgccggatggggcggctcctttcgctgtcgccttcgtcccaccagctgaggcggcgactgctcctcgcgtggcagacgctccagcctccttggtcgtcctggaggtgccaggagtggttgcccctggtgcggccttctttgagccgccgccttctgcacctggcccggggcaggtttcggtcgccgaggaagtcgttgtcggcgcgcgctcggtggcggcagggtcggtcgccggtctgccgccgccgcccccgccccgtgaagggggttctgggttggcgctgttgcccgcggaggtcgccgcgccctaggtgccaccgccgcctgccgctattgccttgacttccgcaggtgccgcggtacccatgggatctgaggaaatccacggggggcttcccctctccctccctgaaggacggggggcagaggcagaagagtggcagcggaccgagtcagcctcgtctcgggccaactcgagcttagaaactatcgagcgcatgttcggtagcttcgaggaggcgatttcgattgcttgggcgtcgatgacgcgggatctgattccttttggttagcgcctccttatgcggtcggtggctcgagaggaagcgctactagccgcccaacaggaggtggagcagttgcgtgctggggccattcggctcagggagtgggagcgcgagctcaccaccctttgttctgaggctgtccggcttcggagcgagacgccgctcctacgcgtggagcatgacgatgcttagggcaacatggatcacctacgggaggaggggtcccgactctaagaggccctcgatgggatgagccttggggccgagggggccacgccgaaccttggggaggtcgacgcctgtctaggggaggcaaactcggagctccaaagggaacgcaatgcaactggagatgatttcccaagctgaggtcgccaggaaggcagcagaagaggcgaagacggtggcagaaggaaggatacgagagctctcgcttgcttgtgatggcaccgttgtttcgagactccaggcggagacctcactttcggagcggagcgccgagctccaagtgcttcacccgatcgtcggctcggtgtgcactcacctttcttctccaccgccgatcgaggtccctctaatcaatcggctgcgagcgctgtccgatcatgtggagcacgtggtcgtcgagggagcatatcacgggagcatccttgccctgggacagatggtctcccatttcgatgaaatcgactctggtgtgatcgcggaaggcttcgccgccggttgaagtgacgaggagctgggtgccattgaggtgcaggtccatccccacgcccggtcgatcgtgggccgggtcaatgtgaagttcctcctgatcgacccctggagcctgggaccactcgccggtggtccgtccacccattcttagtcggcgttcattgtaatgttttgtaatgactatctttagatgtcctgactgtgatcttatgtataatattatctgttttaaactctgcatccttcctttttcctt

SEQ ID NO: 15281 - DNA, 4082 bp, Zea Mays
accaattgattttcttcacccgtccacctcgtcttgcgctcctctgtctcggcgacgactgtgctaccgccgccgccgccgcaagacttcgtcgggcactttgccggcgacgatttcccaccaggtgcttgctatggaacttttgaggcgttcagatacaagatccctggattgctaaagatcagatacattgggcaaaccaccgttggcagcgctgcgatttttgggcttttcttgggggctgggagcttgattcactgtggaaaatcctactagtttgtttccctttttttttctgaagtctgaacacacctttgtcgatgggcttcagtgaaaactattcaatgcctgtttcatgtaacagctaatagctcagggttggaaaagaacaatcaagttatgtcctagttttggtgtggatggaaatagaatcaacgttcatctgcacgagaatcgtcaatttctcatctagcgtcttatgttctcatctcattttctttaaaaacgtaaggaattctttactcaccatatactttagctcggcagggcgccgcgaagcgcgcaactttttgtttactagtacttattagcagccggtgaagtaataaaagtgcgtacagcttttgctttactttttgtttacctattgcatccctactttggctctgaagtgtcctgccagcggcctgcgtacttaggcctaatttgataggccatgagtatgtggccagctgagtggcgcgcaggccataaatgcgctgcagtcagaggggctacttctaccgtcgcgagtactgcaccgcgtgcgcgtcctccacgaccagacacgtgtcccgccagtcctcgaccgcgccggcaacacggttcactccaccacgtcctcgcgcgagtgcgtgtctcaggtgttagccacgacgactggccacccggctgctccggtccgtcagttaagacccagcactcgtccttcatcgctctcggtccatcagcacgagcccgtatgaccttcacctcggccgtcgaccaccatccctatgctccacacctacacaccacaagccgaccgatatggttgcacaaaacataatctcacactctggtcagtccacagactaccacagagtgctattcgttgataatcactcatcatcaacccgaaccacaagggaagagacaaatcaaccttgtgttcgcacttttccaaccctatttctccacaagccgaccacaaaggtcaaggcaaatcctttccttaaacttgctcaacgagcgggagatacaaacttcttggggtcttccacaagttggagactcccaagcacacacaaaccgtcaaggaaccaaagttccaagagtaataaattcgcacaagtgaagtttgcaaaacgagctcaagtgagggagagggaggaggagagtgaaaaaccaacaacaaatcaacgaacgtcacctcacaccgaagatcctccaaccgttggaagaggatgcgatttgaggtgtgggagatagagttagagcgcttgttttgagtttggtgagcagtaaagtcagggagagtggctgaagtaaatgaggagagagagggaaaggggagtatatataggtgtccctctctcagggcagaagatttgaaaaatctgtgcaaaggtcggttgaaccgcacccagggccggttcaaccgtctgataggtcagacctatcagaacggccttctgactaaaggtcggttgaaccgcaccctagggccggttcaaccgctattttccagagaggtctgagtataaagtccggttgaaccagccaacagggcgaggttcaaccgcattttgtcagagaggtttgcgaggccggttcaaccgctttttaccagagacttccggaacagagtccggttgaaccgcaccctagggccggttcaaccacacttttccagagacttcttttggagaagtcaggttgaattgcccctgaggtaggttcaacctttcttcctagagagggtatcaaatgcaaattctctggagcggattgaacttttgcaaaccaaattcgaaatgcggttttcaaaatagattttgaagagtagagattttgagctcttgcaaacattttatacctttgtgcgaatccctcttgattgtacggtgaatcctatgactcaagaaaaagtaaatttcgaagagccttctcttggaaacaccagaaacacagtgcgatgtatgaaccaagttttagtagttatcgccttgatccgtgtttcttcctcttttaaaatgtattctgtttatctacctaatttgcaataactaaatatacacttggagcaaacttgttagacaccttatttgttttgtcatttaatgaccaaaaccttcaaaaaggttgattgtacttacaccttcggcggttgcgcagaggaaagcggttgcccgacagcgctcctctcgcatgtacgtatcgagcaagtctgtgaacgacgcggctttggcggcgaagggggcgccccgtcccctcgggtcctcttactgccggcgccggatggggcggctcctttcgctgtcgccttcgtcccaccagctgaggcggcgactgctcctcgcgtggcagacgctccagcctccttggtcgtcctggaggtgccaggagtggttgcccctggtgcggccttctttgagccgccgccttctgcacctggcccggggcaggtttcggtcgccgaggaagtcgttgtcggcgcgcgctcggtggcggcagggtcggtcgccggtctgccgccgccgcccccgccccgtgaagggggttctgggttggcgctgttgcccgcggaggtcgccgcgccctaggtgccaccgccgcctgccgctattgccttgacttccgcaggtgccgcggtacccatgggatctgaggaaatccacggggggcttcccctctccctccctgaaggacggggggcagaggcagaagagtggcagcggaccgagtcagcctcgtctcgggccaactcgagcttagaaactatcgagcgcatgttcggtagcttcgaggaggcgatttcgattgcttgggcgtcgatgacgcgggatctgattccttttggttagcgcctccttatgcggtcggtggctcgagaggaagcgctactagccgcccaacaggaggtggagcagttgcgtgctggggccattcggctcagggagtgggagcgcgagctcaccaccctttgttctgaggctgtccggcttcggagcgagacgccgctcctacgcgtggagcatgacgatgcttagggcaacatggatcacctacgggaggaggggtcccgactctaagaggccctcgatgggatgagccttggggccgagggggccacgccgaaccttggggaggtcgacgcctgtctaggggaggcaaactcggagctccaaagggaacgcaatgcaactggagagctctaaaagatgatttcccaagctgaggtcgccaggaaggcagcagaagaggcgaagacggtggcagaaggaaggatacgagagctctcgcttgcttgtgatggcaccgttgtttcgagactccaggcggagacctcactttcggagcggagcgccgagctccaagtgcttcacccgatcgtcggctcggtgtgcactcacctttcttctccaccgccgatcgaggtccctctaatcaatcggctgcgagcgctgtccgatcatgtggagcacgtggtcgtcgagggagcatatcacgggagcatccttgccctgggacagatggtctcccatttcgatgaaatcgactctggtgtgatcgcggaaggcttcgccgccggttgaagtgacgaggagctgggtgccattgaggtgcaggtccatccccacgcccggtcgatcgtgggccgggtcaatgtgaagttcctcctgatcgacccctggagcctgggaccactcgccggtggtccgtccacccattcttagtcggcgttcattgtaatgttttgtaatgactatctttagatgtcctgactgtgatcttatgtataatattatctgttttaaactctgcatccttcctttttcctt

SEQ ID NO: 15282 - DNA, 3987 bp, Zea Mays
ccagtttggcacgaagttcgtctccgcggcgtccatcctccgcagcggatgcgggatcaacgccaagatccctggattgctaaagatcagatacattgggcaaaccaccgttggcagcgctgcgatttttgggcttttcttgggggctgggagcttgattcactgtggaaaatcctactagtttgtttccctttttttttctgaagtctgaacacacctttgtcgatgggcttcagtgaaaactattcaatgcctgtttcatgtaacagctaatagctcagggttggaaaagaacaatcaagttatgtcctagttttggtgtggatggaaatagaatcaacgttcatctgcacgagaatcgtcaatttctcatctagcgtcttatgttctcatctcattttctttaaaaacgtaaggaattctttactcaccatatactttagctcggcagggcgccgcgaagcgcgcaactttttgtttactagtacttattagcagccggtgaagtaataaaagtgcgtacagcttttgctttactttttgtttacctattgcatccctactttggctctgaagtgtcctgccagcggcctgcgtacttaggcctaatttgataggccatgagtatgtggccagctgagtggcgcgcaggccataaatgcgctgcagtcagaggggctacttctaccgtcgcgagtactgcaccgcgtgcgcgtcctccacgaccagacacgtgtcccgccagtcctcgaccgcgccggcaacacggttcactccaccacgtcctcgcgcgagtgcgtgtctcaggtgttagccacgacgactggccacccggctgctccggtccgtcagttaagacccagcactcgtccttcatcgctctcggtccatcagcacgagcccgtatgaccttcacctcggccgtcgaccaccatccctatgctccacacctacacaccacaagccgaccgatatggttgcacaaaacataatctcacactctggtcagtccacagactaccacagagtgctattcgttgataatcactcatcatcaacccgaaccacaagggaagagacaaatcaaccttgtgttcgcacttttccaaccctatttctccacaagccgaccacaaaggtcaaggcaaatcctttccttaaacttgctcaacgagcgggagatacaaacttcttggggtcttccacaagttggagactcccaagcacacacaaaccgtcaaggaaccaaagttccaagagtaataaattcgcacaagtgaagtttgcaaaacgagctcaagtgagggagagggaggaggagagtgaaaaaccaacaacaaatcaacgaacgtcacctcacaccgaagatcctccaaccgttggaagaggatgcgatttgaggtgtgggagatagagttagagcgcttgttttgagtttggtgagcagtaaagtcagggagagtggctgaagtaaatgaggagagagagggaaaggggagtatatataggtgtccctctctcagggcagaagatttgaaaaatctgtgcaaaggtcggttgaaccgcacccagggccggttcaaccgtctgataggtcagacctatcagaacggccttctgactaaaggtcggttgaaccgcaccctagggccggttcaaccgctattttccagagaggtctgagtataaagtccggttgaaccagccaacagggcgaggttcaaccgcattttgtcagagaggtttgcgaggccggttcaaccgctttttaccagagacttccggaacagagtccggttgaaccgcaccctagggccggttcaaccacacttttccagagacttcttttggagaagtcaggttgaattgcccctgaggtaggttcaacctttcttcctagagagggtatcaaatgcaaattctctggagcggattgaacttttgcaaaccaaattcgaaatgcggttttcaaaatagattttgaagagtagagattttgagctcttgcaaacattttatacctttgtgcgaatccctcttgattgtacggtgaatcctatgactcaagaaaaagtaaatttcgaagagccttctcttggaaacaccagaaacacagtgcgatgtatgaaccaagttttagtagttatcgccttgatccgtgtttcttcctcttttaaaatgtattctgtttatctacctaatttgcaataactaaatatacacttggagcaaacttgttagacaccttatttgttttgtcatttaatgaccaaaaccttcaaaaaggttgattgtacttacaccttcggcggttgcgcagaggaaagcggttgcccgacagcgctcctctcgcatgtacgtatcgagcaagtctgtgaacgacgcggctttggcggcgaagggggcgccccgtcccctcgggtcctcttactgccggcgccggatggggcggctcctttcgctgtcgccttcgtcccaccagctgaggcggcgactgctcctcgcgtggcagacgctccagcctccttggtcgtcctggaggtgccaggagtggttgcccctggtgcggccttctttgagccgccgccttctgcacctggcccggggcaggtttcggtcgccgaggaagtcgttgtcggcgcgcgctcggtggcggcagggtcggtcgccggtctgccgccgccgcccccgccccgtgaagggggttctgggttggcgctgttgcccgcggaggtcgccgcgccctaggtgccaccgccgcctgccgctattgccttgacttccgcaggtgccgcggtacccatgggatctgaggaaatccacggggggcttcccctctccctccctgaaggacggggggcagaggcagaagagtggcagcggaccgagtcagcctcgtctcgggccaactcgagcttagaaactatcgagcgcatgttcggtagcttcgaggaggcgatttcgattgcttgggcgtcgatgacgcgggatctgattccttttggttagcgcctccttatgcggtcggtggctcgagaggaagcgctactagccgcccaacaggaggtggagcagttgcgtgctggggccattcggctcagggagtgggagcgcgagctcaccaccctttgttctgaggctgtccggcttcggagcgagacgccgctcctacgcgtggagcatgacgatgcttagggcaacatggatcacctacgggaggaggggtcccgactctaagaggccctcgatgggatgagccttggggccgagggggccacgccgaaccttggggaggtcgacgcctgtctaggggaggcaaactcggagctccaaagggaacgcaatgcaactggagagctctaaaagatgatttcccaagctgaggtcgccaggaaggcagcagaagaggcgaagacggtggcagaaggaaggatacgagagctctcgcttgcttgtgatggcaccgttgtttcgagactccaggcggagacctcactttcggagcggagcgccgagctccaagtgcttcacccgatcgtcggctcggtgtgcactcacctttcttctccaccgccgatcgaggtccctctaatcaatcggctgcgagcgctgtccgatcatgtggagcacgtggtcgtcgagggagcatatcacgggagcatccttgccctgggacagatggtctcccatttcgatgaaatcgactctggtgtgatcgcggaaggcttcgccgccggttgaagtgacgaggagctgggtgccattgaggtgcaggtccatccccacgcccggtcgatcgtgggccgggtcaatgtgaagttcctcctgatcgacccctggagcctgggaccactcgccggtggtccgtccacccattcttagtcggcgttcattgtaatgttttgtaatgactatctttagatgtcctgactgtgatcttatgtataatattatctgttttaaactctgcatccttcctttttcctt

SEQ ID NO: 15283 - DNA, 962 bp, Zea Mays
gcctttgatccggagcttccgaatacggcggatcagggcgtgtcgggtacgttggccgggtcggtgaaattgtgagaaaacgagacgtgcctgccactctctctctcctccgctggccgacctgccccctccctccctccctctgctgctgtagctgagccctacgggcacctctccgttcaggagcaaagccaaaaacatcatccccctcgccaagaaagaaggcagacgaaggcaaaccctagccaacgcgtacgcctcgccccccgcgcctcctcccccagatccggccgatccgtcgttgccatggcgctgcgagctctcgccggcaagctgagggtcctcccttcacgagcggcggcctctcgctccttcgcctcccagatggagaagaaatgcagcaagtgtgctcttgaagagcaggctggatccttctctcaatggttggatgaaaggaagaggaatatcaaatgacggcgacaaagatgttacttgagagaaactgatgccattcacgcagaagggggaaaatggccatccacacgagatcatgtaagtccaacgtgatcaacatgaagcctattcatcttcaggcaccctcgaaagccaatatgggtgaactatcttgcatggccaaatattttcaacgtccctactggcttttacaacatcaacaacaccaagatgctcagccttgcgaagatgctcagcctactggcttttacaacatcaacaacaccaagatgctcagccttgcgaaggtatttccgagcaactatgtagccatctatgaagccaagtcaagagttgtacaagcccgacaaaaaacaaatcccgacaaaaaacaaatcgacattaggagaatccgtttgggtcgtgcttgggctaaaattgcctggacggggaagatgatggggcttgcttgcctgggccacgcagatgttgccccagccaatatttag

SEQ ID NO: 15284 - DNA, 1431 bp, Zea Mays
ccctccctccctctgctgctgtagctgagccctacgggcacctctccgttcaggagcaaagccaaaaacatcatccccctcgccaagaaagaaggcagacgaaggcaaaccctagccaacgcgtacgcctcgccccccgcgcctcctcccccagatccggccgatccgtcgttgccatggcgctgcgagctctcgccggcaagctgagggtcctcccttcacgagcggcggcctctcgctccttcgcctcccagatggagaagaaatgcagcaagtgtgctcttgaagagcaggctggatccttctctcaatggttggatgaaaggaagaggcgtgatatggaagagcttgcaaggttcagaaggaagagctacgtgcacaatgtgctagttcttgctggtagtgttggctttgtggcattcacgttgtcatgcgttgctgatgttatagcagatgaaatgaactagggagaaggggaggggagcacggcggcagcaaatgctccatgattggactggtagcttccccagggtcagaaaaaagaatgtgactcactgactgtaggggaatgccatggaagtgtagatgtgatgtttcttctcaattgtatatgccattggattgatgtttggaaattttacgtgtagtatgtctaagataagtccttttatgtactggttccgtgaacctataaaaatgcttcagctagttcttgagcattagttgtggtagtgtggaagagcaaagcacggttcagatttagcagggttttttttttcgaggaagttcagataaaaatgctttatatatataacaaataatatatccataagttggaatcacctctttctaaacatcatatttaaaccatgtattgaaggtaatgaaacacaactgagatgagaacagctagtaatgcatggattacaggaatatcaaatgacggcgacaaagatgttacttgagagaaactgatgccattcacgcagaagggggaaaatggccatccacacgagatcatgtaagtccaacgtgatcaacatgaagcctattcatcttcaggcaccctcgaaagccaatatgggtgaactatcttgcatggccaaatattttcaacgtccctactggcttttacaacatcaacaacaccaagatgctcagccttgcgaagatgctcagcctactggcttttacaacatcaacaacaccaagatgctcagccttgcgaaggtatttccgagcaactatgtagccatctatgaagccaagtcaagagttgtacaagcccgacaaaaaacaaatcccgacaaaaaacaaatcgacattaggagaatccgtttgggtcgtgcttgggctaaaattgcctggacggggaagatgatggggcttgcttgcctgggccacgcagatgttgccccagccaatatttag

SEQ ID NO: 15285 - DNA, 1103 bp, Zea Mays
ccacgtcttcgccgagtccgttcgagcgctcgcgatccacctgggaaatccgccgccatccgcaaccacctcgtggccgccttgccagctggccaagggccgggtggtgcctttatataccagtcgcgacccttattcaccgaaaccgaagcaccatcgttgaagacaccgcggcgagaagagagaaaccgagagaagggagagagcgccgccgcgcatgggcagagcgtgtccatgcggtcattggggcctcgggaccgagtcaaggggcgtcgccaggccgcgctgaacatgactgtgacttcgcctgggcggacttgcgctccggaccaccggaatttctcgccggaatcctcgtgccgccacaccgcgtggtcgggcccctctgcgccataaactccggtcaaaaacaggtaccgctggaggagtatgaaggatgctgcgatgagtacggagaggtctaggccgtcgtctcccagtcaactatggttatggaggatcgtcatcgtcatatggtgtaatttatttagttattttatacagaattcctattatataataaagatgtgacattgatttctgtaccatgagtcatcatatgtgtgagactttatcctagcacacatttgagacgcacccgggtttgcccttaaatctgggtgtgacacctataatgaatgaaatgtgatggatcaacttattctattccacaaaccaaataaataaagtgaggagtgagaagatgatagactaccttattcctctaaccaaacacgccattagttccttttcctggtaacagagaatatcactagtcttggtttgttttatcatctgcaggtgaatagacttgactcaatgctatgcctggtggttgtaggaggaggctgccgatcgaggtcaagtatgctggcatcatgcttagttagcgaagactgctatctcagatagtgagtacgacaacctttccaagttcaatttataggcggcggccttagtcctcatgtattggtgtgtttaacttgtccgctttttattatcagaacatcagtaggttttggtttgttgtccgcttttattatcagaacatgagtgtgtttaac

SEQ ID NO: 15286 - DNA, 624 bp, Zea Mays
cacgtcttcgccgagtccgttcgagcgctcgcgatccacctgggaaatccgccgccatccgcaaccacctcgtggccgccttgccagctggccaagggccgggtggtgcctttatataccagtcgcgacccttattcaccgaaaccgaagcaccatcgttgaagacaccgcggcgagaagagagaaaccgagagaagggagagagcgccgccgcgcatgggcagagcgtgtccatgcggtcattggggcctcgggaccgagtcaaggggcgtcgccaggccgcgctgaacatgactgtgacttcgcctgggcggacttgcgctccggaccaccggaatttctcgccggaatcctcgtgccgccacaccgcgtggtcgggcccctctgcgccataaactccggaggaggctgccgatcgaggtcaagtatgctggcatcatgcttagttagcgaagactgctatctcagatagtgagtacgacaacctttccaagttcaatttataggcggcggccttagtcctcatgtattggtgtgtttaacttgtccgctttttattatcagaacatcagtaggttttggtttgttgtccgcttttattatcagaacatgagtgtgtttaac

SEQ ID NO: 15287 - DNA, 739 bp, Zea Mays
cacgtcttcgccgagtccgttcgagcgctcgcgatccacctgggaaatccgccgccatccgcaaccacctcgtggccgccttgccagctggccaagggccgggtggtgcctttatataccagtcgcgacccttattcaccgaaaccgaagcaccatcgttgaagacaccgcggcgagaagagagaaaccgagagaagggagagagcgccgccgcgcatgggcagagcgtgtccatgcggtcattggggcctcgggaccgagtcaaggggcgtcgccaggccgcgctgaacatgactgtgacttcgcctgggcggacttgcgctccggaccaccggaatttctcgccggaatcctcgtgccgccacaccgcgtggtcgggcccctctgcgccataaactccggtcaaaaacaggtaccgctggaggagtatgaaggatgctgcgatgagtacggagaggtctaggccgtcgtctcccagtcaactatggttatggaggatcgtcatcgtcatatggtgaggaggctgccgatcgaggtcaagtatgctggcatcatgcttagttagcgaagactgctatctcagatagtgagtacgacaacctttccaagttcaatttataggcggcggccttagtcctcatgtattggtgtgtttaacttgtccgctttttattatcagaacatcagtaggttttggtttgttgtccgcttttattatcagaacatgagtgtgtttaac

SEQ ID NO: 15288 - DNA, 3133 bp, Zea Mays
cggctttgctctgacactttgaagcggcaccgcgcgccgtgcggtactccgcgtcatccgcgcttcattttctaccctcccctccactaccgccgactccgtggcgacatcctgagtcggagcgccgtgctcgtccggattcgagacaccgagcacaacgcgagctctttctgtagtgttcggagctgaaaatgagtgaggtgaataatactcagctggaccttgagaaaggattttctcaagtgtctcatgataatgattcgagtagccctgtaacggtgcacaagatgaaagttgagacagaaggtggaagtgaaatcgaatcacccactccagaaaaacgtgaatctagaagcaaaggggtcgttgtgagttcactggcaaggaatttgcttgcagagaggtacaaagacagacttgcaaatcagctggtggaagatgagagtgagacagatgatgaagactataatgaaagtgtttcgcctagtggtagccgatctctttttttagaaagcattgaacttcttgagaagatttgctgaatcttttcaatagaatggagagttctataagattgcttcacctacggaagaagatggctacatttaataatattgccacccaggtggagatactcacaaaaaggaagttattatacagccatttggcccagatgaagcatttgttcccagaagcaatccagataaagaggatactagtacatgacgagaagagcatatgcatgtatgctgatatggaaatcacacttgtaatggatgttgtggaatgcacaagccctgatcactctctatccatgacaatttgtgaggctttttactcaaagcttttgagatttttggatgctcatcataagggtgcagacattcctgaggcaatcctaccggaaccctttaactcaaggccaagggagaagttatatcttgaggcagtacataacggacatgctgctgagccacctctgcatggtgccgttgaggagggattctcaaatgcttcccacttcccacaatcttttcaaaaattcatgtcgaaaaaaatcattgctgatggaactgaaaagactcaattgctatccgacccagcagaactgagctctgtgagtgcttatggtacaaaagggtcaaacagaaaccctaaaaagcaagatgaacatgctccagttccagtgaactctgaaatttctgctactccaagccgccatttgatctcttgttgtcaagagagtacgccaaaacaacagacctcagagtcaccattgttgtctggaacacctgcaatgcagacaccaaaaaggccattgctggctccgcttgagaaacccaaggccacatgtggacacattagtgaaccacgttcagccagttctgcccgcagatcactaaatacatccttaacatatgaaggaggaagcccttcttattatgatggaatggaacatacggctacagctaaaaagtgcatgatctcagaagacttgtcaagttttaacaagtcatttgaggaagatagccatgtcttctttactgataaagacaaaatcaatgaagtggagtcagtggatagccaggaaaggatagcttctctacgtaccacatttgacattgtctatgatatttctcattctaccaagaatccacttatcacgaaacaggaacttttccacaatattcttgccaacaacttggagatagaagagattggggagatagaagagcagctgcatattttagaggatctggctcccgatttgatatcaaagaaggtgataaatggaggagaaatactttatagcatcgaacctataacagataagaattcagttcgggctaggcttgtagtagaacctgtatgagatagctgcaattggttcaaagctgaagaaatttgaagagattctctatatgcatgtaccactaatggaacccagattagctgatttattcaaccatggaagcatctgcatcgctcatgtagtcatgtctgattcgagttcaaatctgtgtttttattgacctgctcagtgccgaaatttctatggaacttaaattcgcaccagctgctctgtgagcttactgtggtaatcccatgaacttgtgtggagttcagatgcccatcggcatctgctctgtgacgtttaactcatgaaaagtgcacaagaatatttattcaatattcaataatgacatatatacatcctccatatacagtaatgacatggcatgcatacagtacactagttaaggcaatgagcccacgacctgtatcctctaatcatatgtaatgtatcatgtatgtacacggcacgtatcaagtggcaacagacggagcaaacgcagtcctctcgtcactgctcggaccaggtgatgtccaccatgccgacgttctggtcgagtcccagggcgtcccacaccgccggcgaggcgtcgacgatgttgttgtcgcacggcggctcgaagttgtgctcgtcgtcgcagccgtgcacggagtcgcactcgtccaccaccttggcgtacacggagttgccgttggcggcgctgatcttgatccggtggccgcagcgcgccatgttgctgaaccagcccgtggagagcgccaccaccttctcctggtcgctgtggtacgcgttgtcgcactccgaggggccgccgccgtccttgcccttctcgaagctgttgagcgtcagcacggccctggtgctcgccgtgaccggcggcgagcagcggtactgcgggtacatcttgccgtcctcgcagcagtccgggtcgttgctcttctcgcagttgccggagcggcccgggaggtacccgctggcgcggcacgtgccgaggctggcgccagggcggagagaggacgccgtgtggggtgcggagagcgcgaccaggaggaacatgaacatggcggcggctacagctcctacaccggccatctttgcttgcctgcagattttgtgctcgaggatcgagccccttctcactctgttctttttccttccttccttccttcctttctttctttctttctttctttctttcttgtgctctgctttgcttgatggttttgttagattactcgtgcatgggattatatatagtggccgtgccctcttgttaca

SEQ ID NO: 15289 - DNA, 2905 bp, Zea Mays
cggctttgctctgacactttgaagcggcaccgcgcgccgtgcggtactccgcgtcatccgcgcttcattttctaccctcccctccactaccgccgactccgtggcgacatcctgagtcggagcgccgtgctcgtccggattcgagacaccgagcacaacgcgagctctttctgtagtgttcggagctgaaaatgagtgaggtgaataatactcagctggaccttgagaaaggattttctcaagtgtctcatgataatgattcgagtagccctgtaacggtgcacaagatgaaagttgagacagaaggtggaagtgaaatcgaatcacccactccagaaaaacgtgaatctagaagcaaaggggtcgttgtgagttcactggcaaggaatttgcttgcagagaggtacaaagacagacttgcaaatcagctggtggaagatgagagtgagacagatgatgaagactataatgaaagtgtttcgcctagtggtagccgatctctttttttagaaagcattgaacttcttgagaaacacaaggatttgctgaatcttttcaatagaatggagagttctataagattgcttcacctacggaagaagatggctacatttaataatattgccacccaggtggagatactcacaaaaaggaagttattatacagccatttggcccagatgaagcatttgttcccagaagcaatccagataaagaggatactagtacatgacgagaagagcatatgcatgtatgctgatatggaaatcacacttgtaatggatgttgtggaatgcacaagccctgatcactctctatccatgacaatttgtgaggctttttactcaaagcttttgagatttttggatgctcatcataagggtgcagacattcctgaggcaatcctaccggaaccctttaactcaaggccaagggagaagttatatcttgaggcagtacataacggacatgctgctgagccacctctgcatggtgccgttgaggagggattctcaaatgcttcccacttcccacaatcttttcaaaaattcatgtcgaaaaaaatcattgctgatggaactgaaaagactcaattgctatccgacccagcagaactgagctctgtgagtgcttatggtacaaaagggtcaaacagaaaccctaaaaagcaagatgaacatgctccagttccagtgaactctgaaatttctgctactccaagccgccatttgatctcttgttgtcaagagagtacgccaaaacaacagacctcagagtcaccattgttgtctggaacacctgcaatgcagacaccaaaaaggccattgctggctccgcttgagaaacccaaggccacatgtggacacattagtgaaccacgttcagccagttctgcccgcagatcactaaatacatccttaacatatgaaggaggaagcccttcttattatgatggaatggaacatacggctacagctaaaaagtgcatgatctcagaagacttgtcaagttttaacaagtcatttgaggaagatagccatgtcttctttactgataaagacaaaatcaatgaagtggagtcagtggatagccaggaaaggatagcttctctacgtaccacatttgacattgtctatgatatttctcattctaccaagaatccacttatcacgaaacaggaacttttccacaatattcttgccaacaacttggagatagaagagattggggagatagaagagcagctgcatattttagaggatctggctcccgatttgatatcaaagaaggtgataaatggaggagaaatactttatagcatcgaacctataacagataagaattcagttcgggctaggcttgtagtagaacctgtatgagatagctgcaattggttcaaagctgaagaaatttgaagagattctctatatgcatgtaccactaatggaacccagattagctgatttattcaaccatggaagcatctgcatcgctcatgtagtcatgtctgattcgagttcaaatctgtgtttttattgacctgctcagtgccgaaatttctatggaacttaaattcgcaccagctgctctgtgagcttactgtgtggcaacagacggagcaaacgcagtcctctcgtcactgctcggaccaggtgatgtccaccatgccgacgttctggtcgagtcccagggcgtcccacaccgccggcgaggcgtcgacgatgttgttgtcgcacggcggctcgaagttgtgctcgtcgtcgcagccgtgcacggagtcgcactcgtccaccaccttggcgtacacggagttgccgttggcggcgctgatcttgatccggtggccgcagcgcgccatgttgctgaaccagcccgtggagagcgccaccaccttctcctggtcgctgtggtacgcgttgtcgcactccgaggggccgccgccgtccttgcccttctcgaagctgttgagcgtcagcacggccctggtgctcgccgtgaccggcggcgagcagcggtactgcgggtacatcttgccgtcctcgcagcagtccgggtcgttgctcttctcgcagttgccggagcggcccgggaggtacccgctggcgcggcacgtgccgaggctggcgccagggcggagagaggacgccgtgtggggtgcggagagcgcgaccaggaggaacatgaacatggcggcggctacagctcctacaccggccatctttgcttgcctgcagattttgtgctcgaggatcgagccccttctcactctgttctttttccttccttccttccttcctttctttctttctttctttctttctttcttgtgctctgctttgcttgatggttttgttagattactcgtgcatgggattatatatagtggccgtgccctcttgttaca

SEQ ID NO: 15290 - DNA, 1966 bp, Zea Mays
ataatactcagtttttctctttcaattatatgttctaactacctattaagaaatagaaggaacagtaccagttcaagatggtaatgtaatagtataccatagaaagataaggaaacacattgctcaacttgtaattgtatttttctcttcagaaatagatcttttggtttttgaatagcttgggagagtacattattatagtagtgcatgttgttaatccatcaatggagttctaccaagctcatttgatgaactgaatctcacacaggtaaatggcagcgcaacaagtatgttggtgtatctcttgtgggcaaaactctcgcgattcttgggttcgggaaggttggttcagaagttgctcgtcgcgctaaaggtttaggaatgcatgtgattgcacatgatccatacgcttctgctgatcgggcccgtgcaattggagttgagctagttagtatggaggaggccatgacaactgctgacttcatctcattgcacatgcctcttacccctgcaacaaacaagatgctcaacgatgaggcctttgctaagatgaagtatggtgttcgcattataaatgttgcacgcggtggtgtgattgatgaagatgctctagtcagggctcttgattcaggaatagtagcacaggctgctcttgatgtgttcactaaagaacctccagctcctgataacaagttggtgctgcacgagaatgttactgtcacacctcaccttggtgccagcacagtggaggcacaggaaggagtggctattgagatagctgaagctgtcattggagctctgaaaggggaacttgcagcttctgcagtcaacgctccaatggttcctgctgaggtgctgtcagagcttgcaccttttgttgtgcttgcagaaaagcttgggcatttagctgtgcaactagttgctggtggtggtggcatcaagtctgtgaaagtgacctatgcatctgcacgggcccctgatgatcttgacacgagacttctccgtgcaatgatcaccaagggattgattgagccaatctccagcgtttttgtcaatcttgttaatgctgacttcaccgcaaagcagaggggagttcgcatcactgaggagaggatcatcttggacggctcacctgagacgcctatcgactacattcaagttcagattgccaatgtcaagtccaaatttcctagtgcgatatctgagactggagagatcacagtggaggggagagtgaaggatggcgttcctcatctaacaaaggttggagcattccaggtggatgtgagcttggaaggaagcctgatcctttgcaggcaggttgatcagccaggtatgattgggtcggtaggaagtgtcttgggtgaggagaacattaatgtcagtttcatgagtgtcggaaggattgctcctcgcaagcatgctgtcatggcaatcggtgttgatgaggaaccaagcaaggtcacactgagaaagattggggagattccagcaatcgaagagtttgttttcctcaagctttaggcaactaagcgcaaatgtatgtttcaagttgcaagcatgctgtgcaattttgatgtagcttagcaatatagaggacggatggttctccttaaataagcttttaggattatttttgtagtggcgctcttgaatttggtgcaatattgatgccatcttttgaacggggtgttattctcagctactgtttcccaggttataaaaaataatatgtactccacgttccaatttataattcgtttgactttttttatctaatttataattcgtttgatttttttatctgaagcttgaccacctcgttttattcaaaaaaatatctaattattaatattttttattatgatattgttttgcatataatatactttaagtatgtctttaattttttttttaaaattttgcagtcgatcaaatttgataaaaaagtcaaacgaattataaa

SEQ ID NO: 15291 - DNA, 1590 bp, Zea Mays
cgtcaacgccagtcagtacgtcgctgcctttcctctcccgactcccgttcaccacactactttccctcgtgcggccgccgccctacaacaggtgccccaggtcttcgctgcgccattcgccagcgacgagcacccaacaggctcagaaacatcgctgacatccacatgcaccacagtagttcagtagagtagctgttggaacccacacaccggcgatggcaactgctcctgtgacatcctccatggctacgaactccacctgtgtgcggctgcctagcatgcccctgaggcgtgcacccgccatcgtctcctttgcctctcgtccatggtcaaccgcaatgacctcatgtactggattgtcgcggcactctgatgtggttgccgccgcggggcaccagaagttgatggggtctttgaacaacaacgagggactcatgtttggggtggttgtggcacggttcaacgaggtcgtgacaaatttgttactacagggtgccctggaaactttcgagcgatactctgttaaagcagaaaatataacagttgttagtgttcctggaagctttgaagttcctataacggcacaaaagcttgggaaatctggaaaatttgatgcaattctgtgcattggagctgtgattagaggtgacacaacccactatgatgccgttgcaaactcagctgcatcaggtgtactcaatgctggattatctgctggtatgttgttttctgttcttccctatcatgtgtcatgcagtactgggtaattctaggtacgttcattttcttctatttttaagtgttaaaaaggtggtctagcaagttgaaatattgaactcttaaacatattcccacaggtattgaaacttgttttatatgtttcattgttgtttctcagcgaatatgcatatataagtacaatggcaaaaaaaagtcacaagcatgttggggtagactaaaattttgccagtacagcttacagaaatctacaatagttaatgcgagcaactagtgtgggactggaaggttttggttatatgagagaattgtatagttggtgctataaaagtacttcacaacattaagtgaaactttgcagtgtgctcatcttgttttttctttatgatggttaattcagttaataataaaaattcagattattttggcttttaatggtgatacaggtgttccttgtgtatttggtgttctaacctgtgaagacatggatcaggcactgaaccgtgctggtggcaaggctggaaacaaaggagctgaagctgctcttactgccattgagatggcctcgctgttccggcatcacttaggctgacaccttgtgtattctgattttctatacacgaggcggcagcatttcctcctatcaagagttttggctaatagagagcttttccgccgcggctagtataatttatttccaagtttgttggtccggtgcggattggttgctttccttctgagacctgaaaagctcacaagacatgtctgtaaacctgacatcgtgaataattgtctccacgaacgaaatatggtcatgaataaagctgcacaagtgttttgttacgtatgatt

SEQ ID NO: 15292 - DNA, 1374 bp, Zea Mays
aacgccagtcagtacgtcgctgcctttcctctcccgactcccgttcaccacactactttccctcgtgcggccgccgccctacaacaggtgccccaggtcttcgctgcgccattcgccagcgacgagcacccaacaggggtgtacatgtcgatgttgcctctttattcggcgctaagaagctcagaaacatcgctgacatccacatgcaccacagtagttcagtagagtagctgttggaacccacacaccggcgatggcaactgctcctgtgacatcctccatggctacgaactccacctgtgtgcggctgcctagcatgcccctgaggcgtgcacccgccatcgtctcctttgcctctcgtccatggtcaaccgcaatgacctcatgtactggattgtcgcggcactctgatgtggttgccgccgcggggcaccagaagttgatggggtctttgaacaacaacgagggactcatgtttggggtggttgtggcacggttcaacgaggtcgtgacaaatttgttactacagggtgccctggaaactttcgagcgatactctgttaaagcagaaaatataacagttgttagtgttcctggaagctttgaagttcctataacggcacaaaagcttgggaaatctggaaaatttgatgcaattctgtgcattggagctgtgattagaggtgacacaacccactatgatgccgttgcaaactcagctgcatcaggtgtactcaatgctggattatctgctggtgttccttgtgtatttggtgttctaacctgtgaagacatggatcaggtacttcatggtttgattatgtacatctttaatccagaatggccacattagcgaagctgaggtttcacacaagtattcccttgtgacgagaaagtttcatgtcaataatgtgacctctttttttgttggttatctggctacttttcaagacctgatcactgttttgctccttatcgaaatcctgctgagaatgctaaatcgcatactgcaggcactgaaccgtgctggtggcaaggctggaaacaaaggagctgaagctgctcttactgccattgagatggcctcgctgttccggcatcacttaggctgacaccttgtgtattctgattttctatacacgaggcggcagcatttcctcctatcaagagttttggctaatagagagcttttccgccgcggctagtataatttatttccaagtctgttggtccggtgcggattggttgctttccttctatgagacctgaaaagctcacaagacatatctgtaatgtaaacctgacaccatgaataattgtcgccacgaacgaaatatggtcatgaataaagatgcactagtgttttgttacgta

SEQ ID NO: 15293 - DNA, 1613 bp, Zea Mays
aacgccagtcagtacgtcgctgcctttcctctcccgactcccgttcaccacactactttccctcgtgcggccgccgccctacaacaggtgccccaggtcttcgctgcgccattcgccagcgacgagcacccaacagcatggtcaaccgcaatgacctcatgtactggattgtcgcggcactctgatgtggttgccgccgcggggcaccagaagttgatggggtctttgaacaacaacgagggactcatgtttggggtggttgtggcacggttcaacgaggtcgtgacaaatttgttactacagggtgccctggaaactttcgagcgatactctgttaaagcagaaaatataacagttgttagtgttcctggaagctttgaagttcctataacggcacaaaagcttgggaaatctggaaaatttgatgcaattctgtgcattggagctgtgattagaggtgacacaacccactatgatgccgttgcaaactcagctgcatcaggtgtactcaatgctggattatctgctggtatgttgttttctgttcttccctatcatgtgtcatgcagtactgggtaattctaggtacgttcattttcttctatttttaagtgttaaaaaggtggtctagcaagttgaaatattgaactcttaaacatattcccacaggtattgaaacttgttttatatgtttcattgttgtttctcagcgaatatgcatatataagtacaatggcaaaaaaaagtcacaagcatgttggggtagactaaaattttgccagtacagcttacagaaatctacaatagttaatgcgagcaactagtgtgggactggaaggttttggttatatgagagaattgtatagttggtgctataaaagtacttcacaacattaagtgaaactttgcagtgtgctcatcttgttttttctttatgatggttaattcagttaataataaaaattcagattattttggcttttaatggtgatacaggtgttccttgtgtatttggtgttctaacctgtgaagacatggatcaggtacttcatggtttgattatgtacatctttaatccagaatggccacattagcgaagctgaggtttcacacaagtattcccttgtgacgagaaagtttcatgtcaataatgtgacctctttttttgttggttatctggctacttttcaagacctgatcactgttttgctccttatcgaaatcctgctgagaatgctaaatcgcatactgcaggcactgaaccgtgctggtggcaaggctggaaacaaaggagctgaagctgctcttactgccattgagatggcctcgctgttccggcatcacttaggctgacaccttgtgtattctgattttctatacacgaggcggcagcatttcctcctatcaagagttttggctaatagagagcttttccgccgcggctagtataatttatttccaagtttgttggtccggtgcggattggttgctttccttctgagacctgaaaagctcacaagacatgtctgtaaacctgacatcgtgaataattgtctccacgaacgaaatatggtcatgaataaagctgcacaagtgttttgttacgtatgatt

SEQ ID NO: 15294 - DNA, 1797 bp, Zea Mays
aacgccagtcagtacgtcgctgcctttcctctcccgactcccgttcaccacactactttccctcgtgcggccgccgccctacaacaggtgccccaggtcttcgctgcgccattcgccagcgacgagcacccaacaggctcagaaacatcgctgacatccacatgcaccacagtagttcagtagagtagctgttggaacccacacaccggcgatggcaactgctcctgtgacatcctccatggctacgaactccacctgtgtgcggctgcctagcatgcccctgaggcgtgcacccgccatcgtctcctttgcctctcgtccatggtcaaccgcaatgacctcatgtactggattgtcgcggcactctgatgtggttgccgccgcggggcaccagaagttgatggggtctttgaacaacaacgagggactcatgtttggggtggttgtggcacggttcaacgaggtcgtgacaaatttgttactacagggtgccctggaaactttcgagcgatactctgttaaagcagaaaatataacagttgttagtgttcctggaagctttgaagttcctataacggcacaaaagcttgggaaatctggaaaatttgatgcaattctgtgcattggagctgtgattagaggtgacacaacccactatgatgccgttgcaaactcagctgcatcaggtgtactcaatgctggattatctgctggtatgttgttttctgttcttccctatcatgtgtcatgcagtactgggtaattctaggtacgttcattttcttctatttttaagtgttaaaaaggtggtctagcaagttgaaatattgaactcttaaacatattcccacaggtattgaaacttgttttatatgtttcattgttgtttctcagcgaatatgcatatataagtacaatggcaaaaaaaagtcacaagcatgttggggtagactaaaattttgccagtacagcttacagaaatctacaatagttaatgcgagcaactagtgtgggactggaaggttttggttatatgagagaattgtatagttggtgctataaaagtacttcacaacattaagtgaaactttgcagtgtgctcatcttgttttttctttatgatggttaattcagttaataataaaaattcagattattttggcttttaatggtgatacaggtgttccttgtgtatttggtgttctaacctgtgaagacatggatcaggtacttcatggtttgattatgtacatctttaatccagaatggccacattagcgaagctgaggtttcacacaagtattcccttgtgacgagaaagtttcatgtcaataatgtgacctctttttttgttggttatctggctacttttcaagacctgatcactgttttgctccttatcgaaatcctgctgagaatgctaaatcgcatactgcaggcactgaaccgtgctggtggcaaggctggaaacaaaggagctgaagctgctcttactgccattgagatggcctcgctgttccggcatcacttaggctgacaccttgtgtattctgattttctatacacgaggcggcagcatttcctcctatcaagagttttggctaatagagagcttttccgccgcggctagtataatttatttccaagtttgttggtccggtgcggattggttgctttccttctgagacctgaaaagctcacaagacatgtctgtaaacctgacatcgtgaataattgtctccacgaacgaaatatggtcatgaataaagctgcacaagtgttttgttacgtatgatt

SEQ ID NO: 15295 - DNA, 400 bp, Zea Mays
ctacgactttttcgtccagtcctgctcacgatattcacatgcgccgtttcctctgtacacccgcgccgcgcccctttccctttctcgcttctgcccctctgcggctctgctgcctgcggcctgcccctttttttattcccaaaaaaactcccatctcgcggcggaaagagagagaggagaggtgcgagctggtaagatggatcggttggaggagcggaacattaagaagggggagagggagatggaggaggcgcgcaaggaagaggagcggaaggaggaggcgggggacaggaatacccaggagccgcagcaaggtcaaggcctcagcctctcactcgccaacggcagcgacagcggcaggctttgggaaagaactctggcagatggcgtgcacatccaa

SEQ ID NO: 15296 - DNA, 744 bp, Zea Mays
ctacgactttttcgtccagtcctgctcacgatattcacatgcgccgtttcctctgtacacccgcgccgcgcccctttccctttctcgcttctgcccctctgcggctctgctgcctgcggcctgcccctttttttattcccaaaaaaactcccatctcgcggcggaaagagagagaggagaggtgcgagctggtaagatggatcggttggaggagcggaacattaagaagggggagagggagatggaggaggcgcgcaaggaagaggagcggaaggaggaggcgggggacaggaatacccaggagccgcagcaaggtcaaggcctcagcctctcactcgccaacggcagcgacagcggcaggtctggaatgttgccgatgtcgaacccttcagctaatcccacacagcttacaattttctatggtggatcagtatgtgtgtatgactcggtgccaccagaaaaggctcaggcaatcatgcttatagctgcggctgcagcagctgcggcagccaccaaaggcagtgctgccactgcttttaatcctccaatgagcacttctgtagcagctggacaagctcaggttgttgctgaccctagctcaataagcaagcttcaggctgatctccccattgccaggaggcactctctccagcgcttccttgagaaacgtcgtgacaggaaaataacatatctgagaatcgggatgttcctgtgtattatcctgttctatttggaaaagctggc

SEQ ID NO: 15297 - DNA, 1052 bp, Zea Mays
ctacgactttttcgtccagtcctgctcacgatattcacatgcgccgtttcctctgtacacccgcgccgcgcccctttccctttctcgcttctgcccctctgcggctctgctgcctgcggcctgcccctttttttattcccaaaaaaactcccatctcgcggcggaaagagagagaggagaggtgcgagctggtaagatggatcggttggaggagcggaacattaagaagggggagagggagatggaggaggcgcgcaaggaagaggagcggaaggaggaggcgggggacaggaatacccaggagccgcagcaaggtcaaggcctcagcctctcactcgccaacggcagcgacagcggcaggtctggaatgttgccgatgtcgaacccttcagctaatcccacacagcttacaattttctatggtggatcagtatgtgtgtatgactcggtgccaccagaaaaggctcaggcaatcatgcttatagctgcggctgcagcagctgcggcagccaccaaaggcagtgctgccactgcttttaatcctccaatggtacatacagacactgtcgccccagcagcagtcttctctcctgtgcttacacggtctccatcactgcagagcacttctgtagcagctggacaagctcaggttgttgctgaccctagctcaataagcaagcttcaggctgatctccccattgccaggaggcactctctccagcgcttccttgagaaacgtcgtgacagggtcgtgagcaaagctccgtacagccccgccaagtcgttcgatggcatggagtcagcgggaatggagatgactgcggacggcaagcagggcgcaaggcccagtatcttgaaaggttggggagccgcgaagtctgaagtctgaacggtgaaaggctggctgacgctgtggggaggaagggacagggacgtgctgttggttttattatattggtatttatgttattatatactgtatgtggtagcagcagcgtggaaccgcactaataatggggaccttaacacctctattttactgtcaaaaaaaa

SEQ ID NO: 15298 - DNA, 2129 bp, Zea Mays
aggcgcccctgccccccgcacgcacagacgacgtgctggctaccctcccccaacttaggcctctagcgacgaagcaggcgggatatttggtgcgcgcgggcggtgtgaacaatcagcctgcagcgatcgagcaaaagccagcatcagcgagcaactcggcgacgtcggcgtcgccaggggagcccgggcagagaagcacctgccctctgcatctggaaccccgcgcgggctccgccggccgcggcccgtgccgcgacgactcggcacgcgctagccagctataggtagctgtttcccttcccgccactatcctgccgcccgggctcgcgtggcggatgatgattcctagagagccacggcggccggagcacccttcctcctcctgaccccgagctgccccgcccatcgcagcgggcggctctgccctccgccgcagcgtctgtgtccagactggaggatggagactccgcaagtcgagatgggcggtttcaaggtcaacagcccgcaagtgcccaacggtggcttgcggcccaccgtgtcttcgtcctggaactcgcaagggacggtcgagagggcgctcaggagcatcaggatcgtcatttttacttccaagctcaacttgctcatgccgttcggacctgcctccatcattctccacttcacgactaggagacatggattggtttttcttttcagcatgctaggaattatgcctttagctgagcgattgggatatgcaactgagcagcttgcagtatacactggtccaacagttggtggccttctgaatgctacatttggaaatgcaactgaaatgatcattgcaatatatgctttgaaaaatggaatgatccgagtagtgcagcagtcactattgggttccattttgtcaaatatgctgttggttatgggctgtgctttctttgctggtggtattgttcatcgcaacaaagaccaagtcttcagtaaggcaactgcagctgtcaactcaggtttactgttgatggctgtcatgggattgatgtttcctgccgttctccatttcactcattcagaagtgcggcaaggagcatcagaggttgctctttcaagattcagtagctgtattatgcttgtggcgtatgcaagctacctctatttccaattaagtggacggagcaacatttacagtccaataggcagaagaggcgcctagcgaggataacccggaagaagatgaagaagctgagattggcatgtgggaggcagtaacatggcttgcggtgttaacattctgggtgtcttttctttctgagtacctagttaacgccattgagggagcatctgattcattgaacctaccggtggcttttatcagtgttattttgcttcctattgtgggcaatgcagctgaacatgcaagcgcaataatgtttgccatgaaagataagcttgacataacacttggtgttgcaattggttcatcaacacagatatcaatgtttgtgattccattttgtgttgttattggttggacgatgggacaaaagatggacttgaattttcagctatttgagacagcaactctcttcataacagtacttgtggtggcatttatgttacaggatggcactgcgaactacttgaaaggacttatgctgatcctatgttatctaatagttgctgccagtttctttgttcacgttgatccacaatcaagtgaaggctgaagccatatatcctgtaagtaacgcgccaaataccttttgagacttaataatcttgttttgttccgcctgtctcaagccgggttccttcatgaactgcagaaggaatttttgtattttgttttgtggatactgatgtgtactagggtagtctcgatgtatacagaaacaagaagtggcagcatgttatattcgattaattgtatgggttttctgttttccttgaaatttaactattgggctgaatgtaaatttgggtatatgatttgatgatgacagatgctagatctttcatcatttttttgtagttgatgatgtctgcatagtcacggttctgcatcaatgtttcttttccttccctagtgattgtgtacacttttgatggcagatcaattttatatggccggtcattgtaaaaaaaag

SEQ ID NO: 15299 - DNA, 2121 bp, Zea Mays
aggcgcccctgccccccgcacgcacagacgacgtgctggctaccctcccccaacttaggcctctagcgacgaagcaggcgggatatttggtgcgcgcgggcggtgtgaacaatcagcctgcagcgatcgagcaaaagccagcatcagcgagcaactcggcgacgtcggcgtcgccaggggagcccgggcagagaagcacctgccctctgcatctggaaccccgcgcgggctccgccggccgcggcccgtgccgcgacgactcggcacgcgctagccagctataggtagctgtttcccttcccgccactatcctgccgcccgggctcgcgtggcggatgatgattcctagagagccacggcggccggagcacccttcctcctcctgaccccgagctgccccgcccatcgcagcgggcggctctgccctccgccgcagcgtctgtgtccagactggaggatggagactccgcaagtcgagatgggcggtttcaaggtcaacagcccgcaagtgcccaacggtggcttgcggcccaccgtgtcttcgtcctggaactcgcaagggacggtcgagagggcgctcaggagcatcaggatcgtcatttttacttccaagctcaacttgctcatgccgttcggacctgcctccatcattctccacttcacgactaggagacatggattggtttttcttttcagcatgctaggaattatgcctttagctgagcgattgggatatgcaactgagcagcttgcagtatacactggtccaacagttggtggccttctgaatgctacatttggaaatgcaactgaaatgatcattgcaatatatgctttgaaaaatggaatgatccgagtagtgcagcagtcactattgggttccattttgtcaaatatgctgttggttatgggctgtgctttctttgctggtggtattgttcatcgcaacaaagaccaagtcttcagtaagctgtcaactcaggtttactgttgatggctgtcatgggattgatgtttcctgccgttctccatttcactcattcagaagtgcggcaaggagcatcagaggttgctctttcaagattcagtagctgtattatgcttgtggcgtatgcaagctacctctatttccaattaagtggacggagcaacatttacagtccaataggcagtgaagaggcgcctagcgaggataacccggaagaagatgaagaagctgagattggcatgtgggaggcagtaacatggcttgcggtgttaacattctgggtgtcttttctttctgagtacctagttaacgccattgagggagcatctgattcattgaacctaccggtggcttttatcagtgttattttgcttcctattgtgggcaatgcagctgaacatgcaagcgcaataatgtttgccatgaaagataagcttgacataacacttggtgttgcaattggttcatcaacacagatatcaatgtttgtgattccattttgtgttgttattggttggacgatgggacaaaagatggacttgaattttcagctatttgagacagcaactctcttcataacagtacttgtggtggcatttatgttacaggatggcactgcgaactacttgaaaggacttatgctgatcctatgttatctaatagttgctgccagtttctttgttcacgttgatccacaatcaagtgaaggctgaagccatatatcctgtaagtaacgcgccaaataccttttgagacttaataatcttgttttgttccgcctgtctcaagccgggttccttcatgaactgcagaaggaatttttgtattttgttttgtggatactgatgtgtactagggtagtctcgatgtatacagaaacaagaagtggcagcatgttatattcgattaattgtatgggttttctgttttccttgaaatttaactattgggctgaatgtaaatttgggtatatgatttgatgatgacagatgctagatctttcatcatttttttgtagttgatgatgtctgcatagtcacggttctgcatcaatgtttcttttccttccctagtgattgtgtacacttttgatggcagatcaattttatatggccggtcattgtaaaaaaaag

SEQ ID NO: 15300 - DNA, 930 bp, Zea Mays
ctttagtccaggtgtaatgtattggaagaggcgcctagcgaggataacccggaagaagatgaagaagctgagattggcatgtgggaggcagtaacatggcttgcggtgttaacattctgggtgtcttttctttctgagtacctagttaacgccattgagggagcatctgattcattgaacctaccggtggcttttatcagtgttattttgcttcctattgtgggcaatgcagctgaacatgcaagcgcaataatgtttgccatgaaagataagcttgacataacacttggtgttgcaattggttcatcaacacagatatcaatgtttgtgatggacttgaattttcagctatttgagacagcaactctcttcataacagtacttgtggtggcatttatgttacaggatggcactgcgaactacttgaaaggacttatgctgatcctatgttatctaatagttgctgccagtttctttgttcacgttgatccacaatcaagtgaaggctgaagccatatatcctgtaagtaacgcgccaaataccttttgagacttaataatcttgttttgttccgcctgtctcaagccgggttccttcatgaactgcagaaggaatttttgtattttgttttgtggatactgatgtgtactagggtagtctcgatgtatacagaaacaagaagtggcagcatgttatattcgattaattgtatgggttttctgttttccttgaaatttaactattgggctgaatgtaaatttgggtatatgatttgatgatgacagatgctagatctttcatcatttttttgtagttgatgatgtctgcatagtcacggttctgcatcaatgtttcttttccttccctagtgattgtgtacacttttgatggcagatcaattttatatggccggtcattgtaaaaaaaag

SEQ ID NO: 15301 - DNA, 1850 bp, Zea Mays
atccagagtccagacaaccccattttcctgatcggaaagccgttcgctgttgactgtgaggaaagcaacgcctttcgccttcccttcccgcaagagaaaatttcacgttatcttttctttttcgttaaaaaagaagcaagcgaaaaaaaacacttctagccgtgcgggcttggccgtccgcagtagcagcagcaacgaaccaacgaagcactggttgttggtaggtgcacgcaccccatccccccacccaatccctcgcggcgggcgggcgagagagcgagcggcgatggcggcactggaggcggtgaggtcgtgggcggtgtccgtcatcccgccggagctcgccgccgccgcggggggagacccgctcgccgcgctggcagccaccgccgcggcccttgtcgcggggctgcttatcctcgccgtctggttccgatccggaggcggggcgccgtccaagccggtcgccacgccattacggccgccgccggtgaaggtggacgccgacgccgacgtggacgacgggcggaagcgcgtcaccatcttcttcggcacgcagaccggcaccgccgagggattcgccaagtcgatggcggacgaggcgagggtgcggtacgagaaggccgtgtttaaagtggtggatctggatgactatgctcaggaggacgaggaatacgaggagaagctgaagaaggaaactgtggcgctgttcttcttagcaacatatggggatggagagccaactgataacgcagcaagattctacaaatggtttactgagggaaaagagaaggaagtttggctgaaggatcttaaatatggtatttttggccttggaaacaggcagtatgaacattttaataaggttgcaaaggtggtagatgagctactagaggagcagggtgggaaacgtcttgttcctgttggccttggagatgatgatcagtgcattgaggatgatttcactgcatggaaagaactagtgtggccagagttggatcaattgctccgcgacgaggatgacacaaatggtgcatcaactccatatactgctgctattcctgaatacagagttgttttcattgataaatctgacctgtcattccaagatagatcatggtcactagccaacggtactggtgtgattgatattcaccacccttgcagggctaatgttgctgttcgaaaggagctgcacaaaccagcttcagaccgctcttgtattcatcttgagtttgatatttctggcactagtcttgtgtatgaaaccggagaccatgttggtgtatatgcagaaaattctgttgagactgtggaggaggctgaaagcctacttgacctttctccagatacagtcttctccatccatgcagatgcagaagatgggtctcctcgtaaaggaggaagttccttggccccacctttcccatctccatgtactttgcggactgcgcttctacgatatgctgatctactcaatccaccgaagaaggctgctttgcttgctttagcttctcatgcatctgatccagctgaagctgaacgacttaggttcttggcctctcctgctggaaaggatgagtattctcaatggataactgctagtcagaggagtcttcttgaagttatggctgcattcccttcagctaagccaccactgggagtgtttttcgcagcaatagctcctcgtctgcaaccacgatactactcaatttcatcatctccaaagatggctccctccagaattcatgtaacatgtgcattagtttatgggccttcaccaacaggaaggatccaccaaggagtttgttcaacatggatgaagaatacaattcctctggaatatagcg

SEQ ID NO: 15302 - DNA, 5488 bp, Zea Mays
atccagagtccagacaaccccattttcctgatcggaaagccgttcgctgttgactgtgaggaaagcaacgcctttcgccttcccttcccgcaagagaaaatttcacgttatcttttctttttcgttaaaaaagaagcaagcgaaaaaaaacacttctagccgtgcgggcttggccgtccgcagtagcagcagcaacgaaccaacgaagcactggttgttggtaggtgcacgcaccccatccccccacccaatccctcgcggcgggcgggcgagagagcgagcggcgatggcggcactggaggcggtgaggtcgtgggcggtgtccgtcatcccgccggagctcgccgccgccgcggggggagacccgctcgccgcgctggcagccaccgccgcggcccttgtcgcggggctgcttatcctcgccgtctggttccgatccggaggcggggcgccgtccaagccggtcgccacgccattacggccgccgccggtgaaggtggacgccgacgccgacgtggacgacgggcggaagcgcgtcaccatcttcttcggcacgcagaccggcaccgccgagggattcgccaagtcgatggcggacgaggcgagggtgcggtacgagaaggccgtgtttaaagtggtggatctggatgactatgctcaggaggacgaggaatacgaggagaagctgaagaaggaaactgtggcgctgttcttcttagcaacatatggggatggagagccaactgataacgcagcaagattctacaaatggtttactgagggaaaagagaaggaagtttggctgaaggatcttaaatatggtatttttggccttggaaacaggcagtatgaacattttaataaggttgcaaaggtggtagatgagctactagaggagcagggtgggaaacgtcttgttcctgttggccttggagatgatgatcagtgcattgaggatgatttcactgcatggaaagaactagtgtggccagagttggatcaattgctccgcgacgaggatgacacaaatggtgcatcaactccatatactgctgctattcctgaatacagagttgttttcattgataaatctgacctgtcattccaagatagatcatggtcactagccaacggtactggtgtgattgatattcaccacccttgcagggctaatgttgctgttcgaaaggagctgcacaaaccagcttcagaccgctcttgtattcatcttgagtttgatatttctggcactagtcttgtgtatgaaaccggagaccatgttggtgtatatgcagaaaattctgttgagactgtggaggaggctgaaagcctacttgacctttctccagatacagtcttctccatccatgcagatgcagaagatgggtctcctcgtaaaggaggaagttccttggccccacctttcccatctccatgtactttgcggactgcgcttctacgatatgctgatctactcaatccaccgaagaaggctgctttgcttgctttagcttctcatgcatctgatccagctgaagctgaacgacttaggttcttggcctctcctgctggaaaggatgagtattctcaatggataactgctagtcagaggagtcttcttgaagttatggctgcattcccttcagctaagccaccactgggagtgtttttcgcagcaatagctcctcgtctgcaaccacgatactactcaatttcatcatctccaaagatggctccctccagaattcatgtaacatgtgcattagtttatgggccttcaccaacaggaaggatccaccaaggagtttgttcaacatggatgaagaatacaattcctctggaatatagcgaagaatgcagctgggctcccatatttgtgaggcagtcaaatttcaagttacctgctgacccatccactccgattatcatgattggtcctgggacagggctggctccttttagaggtttcttgcaggaaaggttagcactgaaacaatctggagcagaactgggcacttcaatccttttctttggatgcaggaaccgtaatatggactacatatatgaagatgagctgcaaactttccttgaggagggggcgctttctgagctaattgttgcattctctcgggaagggccaactaaagaatatgtgcagcataagatggtggagaaggccacagaaatttggaacatcatctcacatggtggttacttatatgtatgcggtgatgccaagggaatggttagcactgaaacaatctggagcagaactgggcacttcaatccttttctttggatgcaggaaccgtaatatggactacatatatgaagatgagctgcaaactttccttgaggcgggggcgctttctgagctaattgttgcattctctcaagaagggccaacgaaagaatatgtgcagcataagatggtggagaagtctgacctgaaaattttggaaccaatggaagaggaagagtatagctctgaaacatctaatgaagaagatggcgaaaaagaaggaaatgctgctgagagtgatgtcttcagaccagttgatgtagatccagcatgtttaccaagagtagggatgatatttgactcggaggaagatgcctttcagttttatgtgacgtatggttgtcacgcaggttttggtattacaagaagatctaacaatacctttgatggtttccgctatcgctctacattcatatgttctaaaggagggcagtctagactgagatctggtgtgacaaaacctgcaagaaagcgaggtgtgaagactggctgcaaggccaagatgattgtgaaggatgcccattttcaaaatcgctgggaagtaattgttcttgagttggagcacaaccatccattggatccgaacttgcttaagtttaagagacatttgaagaactccccttttacgataaatccacctcaaatttgtgagtctgagggacaacagagcaactcagctcttgtacattcaagcagagttgttgatactggtataacttcgtcttctacacagattgaattcaaagccaagatagatagaaataggaaattgaagctcgcagaaggagacttagacgccttgttggattttctcaacaaaatgcaagaccaaaacccttgtttcttttacagtttagatatgaatgagcaagggcaactaaggaatgtcttttggtctgacgccaaatcacgcagttcatacaattactttggtgatgttgttgctattaatgtcacaaacttcagcgatcagtatgatatgcagtttgtgtcattcatgggaactaaccaccatgcacagccagtgttactaggttgtggcctgcttgctggtagatctcttggggcttatgtgtggctttttggtacatggttaagatgtatgaatgccaaaccaccacattcaataattacaaactactgtcatgatgtagcgatagctatcaaaaaggttttccctaacgcacgtcaccgtttttgcctttcacacatcttaaatgtgcttcctgaaaagttggaagaaattgataacaaagatgaaattatttccacattcaccacactagcctatgattatgttactatgactgattttgacagagagtggcaagatactatccaacattttcgtttggagagaaatgaatggctgtccaaactatatgaggtcaggatgcagtgggctcctgtttatgttaaggattcattttgggcaggaatgtctgtcacagacagaagtgatagtgtaactgactattttgatggctggttgatgtcaggaacctctttgaaaatgtttgtagagcaatatgaggaagctgttaaaggaaagttagaaaaggaatcttacgaagatttacgatcagctcagatgaggccaccaatggtgacggggttgcctgtggaagatcaagcagcaaaggtgtacactgcagaaatctttcagaagttcttcaatgaaataggacattcatttcattgcaattataatatacttgaacggaatgagtcagtggttacatacatagtttcggagcatgtcgatcaaacaaacaaggtagactacaaagttgcttatgataatgttcaaggtgacatatggtgcctctgccgtttgtaccaatccaaaggaatattgtgcaggcatgcactcactgtactgagacaggagcttgtgctgatgattccacaaaaatacatcattcatcgctggtgcaaggactgtaaacaaacttgtgcttccatatcccagcctgtctcagcagaagttgtggaatttggttccatgaactcagaatcaaaagaatatgctttgtcaatcatgagggaagtcagggataaagtgatttcatatgagaaatcactaagagatcaaagggttgacagccatgtttcaacagccaactttgcatacaatcctgtgaatgaggattttactgatgatgctttgcctatctctcttagtacaaagggctgggatcttacccaaggccaatctaaacgttcccgaaagaagaagctggcgaccccaactgttcttgatactttgaaaaagaaaactaaaagggcatataacaaaaggaggaatgccactgcaaacaccctgaacacatctgccactgcaactgacggcataactgatggcacaaatgtggagaacatttcgtttgatttgtcacaatacaacaatgccccaagcttccactggcctgaaagcagcagcaggtctcagctccactgagtaggcagcaatgcaatcgtggatgccttccaaatagactaagttctgacagtcttgtaagggcttgttcggttattcctatcttctgtggattagatgagattggaaaaaaatatgaaagattttgacttgaaagattttgacttgtttgggattaaaacgcacccaattccactcaatctacatggattgagagcaaaaccaacaagccctaatttggaaaaaaaaaaaaactagaggtgatggatcaggtttgacctttctattcctgcctaggactctaggagtcagtgaccacctgaataaaggtgaaaagggaagggattcaatgtggtgaagtgacatctaccatctatgtaccaatttagtggaacgggttctctacataatcattcctttttttccttccatggatatttgcagctcccgattgatttatctgaaccatgtaaattaggtcagatgcccctgaatcgacctgatgtttcactatggatccctcaggaaatcatatgccccttctctgatgaagctgtttgtaacaagatgtttattgcttcaccaagttcatctgttttcgctaatatttgttccgttcaatttctatgatcaaattattatatttgttctgtccagataatattttgtatcattttattctttttttctcaaacatgcaggagaactgtgtgtcaatatattaagatagaacgaatgatctgatt

SEQ ID NO: 15303 - DNA, 2654 bp, Zea Mays
cgcaagagaaaatttcacgttatcttttctttttcgttaaaaaagaagcaagcgaaaaaaaacacttctagccgtgcgggcttggccgtccgcagtagcagcagcaacgaaccaacgaagcactggttgttggtaggtgcacgcaccccatccccccacccaatccctcgcggcgggcgggcgagagagcgagcggcgatggcggcactggaggcggtgaggtcgtgggcggtgtccgtcatcccgccggagctcgccgccgccgcggggggagacccgctcgccgcgctggcagccaccgccgcggcccttgtcgcggggctgcttatcctcgccgtctggttccgatccggaggcggggcgccgtccaagccggtcgccacgccattacggccgccgccggtgaaggtggacgccgacgccgacgtggacgacgggcggaagcgcgtcaccatcttcttcggcacgcagaccggcaccgccgagggattcgccaagtcgatggcggacgaggcgagggtgcggtacgagaaggccgtgtttaaagtggtggatctggatgactatgctcaggaggacgaggaatacgaggagaagctgaagaaggaaactgtggcgctgttcttcttagcaacatatggggatggagagccaactgataacgcagcaagattctacaaatggtttactgagggaaaagagaaggaagtttggctgaaggatcttaaatatggtatttttggccttggaaacaggcagtatgaacattttaataaggttgcaaaggtggtagatgagctactagaggagcagggtgggaaacgtcttgttcctgttggccttggagatgatgatcagtgcattgaggatgatttcactgcatggaaagaactagtgtggccagagttggatcaattgctccgcgacgaggatgacacaaatggtgcatcaactccatatactgctgctattcctgaatacagagttgttttcattgataaatctgacctgtcattccaagatagatcatggtcactagccaacggtactggtgtgattgatattcaccacccttgcagggctaatgttgctgttcgaaaggagctgcacaaaccagcttcagaccgctcttgtattcatcttgagtttgatatttctggcactagtcttgtgtatgaaaccggagaccatgttggtgtatatgcagaaaattctgttgagactgtggaggaggctgaaagcctacttgacctttctccagatacagtcttctccatccatgcagatgcagaagatgggtctcctcgtaaaggaggaagttccttggccccacctttcccatctccatgtactttgcggactgcgcttctacgatatgctgatctactcaatccaccgaagaagcttctcatgcatctgatccagctgaagctgaacgacttaggttcttggcctctcctgctggaaaggatgagtattctcaatggataactgctagtcagaggagtcttcttgaagttatggctgcattcccttcagctaagccaccactgggagtgtttttcgcagcaatagctcctcgtctgcaaccacgatactactcaatttcatcatctccaaagatggctccctccagaattcatgtaacatgtgcattagtttatgggccttcaccaacaggaaggatccaccaaggagtttgttcaacatggatgaagaatacaattcctctggaatatagcgaagaatgcagctgggctcccatatttgtgaggcagtcaaatttcaagttacctgctgacccatccactccgattatcatgattggtcctgggacagggctggctccttttagaggtttcttgcaggaaaggttagcactgaaacaatctggagcagaactgggcacttcaatccttttctttggatgcaggaaccgtaatatggactacatatatgaagatgagctgcaaactttccttgaggagggggcgctttctgagctaattgttgcattctctcgggaagggccaactaaagaatatgtgcagcataagatggtggagaaggccacagaaatttggaacatcatctcacatggtggttacttatatgtatgcggtgatgccaagggaatggctagagacgtacacaggatgcttcatacagtagtccaagagcagggatctttggatagctccaaaaccgagagctacgtaaagagcctgcagatggaaggcaggtacctccgtgatgtatggtgacacatcacccccattcagccatagctctagcgtgtggaagtaaagctggctttgcgtgtacgacatgcctaatgccaaatgaagcgtgccattgattagaaactgaaatgttcagtcgatcagtgtaattctttgacatctaactatttatcattatatggaatgggaggaactgttgtagatttgtagaactacaaaaaaattgtgtatccctaacaagtttgtagcaaagggggtacattattacagtttgagatgaggacatcatgtatactgtttgagacgaggacattatgtatatacttggtacattagaaggccaccgaaaacaaattttgcatctggtttttgaaagcatgtgctcctatcaactatcgtgctgtctgcaat

SEQ ID NO: 15304 - DNA, 4568 bp, Zea Mays
gttctaatagacagcttgaatttatcgtagtacaaccttattttcattgatgatacgatatggggatggagagccaactgataacgcagcaagattctacaaatggtttactgagggaaaagagaaggaagtttggctgaaggatcttaaatatggtatttttggccttggaaacaggcagtatgaacattttaataaggttgcaaaggtggtagatgagctactagaggagcagggtgggaaacgtcttgttcctgttggccttggagatgatgatcagtgcattgaggatgatttcactgcatggaaagaactagtgtggccagagttggatcaattgctccgcgacgaggatgacacaaatggtgcatcaactccatatactgctgctattcctgaatacagagttgttttcattgataaatctgacctgtcattccaagatagatcatggtcactagccaacggtactggtgtgattgatattcaccacccttgcagggctaatgttgctgttcgaaaggagctgcacaaaccagcttcagaccgctcttgtattcatcttgagtttgatatttctggcactagtcttgtgtatgaaaccggagaccatgttggtgtatatgcagaaaattctgttgagactgtggaggaggctgaaagcctacttgacctttctccagatacagtcttctccatccatgcagatgcagaagatgggtctcctcgtaaaggaggaagttccttggccccacctttcccatctccatgtactttgcggactgcgcttctacgatatgctgatctactcaatccaccgaagaaggctgctttgcttgctttagcttctcatgcatctgatccagctgaagctgaacgacttaggttcttggcctctcctgctggaaaggatgagtattctcaatggataactgctagtcagaggagtcttcttgaagttatggctgcattcccttcagctaagccaccactgggagtgtttttcgcagcaatagctcctcgtctgcaaccacgatactactcaatttcatcatctccaaagatggctccctccagaattcatgtaacatgtgcattagtttttgggccttcaccaacaggaaggatccaccaaggagtttgttcaacatggatgaagggctggctccttttagaggtttcttgcaggaaaggttagcactgaaacaatctggagcagaactgggcacttcaatccttttctttggatgcaggaaccgtaatatggactacatatatgaagatgagctgcaaactttccttgaggcgggggcgctttctgagctaattgttgcattctctcaagaagggccaacgaaagaatatgtgcagcataagatggtggagaagtctgacctgaaaattttggaaccaatggaagaggaagagtatagctctgaaacatctaatgaagaagatggcgaaaaagaaggaaatgctgctgagagtgatgtcttcagaccagttgatgtagatccagcatgtttaccaagagtagggatgatatttgactcggaggaagatgcctttcagttttatgtgacgtatggttgtcacgcaggttttggtattacaagaagatctaacaatacctttgatggtttccgctatcgctctacattcatatgttctaaaggagggcagtctagactgagatctggtgtgacaaaacctgcaagaaagcgaggtgtgaagactggctgcaaggccaagatgattgtgaaggatgcccattttcaaaatcgctgggaagtaattgttcttgagttggagcacaaccatccattggatccgaacttgcttaagtttaagagacatttgaagaactccccttttacgataaatccacctcaaatttgtgagtctgagggacaacagagcaactcagctcttgtacattcaagcagagttgttgatactggtataacttcgtcttctacacagattgaattcaaagccaagatagatagaaataggaaattgaagctcgcagaaggagacttagacgccttgttggattttctcaacaaaatgcaagaccaaaacccttgtttcttttacagtttagatatgaatgagcaagggcaactaaggaatgtcttttggtctgacgccaaatcacgcagttcatacaattactttggtgatgttgttgctattaatgtcacaaacttcagcgatcagtatgatatgcagtttgtgtcattcatgggaactaaccaccatgcacagccagtgttactaggttgtggcctgcttgctggtagatctcttggggcttatgtgtggctttttggtacatggttaagatgtatgaatgccaaaccaccacattcaataattacaaactactgtcatgatgtagcgatagctatcaaaaaggttttccctaacgcacgtcaccgtttttgcctttcacacatcttaaatgtgcttcctgaaaagttggaagaaattgataacaaagatgaaattatttccacattcaccacactagcctatgattatgttactatgactgattttgacagagagtggcaagatactatccaacattttcgtttggagagaaatgaatggctgtccaaactatatgaggtcaggatgcagtgggctcctgtttatgttaaggattcattttgggcaggaatgtctgtcacagacagaagtgatagtgtaactgactattttgatggctggttgatgtcaggaacctctttgaaaatgtttgtagagcaatatgaggaagctgttaaaggaaagttagaaaaggaatcttacgaagatttacgatcagctcagatgaggccaccaatggtgacggggttgcctgtggaagatcaagcagcaaaggtgtacactgcagaaatctttcagaagttcttcaatgaaataggacattcatttcattgcaattataatatacttgaacggaatgagtcagtggttacatacatagtttcggagcatgtcgatcaaacaaacaaggtagactacaaagttgcttatgataatgttcaaggtgacatatggtgcctctgccgtttgtaccaatccaaaggaatattgtgcaggcatgcactcactgtactgagacaggagcttgtgctgatgattccacaaaaatacatcattcatcgctggtgcaaggactgtaaacaaacttgtgcttccatatcccagcctgtctcagcaggtaatcaggaactgggaagctacgatgatctgtacaaacttggccacctatactttgcagaagttgtggaatttggttccatgaactcagaatcaaaagaatatgctttgtcaatcatgagggaagtcagggataaagtgatttcatatgagaaatcactaagagatcaaagggttgacagccatgtttcaacagccaactttgcatacaatcctgtgaatgaggattttactgatgatgctttgcctatctctcttagtacaaagggctgggatcttacccaaggccaatctaaacgttcccgaaagaagaagctggcgaccccaactgttcttgatactttgaaaaagaaaactaaaagggcatataacaaaaggaggaatgccactgcaaacaccctgaacacatctgccactgcaactgacggcataactgatggcacaaatgttcagcagaatcctgtaaatgagggatggcagctagcgtcgactagtgctcccgaaactttctcttatggagtggagaacatttcgtttgatttgtcacaatacaacaatgccccaagcttccactggcctgaaagcagcagcaggtctcagctccactgagtaggcagcaatgcaatcgtggatgccttccaaatagactaagttctgacagtcttgtaagggcttgttcggttattcctatcttctgtggattagatgagattggaaaaaaatatgaaagattttgacttgaaagattttgacttgtttgggattaaaacgcacccaattccactcaatctacatggattgagagcaaaaccaacaagccctaatttggaaaaaaaaaaaaactagaggtgatggatcaggtttgacctttctattcctgcctaggactctaggagtcagtgaccacctgaataaaggtgaaaagggaagggattcaatgtggtgaagtgacatctaccatctatgtaccaatttagtggaacgggttctctacataatcattcctttttttccttccatggatatttgcagctcccgattgatttatctgaaccatgtaaattaggtcagatgcccctgaatcgacctgatgtttcactatggatccctcaggaaatcatatgccccttctctgatgaagctgtttgtaacaagatgtttattgcttcaccaagttcatctgttttcgctaatatttgttccgttcaatttctatgatcaaattattatatttgttctgtccagataatattttgtatcattttattctttttttctcaaacatgcaggagaactgtgtgtcaatatattaagatagaacgaatgatctgatt

SEQ ID NO: 15305 - DNA, 6581 bp, Zea Mays
cgggagcacccgcgccgtgctgcaccgcccgtccgctccgggccccagttgtctggcggccgtagctctggtccgtcggttggaccttcaagcactgcctttcacccctatatacttttcctggatccgccaccgcccacccttccgtcgttttgcccttccgtttcacttactggagcacactgcctcgaatgaggaggttatttctggcgtgctgccgctacctgcagttcacatctgtccctgatgctatcagagctacttcacctgttaacaatgtctacgggtcatggaggaggtatatcttcacaaacgctgataaggttctaccatgggaggcgccatcccgtgaaattctgttgaggaagataaattgtgctatgaaggatgggaatgttgaagaggcgctgcaatctttgagcaattacaagaagcttcacggtcttcctgagccgcgggtactgaatagtataattgtgtcgctgtcctacatgtctagtaggaggtggcttcagagggcatttgacatggttctctcagtttatcaaattaatagaaatcttctcaattgtggctcactgatgaggctagcattggcgctcgcaagagatcagatgcctatcccggcctccacagtcctgaggataatactagagagtagaaagcttcccgatgttgatatgctgaccatgtcgtttctgcatatgttgaagtcacaggtaggctcctaccttgccactgatgttctgattgagacttgcgagagctttttggaccaagttacagataggcgggagatgaaaaaactggacccaataaaaaacaatgccaccttgttcaatatggttttggagtcatgtgtgacctttaaatgcattatcaaggcccagaaaataatggaactgatgtcattgatcggagttgtggccgatgtaaatacagtggtgatggctagccgtgtctttgagatggttgggcaacgggatgagttgatacatatgaaaagaagcatcgattctttaacatctttgacatttcttcagtactacctgcatttttatgacagtctattgagcctccatttcaaatataatgacatggatgctgctgcaaagtttttaatcgatctgcatcagcaaccaaagcctggtgttttattttgcaatggtttgcagaaacaaagtatcatacaaattggctctggcaatctgaaaagcggatataaaataatgtttgatcccaaaaaagttgacaggggttttgtgttgggtacagaaagccaattcggccttgttgttcttactgatggaaaccttcttcatactgaaaaggctcttgctaaacttatcataggctgtgtgaaatcaagaaatatgcatatactgtctaacttttttattatgtcatgtcaatatggtctagagctaatttctcctcaagatgtggttactgcttgcattcaaatgggatggttgcatgctgctcatgatatcatagataacttggagtcagccgggattccagttgggattactggttacgtttctcttctgagagcatatgagaaggagaataagtcagaagaagtcaatggccttcttcaacagatacaaaagatggcatctaccatggatgatgttcatactgattcaccatttactatcaataatattgccgaagtagtgaaatatgaaatgtccttcagtagttcatctttggttgctgctttggctgatgaaattaaacattacaaccctggagagcacttggcattagagctcaataattcggttcttttcttctgcaaggcaaaaatgatggaagatgctctttgcacatataagtgtatgagagagcaaaatatcagacccacatctcatactttttgtcatatgttgtgtggttattcttcaatggacatgcatagggagatcaccatgttgtggggagaaataaagcgcagacatgaatatggagagctagatttggatagggacttgcttgatagcttggttttgaattttcttaaaggtggatatttttcgagggtgatggagatcattagttacatgtcaaaacataacatttactgtgacaagtggaaatacaggcgtgccttcctgaagctacacaagaacctgtataggaatttggattcattgcatgacaaaacagaagctcaaagtaaaaggattgaagatgtccgagctttcaggttgtgggcaagcattaagtagggacagcgaccaatttgatccctctcattttcaaattgggtaaagacacccctttgatgacttgtagtgcggtgccaagcaagcctgccttgttgccacctcaaggattactcctggcttgttgccctgaagcctcccttgagggaaaaaggcaaagaggcatcgatggtgttcgcagcacctgcagcgggggaagagggttgaggctgtggagagctttggggagctcagccttagggaggtggtgatgtttgcgctgggagaggtgggcctctccaagcagacggagatccagttggttgacgtgaccagcggcgtgttcggctcccacaccggctctagaaagacgttcttctacttgctccttgtttattgttcaggtatgaaaccggagaccatgttggtgtatatgcagaaaattctgttgagactgtggaggaggctgatgtgatggcccctggccaccggcgtgcgcagatgccgggacgtgagctctgatcaccaccaggacttggcaaacgaagcaaatgcagaagatgggtctcctcgtaaaggaggaggttccttggccccacctttcccatctccatgtactttgcggactacgcttctacgatatgctgatctactcaatccaccgaagaaggctgctttgcttgctttagcttctcatgcatctgatccagctgaagctgaacgacttaggttcttggcctctcctgctggaaaggggggaaggtttgcctcctcaatcatgtgggagcctgtggcgctgggtctgctcttttatcgaactgtcctgttcatgccggtgtggcatactatgcttgaggtggtggatggctccctccagaattcgtgtaacatgtgcattagtttttgggccttcaccaacaggaaggatccaccaaggagtttgttcaacatggatgaagggctggctccttttagaggtttcttgcaggaaaggttagcactgaaacaatctggagcagaactgggcacttcaatccttttctttggatgcaggaaccgtaatatggactacatatatgaagatgagctgcaaactttccttgaggcgggggcgctttctgagctaattgttgcattctctcaagaagggccaacgaaagaatatgtgcagcataagatggtggagaagtctgacctgaaaattttggaaccaatggaagaggaagagtatagctctgaaacatctaatgaagaagatggcgaaaaagaaggaaatgctgctgagagtgatgtcttcagaccagttgatgtagatccagcatgtttaccaagagtagggatgatatttgactcggaggaagatgcctttcagttttatgtgacgtatggttgtcacgcaggttttggtattacaagaagatctaacaatacctttgatggtttccgctatcgctctacattcatatgttctaaaggagggcagtctagactgagatctggtgtgacaaaacctgcaagaaagcgaggtgtgaagactggctgcaaggccaagatgattgtgaaggatgcccattttcaaaatcgctgggaagtaattgttcttgagttggagcacaaccatccattggatccgaacttgcttaagtttaagagacatttgaagaactccccttttacgataaatccacctcaaatttgtgagtctgagggacaacagagcaactcagctcttgtacattcaagcagagttgttgatactggtataacttcgtcttctacacagattgaattcaaagccaagatagatagaaataggaaattgaagctcgcagaaggagacttagacgccttgttggattttctcaacaaaatgcaagaccaaaacccttgtttcttttacagtttagatatgaatgagcaagggcaactaaggaatgtcttttggtctgacgccaaatcacgcagttcatacaattactttggtgatgttgttgctattaatgtcacaaacttcagcgatcagtatgatatgcagtttgtgtcattcatgggaactaaccaccatgcacagccagtgttactaggttgtggcctgcttgctggtagatctcttggggcttatgtgtggctttttggtacatggttaagatgtatgaatgccaaaccaccacattcaataattacaaactactgtcatgatgtagcgatagctatcaaaaaggttttccctaacgcacgtcaccgtttttgcctttcacacatcttaaatgtgcttcctgaaaagttggaagaaattgataacaaagatgaaattatttccacattcaccacactagcctatgattatgttactatgactgattttgacagagagtggcaagatactatccaacattttcgtttggagagaaatgaatggctgtccaaactatatgaggtcaggatgcagtgggctcctgtttatgttaaggattcattttgggcaggaatgtctgtcacagacagaagtgatagtgtaactgactattttgatggctggttgatgtcaggaacctctttgaaaatgtttgtagagcaatatgaggaagctgttaaaggaaagttagaaaaggaatcttacgaagatttacgatcagctcagatgaggccaccaatggtgacggggttgcctgtggaagatcaagcagcaaaggtgtacactgcagaaatctttcagaagttcttcaatgaaataggacattcatttcattgcaattataatatacttgaacggaatgagtcagtggttacatacatagtttcggagcatgtcgatcaaacaaacaaggtagactacaaagttgcttatgataatgttcaaggtgacatatggtgcctctgccgtttgtaccaatccaaaggaatattgtgcaggcatgcactcactgtactgagacaggagcttgtgctgatgattccacaaaaatacatcattcatcgctggtgcaaggactgtaaacaaacttgtgcttccatatcccagcctgtctcagcaggtaatcaggaactgggaagctacgatgatctgtacaaacttggccacctatactttgcagaagttgtggaatttggttccatgaactcagaatcaaaagaatatgctttgtcaatcatgagggaagtcagggataaagtgatttcatatgagaaatcactaagagatcaaagggttgacagccatgtttcaacagccaactttgcatacaatcctgtgaatgaggattttactgatgatgctttgcctatctctcttagtacaaagggctgggatcttacccaaggccaatctaaacgttcccgaaagaagaagctggcgaccccaactgttcttgatactttgaaaaagaaaactaaaagggcatataacaaaaggaggaatgccactgcaaacaccctgaacacatctgccactgcaactgacggcataactgatggcacaaatgttcagcagaatcctgtaaatgagggatggcagctagcgtcgactagtgctcccgaaactttctcttatggagtggagaacatttcgtttgatttgtcacaatacaacaatgccccaagcttccactggcctgaaagcagcagcaggtctcagctccactgagtaggcagcaatgcaatcgtggatgccttccaaatagactaagttctgacagtcttgtaagggcttgttcggttattcctatcttctgtggattagatgagattggaaaaaaatatgaaagattttgacttgaaagattttgacttgtttgggattaaaacgcacccaattccactcaatctacatggattgagagcaaaaccaacaagccctaatttggaaaaaaaaaaaaactagaggtgatggatcaggtttgacctttctattcctgcctaggactctaggagtcagtgaccacctgaataaaggtgaaaagggaagggattcaatgtggtgaagtgacatctaccatctatgtaccaatttagtggaacgggttctctacataatcattcctttttttccttccatggatatttgcagctcccgattgatttatctgaaccatgtaaattaggtcagatgcccctgaatcgacctgatgtttcactatggatccctcaggaaatcatatgccccttctctgatgaagctgtttgtaacaagatgtttattgcttcaccaagttcatctgttttcgctaatatttgttccgttcaatttctatgatcaaattattatatttgttctgtccagataatattttgtatcattttattctttttttctcaaacatgcaggagaactgtgtgtcaatatattaagatagaacgaatgatctgatt

SEQ ID NO: 15306 - DNA, 6641 bp, Zea Mays
agcacccgcgccgtgctgcaccgcccgtccgctccgggccccagttgtctggcggccgtagctctggtccgtcggttggaccttcaagcactgcctttcacccctatatacttttcctggatccgccaccgcccacccttccgtcgttttgcccttccgtttcacttactggagcacactgcctcgaatgaggaggttatttctggcgtgctgccgctacctgcagttcacatctgtccctgatgctatcagagctacttcacctgttaacaatgtctacgggtcatggaggaggtatatcttcacaaacgctgataaggttctaccatgggaggcgccatcccgtgaaattctgttgaggaagataaattgtgctatgaaggatgggaatgttgaagaggcgctgcaatctttgagcaattacaagaagcttcacggtcttcctgagccgcgggtactgaatagtataattgtgtcgctgtcctacatgtctagtaggaggtggcttcagagggcatttgacatggttctctcagtttatcaaattaatagaaatcttctcaattgtggctcactgatgaggctagcattggcgctcgcaagagatcagatgcctatcccggcctccacagtcctgaggataatactagagagtagaaagcttcccgatgttgatatgctgaccatgtcgtttctgcatatgttgaagtcacaggtaggctcctaccttgccactgatgttctgattgagacttgcgagagctttttggaccaagttacagataggcgggagatgaaaaaactggacccaataaaaaacaatgccaccttgttcaatatggttttggagtcatgtgtgacctttaaatgcattatcaaggcccagaaaataatggaactgatgtcattgatcggagttgtggccgatgtaaatacagtggtgatggctagccgtgtctttgagatggttgggcaacgggatgagttgatacatatgaaaagaagcatcgattctttaacatctttgacatttcttcagtactacctgcatttttatgacagtctattgagcctccatttcaaatataatgacatggatgctgctgcaaagtttttaatcgatctgcatcagcaaccaaagcctggtgttttattttgcaatggtttgcagaaacaaagtatcatacaaattggctctggcaatctgaaaagcggatataaaataatgtttgatcccaaaaaagttgacaggggttttgtgttgggtacagaaagccaattcggccttgttgttcttactgatggaaaccttcttcatactgaaaaggctcttgctaaacttatcataggctgtgtgaaatcaagaaatatgcatatactgtctaacttttttattatgtcatgtcaatatggtctagagctaatttctcctcaagatgtggttactgcttgcattcaaatgggatggttgcatgctgctcatgatatcatagataacttggagtcagccgggattccagttgggattactggttacgtttctcttctgagagcatatgagaaggagaataagtcagaagaagtcaatggccttcttcaacagatacaaaagatggcatctaccatggatgatgttcatactgattcaccatttactatcaataatattgccgaagtagtgaaatatgaaatgtccttcagtagttcatctttggttgctgctttggctgatgaaattaaacattacaaccctggagagcacttggcattagagctcaataattcggttcttttcttctgcaaggcaaaaatgatggaagatgctctttgcacatataagtgtatgagagagcaaaatatcagacccacatctcatactttttgtcatatgttgtgtggttattcttcaatggacatgcatagggagatcaccatgttgtggggagaaataaagcgcagacatgaatatggagagctagatttggatagggacttgcttgatagcttggttttgaattttcttaaaggtggatatttttcgagggtgatggagatcattagttacatgtcaaaacataacatttactgtgacaagtggaaatacaggcgtgccttcctgaagctacacaagaacctgtataggaatttggattcattgcatgacaaaacagaagctcaaagtaaaaggattgaagatgtccgagctttcaggttgtgggcaagcattaagtagggacagcgaccaatttgatccctctcattttcaaattgggtaaagacacccctttgatgacttgtagtgcggtgccaagcaagcctgccttgttgccacctcaaggattactcctggcttgttgccctgaagcctcccttgagggaaaaaggcaaagaggcatcgatggtgttcgcagcacctgcagcgggggaagagggttgaggctgtggagagctttggggagctcagccttagggaggtggtgatgtttgcgctgggagaggtgggcctctccaagcagacggagatccagttggttgacgtgaccagcggcgtgttcggctcccacaccggctctagaaagacgttcttctacttgctccttgtttattgttcagtttggtcacaattgttctacacaactatttgtttgaatacaacaagaaagccatttaatgctgggcaagttggggtaggatggaaatgaattgcccatgtactgattgattactgttcaacaaggtatgaaaccggagaccatgttggtgtatatgcagaaaattctgttgagactgtggaggaggctgatgtgatggcccctggccaccggcgtgcgcagatgccgggacgtgagctctgatcaccaccaggacttggcaaacgaagcaaatgcagaagatgggtctcctcgtaaaggaggaggttccttggccccacctttcccatctccatgtactttgcggactacgcttctacgatatgctgatctactcaatccaccgaagaaggctgctttgcttgctttagcttctcatgcatctgatccagctgaagctgaacgacttaggttcttggcctctcctgctggaaaggggggaaggtttgcctcctcaatcatgtgggagcctgtggcgctgggtctgctcttttatcgaactgtcctgttcatgccggtgtggcatactatgcttgaggtggtggatggctccctccagaattcgtgtaacatgtgcattagtttttgggccttcaccaacaggaaggatccaccaaggagtttgttcaacatggatgaagggctggctccttttagaggtttcttgcaggaaaggttagcactgaaacaatctggagcagaactgggcacttcaatccttttctttggatgcaggaaccgtaatatggactacatatatgaagatgagctgcaaactttccttgaggcgggggcgctttctgagctaattgttgcattctctcaagaagggccaacgaaagaatatgtgcagcataagatggtggagaagtctgacctgaaaattttggaaccaatggaagaggaagagtatagctctgaaacatctaatgaagaagatggcgaaaaagaaggaaatgctgctgagagtgatgtcttcagaccagttgatgtagatccagcatgtttaccaagagtagggatgatatttgactcggaggaagatgcctttcagttttatgtgacgtatggttgtcacgcaggttttggtattacaagaagatctaacaatacctttgatggtttccgctatcgctctacattcatatgttctaaaggagggcagtctagactgagatctggtgtgacaaaacctgcaagaaagcgaggtgtgaagactggctgcaaggccaagatgattgtgaaggatgcccattttcaaaatcgctgggaagtaattgttcttgagttggagcacaaccatccattggatccgaacttgcttaagtttaagagacatttgaagaactccccttttacgataaatccacctcaaatttgtgagtctgagggacaacagagcaactcagctcttgtacattcaagcagagttgttgatactggtataacttcgtcttctacacagattgaattcaaagccaagatagatagaaataggaaattgaagctcgcagaaggagacttagacgccttgttggattttctcaacaaaatgcaagaccaaaacccttgtttcttttacagtttagatatgaatgagcaagggcaactaaggaatgtcttttggtctgacgccaaatcacgcagttcatacaattactttggtgatgttgttgctattaatgtcacaaacttcagcgatcagtatgatatgcagtttgtgtcattcatgggaactaaccaccatgcacagccagtgttactaggttgtggcctgcttgctggtagatctcttggggcttatgtgtggctttttggtacatggttaagatgtatgaatgccaaaccaccacattcaataattacaaactactgtcatgatgtagcgatagctatcaaaaaggttttccctaacgcacgtcaccgtttttgcctttcacacatcttaaatgtgcttcctgaaaagttggaagaaattgataacaaagatgaaattatttccacattcaccacactagcctatgattatgttactatgactgattttgacagagagtggcaagatactatccaacattttcgtttggagagaaatgaatggctgtccaaactatatgaggtcaggatgcagtgggctcctgtttatgttaaggattcattttgggcaggaatgtctgtcacagacagaagtgatagtgtaactgactattttgatggctggttgatgtcaggaacctctttgaaaatgtttgtagagcaatatgaggaagctgttaaaggaaagttagaaaaggaatcttacgaagatttacgatcagctcagatgaggccaccaatggtgacggggttgcctgtggaagatcaagcagcaaaggtgtacactgcagaaatctttcagaagttcttcaatgaaataggacattcatttcattgcaattataatatacttgaacggaatgagtcagtggttacatacatagtttcggagcatgtcgatcaaacaaacaaggtagactacaaagttgcttatgataatgttcaaggtgacatatggtgcctctgccgtttgtaccaatccaaaggaatattgtgcaggcatgcactcactgtactgagacaggagcttgtgctgatgattccacaaaaatacatcattcatcgctggtgcaaggactgtaaacaaacttgtgcttccatatcccagcctgtctcagcagaagttgtggaatttggttccatgaactcagaatcaaaagaatatgctttgtcaatcatgagggaagtcagggataaagtgatttcatatgagaaatcactaagagatcaaagggttgacagccatgtttcaacagccaactttgcatacaatcctgtgaatgaggattttactgatgatgctttgcctatctctcttagtacaaagggctgggatcttacccaaggccaatctaaacgttcccgaaagaagaagctggcgaccccaactgttcttgatactttgaaaaagaaaactaaaagggcatataacaaaaggaggaatgccactgcaaacaccctgaacacatctgccactgcaactgacggcataactgatggcacaaatgttcagcagaatcctgtaaatgagggatggcagctagcgtcgactagtgctcccgaaactttctcttatggagtggagaacatttcgtttgatttgtcacaatacaacaatgccccaagcttccactggcctgaaagcagcagcaggtctcagctccactgagtaggcagcaatgcaatcgtggatgccttccaaatagactaagttctgacagtcttgtaagggcttgttcggttattcctatcttctgtggattagatgagattggaaaaaaatatgaaagattttgacttgaaagattttgacttgtttgggattaaaacgcacccaattccactcaatctacatggattgagagcaaaaccaacaagccctaatttggaaaaaaaaaaaaactagaggtgatggatcaggtttgacctttctattcctgcctaggactctaggagtcagtgaccacctgaataaaggtgaaaagggaagggattcaatgtggtgaagtgacatctaccatctatgtaccaatttagtggaacgggttctctacataatcattcctttttttccttccatggatatttgcagctcccgattgatttatctgaaccatgtaaattaggtcagatgcccctgaatcgacctgatgtttcactatggatccctcaggaaatcatatgccccttctctgatgaagctgtttgtaacaagatgtttattgcttcaccaagttcatctgttttcgctaatatttgttccgttcaatttctatgatcaaattattatatttgttctgtccagataatattttgtatcattttattctttttttctcaaacatgcaggagaactgtgtgtcaatatattaagatagaacgaatgatctgatt

SEQ ID NO: 15307 - DNA, 6251 bp, Zea Mays
ctgcaccgcccgtccgctccgggccccagttgtctggcggccgtagctctggtccgtcggttggaccttcaagcactgcctttcacccctatatacttttcctggatccgccaccgcccacccttccgtcgttttgcccttccgtttcacttactggagcacactgcctcgaatgaggaggttatttctggcgtgctgccgctacctgcagttcacatctgtccctgatgctatcagagctacttcacctgttaacaatgtctacgggtcatggaggaggtatatcttcacaaacgctgataaggttctaccatgggaggcgccatcccgtgaaattctgttgaggaagataaattgtgctatgaaggatgggaatgttgaagaggcgctgcaatctttgagcaattacaagaagcttcacggtcttcctgagccgcgggtactgaatagtataattgtgtcgctgtcctacatgtctagtaggaggtggcttcagagggcatttgacatggttctctcagtttatcaaattaatagaaatcttctcaattgtggctcactgatgaggctagcattggcgctcgcaagagatcagatgcctatcccggcctccacagtcctgaggataatactagagagtagaaagcttcccgatgttgatatgctgaccatgtcgtttctgcatatgttgaagtcacaggtaggctcctaccttgccactgatgttctgattgagacttgcgagagctttttggaccaagttacagataggcgggagatgaaaaaactggacccaataaaaaacaatgccaccttgttcaatatggttttggagtcatgtgtgacctttaaatgcattatcaaggcccagaaaataatggaactgatgtcattgatcggagttgtggccgatgtaaatacagtggtgatggctagccgtgtctttgagatggttgggcaacgggatgagttgatacatatgaaaagaagcatcgattctttaacatctttgacatttcttcagtactacctgcatttttatgacagtctattgagcctccatttcaaatataatgacatggatgctgctgcaaagtttttaatcgatctgcatcagcaaccaaagcctggtgttttattttgcaatggtttgcagaaacaaagtatcatacaaattggctctggcaatctgaaaagcggatataaaataatgtttgatcccaaaaaagttgacaggggttttgtgttgggtacagaaagccaattcggccttgttgttcttactgatggaaaccttcttcatactgaaaaggctcttgctaaacttatcataggctgtgtgaaatcaagaaatatgcatatactgtctaacttttttattatgtcatgtcaatatggtctagagctaatttctcctcaagatgtggttactgcttgcattcaaatgggatggttgcatgctgctcatgatatcatagataacttggagtcagccgggattccagttgggattactggttacgtttctcttctgagagcatatgagaaggagaataagtcagaagaagtcaatggccttcttcaacagatacaaaagatggcatctaccatggatgatgttcatactgattcaccatttactatcaataatattgccgaagtagtgaaatatgaaatgtccttcagtagttcatctttggttgctgctttggctgatgaaattaaacattacaaccctggagagcacttggcattagagctcaataattcggttcttttcttctgcaaggcaaaaatgatggaagatgctctttgcacatataagtgtatgagagagcaaaatatcagacccacatctcatactttttgtcatatgttgtgtggttattcttcaatggacatgcatagggagatcaccatgttgtggggagaaataaagcgcagacatgaatatggagagctagatttggatagggacttgcttgatagcttggttttgaattttcttaaaggtggatatttttcgagggtgatggagatcattagttacatgtcaaaacataacatttactgtgacaagtggaaatacaggcgtgccttcctgaagctacacaagaacctgtataggaatttggattcattgcatgacaaaacagaagctcaaagtaaaaggattgaagatgtccgagctttcaggttgtgggcaagcattaagtagggacagcgaccaatttgatccctctcattttcaaattgggtaaagacacccctttgatgacttgtagtgcggtgccaagcaagcctgccttgttgccacctcaaggattactcctggcttgttgccctgaagcctcccttgagggaaaaaggcaaagaggcatcgatggtgttcgcagcacctgcagcgggggaagagggttgaggctgtggagagctttggggagctcagccttagggaggtggtgatgtttgcgctgggagaggtgggcctctccaagcagacggagatccagttggttgacgtgaccagcggcgtgttcggctcccacaccggctctagaaagacgttcttctacttgctccttgtttattgttcaggtatgaaaccggagaccatgttggtgtatatgcagaaaattctgttgagactgtggaggaggctgatgtgatggcccctggccaccggcgtgcgcagatgccgggacgtgagctctgatcaccaccaggacttggcaaacgaagcaagatggctccctccagaattcgtgtaacatgtgcattagtttttgggccttcaccaacaggaaggatccaccaaggagtttgttcaacatggatgaagggctggctccttttagaggtttcttgcaggaaaggttagcactgaaacaatctggagcagaactgggcacttcaatccttttctttggatgcaggaaccgtaatatggactacatatatgaagatgagctgcaaactttccttgaggcgggggcgctttctgagctaattgttgcattctctcaagaagggccaacgaaagaatatgtgcagcataagatggtggagaagtctgacctgaaaattttggaaccaatggaagaggaagagtatagctctgaaacatctaatgaagaagatggcgaaaaagaaggaaatgctgctgagagtgatgtcttcagaccagttgatgtagatccagcatgtttaccaagagtagggatgatatttgactcggaggaagatgcctttcagttttatgtgacgtatggttgtcacgcaggttttggtattacaagaagatctaacaatacctttgatggtttccgctatcgctctacattcatatgttctaaaggagggcagtctagactgagatctggtgtgacaaaacctgcaagaaagcgaggtgtgaagactggctgcaaggccaagatgattgtgaaggatgcccattttcaaaatcgctgggaagtaattgttcttgagttggagcacaaccatccattggatccgaacttgcttaagtttaagagacatttgaagaactccccttttacgataaatccacctcaaatttgtgagtctgagggacaacagagcaactcagctcttgtacattcaagcagagttgttgatactggtataacttcgtcttctacacagattgaattcaaagccaagatagatagaaataggaaattgaagctcgcagaaggagacttagacgccttgttggattttctcaacaaaatgcaagaccaaaacccttgtttcttttacagtttagatatgaatgagcaagggcaactaaggaatgtcttttggtctgacgccaaatcacgcagttcatacaattactttggtgatgttgttgctattaatgtcacaaacttcagcgatcagtatgatatgcagtttgtgtcattcatgggaactaaccaccatgcacagccagtgttactaggttgtggcctgcttgctggtagatctcttggggcttatgtgtggctttttggtacatggttaagatgtatgaatgccaaaccaccacattcaataattacaaactactgtcatgatgtagcgatagctatcaaaaaggttttccctaacgcacgtcaccgtttttgcctttcacacatcttaaatgtgcttcctgaaaagttggaagaaattgataacaaagatgaaattatttccacattcaccacactagcctatgattatgttactatgactgattttgacagagagtggcaagatactatccaacattttcgtttggagagaaatgaatggctgtccaaactatatgaggtcaggatgcagtgggctcctgtttatgttaaggattcattttgggcaggaatgtctgtcacagacagaagtgatagtgtaactgactattttgatggctggttgatgtcaggaacctctttgaaaatgtttgtagagcaatatgaggaagctgttaaaggaaagttagaaaaggaatcttacgaagatttacgatcagctcagatgaggccaccaatggtgacggggttgcctgtggaagatcaagcagcaaaggtgtacactgcagaaatctttcagaagttcttcaatgaaataggacattcatttcattgcaattataatatacttgaacggaatgagtcagtggttacatacatagtttcggagcatgtcgatcaaacaaacaaggtagactacaaagttgcttatgataatgttcaaggtgacatatggtgcctctgccgtttgtaccaatccaaaggaatattgtgcaggcatgcactcactgtactgagacaggagcttgtgctgatgattccacaaaaatacatcattcatcgctggtgcaaggactgtaaacaaacttgtgcttccatatcccagcctgtctcagcaggtaatcaggaactgggaagctacgatgatctgtacaaacttggccacctatactttgcagaagttgtggaatttggttccatgaactcagaatcaaaagaatatgctttgtcaatcatgagggaagtcagggataaagtgatttcatatgagaaatcactaagagatcaaagggttgacagccatgtttcaacagccaactttgcatacaatcctgtgaatgaggattttactgatgatgctttgcctatctctcttagtacaaagggctgggatcttacccaaggccaatctaaacgttcccgaaagaagaagctggcgaccccaactgttcttgatactttgaaaaagaaaactaaaagggcatataacaaaaggaggaatgccactgcaaacaccctgaacacatctgccactgcaactgacggcataactgatggcacaaatgttcagcagaatcctgtaaatgagggatggcagctagcgtcgactagtgctcccgaaactttctcttatggagtggagaacatttcgtttgatttgtcacaatacaacaatgccccaagcttccactggcctgaaagcagcagcaggtctcagctccactgagtaggcagcaatgcaatcgtggatgccttccaaatagactaagttctgacagtcttgtaagggcttgttcggttattcctatcttctgtggattagatgagattggaaaaaaatatgaaagattttgacttgaaagattttgacttgtttgggattaaaacgcacccaattccactcaatctacatggattgagagcaaaaccaacaagccctaatttggaaaaaaaaaaaaactagaggtgatggatcaggtttgacctttctattcctgcctaggactctaggagtcagtgaccacctgaataaaggtgaaaagggaagggattcaatgtggtgaagtgacatctaccatctatgtaccaatttagtggaacgggttctctacataatcattcctttttttccttccatggatatttgcagctcccgattgatttatctgaaccatgtaaattaggtcagatgcccctgaatcgacctgatgtttcactatggatccctcaggaaatcatatgccccttctctgatgaagctgtttgtaacaagatgtttattgcttcaccaagttcatctgttttcgctaatatttgttccgttcaatttctatgatcaaattattatatttgttctgtccagataatattttgtatcattttattctttttttctcaaacatgcaggagaactgtgtgtcaatatattaagatagaacgaatgatctgatt

SEQ ID NO: 15308 - DNA, 6521 bp, Zea Mays
ccgcccgtccgctccgggccccagttgtctggcggccgtagctctggtccgtcggttggaccttcaagcactgcctttcacccctatatacttttcctggatccgccaccgcccacccttccgtcgttttgcccttccgtttcacttactggagcacactgcctcgaatgaggaggttatttctggcgtgctgccgctacctgcagttcacatctgtccctgatgctatcagagctacttcacctgttaacaatgtctacgggtcatggaggaggtatatcttcacaaacgctgataaggttctaccatgggaggcgccatcccgtgaaattctgttgaggaagataaattgtgctatgaaggatgggaatgttgaagaggcgctgcaatctttgagcaattacaagaagcttcacggtcttcctgagccgcgggtactgaatagtataattgtgtcgctgtcctacatgtctagtaggaggtggcttcagagggcatttgacatggttctctcagtttatcaaattaatagaaatcttctcaattgtggctcactgatgaggctagcattggcgctcgcaagagatcagatgcctatcccggcctccacagtcctgaggataatactagagagtagaaagcttcccgatgttgatatgctgaccatgtcgtttctgcatatgttgaagtcacaggtaggctcctaccttgccactgatgttctgattgagacttgcgagagctttttggaccaagttacagataggcgggagatgaaaaaactggacccaataaaaaacaatgccaccttgttcaatatggttttggagtcatgtgtgacctttaaatgcattatcaaggcccagaaaataatggaactgatgtcattgatcggagttgtggccgatgtaaatacagtggtgatggctagccgtgtctttgagatggttgggcaacgggatgagttgatacatatgaaaagaagcatcgattctttaacatctttgacatttcttcagtactacctgcatttttatgacagtctattgagcctccatttcaaatataatgacatggatgctgctgcaaagtttttaatcgatctgcatcagcaaccaaagcctggtgttttattttgcaatggtttgcagaaacaaagtatcatacaaattggctctggcaatctgaaaagcggatataaaataatgtttgatcccaaaaaagttgacaggggttttgtgttgggtacagaaagccaattcggccttgttgttcttactgatggaaaccttcttcatactgaaaaggctcttgctaaacttatcataggctgtgtgaaatcaagaaatatgcatatactgtctaacttttttattatgtcatgtcaatatggtctagagctaatttctcctcaagatgtggttactgcttgcattcaaatgggatggttgcatgctgctcatgatatcatagataacttggagtcagccgggattccagttgggattactggttacgtttctcttctgagagcatatgagaaggagaataagtcagaagaagtcaatggccttcttcaacagatacaaaagatggcatctaccatggatgatgttcatactgattcaccatttactatcaataatattgccgaagtagtgaaatatgaaatgtccttcagtagttcatctttggttgctgctttggctgatgaaattaaacattacaaccctggagagcacttggcattagagctcaataattcggttcttttcttctgcaaggcaaaaatgatggaagatgctctttgcacatataagtgtatgagagagcaaaatatcagacccacatctcatactttttgtcatatgttgtgtggttattcttcaatggacatgcatagggagatcaccatgttgtggggagaaataaagcgcagacatgaatatggagagctagatttggatagggacttgcttgatagcttggttttgaattttcttaaaggtggatatttttcgagggtgatggagatcattagttacatgtcaaaacataacatttactgtgacaagtggaaatacaggcgtgccttcctgaagctacacaagaacctgtataggaatttggattcattgcatgacaaaacagaagctcaaagtaaaaggattgaagatgtccgagctttcaggttgtgggcaagcattaagtagggacagcgaccaatttgatccctctcattttcaaattgggtaaagacacccctttgatgacttgtagtgcggtgccaagcaagcctgccttgttgccacctcaaggattactcctggcttgttgccctgaagcctcccttgagggaaaaaggcaaagaggcatcgatggtgttcgcagcacctgcagcgggggaagagggttgaggctgtggagagctttggggagctcagccttagggaggtggtgatgtttgcgctgggagaggtgggcctctccaagcagacggagatccagttggttgacgtgaccagcggcgtgttcggctcccacaccggctctagaaagacgttcttctacttgctccttgtttattgttcaggtatgaaaccggagaccatgttggtgtatatgcagaaaattctgttgagactgtggaggaggctgatgtgatggcccctggccaccggcgtgcgcagatgccgggacgtgagctctgatcaccaccaggacttggcaaacgaagcaaatacagtcttctccatccatgcagatgcagaagatgggtctcctcgtaaaggaggaggttccttggccccacctttcccatctccatgtactttgcggactacgcttctacgatatgctgatctactcaatccaccgaagaaggctgctttgcttgctttagcttctcatgcatctgatccagctgaagctgaacgacttaggttcttggcctctcctgctggaaaggggggaaggtttgcctcctcaatcatgtgggagcctgtggcgctgggtctgctcttttatcgaactgtcctgttcatgccggtgtggcatactatgcttgaggtggtggatggctccctccagaattcgtgtaacatgtgcattagtttttgggccttcaccaacaggaaggatccaccaaggagtttgttcaacatggatgaagggctggctccttttagaggtttcttgcaggaaaggttagcactgaaacaatctggagcagaactgggcacttcaatccttttctttggatgcaggaaccgtaatatggactacatatatgaagatgagctgcaaactttccttgaggcgggggcgctttctgagctaattgttgcattctctcaagaagggccaacgaaagaatatgtgcagcataagatggtggagaagtctgacctgaaaattttggaaccaatggaagaggaagagtatagctctgaaacatctaatgaagaagatggcgaaaaagaaggaaatgctgctgagagtgatgtcttcagaccagttgatgtagatccagcatgtttaccaagagtagggatgatatttgactcggaggaagatgcctttcagttttatgtgacgtatggttgtcacgcaggttttggtattacaagaagatctaacaatacctttgatggtttccgctatcgctctacattcatatgttctaaaggagggcagtctagactgagatctggtgtgacaaaacctgcaagaaagcgaggtgtgaagactggctgcaaggccaagatgattgtgaaggatgcccattttcaaaatcgctgggaagtaattgttcttgagttggagcacaaccatccattggatccgaacttgcttaagtttaagagacatttgaagaactccccttttacgataaatccacctcaaatttgtgagtctgagggacaacagagcaactcagctcttgtacattcaagcagagttgttgatactggtataacttcgtcttctacacagattgaattcaaagccaagatagatagaaataggaaattgaagctcgcagaaggagacttagacgccttgttggattttctcaacaaaatgcaagaccaaaacccttgtttcttttacagtttagatatgaatgagcaagggcaactaaggaatgtcttttggtctgacgccaaatcacgcagttcatacaattactttggtgatgttgttgctattaatgtcacaaacttcagcgatcagtatgatatgcagtttgtgtcattcatgggaactaaccaccatgcacagccagtgttactaggttgtggcctgcttgctggtagatctcttggggcttatgtgtggctttttggtacatggttaagatgtatgaatgccaaaccaccacattcaataattacaaactactgtcatgatgtagcgatagctatcaaaaaggttttccctaacgcacgtcaccgtttttgcctttcacacatcttaaatgtgcttcctgaaaagttggaagaaattgataacaaagatgaaattatttccacattcaccacactagcctatgattatgttactatgactgattttgacagagagtggcaagatactatccaacattttcgtttggagagaaatgaatggctgtccaaactatatgaggtcaggatgcagtgggctcctgtttatgttaaggattcattttgggcaggaatgtctgtcacagacagaagtgatagtgtaactgactattttgatggctggttgatgtcaggaacctctttgaaaatgtttgtagagcaatatgaggaagctgttaaaggaaagttagaaaaggaatcttacgaagatttacgatcagctcagatgaggccaccaatggtgacggggttgcctgtggaagatcaagcagcaaaggtgtacactgcagaaatctttcagaagttcttcaatgaaataggacattcatttcattgcaattataatatacttgaacggaatgagtcagtggttacatacatagtttcggagcatgtcgatcaaacaaacaaggtagactacaaagttgcttatgataatgttcaaggtgacatatggtgcctctgccgtttgtaccaatccaaaggaatattgtgcaggcatgcactcactgtactgagacaggagcttgtgctgatgattccacaaaaatacatcattcatcgctggtgcaaggactgtaaacaaacttgtgcttccatatcccagcctgtctcagcagaagttgtggaatttggttccatgaactcagaatcaaaagaatatgctttgtcaatcatgagggaagtcagggataaagtgatttcatatgagaaatcactaagagatcaaagggttgacagccatgtttcaacagccaactttgcatacaatcctgtgaatgaggattttactgatgatgctttgcctatctctcttagtacaaagggctgggatcttacccaaggccaatctaaacgttcccgaaagaagaagctggcgaccccaactgttcttgatactttgaaaaagaaaactaaaagggcatataacaaaaggaggaatgccactgcaaacaccctgaacacatctgccactgcaactgacggcataactgatggcacaaatgttcagcagaatcctgtaaatgagggatggcagctagcgtcgactagtgctcccgaaactttctcttatggagtggagaacatttcgtttgatttgtcacaatacaacaatgccccaagcttccactggcctgaaagcagcagcaggtctcagctccactgagtaggcagcaatgcaatcgtggatgccttccaaatagactaagttctgacagtcttgtaagggcttgttcggttattcctatcttctgtggattagatgagattggaaaaaaatatgaaagattttgacttgaaagattttgacttgtttgggattaaaacgcacccaattccactcaatctacatggattgagagcaaaaccaacaagccctaatttggaaaaaaaaaaaaactagaggtgatggatcaggtttgacctttctattcctgcctaggactctaggagtcagtgaccacctgaataaaggtgaaaagggaagggattcaatgtggtgaagtgacatctaccatctatgtaccaatttagtggaacgggttctctacataatcattcctttttttccttccatggatatttgcagctcccgattgatttatctgaaccatgtaaattaggtcagatgcccctgaatcgacctgatgtttcactatggatccctcaggaaatcatatgccccttctctgatgaagctgtttgtaacaagatgtttattgcttcaccaagttcatctgttttcgctaatatttgttccgttcaatttctatgatcaaattattatatttgttctgtccagataatattttgtatcattttattctttttttctcaaacatgcaggagaactgtgtgtcaatatattaagatagaacgaatgatctgatt

SEQ ID NO: 15309 - DNA, 3133 bp, Zea Mays
gttggaccttcaagtctgacctgaaaattttggaaccaatggaagaggaagagtatagctctgaaacatctaatgaagaagatggcgaaaaagaaggaaatgctgctgagagtgatgtcttcagaccagttgatgtagatccagcatgtttaccaagagtagggatgatatttgactcggaggaagatgcctttcagttttatgtgacgtatggttgtcacgcaggttttggtattacaagaagatctaacaatacctttgatggtttccgctatcgctctacattcatatgttctaaaggagggcagtctagactgagatctggtgtgacaaaacctgcaagaaagcgaggtgtgaagactggctgcaaggccaagatgattgtgaaggatgcccattttcaaaatcgctgggaagtaattgttcttgagttggagcacaaccatccattggatccgaacttgcttaagtttaagagacatttgaagaactccccttttacgataaatccacctcaaatttgtgagtctgagggacaacagagcaactcagctcttgtacattcaagcagagttgttgatactggtataacttcgtcttctacacagattgaattcaaagccaagatagatagaaataggaaattgaagctcgcagaaggagacttagacgccttgttggattttctcaacaaaatgcaagaccaaaacccttgtttcttttacagtttagatatgaatgagcaagggcaactaaggaatgtcttttggtctgacgccaaatcacgcagttcatacaattactttggtgatgttgttgctattaatgtcacaaacttcagcgatcagtatgatatgcagtttgtgtcattcatgggaactaaccaccatgcacagccagtgttactaggttgtggcctgcttgctggtagatctcttggggcttatgtgtggctttttggtacatggttaagatgtatgaatgccaaaccaccacattcaataattacaaactactgtcatgatgtagcgatagctatcaaaaaggttttccctaacgcacgtcaccgtttttgcctttcacacatcttaaatgtgcttcctgaaaagttggaagaaattgataacaaagatgaaattatttccacattcaccacactagcctatgattatgttactatgactgattttgacagagagtggcaagatactatccaacattttcgtttggagagaaatgaatggctgtccaaactatatgaggtcaggatgcagtgggctcctgtttatgttaaggattcattttgggcaggaatgtctgtcacagacagaagtgatagtgtaactgactattttgatggctggttgatgtcaggaacctctttgaaaatgtttgtagagcaatatgaggaagctgttaaaggaaagttagaaaaggaatcttacgaagatttacgatcagctcagatgaggccaccaatggtgacggggttgcctgtggaagatcaagcagcaaaggtgtacactgcagaaatctttcagaagttcttcaatgaaataggacattcatttcattgcaattataatatacttgaacggaatgagtcagtggttacatacatagtttcggagcatgtcgatcaaacaaacaaggtagactacaaagttgcttatgataatgttcaaggtgacatatggtgcctctgccgtttgtaccaatccaaaggaatattgtgcaggcatgcactcactgtactgagacaggagcttgtgctgatgattccacaaaaatacatcattcatcgctggtgcaaggactgtaaacaaacttgtgcttccatatcccagcctgtctcagcagaagttgtggaatttggttccatgaactcagaatcaaaagaatatgctttgtcaatcatgagggaagtcagggataaagtgatttcatatgagaaatcactaagagatcaaagggttgacagccatgtttcaacagccaactttgcatacaatcctgtgaatgaggattttactgatgatgctttgcctatctctcttagtacaaagggctgggatcttacccaaggccaatctaaacgttcccgaaagaagaagctggcgaccccaactgttcttgatactttgaaaaagaaaactaaaagggcatataacaaaaggaggaatgccactgcaaacaccctgaacacatctgccactgcaactgacggcataactgatggcacaaatgttcagcagaatcctgtaaatgagggatggcagctagcgtcgactagtgctcccgaaactttctcttatggagtggagaacatttcgtttgatttgtcacaatacaacaatgccccaagcttccactggcctgaaagcagcagcaggtctcagctccactgagtaggcagcaatgcaatcgtggatgccttccaaatagactaagttctgacagtcttgtaagggcttgttcggttattcctatcttctgtggattagatgagattggaaaaaaatatgaaagattttgacttgaaagattttgacttgtttgggattaaaacgcacccaattccactcaatctacatggattgagagcaaaaccaacaagccctaatttggaaaaaaaaaaaaactagaggtgatggatcaggtttgacctttctattcctgcctaggactctaggagtcagtgaccacctgaataaaggtgaaaagggaagggattcaatgtggtgaagtgacatctaccatctatgtaccaatttagtggaacgggttctctacataatcattcctttttttccttccatggatatttgcagctcccgattgatttatctgaaccatgtaaattaggtcagatgcccctgaatcgacctgatgtttcactatggatccctcaggaaatcatatgccccttctctgatgaagctgtttgtaacaagatgtttattgcttcaccaagttcatctgttttcgctaatatttgttccgttcaatttctatgatcaaattattatatttgttctgtccagataatattttgtatcattttattctttttttctcaaacatgcaggagaactgtgtgtcaatatattaagatagaacgaatgatctgatt

SEQ ID NO: 15310 - DNA, 2565 bp, Zea Mays
gatccgccaccgcccacccttccgtcgttttgcccttccgtttcacttactggagcacactgcctcgaatgaggaggttatttctggcgtgctgccgctacctgcagttcacatctgtccctgatgctatcagagctacttcacctgttaacaatgtctacgggtcatggaggaggtatatcttcacaaacgctgataaggttctaccatgggaggcgccatcccgtgaaattctgttgaggaagataaattgtgctatgaaggatgggaatgttgaagaggcgctgcaatctttgagcaattacaagaagcttcacggtcttcctgagccgcgggtactgaatagtataattgtgtcgctgtcctacatgtctagtaggaggtggcttcagagggcatttgacatggttctctcagtttatcaaattaatagaaatcttctcaattgtggctcactgatgaggctagcattggcgctcgcaagagatcagatgcctatcccggcctccacagtcctgaggataatactagagagtagaaagcttcccgatgttgatatgctgaccatgtcgtttctgcatatgttgaagtcacaggtaggctcctaccttgccactgatgttctgattgagacttgcgagagctttttggaccaagttacagataggcgggagatgaaaaaactggacccaataaaaaacaatgccaccttgttcaatatggttttggagtcatgtgtgacctttaaatgcattatcaaggcccagaaaataatggaactgatgtcattgatcggagttgtggccgatgtaaatacagtggtgatggctagccgtgtctttgagatggttgggcaacgggatgagttgatacatatgaaaagaagcatcgattctttaacatctttgacatttcttcagtactacctgcatttttatgacagtctattgagcctccatttcaaatataatgacatggatgctgctgcaaagtttttaatcgatctgcatcagcaaccaaagcctggtgttttattttgcaatggtttgcagaaacaaagtatcatacaaattggctctggcaatctgaaaagcggatataaaataatgtttgatcccaaaaaagttgacaggggttttgtgttgggtacagaaagccaattcggccttgttgttcttactgatggaaaccttcttcatactgaaaaggctcttgctaaacttatcataggctgtgtgaaatcaagaaatatgcatatactgtctaacttttttattatgtcatgtcaatatggtctagagctaatttctcctcaagatgtggttactgcttgcattcaaatgggatggttgcatgctgctcatgatatcatagataacttggagtcagccgggattccagttgggattactggttacgtttctcttctgagagcatatgagaaggagaataagtcagaagaagtcaatggccttcttcaacagatacaaaagatggcatctaccatggatgatgttcatactgattcaccatttactatcaataatattgccgaagtagtgaaatatgaaatgtccttcagtagttcatctttggttgctgctttggctgatgaaattaaacattacaaccctggagagcacttggcattagagctcaataattcggttcttttcttctgcaaggcaaaaatgatggaagatgctctttgcacatataagtgtatgagagagcaaaatatcagacccacatctcatactttttgtcatatgttgtgtggttattcttcaatggacatgcatagggagatcaccatgttgtggggagaaataaagcgcagacatgaatatggagagctagatttggatagggacttgcttgatagcttggttttgaattttcttaaaggtggatatttttcgagggtgatggagatcattagttacatgtcaaaacataacatttactgtgacaagtggaaatacaggcgtgccttcctgaagctacacaagaacctgtataggaatttggattcattgcatgacaaaacagaagctcaaagtaaaaggattgaagatgtccgagctttcaggttgtgggcaagcattaagtagggacagcgaccaatttgatccctctcattttcaaattgggtaaagacacccctttgatgacttgtagtgcggtgccaagcaagcctgccttgttgccacctcaaggattactcctggcttgttgccctgaagcctcccttgagggaaaaaggcaaagaggcatcgatggtgttcgcagcacctgcagcgggggaagagggttgaggctgtggagagctttggggagctcagccttagggaggtggtgatgtttgcgctgggagaggtgggcctctccaagcagacggagatccagttggttgacgtgaccagcggcgtgttcggctcccacaccggctctagaaagacgttcttctacttgctccttgtttattgttcagacctaggaggacctggttaccattcatcctgtgaggtacgtaacatggtatcaaagcaggttagggttaat

SEQ ID NO: 15311 - DNA, 4480 bp, Zea Mays
cggtgcagcaagcccatactgacatcctcgttcaccagaccgtggatccaaccaaccctgttttcaggccacatctccatatccctagccttggtttccttcatttgacgtgccaacacagtccattcggttgccacctctgctgctaacctcgactgaatcgggattgtttgctggacgtcatccaccacttccgacttctgaatcaaacgatccaaccggttcatcaccctatcccaacgccctgcatcctccttcctccactcttccatcgcgaacagaatgaatcgagttggttgtttgtacctcgcacacctcctgtcaaggaccgccctggtcctgttccgatcccgactgcaggaggagttccgtgtcgagaagcacaaccgcgtcatgggatgatgtcgacgcgaggtagacgagtaagctggggaggaggggaaacgccgatgaagaaccgaagacgttggagccgacggagaagaaacgcttgcaccgcgagaacctaggtcgctggaacggaatcgccgccaaagaggacacgaccctcaggcgccccaccgaggatcagagagctttgataccactgtgatggcccctagccaccggcgtgcgcagatgctgggacgtgagctctgatcgccgccaggacttggcaaacgaagcagatgcagaagatgggtctcctcgtaaaggaggaggttccttggccccacctttcccatctccatgtactttgcggactacgcttctacgatatgctgatctactcaatccaccgaagaaggctgctttgcttgctttagcttctcatgcatctgatccagctgaagctgaacgacttaggttcttggcctctcctgctggaaaggggggaaggtttgcctcctcaatcatgtgggagcctgtggcgctgggtctgctcttttatcgaactgtcctgttcatgccggtgtggcatactatgcttgaggtggtggatggctccctccagaattcgtgtaacatgtgcattagtttttgggccttcaccaacaggaaggatccaccaaggagtttgttcaacatggatgaagggctggctccttttagaggtttcttgcaggttagcactgaaacaatctggagcagaactgggcacttcaatccttttctttggatgcaggaaccgtaatatggactacatatatgaagatgagctgcaaactttccttgaggcgggggcgctttctgagctaattgttgcattctctcaagaagggccaacgaaagaatatgtgcagcataagatggtggagaagtctgacctgaaaattttggaaccaatggaagaggaagagtatagctctgaaacatctaatgaagaagatggcgaaaaagaaggaaatgctgctgagagtgatgtcttcagaccagttgatgtagatccagcatgtttaccaagagtagggatgatatttgactcggaggaagatgcctttcagttttatgtgacgtatggttgtcacgcaggttttggtattacaagaagatctaacaatacctttgatggtttccgctatcgctctacattcatatgttctaaaggagggcagtctagactgagatctggtgtgacaaaacctgcaagaaagcgaggtgtgaagactggctgcaaggccaagatgattgtgaaggatgcccattttcaaaatcgctgggaagtaattgttcttgagttggagcacaaccatccattggatccgaacttgcttaagtttaagagacatttgaagaactccccttttacgataaatccacctcaaatttgtgagtctgagggacaacagagcaactcagctcttgtacattcaagcagagttgttgatactggtataacttcgtcttctacacagattgaattcaaagccaagatagatagaaataggaaattgaagctcgcagaaggagacttagacgccttgttggattttctcaacaaaatgcaagaccaaaacccttgtttcttttacagtttagatatgaatgagcaagggcaactaaggaatgtcttttggtctgacgccaaatcacgcagttcatacaattactttggtgatgttgttgctattaatgtcacaaacttcagcgatcagtatgatatgcagtttgtgtcattcatgggaactaaccaccatgcacagccagtgttactaggttgtggcctgcttgctggtagatctcttggggcttatgtgtggctttttggtacatggttaagatgtatgaatgccaaaccaccacattcaataattacaaactactgtcatgatgtagcgatagctatcaaaaaggttttccctaacgcacgtcaccgtttttgcctttcacacatcttaaatgtgcttcctgaaaagttggaagaaattgataacaaagatgaaattatttccacattcaccacactagcctatgattatgttactatgactgattttgacagagagtggcaagatactatccaacattttcgtttggagagaaatgaatggctgtccaaactatatgaggtcaggatgcagtgggctcctgtttatgttaaggattcattttgggcaggaatgtctgtcacagacagaagtgatagtgtaactgactattttgatggctggttgatgtcaggaacctctttgaaaatgtttgtagagcaatatgaggaagctgttaaaggaaagttagaaaaggaatcttacgaagatttacgatcagctcagatgaggccaccaatggtgacggggttgcctgtggaagatcaagcagcaaaggtgtacactgcagaaatctttcagaagttcttcaatgaaataggacattcatttcattgcaattataatatacttgaacggaatgagtcagtggttacatacatagtttcggagcatgtcgatcaaacaaacaaggtagactacaaagttgcttatgataatgttcaaggtgacatatggtgcctctgccgtttgtaccaatccaaaggaatattgtgcaggcatgcactcactgtactgagacaggagcttgtgctgatgattccacaaaaatacatcattcatcgctggtgcaaggactgtaaacaaacttgtgcttccatatcccagcctgtctcagcaggtaatcaggaactgggaagctacgatgatctgtacaaacttggccacctatactttgcagaagttgtggaatttggttccatgaactcagaatcaaaagaatatgctttgtcaatcatgagggaagtcagggataaagtgatttcatatgagaaatcactaagagatcaaagggttgacagccatgtttcaacagccaactttgcatacaatcctgtgaatgaggattttactgatgatgctttgcctatctctcttagtacaaagggctgggatcttacccaaggccaatctaaacgttcccgaaagaagaagctggcgaccccaactgttcttgatactttgaaaaagaaaactaaaagggcatataacaaaaggaggaatgccactgcaaacaccctgaacacatctgccactgcaactgacggcataactgatggcacaaatgttcagcagaatcctgtaaatgagggatggcagctagcgtcgactagtgctcccgaaactttctcttatggagtggagaacatttcgtttgatttgtcacaatacaacaatgccccaagcttccactggcctgaaagcagcagcaggtctcagctccactgagtaggcagcaatgcaatcgtggatgccttccaaatagactaagttctgacagtcttgtaagggcttgttcggttattcctatcttctgtggattagatgagattggaaaaaaatatgaaagattttgacttgaaagattttgacttgtttgggattaaaacgcacccaattccactcaatctacatggattgagagcaaaaccaacaagccctaatttggaaaaaaaaaaaaactagaggtgatggatcaggtttgacctttctattcctgcctaggactctaggagtcagtgaccacctgaataaaggtgaaaagggaagggattcaatgtggtgaagtgacatctaccatctatgtaccaatttagtggaacgggttctctacataatcattcctttttttccttccatggatatttgcagctcccgattgatttatctgaaccatgtaaattaggtcagatgcccctgaatcgacctgatgtttcactatggatccctcaggaaatcatatgccccttctctgatgaagctgtttgtaacaagatgtttattgcttcaccaagttcatctgttttcgctaatatttgttccgttcaatttctatgatcaaattattatatttgttctgtccagataatattttgtatcattttattctttttttctcaaacatgcaggagaactgtgtgtcaatatattaagatagaacgaatgatctgatt

SEQ ID NO: 15312 - DNA, 4177 bp, Zea Mays
cgcacacctcctgtcaaggaccgccctggtcctgttccgatcccgactgcaggaggagttccgtgtcgagaagcacaaccgcgtcatgggatgatgtcgacgcgaggtagacgagtaagctggggaggaggggaaacgccgatgaagaaccgaagacgttggagccgacggagaagaaacgcttgcaccgcgagaacctaggtcgctggaacggaatcgccgccaaagaggacacgaccctcaggcgccccaccgaggatcagagagctttgataccactgtgatggcccctagccaccggcgtgcgcagatgctgggacgtgagctctgatcgccgccaggacttggcaaacgaagcagatgcagaagatgggtctcctcgtaaaggaggaggttccttggccccacctttcccatctccatgtactttgcggactacgcttctacgatatgctgatctactcaatccaccgaagaaggctgctttgcttgctttagcttctcatgcatctgatccagctgaagctgaacgacttaggttcttggcctctcctgctggaaaggggggaaggtttgcctcctcaatcatgtgggagcctgtggcgctgggtctgctcttttatcgaactgtcctgttcatgccggtgtggcatactatgcttgaggtggtggatggctccctccagaattcgtgtaacatgtgcattagtttttgggccttcaccaacaggaaggatccaccaaggagtttgttcaacatggatgaagggctggctccttttagaggtttcttgcaggaaaggttagcactgaaacaatctggagcagaactgggcacttcaatccttttctttggatgcaggaaccgtaatatggactacatatatgaagatgagctgcaaactttccttgaggcgggggcgctttctgagctaattgttgcattctctcaagaagggccaacgaaagaatatgtgcagcataagatggtggagaagtctgacctgaaaattttggaaccaatggaagaggaagagtatagctctgaaacatctaatgaagaagatggcgaaaaagaaggaaatgctgctgagagtgatgtcttcagaccagttgatgtagatccagcatgtttaccaagagtagggatgatatttgactcggaggaagatgcctttcagttttatgtgacgtatggttgtcacgcaggttttggtattacaagaagatctaacaatacctttgatggtttccgctatcgctctacattcatatgttctaaaggagggcagtctagactgagatctggtgtgacaaaacctgcaagaaagcgaggtgtgaagactggctgcaaggccaagatgattgtgaaggatgcccattttcaaaatcgctgggaagtaattgttcttgagttggagcacaaccatccattggatccgaacttgcttaagtttaagagacatttgaagaactccccttttacgataaatccacctcaaatttgtgagtctgagggacaacagagcaactcagctcttgtacattcaagcagagttgttgatactggtataacttcgtcttctacacagattgaattcaaagccaagatagatagaaataggaaattgaagctcgcagaaggagacttagacgccttgttggattttctcaacaaaatgcaagaccaaaacccttgtttcttttacagtttagatatgaatgagcaagggcaactaaggaatgtcttttggtctgacgccaaatcacgcagttcatacaattactttggtgatgttgttgctattaatgtcacaaacttcagcgatcagtatgatatgcagtttgtgtcattcatgggaactaaccaccatgcacagccagtgttactaggttgtggcctgcttgctggtagatctcttggggcttatgtgtggctttttggtacatggttaagatgtatgaatgccaaaccaccacattcaataattacaaactactgtcatgatgtagcgatagctatcaaaaaggttttccctaacgcacgtcaccgtttttgcctttcacacatcttaaatgtgcttcctgaaaagttggaagaaattgataacaaagatgaaattatttccacattcaccacactagcctatgattatgttactatgactgattttgacagagagtggcaagatactatccaacattttcgtttggagagaaatgaatggctgtccaaactatatgaggtcaggatgcagtgggctcctgtttatgttaaggattcattttgggcaggaatgtctgtcacagacagaagtgatagtgtaactgactattttgatggctggttgatgtcaggaacctctttgaaaatgtttgtagagcaatatgaggaagctgttaaaggaaagttagaaaaggaatcttacgaagatttacgatcagctcagatgaggccaccaatggtgacggggttgcctgtggaagatcaagcagcaaaggtgtacactgcagaaatctttcagaagttcttcaatgaaataggacattcatttcattgcaattataatatacttgaacggaatgagtcagtggttacatacatagtttcggagcatgtcgatcaaacaaacaaggtagactacaaagttgcttatgataatgttcaaggtgacatatggtgcctctgccgtttgtaccaatccaaaggaatattgtgcaggcatgcactcactgtactgagacaggagcttgtgctgatgattccacaaaaatacatcattcatcgctggtgcaaggactgtaaacaaacttgtgcttccatatcccagcctgtctcagcaggtaatcaggaactgggaagctacgatgatctgtacaaacttggccacctatactttgcagaagttgtggaatttggttccatgaactcagaatcaaaagaatatgctttgtcaatcatgagggaagtcagggataaagtgatttcatatgagaaatcactaagagatcaaagggttgacagccatgtttcaacagccaactttgcatacaatcctgtgaatgaggattttactgatgatgctttgcctatctctcttagtacaaagggctgggatcttacccaaggccaatctaaacgttcccgaaagaagaagctggcgaccccaactgttcttgatactttgaaaaagaaaactaaaagggcatataacaaaaggaggaatgccactgcaaacaccctgaacacatctgccactgcaactgacggcataactgatggcacaaatgttcagcagaatcctgtaaatgagggatggcagctagcgtcgactagtgctcccgaaactttctcttatggagtggagaacatttcgtttgatttgtcacaatacaacaatgccccaagcttccactggcctgaaagcagcagcaggtctcagctccactgagtaggcagcaatgcaatcgtggatgccttccaaatagactaagttctgacagtcttgtaagggcttgttcggttattcctatcttctgtggattagatgagattggaaaaaaatatgaaagattttgacttgaaagattttgacttgtttgggattaaaacgcacccaattccactcaatctacatggattgagagcaaaaccaacaagccctaatttggaaaaaaaaaaaaactagaggtgatggatcaggtttgacctttctattcctgcctaggactctaggagtcagtgaccacctgaataaaggtgaaaagggaagggattcaatgtggtgaagtgacatctaccatctatgtaccaatttagtggaacgggttctctacataatcattcctttttttccttccatggatatttgcagctcccgattgatttatctgaaccatgtaaattaggtcagatgcccctgaatcgacctgatgtttcactatggatccctcaggaaatcatatgccccttctctgatgaagctgtttgtaacaagatgtttattgcttcaccaagttcatctgttttcgctaatatttgttccgttcaatttctatgatcaaattattatatttgttctgtccagataatattttgtatcattttattctttttttctcaaacatgcaggagaactgtgtgtcaatatattaagatagaacgaatgatctgatt

SEQ ID NO: 15313 - DNA, 4181 bp, Zea Mays
ccgccctggtcctgttccgatcccgactgcaggaggagttccgtgtcgagaagcacaaccgcgtcatgggatgatgtcgacgcgaggtagacgagtaagctggggaggaggggaaacgccgatgaagaaccgaagacgttggagccgacggagaagaaacgcttgcaccgcgagaacctaggtcgctggaacggaatcgccgccaaagaggacacgaccctcaggcgccccaccgaggatcagagagctttgataccactgtgatggcccctagccaccggcgtgcgcagatgctgggacgtgagctctgatcgccgccaggacttggcaaacgaagcagatacagtcttctccatccatgcagatgcagaagatgggtctcctcgtaaaggaggaggttccttggccccacctttcccatctccatgtactttgcggactacgcttctacgatatgctgatctactcaatccaccgaagaaggctgctttgcttgctttagcttctcatgcatctgatccagctgaagctgaacgacttaggttcttggcctctcctgctggaaaggggggaaggtttgcctcctcaatcatgtgggagcctgtggcgctgggtctgctcttttatcgaactgtcctgttcatgccggtgtggcatactatgcttgaggtggtggatggctccctccagaattcgtgtaacatgtgcattagtttttgggccttcaccaacaggaaggatccaccaaggagtttgttcaacatggatgaagggctggctccttttagaggtttcttgcaggaaaggttagcactgaaacaatctggagcagaactgggcacttcaatccttttctttggatgcaggaaccgtaatatggactacatatatgaagatgagctgcaaactttccttgaggcgggggcgctttctgagctaattgttgcattctctcaagaagggccaacgaaagaatatgtgcagcataagatggtggagaagtctgacctgaaaattttggaaccaatggaagaggaagagtatagctctgaaacatctaatgaagaagatggcgaaaaagaaggaaatgctgctgagagtgatgtcttcagaccagttgatgtagatccagcatgtttaccaagagtagggatgatatttgactcggaggaagatgcctttcagttttatgtgacgtatggttgtcacgcaggttttggtattacaagaagatctaacaatacctttgatggtttccgctatcgctctacattcatatgttctaaaggagggcagtctagactgagatctggtgtgacaaaacctgcaagaaagcgaggtgtgaagactggctgcaaggccaagatgattgtgaaggatgcccattttcaaaatcgctgggaagtaattgttcttgagttggagcacaaccatccattggatccgaacttgcttaagtttaagagacatttgaagaactccccttttacgataaatccacctcaaatttgtgagtctgagggacaacagagcaactcagctcttgtacattcaagcagagttgttgatactggtataacttcgtcttctacacagattgaattcaaagccaagatagatagaaataggaaattgaagctcgcagaaggagacttagacgccttgttggattttctcaacaaaatgcaagaccaaaacccttgtttcttttacagtttagatatgaatgagcaagggcaactaaggaatgtcttttggtctgacgccaaatcacgcagttcatacaattactttggtgatgttgttgctattaatgtcacaaacttcagcgatcagtatgatatgcagtttgtgtcattcatgggaactaaccaccatgcacagccagtgttactaggttgtggcctgcttgctggtagatctcttggggcttatgtgtggctttttggtacatggttaagatgtatgaatgccaaaccaccacattcaataattacaaactactgtcatgatgtagcgatagctatcaaaaaggttttccctaacgcacgtcaccgtttttgcctttcacacatcttaaatgtgcttcctgaaaagttggaagaaattgataacaaagatgaaattatttccacattcaccacactagcctatgattatgttactatgactgattttgacagagagtggcaagatactatccaacattttcgtttggagagaaatgaatggctgtccaaactatatgaggtcaggatgcagtgggctcctgtttatgttaaggattcattttgggcaggaatgtctgtcacagacagaagtgatagtgtaactgactattttgatggctggttgatgtcaggaacctctttgaaaatgtttgtagagcaatatgaggaagctgttaaaggaaagttagaaaaggaatcttacgaagatttacgatcagctcagatgaggccaccaatggtgacggggttgcctgtggaagatcaagcagcaaaggtgtacactgcagaaatctttcagaagttcttcaatgaaataggacattcatttcattgcaattataatatacttgaacggaatgagtcagtggttacatacatagtttcggagcatgtcgatcaaacaaacaaggtagactacaaagttgcttatgataatgttcaaggtgacatatggtgcctctgccgtttgtaccaatccaaaggaatattgtgcaggcatgcactcactgtactgagacaggagcttgtgctgatgattccacaaaaatacatcattcatcgctggtgcaaggactgtaaacaaacttgtgcttccatatcccagcctgtctcagcaggtaatcaggaactgggaagctacgatgatctgtacaaacttggccacctatactttgcagaagttgtggaatttggttccatgaactcagaatcaaaagaatatgctttgtcaatcatgagggaagtcagggataaagtgatttcatatgagaaatcactaagagatcaaagggttgacagccatgtttcaacagccaactttgcatacaatcctgtgaatgaggattttactgatgatgctttgcctatctctcttagtacaaagggctgggatcttacccaaggccaatctaaacgttcccgaaagaagaagctggcgaccccaactgttcttgatactttgaaaaagaaaactaaaagggcatataacaaaaggaggaatgccactgcaaacaccctgaacacatctgccactgcaactgacggcataactgatggcacaaatgttcagcagaatcctgtaaatgagggatggcagctagcgtcgactagtgctcccgaaactttctcttatggagtggagaacatttcgtttgatttgtcacaatacaacaatgccccaagcttccactggcctgaaagcagcagcaggtctcagctccactgagtaggcagcaatgcaatcgtggatgccttccaaatagactaagttctgacagtcttgtaagggcttgttcggttattcctatcttctgtggattagatgagattggaaaaaaatatgaaagattttgacttgaaagattttgacttgtttgggattaaaacgcacccaattccactcaatctacatggattgagagcaaaaccaacaagccctaatttggaaaaaaaaaaaaactagaggtgatggatcaggtttgacctttctattcctgcctaggactctaggagtcagtgaccacctgaataaaggtgaaaagggaagggattcaatgtggtgaagtgacatctaccatctatgtaccaatttagtggaacgggttctctacataatcattcctttttttccttccatggatatttgcagctcccgattgatttatctgaaccatgtaaattaggtcagatgcccctgaatcgacctgatgtttcactatggatccctcaggaaatcatatgccccttctctgatgaagctgtttgtaacaagatgtttattgcttcaccaagttcatctgttttcgctaatatttgttccgttcaatttctatgatcaaattattatatttgttctgtccagataatattttgtatcattttattctttttttctcaaacatgcaggagaactgtgtgtcaatatattaagatagaacgaatgatctgatt

SEQ ID NO: 15314 - DNA, 3414 bp, Zea Mays
acctactgtgtgctatggttattgggaggctaccctttggtccgtcgtctccgctcctgccgacaccggcacaacaccgctcgcagtgactcgatccctgccgccgcagcctgctgattgcccgcaggccctcgccctgcccgatcctgtctccctgatccctccaccggtgcgatgccctctgccctcggcaggcggcagctcatctcgagtgctcccttctcgcccaccacggccgtgctcgcgtagcccggccggcgtcaccgccggaaaggtgtaggcgggaacacccgcgccgtgctgcaccgcccgtccgctccgggccccagttctcttgcgccagcacccacagcttgtagggcgcaggctggcggccgtagctccggtccatcggttggaccttcaagtctgacctgaaaattttggaaccaatggaagaggaagagtatagctctgaaacatctaatgaagaagatggcgaaaaagaaggaaatgctgctgagagtgatgtcttcagaccagttgatgtagatccagcatgtttaccaagagtagggatgatatttgactcggaggaagatgcctttcagttttatgtgacgtatggttgtcacgcaggttttggtattacaagaagatctaacaatacctttgatggtttccgctatcgctctacattcatatgttctaaaggagggcagtctagactgagatctggtgtgacaaaacctgcaagaaagcgaggtgtgaagactggctgcaaggccaagatgattgtgaaggatgcccattttcaaaatcgctgggaagtaattgttcttgagttggagcacaaccatccattggatccgaacttgcttaagtttaagagacatttgaagaactccccttttacgataaatccacctcaaatttgtgagtctgagggacaacagagcaactcagctcttgtacattcaagcagagttgttgatactggtataacttcgtcttctacacagattgaattcaaagccaagatagatagaaataggaaattgaagctcgcagaaggagacttagacgccttgttggattttctcaacaaaatgcaagaccaaaacccttgtttcttttacagtttagatatgaatgagcaagggcaactaaggaatgtcttttggtctgacgccaaatcacgcagttcatacaattactttggtgatgttgttgctattaatgtcacaaacttcagcgatcagtatgatatgcagtttgtgtcattcatgggaactaaccaccatgcacagccagtgttactaggttgtggcctgcttgctggtagatctcttggggcttatgtgtggctttttggtacatggttaagatgtatgaatgccaaaccaccacattcaataattacaaactactgtcatgatgtagcgatagctatcaaaaaggttttccctaacgcacgtcaccgtttttgcctttcacacatcttaaatgtgcttcctgaaaagttggaagaaattgataacaaagatgaaattatttccacattcaccacactagcctatgattatgttactatgactgattttgacagagagtggcaagatactatccaacattttcgtttggagagaaatgaatggctgtccaaactatatgaggaacctctttgaaaatgtttgtagagcaatatgaggaagctgttaaaggaaagttagaaaaggaatcttacgaagatttacgatcagctcagatgaggccaccaatggtgacggggttgcctgtggaagatcaagcagcaaaggtgtacactgcagaaatctttcagaagttcttcaatgaaataggacattcatttcattgcaattataatatacttgaacggaatgagtcagtggttacatacatagtttcggagcatgtcgatcaaacaaacaaggtagactacaaagttgcttatgataatgttcaaggtgacatatggtgcctctgccgtttgtaccaatccaaaggaatattgtgcaggcatgcactcactgtactgagacaggagcttgtgctgatgattccacaaaaatacatcattcatcgctggtgcaaggactgtaaacaaacttgtgcttccatatcccagcctgtctcagcagaagttgtggaatttggttccatgaactcagaatcaaaagaatatgctttgtcaatcatgagggaagtcagggataaagtgatttcatatgagaaatcactaagagatcaaagggttgacagccatgtttcaacagccaactttgcatacaatcctgtgaatgaggattttactgatgatgctttgcctatctctcttagtacaaagggctgggatcttacccaaggccaatctaaacgttcccgaaagaagaagctggcgaccccaactgttcttgatactttgaaaaagaaaactaaaagggcatataacaaaaggaggaatgccactgcaaacaccctgaacacatctgccactgcaactgacggcataactgatggcacaaatgttcagcagaatcctgtaaatgagggatggcagctagcgtcgactagtgctcccgaaactttctcttatggagtggagaacatttcgtttgatttgtcacaatacaacaatgccccaagcttccactggcctgaaagcagcagcaggtctcagctccactgagtaggcagcaatgcaatcgtggatgccttccaaatagactaagttctgacagtcttgtaagggcttgttcggttattcctatcttctgtggattagatgagattggaaaaaaatatgaaagattttgacttgaaagattttgacttgtttgggattaaaacgcacccaattccactcaatctacatggattgagagcaaaaccaacaagccctaatttggaaaaaaaaaaaaactagaggtgatggatcaggtttgacctttctattcctgcctaggactctaggagtcagtgaccacctgaataaaggtgaaaagggaagggattcaatgtggtgaagtgacatctaccatctatgtaccaatttagtggaacgggttctctacataatcattcctttttttccttccatggatatttgcagctcccgattgatttatctgaaccatgtaaattaggtcagatgcccctgaatcgacctgatgtttcactatggatccctcaggaaatcatatgccccttctctgatgaagctgtttgtaacaagatgtttattgcttcaccaagttcatctgttttcgctaatatttgttccgttcaatttctatgatcaaattattatatttgttctgtccagataatattttgtatcattttattctttttttctcaaacatgcaggagaactgtgtgtcaatatattaagatagaacgaatgatctgatt

SEQ ID NO: 15315 - DNA, 3185 bp, Zea Mays
gaaaggtgtaggcgggaacacccgcgccgtgctgcaccgcccgtccgctccgggccccagttctcttgcgccagcacccacagcttgtagggcgcaggctggcggccgtagctccggtccatcggttggaccttcaagtctgacctgaaaattttggaaccaatggaagaggaagagtatagctctgaaacatctaatgaagaagatggcgaaaaagaaggaaatgctgctgagagtgatgtcttcagaccagttgatgtagatccagcatgtttaccaagagtagggatgatatttgactcggaggaagatgcctttcagttttatgtgacgtatggttgtcacgcaggttttggtattacaagaagatctaacaatacctttgatggtttccgctatcgctctacattcatatgttctaaaggagggcagtctagactgagatctggtgtgacaaaacctgcaagaaagcgaggtgtgaagactggctgcaaggccaagatgattgtgaaggatgcccattttcaaaatcgctgggaagtaattgttcttgagttggagcacaaccatccattggatccgaacttgcttaagtttaagagacatttgaagaactccccttttacgataaatccacctcaaatttgtgagtctgagggacaacagagcaactcagctcttgtacattcaagcagagttgttgatactggtataacttcgtcttctacacagattgaattcaaagccaagatagatagaaataggaaattgaagctcgcagaaggagacttagacgccttgttggattttctcaacaaaatgcaagaccaaaacccttgtttcttttacagtttagatatgaatgagcaagggcaactaaggaatgtcttttggtctgacgccaaatcacgcagttcatacaattactttggtgatgttgttgctattaatgtcacaaacttcagcgatcagtatgatatgcagtttgtgtcattcatgggaactaaccaccatgcacagccagtgttactaggttgtggcctgcttgctggtagatctcttggggcttatgtgtggctttttggtacatggttaagatgtatgaatgccaaaccaccacattcaataattacaaactactgtcatgatgtagcgatagctatcaaaaaggttttccctaacgcacgtcaccgtttttgcctttcacacatcttaaatgtgcttcctgaaaagttggaagaaattgataacaaagatgaaattatttccacattcaccacactagcctatgattatgttactatgactgattttgacagagagtggcaagatactatccaacattttcgtttggagagaaatgaatggctgtccaaactatatgaggtcaggatgcagtgggctcctgtttatgttaaggattcattttgggcaggaatgtctgtcacagacagaagtgatagtgtaactgactattttgatggctggttgatgtcaggaacctctttgaaaatgtttgtagagcaatatgaggaagctgttaaaggaaagttagaaaaggaatcttacgaagatttacgatcagctcagatgaggccaccaatggtgacggggttgcctgtggaagatcaagcagcaaaggtgtacactgcagaaatctttcagaagttcttcaatgaaataggacattcatttcattgcaattataatatacttgaacggaatgagtcagtggttacatacatagtttcggagcatgtcgatcaaacaaacaaggtagactacaaagttgcttatgataatgttcaaggtgacatatggtgcctctgccgtttgtaccaatccaaaggaatattgtgcaggcatgcactcactgtactgagacaggagcttgtgctgatgattccacaaaaatacatcattcatcgctggtgcaaggactgtaaacaaacttgtgcttccatatcccagcctgtctcagcagaagttgtggaatttggttccatgaactcagaatcaaaagaatatgctttgtcaatcatgagggaagtcagggataaagtgatttcatatgagaaatcactaagagatcaaagggttgacagccatgtttcaacagccaactttgcatacaatcctgtgaatgaggattttactgatgatgctttgcctatctctcttagtacaaagggctgggatcttacccaaggccaatctaaacgttcccgaaagaagaagctggcgaccccaactgttcttgatactttgaaaaagaaaactaaaagggcatataacaaaaggaggaatgccactgcaaacaccctgaacacatctgccactgcaactgacggcataactgatggcacaaatgtggagaacatttcgtttgatttgtcacaatacaacaatgccccaagcttccactggcctgaaagcagcagcaggtctcagctccactgagtaggcagcaatgcaatcgtggatgccttccaaatagactaagttctgacagtcttgtaagggcttgttcggttattcctatcttctgtggattagatgagattggaaaaaaatatgaaagattttgacttgaaagattttgacttgtttgggattaaaacgcacccaattccactcaatctacatggattgagagcaaaaccaacaagccctaatttggaaaaaaaaaaaaactagaggtgatggatcaggtttgacctttctattcctgcctaggactctaggagtcagtgaccacctgaataaaggtgaaaagggaagggattcaatgtggtgaagtgacatctaccatctatgtaccaatttagtggaacgggttctctacataatcattcctttttttccttccatggatatttgcagctcccgattgatttatctgaaccatgtaaattaggtcagatgcccctgaatcgacctgatgtttcactatggatccctcaggaaatcatatgccccttctctgatgaagctgtttgtaacaagatgtttattgcttcaccaagttcatctgttttcgctaatatttgttccgttcaatttctatgatcaaattattatatttgttctgtccagataatattttgtatcattttattctttttttctcaaacatgcaggagaactgtgtgtcaatatattaagatagaacgaatgatctgatt

SEQ ID NO: 15316 - DNA, 891 bp, Zea Mays
ctcttgcgccagcacccacagcttgtagggcgcaggctggcggccgtagctccggtccatcggttggaccttcaaggtggagaacatttcgtttgatttgtcacaatacaacaatgccccaagcttccactggcctgaaagcagcagcaggtctcagctccactgagtaggcagcaatgcaatcgtggatgccttccaaatagactaagttctgacagtcttgtaagggcttgttcggttattcctatcttctgtggattagatgagattggaaaaaaatatgaaagattttgacttgaaagattttgacttgtttgggattaaaacgcacccaattccactcaatctacatggattgagagcaaaaccaacaagccctaatttggaaaaaaaaaaaaactagaggtgatggatcaggtttgacctttctattcctgcctaggactctaggagtcagtgaccacctgaataaaggtgaaaagggaagggattcaatgtggtgaagtgacatctaccatctatgtaccaatttagtggaacgggttctctacataatcattcctttttttccttccatggatatttgcagctcccgattgatttatctgaaccatgtaaattaggtcagatgcccctgaatcgacctgatgtttcactatggatccctcaggaaatcatatgccccttctctgatgaagctgtttgtaacaagatgtttattgcttcaccaagttcatctgttttcgctaatatttgttccgttcaatttctatgatcaaattattatatttgttctgtccagataatattttgtatcattttattctttttttctcaaacatgcaggagaactgtgtgtcaatatattaagatagaacgaatgatctgatt

SEQ ID NO: 15317 - DNA, 3203 bp, Zea Mays
ttgcactcctattcgcctgctctgtctgacctgaaaattttggaaccaatggaagaggaagagtatagctctgaaacatctaatgaagaagatggcgaaaaagaaggaaatgctgctgagagtgatgtcttcagaccagttgatgtagatccagcatgtttaccaagagtagggatgatatttgactcggaggaagatgcctttcagttttatgtgacgtatggttgtcacgcaggttttggtattacaagaagatctaacaatacctttgatggtttccgctatcgctctacattcatatgttctaaaggagggcagtctagactgagatctggtgtgacaaaacctgcaagaaagcgaggtgtgaagactggctgcaaggccaagatgattgtgaaggatgcccattttcaaaatcgctgggaagtaattgttcttgagttggagcacaaccatccattggatccgaacttgcttaagtttaagagacatttgaagaactccccttttacgataaatccacctcaaatttgtgagtctgagggacaacagagcaactcagctcttgtacattcaagcagagttgttgatactggtataacttcgtcttctacacagattgaattcaaagccaagatagatagaaataggaaattgaagctcgcagaaggagacttagacgccttgttggattttctcaacaaaatgcaagaccaaaacccttgtttcttttacagtttagatatgaatgagcaagggcaactaaggaatgtcttttggtctgacgccaaatcacgcagttcatacaattactttggtgatgttgttgctattaatgtcacaaacttcagcgatcagtatgatatgcagtttgtgtcattcatgggaactaaccaccatgcacagccagtgttactaggttgtggcctgcttgctggtagatctcttggggcttatgtgtggctttttggtacatggttaagatgtatgaatgccaaaccaccacattcaataattacaaactactgtcatgatgtagcgatagctatcaaaaaggttttccctaacgcacgtcaccgtttttgcctttcacacatcttaaatgtgcttcctgaaaagttggaagaaattgataacaaagatgaaattatttccacattcaccacactagcctatgattatgttactatgactgattttgacagagagtggcaagatactatccaacattttcgtttggagagaaatgaatggctgtccaaactatatgaggtcaggatgcagtgggctcctgtttatgttaaggattcattttgggcaggaatgtctgtcacagacagaagtgatagtgtaactgactattttgatggctggttgatgtcaggaacctctttgaaaatgtttgtagagcaatatgaggaagctgttaaaggaaagttagaaaaggaatcttacgaagatttacgatcagctcagatgaggccaccaatggtgacggggttgcctgtggaagatcaagcagcaaaggtgtacactgcagaaatctttcagaagttcttcaatgaaataggacattcatttcattgcaattataatatacttgaacggaatgagtcagtggttacatacatagtttcggagcatgtcgatcaaacaaacaaggtagactacaaagttgcttatgataatgttcaaggtgacatatggtgcctctgccgtttgtaccaatccaaaggaatattgtgcaggcatgcactcactgtactgagacaggagcttgtgctgatgattccacaaaaatacatcattcatcgctggtgcaaggactgtaaacaaacttgtgcttccatatcccagcctgtctcagcaggtaatcaggaactgggaagctacgatgatctgtacaaacttggccacctatactttgcagaagttgtggaatttggttccatgaactcagaatcaaaagaatatgctttgtcaatcatgagggaagtcagggataaagtgatttcatatgagaaatcactaagagatcaaagggttgacagccatgtttcaacagccaactttgcatacaatcctgtgaatgaggattttactgatgatgctttgcctatctctcttagtacaaagggctgggatcttacccaaggccaatctaaacgttcccgaaagaagaagctggcgaccccaactgttcttgatactttgaaaaagaaaactaaaagggcatataacaaaaggaggaatgccactgcaaacaccctgaacacatctgccactgcaactgacggcataactgatggcacaaatgttcagcagaatcctgtaaatgagggatggcagctagcgtcgactagtgctcccgaaactttctcttatggagtggagaacatttcgtttgatttgtcacaatacaacaatgccccaagcttccactggcctgaaagcagcagcaggtctcagctccactgagtaggcagcaatgcaatcgtggatgccttccaaatagactaagttctgacagtcttgtaagggcttgttcggttattcctatcttctgtggattagatgagattggaaaaaaatatgaaagattttgacttgaaagattttgacttgtttgggattaaaacgcacccaattccactcaatctacatggattgagagcaaaaccaacaagccctaatttggaaaaaaaaaaaaactagaggtgatggatcaggtttgacctttctattcctgcctaggactctaggagtcagtgaccacctgaataaaggtgaaaagggaagggattcaatgtggtgaagtgacatctaccatctatgtaccaatttagtggaacgggttctctacataatcattcctttttttccttccatggatatttgcagctcccgattgatttatctgaaccatgtaaattaggtcagatgcccctgaatcgacctgatgtttcactatggatccctcaggaaatcatatgccccttctctgatgaagctgtttgtaacaagatgtttattgcttcaccaagttcatctgttttcgctaatatttgttccgttcaatttctatgatcaaattattatatttgttctgtccagataatattttgtatcattttattctttttttctcaaacatgcaggagaactgtgtgtcaatatattaagatagaacgaatgatctgatt

SEQ ID NO: 15318 - DNA, 908 bp, Zea Mays
cactcctattcgcctgctctggttcagcagaatcctgtaaatgagggatggcagctagcgtcgactagtgctcccgaaactttctcttatggagtggagaacatttcgtttgatttgtcacaatacaacaatgccccaagcttccactggcctgaaagcagcagcaggtctcagctccactgagtaggcagcaatgcaatcgtggatgccttccaaatagactaagttctgacagtcttgtaagggcttgttcggttattcctatcttctgtggattagatgagattggaaaaaaatatgaaagattttgacttgaaagattttgacttgtttgggattaaaacgcacccaattccactcaatctacatggattgagagcaaaaccaacaagccctaatttggaaaaaaaaaaaaactagaggtgatggatcaggtttgacctttctattcctgcctaggactctaggagtcagtgaccacctgaataaaggtgaaaagggaagggattcaatgtggtgaagtgacatctaccatctatgtaccaatttagtggaacgggttctctacataatcattcctttttttccttccatggatatttgcagctcccgattgatttatctgaaccatgtaaattaggtcagatgcccctgaatcgacctgatgtttcactatggatccctcaggaaatcatatgccccttctctgatgaagctgtttgtaacaagatgtttattgcttcaccaagttcatctgttttcgctaatatttgttccgttcaatttctatgatcaaattattatatttgttctgtccagataatattttgtatcattttattctttttttctcaaacatgcaggagaactgtgtgtcaatatattaagatagaacgaatgatctgatt

SEQ ID NO: 15319 - DNA, 3263 bp, Zea Mays
acgtggaatagttcgaattcatgccgccaaagaatctccgcgtcccgacaggagatgggtccgctccagcgccggccgaccgccatgggtgggctcgaggagatcaagaatgaagccgtcgatctggagaacatccccatcgaggaggtgttcgagcagctgaaatgcacccgcgaggggctgagctccagcgagggccagcagcgcctcgagatcttcggccccaacaggctcgaggagaagaaggaaagcaagatcctcaagttcctcgggttcatgtggaacccgctgtcgtgggtcatggagatggccgccgtcatggccatcgccctcgccaacggcggcggcaagccccccgactgggaggacttcgtcggcatcatcgtgctcctggtcatcaactccaccatctccttcatcgaggagaacaatgccggcaacgccgcggccgcgctcatggccaaccttgctcccaagaccaaggttctgagagatggccgatggggcgagcaagaggctgcgatcttggttcctggtgacatcgtcagcatcaagctcggtgacatcgtccctgccgacgcgcgtctcctcgagggcgatcctctcaaggttgaccagtccgcgcttaccggagagtcgctcccggttaccaagggtcccggggacgaggtgttctcggggtccacctgcaagcagggcgagatcgaggccgtggtgatcgccaccggagtgcacaccttcttcggcaaggccgctcacctcgtggacagcaccaaccagcaccgcaggtaccgcagcgggatcgagaacctgctggtgctcctgatcggcggcatcccgatcgccatgcccaccgtgctctcggtcaccatggccatcggctcgcacaagctgtcgcagcagggcgccatcaccaagaggatgaccgccatcgaggagatggccgggatggacgtgctctgcagcgacaagaccggcacgctcaccctcaacaagctcagcgtcgacaagaacctcgtcgaggtgttctgcaagggcgtcgacaaggaccacgtgctgctgctggccgcgagggcgtcgaggaccgagaaccaggacgccatcgacgccgccatggttggcatgcttgctgaccctaaggaggccagggctggtatcagggagatccacttcttgcccttcaaccctgtcgacaagaggactgctctgacgtacattgatgccgatggccactggcaccgtgtcagcaagggtgcccctgaacagattcttgacctgtgccactgcaaggaggatctgaggcgtaaggtgcacggtatcatcgacaagtatgccgagcgtggtcttcgttcgcttgctgttgccagacaggaagtgcctgagagaaacaaggagtcccctggtggaccatggcagttcgttggtctgttgcctttgtttgatccgcccaggcatgacagtgctgagacgattcgcaaggctcttgttcttggtgtcaacgtcaagatgattacgggtgatcagcttgctatcggtaaggagaccggaaggaggctcgggatgggtaccaacatgtatccttcctcagcattgctcggccaaaacaaggatgctacgctcgaggcacttcctgtagacgagctcatcgagaaggccgacggttttgccggagtcttccctgaacacaagtacgagatcgtgaagagactgcaagagaagaagcacatcgttggtatgactggagacggtgtcaacgacgccccggctcttaagaaggccgacatcggtatcgctgtcgcggacgctaccgacgcggccaggagcgcttccgacattgtccttactgagccaggtctcagtgtcatcatcagcgctgtcctcaccagcagatgcatcttccagaggatgaagaactacaccatctatgcagtctccatcacaatccgtatagtgcttggatttatgctcattgcattgatctggcaatacgatttctcccccttcatggtccttatcatcgccattctcaacgacggcactatcatgaccatctctaaggacagagttaagccgtctccgttgccggacagctggaagctgaaggagatctttgccacgggcatcgtgcttggaagctacctcgctctgatgactgtcattttcttctgggctatgcacaagaccgacttcttctcggacaaattcggtgtgaggtcgatcagggacagtgagcatgagatgatgtccgcgctgtacctccaagtgagtatcgtgagccaggctctgatcttcgtcacccggtcccggagctggtccttcgtggagcgccctggcctgctcctggtcaccgcgttcctgctcgcccagcttgtcgcgaccttcctcgctgtctacgccaactggggcttcgccaggatcaagggtatcggctggggctgggccggtgtggtctggctctacagcatcgtgttctacttccctctggacctgatcaagttcttcatccgtttcgtgctcagcggcagggcatgggacaacctcctggagaacaagaccgccttcaccaccaagaaggactacgggcgggaggagagggaggcgcagtgggccaccgcgcagaggacgctgcacgggctccagccgccggaggccgccaccagcacgctgttccacgacaagaacagctaccgcgagctgtccgagatcgcggagcaggccaagaggcgcgccgagatcgcgaggctgcgggagctcaacaccctcaagggccacgtggagtcggtggtcaagctcaagggcctggacatcgacaccatccagcagaactacacggtgtgagatgtgtgctgtgatgtcgacgaaaacacctttgccatgccacccttgttgttcttgcgacgacggagtcatgtgattgttacagaaaaaaagaagaaaattttccggtgatgtgattggagacaatagaagcgtgtacgtacgtacgtgtggctgatcctgaccccgagcatgcagagcagccctaggtgaggtgaccattgccaccagatatatacccgtctttctagcttagctagggagcttcttcttcttttttttccctcttgttattgtcaagtgtgtgcgcgtgttgtaatggttttactcgcctaactagccggtggtctcgcgaggcgaagaaataatgcaaccgaaagcattattgctctcttctgacttgattgatgctggcagcagaatgtgtagcttgtgtcttgtctact

SEQ ID NO: 15320 - DNA, 3340 bp, Zea Mays
cacggagggtgcggagcgagcggcagtgccctgcgccagcgccctctctgatcgagatcggacggccgtactgccgggccggcaatcattgcccccccccggagaacatccccatcgaggaggtgttcgagcagctgaaatgcacccgcgaggggctgagctccagcgagggccagcagcgcctcgagatcttcggccccaacaggctcgaggagaagaaggaaagcaagatcctcaagttcctcgggttcatgtggaacccgctgtcgtgggtcatggagatggccgccgtcatggccatcgccctcgccaacggcggcggcaagccccccgactgggaggacttcgtcggcatcatcgtgctcctggtcatcaactccaccatctccttcatcgaggagaacaatgccggcaacgccgcggccgcgctcatggccaaccttgctcccaagaccaaggttctgagagatggccgatggggcgagcaagaggctgcgatcttggttcctggtgacatcgtcagcatcaagctcggtgacatcgtccctgccgacgcgcgtctcctcgagggcgatcctctcaaggttgaccagtccgcgcttaccggagagtcgctcccggttaccaagggtcccggggacgaggtgttctcggggtccacctgcaagcagggcgagatcgaggccgtggtgatcgccaccggagtgcacaccttcttcggcaaggccgctcacctcgtggacagcaccaaccaggtggggcacttccagcaggtcctgacggcgatcgggaacttctgcatctgctcgatcgcggtgggcatcgtcgtcgagatcatcgtcatgttcccgatccagcaccgcaggtaccgcagcgggatcgagaacctgctggtgctcctgatcggcggcatcccgatcgccatgcccaccgtgctctcggtcaccatggccatcggctcgcacaagctgtcgcagcagggcgccatcaccaagaggatgaccgccatcgaggagatggccgggatggacgtgctctgcagcgacaagaccggcacgctcaccctcaacaagctcagcgtcgacaagaacctcgtcgaggtgttctgcaagggcgtcgacaaggaccacgtgctgctgctggccgcgagggcgtcgaggaccgagaaccaggacgccatcgacgccgccatggttggcatgcttgctgaccctaaggaggccagggctggtatcagggagatccacttcttgcccttcaaccctgtcgacaagaggactgctctgacgtacattgatgccgatggccactggcaccgtgtcagcaagggtgcccctgaacagattcttgacctgtgccactgcaaggaggatctgaggcgtaaggtgcacggtatcatcgacaagtatgccgagcgtggtcttcgttcgcttgctgttgccagacaggaagtgcctgagagaaacaaggagtcccctggtggaccatggcagttcgttggtctgttgcctttgtttgatccgcccaggcatgacagtgctgagacgattcgcaaggctcttgttcttggtgtcaacgtcaagatgattacgggtgatcagcttgctatcggtaaggagaccggaaggaggctcgggatgggtaccaacatgtatccttcctcagcattgctcggccaaaacaaggatgctacgctcgaggcacttcctgtagacgagctcatcgagaaggccgacggttttgccggagtcttccctgaacacaagtacgagatcgtgaagagactgcaagagaagaagcacatcgttggtatgactggagacggtgtcaacgacgccccggctcttaagaaggccgacatcggtatcgctgtcgcggacgctaccgacgcggccaggagcgcttccgacattgtccttactgagccaggtctcagtgtcatcatcagcgctgtcctcaccagcagatgcatcttccagaggatgaagaactacaccatctatgcagtctccatcacaatccgtatagtgcttggatttatgctcattgcattgatctggcaatacgatttctcccccttcatggtccttatcatcgccattctcaacgacggcactatcatgaccatctctaaggacagagttaagccgtctccgttgccggacagctggaagctgaaggagatctttgccacgggcatcgtgcttggaagctacctcgctctgatgactgtcattttcttctgggctatgcacaagaccgacttcttctcggacaaattcggtgtgaggtcgatcagggacagtgagcatgagatgatgtccgcgctgtacctccaagtgagtatcgtgagccaggctctgatcttcgtcacccggtcccggagctggtccttcgtggagcgccctggcctgctcctggtcaccgcgttcctgctcgcccagcttgtcgcgaccttcctcgctgtctacgccaactggggcttcgccaggatcaagggtatcggctggggctgggccggtgtggtctggctctacagcatcgtgttctacttccctctggacctgatcaagttcttcatccgtttcgtgctcagcggcagggcatgggacaacctcctggagaacaagaccgccttcaccaccaagaaggactacgggcgggaggagagggaggcgcagtgggccaccgcgcagaggacgctgcacgggctccagccgccggaggccgccaccagcacgctgttccacgacaagaacagctaccgcgagctgtccgagatcgcggagcaggccaagaggcgcgccgagatcgcgaggctgcgggagctcaacaccctcaagggccacgtggagtcggtggtcaagctcaagggcctggacatcgacaccatccagcagaactacacggtgtgagatgtgtgctgtgatgtcgacgaaaacacctttgccatgccacccttgttgttcttgcgacgacggagtcatgtgattgttacagaaaaaaagaagaaaattttccggtgatgtgattggagacaatagaagcgtgtacgtacgtacgtgtggctgatcctgaccccgagcatgcagagcagccctaggtgaggtgaccattgccaccagatatatacccgtctttctagcttagctagggagcttcttcttcttttttttccctcttgttattgtcaagtgtgtgcgcgtgttgtaatggttttactcgcctaactagccggtggtctcgcgaggcgaagaaataatgcaaccgaaagcattattgctctcttctgacttgattgatgctggcagcagaatgtgtagcttgtgtcttgtctact

SEQ ID NO: 15321 - DNA, 2911 bp, Zea Mays
attcaattagctcaggattctcaatttgggttctgagagatggccgatggggcgagcaagaggctgcgatcttggttcctggtgacatcgtcagcatcaagctcggtgacatcgtccctgccgacgcgcgtctcctcgagggcgatcctctcaaggttgaccagtccgcgcttaccggagagtcgctcccggttaccaagggtcccggggacgaggtgttctcggggtccacctgcaagcagggcgagatcgaggccgtggtgatcgccaccggagtgcacaccttcttcggcaaggccgctcacctcgtggacagcaccaaccaggtggggcacttccagcaggtcctgacggcgatcgggaacttctgcatctgctcgatcgcggtgggcatcgtcgtcgagatcatcgtcatgttcccgatccagcaccgcaggtaccgcagcgggatcgagaacctgctggtgctcctgatcggcggcatcccgatcgccatgcccaccgtgctctcggtcaccatggccatcggctcgcacaagctgtcgcagcagggcgccatcaccaagaggatgaccgccatcgaggagatggccgggatggacgtgctctgcagcgacaagaccggcacgctcaccctcaacaagctcagcgtcgacaagaacctcgtcgaggtgttctgcaagggcgtcgacaaggaccacgtgctgctgctggccgcgagggcgtcgaggaccgagaaccaggacgccatcgacgccgccatggttggcatgcttgctgaccctaaggaggccagggctggtatcagggagatccacttcttgcccttcaaccctgtcgacaagaggactgctctgacgtacattgatgccgatggccactggcaccgtgtcagcaagggtgcccctgaacagattcttgacctgtgccactgcaaggaggatctgaggcgtaaggtgcacggtatcatcgacaagtatgccgagcgtggtcttcgttcgcttgctgttgccagacaggaagtgcctgagagaaacaaggagtcccctggtggaccatggcagttcgttggtctgttgcctttgtttgatccgcccaggcatgacagtgctgagacgattcgcaaggctcttgttcttggtgtcaacgtcaagatgattacgggtgatcagcttgctatcggtaaggagaccggaaggaggctcgggatgggtaccaacatgtatccttcctcagcattgctcggccaaaacaaggatgctacgctcgaggcacttcctgtagacgagctcatcgagaaggccgacggttttgccggagtcttccctgaacacaagtacgagatcgtgaagagactgcaagagaagaagcacatcgttggtatgactggagacggtgtcaacgacgccccggctcttaagaaggccgacatcggtatcgctgtcgcggacgctaccgacgcggccaggagcgcttccgacattgtccttactgagccaggtctcagtgtcatcatcagcgctgtcctcaccagcagatgcatcttccagaggatgaagaactacaccatctatgcagtctccatcacaatccgtatagtgcttggatttatgctcattgcattgatctggcaatacgatttctcccccttcatggtccttatcatcgccattctcaacgacggcactatcatgaccatctctaaggacagagttaagccgtctccgttgccggacagctggaagctgaaggagatctttgccacgggcatcgtgcttggaagctacctcgctctgatgactgtcattttcttctgggctatgcacaagaccgacttcttctcggacaaattcggtgtgaggtcgatcagggacagtgagcatgagatgatgtccgcgctgtacctccaagtgagtatcgtgagccaggctctgatcttcgtcacccggtcccggagctggtccttcgtggagcgccctggcctgctcctggtcaccgcgttcctgctcgcccagcttgtcgcgaccttcctcgctgtctacgccaactggggcttcgccaggatcaagggtatcggctggggctgggccggtgtggtctggctctacagcatcgtgttctacttccctctggacctgatcaagttcttcatccgtttcgtgctcagcggcagggcatgggacaacctcctggagaacaagaccgccttcaccaccaagaaggactacgggcgggaggagagggaggcgcagtgggccaccgcgcagaggacgctgcacgggctccagccgccggaggccgccaccagcacgctgttccacgacaagaacagctaccgcgagctgtccgagatcgcggagcaggccaagaggcgcgccgagatcgcgaggctgcgggagctcaacaccctcaagggccacgtggagtcggtggtcaagctcaagggcctggacatcgacaccatccagcagaactacacggtgtgagatgtgtgctgtgatgtcgacgaaaacacctttgccatgccacccttgttgttcttgcgacgacggagtcatgtgattgttacagaaaaaaagaagaaaattttccggtgatgtgattggagacaatagaagcgtgtacgtacgtacgtgtggctgatcctgaccccgagcatgcagagcagccctaggtgaggtgaccattgccaccagatatatacccgtctttctagcttagctagggagcttcttcttcttttttttccctcttgttattgtcaagtgtgtgcgcgtgttgtaatggttttactcgcctaactagccggtggtctcgcgaggcgaagaaataatgcaaccgaaagcattattgctctcttctgacttgattgatgctggcagcagaatgtgtagcttgtgtcttgtctact

SEQ ID NO: 15322 - DNA, 2946 bp, Zea Mays
aaaagccctcctctttggctgacgcggagcagatctttcgctctgctgggcttctcttgtcttccgggcactcctgcgcgatcaaatccgattcaacggccgagaaaaaaaccctcgaagaggaaaaaggaaaaaaagaaaacagggagagcccaagcctgagacgaacacgaagaagcaaggagcgaagcagacacgagcgagcccatcccaagttcccaacccacacgaagctgcagcagcaggcagccgcctcgccacgcgcccgagcaacgccgccgagagagccgcccgcccgcccgcccgccggtgagcagcgagggcaattcgtcttcggctggtccccgtcccgctcccgcccgccaaccccaattgctcccctctcggaggtcagctcaattcctgctgtttctcggattcgattcggttgcaccgggcgcgtcgtctccctcgccggagatccagcaggtacgagctcgcctggggccgaggatcatgcccccattgctctagggtttgggtgggtaatccaattggctcgccaggcccgcggcctctatgcttgattcgggcctgccgcgccgctccctgggatctcgcggcggttggtgcggcgccagcggtgatgagatcccctccatggccggcgagctgggaattggggtacgggctcgctctctgcaggaagcggcgcaagccctaatggtttgatcctagctgggtgcggcgtgctatccccaattcattggtttctctactccgggtctgatattggggtttgctgcggtggtaactgcatggacacagtaagggaggaggcatggccagtggctgcaccgcggcagcagccatcagctccccaaccgcagcagcaacagcagaatggccgtattgatctcagggagctcaaagctcagatggagaagcagcttggtccggatcgctcgcggcgatattttggctacttgaatggctacttatcagagaggctcggcaggcaagactttgaaaagctgtgcctgcataccctggggcgggagaaccttcaactgcacaaccggctaatccgtgcaattctctacaatgcctaccagggaaagtgcccgccacctccactggatgcagggagacctgtaggagcatcagtaaagaaggcttatcaggctgctgaagtgttgaatgcttgcaatggtgatgccaggttgttacagattcagagattgaggcctgtggccagagcacaggatcatactttaaaagacagtacaaataacacgggtccaaattgtagggtggctgctgccaatcacaaccaagttactcacgatgcttctggatctctggagaatggtacactaaatcaacttgagttgaagagattgcgttttcaacaatgcgaacctgtagagccagtggcaaagcatccgcgtgtggaacagttgccacccaataatttgcctgtacagagaagaagcatgagcagcactgcagaacagtctgcagaaatattgagaagtcctgtacgagctccactgggaattccattttgttcagcaagtgtgggtggtgcaaggaaatttccacctccactaattgttgcaggtgaggatcacttcaacagctgttctgagcatgatgggctgttcagcactgaactgctgcatagacggatggagaaaacagcagaaacgctgggtttagctggtatcacaatggatagtgctgagcttctgaatattgctctggacaagtacatgaaaaacctgattaggtcatctgttgagttagtaggaggtagtgttcagagggatgcaaggaaagggacaccaacctacaagcagcaagcctatggaaagcagattaatggtgtccggctgccaaaccatgttcatatgcaatcagccagtggatcaccaggagccaagaatgagattggaattaaccatttgatctccatcaatgactttaagcgaagttttgtaccaatgtgcttactggtgcccatccgatgtacatttgagctggaagtggcaagattgcaggcacaacacaaaatatgcacatgtggggtcaaggcagaaatctgatcaacgttcagctgtcagagttgtactgaaagaaagacattctttttttcctgatacatcatgctcaaataaaggaaaacatcttctgttctggccatgcagcttaggcctcattagcacttacaaggtggatagtgttacatccaaaagtcccaacttctatgtaacatctggcataagggactggggcagcaaaatgcaagtgctgtcttgtaacttataggaaaatgttctgtaagtttctaggtcaggatgtacattattgattgcaaaaattttctaggtatcttcagtactaatttcagggatctcgaatgttcatttaattcttttgtaactctgctatgagaattatatgttagatctctacctttctaccttgatgtgcgcaagtgtctgccttcgggattaggttggtggtgcccccatacactttttggtgtttattatacccaagaaaaaaaaggagatgcattggatatcacagtgttctgtgatctcaacatgttgtctggacaaatggatcctcgttcaaaaatcttgttacttcggttctttctcttgtccaacttttatttttcattttgaacaatttcaatattttgtttcagagataagaaaagaaatttggtctctggtgtcatttttaggctgtcaaaagcattttcattattcttatactgttatatatcgcgagtatgttgtatctgaactagtgtacttattgatgttggagaggatcagagaaccctggatgctgaccgtctgaattccgaacgttctctgtattttatgtctgcggcaaagaggctcgccggcagtccaatacatcctggttcaatataatatctacttatgc

SEQ ID NO: 15323 - DNA, 2108 bp, Zea Mays
gctcgcggcactgcaaccgcagtggtcaaacgtgggaaattgaagcggaggaagatagagagaaaaagaggagacgagagagggagagagatgctgcaggtggaggaggcgctggcggcggtgctgtccgcggcggcgggccacgcggagccgcacgccgtgccgctgcagggcgcgctcgggctcgtcctcgcggaggacgtctgcgcgcccgatccgctccctcccttccgcgcctccatcaagggatgtgacatagagaaggattcgattgtgctcaagtctggtgagcatataggtcctgcagaaattgggctacttgcaacagtgggtgtaaccactgtcaaggtgtaccctcggccaacaatcgctgtattctccacaggggatgagctagtgcagccagccactgccaccctcagccgtgattcgtgattccaatcgagccatgcttctagcttgtgctattcagcagaaatgcaaagtggttgacctaggtattgcagaggacactgaagaaagtctcaaggagcatatggatgcagctttgcgttctaatgctgatataatcattacttctggtggtgtttccatgggcgacagagatcttgtcaaaccttgcctggcaaagatgggtaaaattcactttgagaagatccagatgaaaccaggaaagccgttaacctttgctgagatcaccacacaagacacgccaaagccatctaaaacagttcttgcatttggtttgcctggaaatccagtgagctgtattgtttgctttaatctttttgttgttcctgcaatccgtcttctctctggctggtcaaaccctcatctgcaaagagtgcatgtgcgcatatcacatcctttaagagcagacccacatcgtacagagtttcaccgtgcagcaattagatgggtgcttgatgatggatctggtcgacctggttttgttgctgagagtactggccatcaggctagtagccgtcttcttagtatgaaatctgctaatgccctgctggaaataccatccactggacaaatattggcagctgggacatctatccaagccatacttatttcagacataataacttcttcagataaactgcctactccttcaaatccgtatccatctcgtggtccttctgcaaaaagtatttccgcagatgtatctcagattgcatctccacaggatgctgaagttaaagtcgcaattctgactgtaagtgacactgtttcatcaggtgctggccctgataggagtggcccaagagctgtatctgtagtgaattcttcatcagagaaactgggtggtgcaactgtggttgccactgcagttgttcctgatgaagtggacaagatcaagggcattctggtacaatggagtgatattgaccatgttaacctcattctgacattaggtgggactggcttcacacccagagatgtcacaccggaagcaacaaaaatggtgatacagaaagaagcgcctggtctcacatttgttatgcttcaagaaagtttgaagattacaccattcgcaatgctatcccgggccacagctggaatcagaggatcaacacttatcatcaacatgcctggcaacccaaatgctgtggcagaatgcctggaagcactcctcccagcgctcaagcacgccctgaagcagatcaagggtgacaagagggagaagcaccctcgccacactccacatgccgcagcggcgcctgtggaccagtgggagcggagcttcagagccgcatcatctggtagtggtgggtgctcatgtgatccctgaggagccctgatcgactgtgaaataccaaaagagtggaaccaaatacgagacagtaggagagctctgtgtcctccgtgctccattgcattgcctgcgtgcctgcgtccagttcgatgttgaagttttgatcttgttctttggtatgttatatggagatgcgggagtccttgattgttacttgctcacgaacttctttcactgtgctacaaataatgtataatatgtaatctcattgactggccgtttgatgttttgtcatggtctaatagaggagccgcagtaatttgagtggcgtttgtccatgata

SEQ ID NO: 15324 - DNA, 2196 bp, Zea Mays
gctcgcggcactgcaaccgcagtggtcaaacgtgggaaattgaagcggaggaagatagagagaaaaagaggagacgagagagggagagagatgctgcaggtggaggaggcgctggcggcggtgctgtccgcggcggcgggccacgcggagccgcacgccgtgccgctgcagggcgcgctcgggctcgtcctcgcggaggacgtctgcgcgcccgatccgctccctcccttccgcgcctccatcaagggatgtgacatagagaaggattcgattgtgctcaagtctggtgagcatataggtcctgcagaaattgggctacttgcaacagtgggtgtaaccactgtcaaggtgtaccctcggccaacaatcgctgtattctccacaggggatgagctagtgcagccagccactgccaccctcagccgtggtcagattcgtgattccaatcgagccatgcttctagcttgtgctattcagcagaaatgcaaagtggttgacctaggtattgcagaggacactgaagaaagtctcaaggagcatatggatgcagctttgcgttctaatgctgatataatcattacttctggtggtgtttccatgggcgacagagatcttgtcaaaccttgcctggcaaagatgggtaaaattcactttgagaagatccagatgaaaccaggaaagccgttaacctttgctgagatcaccacacaagacacgccaaagccatctaaaacagttcttgcatttggtttgcctggaaatccagtgagctgtattgtttgctttaatctttttgttgttcctgcaatccgtcttctctctggctggtcaaaccctcatctgcaaaggtagtaatcctcattgttacaatgttgtcagttttgttctcaccttacactattcaacgtattccttataactctataaccagagtgcatgtgcgcatatcacatcctttaagagcagacccacatcgtacagagtttcaccgtgcagcaattagatgggtgcttgatgatggatctggtcgacctggttttgttgctgagagtactggccatcaggctagtagccgtcttcttagtatgaaatctgctaatgccctgctggaaataccatccactggacaaatattggcagctgggacatctatccaagccatacttatttcagacataataacttcttcagataaactgcctactccttcaaatccgtatccatctcgtggtccttctgcaaaaagtatttccgcagatgtatctcagattgcatctccacaggatgctgaagttaaagtcgcaattctgactgtaagtgacactgtttcatcaggtgctggccctgataggagtggcccaagagctgtatctgtagtgaattcttcatcagagaaactgggtggtgcaactgtggttgccactgcagttgttcctgatgaagtggacaagatcaagggcattctggtacaatggagtgatattgaccatgttaacctcattctgacattaggtgggactggcttcacacccagagatgtcacaccggaagcaacaaaaatggtgatacagaaagaagcgcctggtctcacatttgttatgcttcaagaaagtttgaagattacaccattcgcaatgctatcccgggccacagctggaatcagaggatcaacacttatcatcaacatgcctggcaacccaaatgctgtggcagaatgcctggaagcactcctcccagcgctcaagcacgccctgaagcagatcaagggtgacaagagggagaagcaccctcgccacactccacatgccgcagcggcgcctgtggaccagtgggagcggagcttcagagccgcatcatctggtagtggtgggtgctcatgtgatccctgaggagccctgatcgactgtgaaataccaaaagagtggaaccaaatacgagacagtaggagagctctgtgtcctccgtgctccattgcattgcctgcgtgcctgcgtccagttcgatgttgaagttttgatcttgttctttggtatgttatatggagatgcgggagtccttgattgttacttgctcacgaacttctttcactgtgctacaaataatgtataatatgtaatctcattgactggccgtttgatgttttgtcatggtctaatagaggagccgcagtaatttgagtggcgtttgtccatgata

SEQ ID NO: 15325 - DNA, 2366 bp, Zea Mays
gctcgcggcactgcaaccgcagtggtcaaacgtgggaaattgaagcggaggaagatagagagaaaaagaggagacgagagagggagagagatgctgcaggtggaggaggcgctggcggcggtgctgtccgcggcggcgggccacgcggagccgcacgccgtgccgctgcagggcgcgctcgggctcgtcctcgcggaggacgtctgcgcgcccgatccgctccctcccttccgcgcctccatcaaggacggatacgccgtcgtggcctccgatgggccaggggagtatcctgtggtcacggagtcgagggcgggcgacgacgccctcggagtggttgtcgtccccggcacggtcgcctacgtcaccaccggagggccggttcccgatggcgccgatgccgtcgtgcaggtggaggacaccgagcagctccctggcggagcggatgggtccaagagggttaggattcttgcgcgggcctcccaaagacaggacatccgcagtgtgggatgtgacatagagaaggattcgattgtgctcaagtctggtgagcatataggtcctgcagaaattgggctacttgcaacagtgggtgtaaccactgtcaaggtgtaccctcggccaacaatcgctgtattctccacaggggatgagctagtgcagccagccactgccaccctcagccgtgattcgtgattccaatcgagccatgcttctagcttgtgctattcagcagaaatgcaaagtggttgacctaggtattgcagaggacactgaagaaagtctcaaggagcatatggatgcagctttgcgttctaatgctgatataatcattacttctggtggtgtttccatgggcgacagagatcttgtcaaaccttgcctggcaaagatgggtaaaattcactttgagaagatccagatgaaaccaggaaagccgttaacctttgctgagatcaccacacaagacacgccaaagccatctaaaacagttcttgcatttggtttgcctggaaatccagtgagctgtattgtttgctttaatctttttgttgttcctgcaatccgtcttctctctggctggtcaaaccctcatctgcaaagagtgcatgtgcgcatatcacatcctttaagagcagacccacatcgtacagagtttcaccgtgcagcaattagatgggtgcttgatgatggatctggtcgacctggttttgttgctgagagtactggccatcaggctagtagccgtcttcttagtatgaaatctgctaatgccctgctggaaataccatccactggacaaatattggcagctgggacatctatccaagccatacttatttcagacataataacttcttcagataaactgcctactccttcaaatccgtatccatctcgtggtccttctgcaaaaagtatttccgcagatgtatctcagattgcatctccacaggatgctgaagttaaagtcgcaattctgactgtaagtgacactgtttcatcaggtgctggccctgataggagtggcccaagagctgtatctgtagtgaattcttcatcagagaaactgggtggtgcaactgtggttgccactgcagttgttcctgatgaagtggacaagatcaagggcattctggtacaatggagtgatattgaccatgttaacctcattctgacattaggtgggactggcttcacacccagagatgtcacaccggaagcaacaaaaatggtgatacagaaagaagcgcctggtctcacatttgttatgcttcaagaaagtttgaagattacaccattcgcaatgctatcccgggccacagctggaatcagaggatcaacacttatcatcaacatgcctggcaacccaaatgctgtggcagaatgcctggaagcactcctcccagcgctcaagcacgccctgaagcagatcaagggtgacaagagggagaagcaccctcgccacactccacatgccgcagcggcgcctgtggaccagtgggagcggagcttcagagccgcatcatctggtagtggtgggtgctcatgtgatccctgaggagccctgatcgactgtgaaataccaaaagagtggaaccaaatacgagacagtaggagagctctgtgtcctccgtgctccattgcattgcctgcgtgcctgcgtccagttcgatgttgaagttttgatcttgttctttggtatgttatatggagatgcgggagtccttgattgttacttgctcacgaacttctttcactgtgctacaaataatgtataatatgtaatctcattgactggccgtttgatgttttgtcatggtctaatagaggagccgcagtaatttgagtggcgtttgtccatgata

SEQ ID NO: 15326 - DNA, 1311 bp, Zea Mays
cacgcgcctccgctgcggcacattgggcagcgcgccgcagccgggcccgccgcaccaaccagagagacgaccgggatgttcacgggtcgcccgtcccatcgccgccggcggagccggactgggactgggaggggtgcttgtccatgtcgccaatttgccatagacgtgcacagccggtaccgtggatggaaagaagcaaacgaaccaaccaagctcctcactgttgcagcagttgtgttcttcgtgtcatgtcggggtcgggagtgagcagggcaggaggcagtgagcagagcagcagcccgtagacccaccgccgcattcacggcaccatgcgtcgctgttgggtacagtgtgcgtccggggccggcggtcacgtcacatcatcggcgcggcggtgtcgagaggccaggcgaggctctctgatctctctggattctggtcggcgacggcgagcgatcaggtggctgtggcgagcggcgacccgagtggcagtgggctgctgcctgctggtgcatgtggcagggccaggggcgggggcagtgatccacccctggattttgcgcgcccgcgccttgtagtcctttgccggactcgtagctttcaaggatcgccgggaagatctcgcggcacgcctgctctgctgggtgctggcgattgctgctgggcgggctcactcacgcccagccccttgcggaaaccagtttttccgtcgccgtgccgctggatgctgggccaaacgccgcgagcggctccgaagatgcgacgaaacgccgggaggtttgtttaggttgcgtcatttcaggtatctacctcccgttacgaccagacactgctacgaccgaaaacgcgccgtcccgtcccgttctttctcaccagaagaggaaacacaacgcatccatcagagatcagaacgatcggacacatgccgtgggaagagcgtggaacctggaacgcgtggctgggggacgtcctcaggctcagccagtgtggccgttcttttttttttgtttagtttgtagaatggaacgagttaatccatcattacattatttctcatagttagttagtattaatattagaaattatgttataccacataatttgagtaatgaattcatgatgcaccactttattttggatgaagtggttttttaaaccggacactgacttaacaagcattctttcccccttttttaaatatattagcaaccaactctttgtgtatcactttacactggaaactgatttatcgcttttacactaaggtacatactattgccttttgaactcagcgaatccctccttttcttc

SEQ ID NO: 15327 - DNA, 761 bp, Zea Mays
cacgcgcctccgctgcggcacattgggcagcgcgccgcagccgggcccgccgcaccaaccagagagacgaccgggatgttcacgggtcgcccgtcccatcgccgccggcggagccggactgggactgggaggggtgcttgtccatgtcgccaatttgccatagatatgttatcaagaaattgggtccggatgagtaaatgatgagttcctctcgaagtttaggcgtccgctgctgtcgctgtccgcaccggttgttgccttgccgtccaaaaacgatgatgatatccatcctgatcctggcctgcttatttacgtctcctgagcaacaaagtacactcattcgccgccggcgatcgtacgtgtgtaatatcagcatcagatcgagcgtgtgtgtgcacacgcacggcagacggacggagcaagggaccacggttcaggagcttgtgctttcatcaccattaataaaacggccggcgtccctgtttggtctcgggtctggcctttcgacagtaaccatccatcctattcctgagaacaatgaaatggaaggtaggccaagacagaaagcaccaaacctgttaacgtatgcacagcacagcggagcagacagtgccagctgcacgggatcgtcgtgtactcacccgtatatcaaataataataacgacttcatgtatatacgtggttttacggcgttattactggtacaaggttaatgccagcgaagcaggtacaggagacagaagagagaaacaaaaacaag

SEQ ID NO: 15328 - DNA, 1062 bp, Zea Mays
cgcgcctccgctgcggcacattgggcagcgcgccgcagccgggcccgccgcaccaaccagagagacgaccgggatgttcacgggtcgcccgtcccatcgccgccggcggagccggactgggactgggaggggtgcttgtccatgtcgccaatttgccataggcttcttctacagctggtgcaacttgcaagtggagtcccgtaccgttatgtgctaggaaatgaacaagattctagggaaaaaataacgagggggagacagagttaaagaacgcggcagattgtcgagttctttacgagtagagtatgaaaggtacctgctgctttttcccctacgagtagaatatgaaaggaaaatgcctatgtatataggctgaccacaagtcgccgcccccctagtcgaccaatctttacaaaaacagagggattggttgagcaatactttcgtgttgcgagatcgattagtaggagcatcaacccatgattcggttggtggtggctggtaatggcgtaatcattgcgaccagcctagcgacagcttcaacatacattctattcaaacgagcaggagtgaactttctgctaaattctattcaaaggagcaggagcagttgtgaactttctgctaagagcaagtttaataacagcgtcaatcgtgggcggacggtaaggatccttgtagtctgacatttagcttattcatatatagtggttaactcatcagtattagtgtaagacctcacttgtctttctcacatagcttcttcgtttttgtgtcgaagccgactgtaagccccttctctctctcttctccctccaccatacatcacatacattcttctccaagagaccaagacaaagaacactgggaggataataaactataggataggatgattcacgggagtcaccctaacttgtcgctggtagatgtgcagtcagttcagtgagagacctaacctgcagtgcagtgacactcagaatagttttttgcgcgatccaggaggaattgattcctctgctttctttcctaaagcacctgggaacattttggagaatagtg

SEQ ID NO: 15329 - DNA, 2180 bp, Zea Mays
atatatccacatagcgcacacctgcttgtgaaaagttcaatcttgagtgtcgcttgtttcaaatcccacctttgcttgctccccccggctcctcctcctcgtaccaaatctagggttcccgatcgaaatcctgcgccgccgccgccgccactgccgttggcgataatgtcggccagcaccgagcccgagaaggacgccgctgccgctgccgccaccgagggcgacgagaagacggaggcgaaggacagcggctccggctgggagctgctgtactgcggcgggacgagcttcgacgccatgggtcggaaggtggtgggcggggcgcagggcaacctggtgtcgccgactcggctgcggccgctcgtgggcgttgatatccgcttcgttgcctctggatgcactgcttgccactgtgttgctttagatgctggaggcaaatgttatacatggggtcgcaacgagaagggacagctagggcatggagatactcttctgcgtaacctgccgactgttgtttctcaactatcaaaatacaaaatcatcaaagcatgtgttggaagaaaccatacagtggttgtaactgatgatggcaaatccttatctttcggtcataacaagcatggacagttagggacgggttccttaaggaatgagattgagtcatcgccagtgtcctgtatcgttgcggaagcaaccaacgttgcatgtggggctgattttactgcctggttgtcatctgtggaaggctcttctatacttacagcaggtcttccccaatatggtcaactcgggcatggaactgataatgagtacaatgctaaagaatcgtctgtgaaactgacctatgaaccccagccccgtccaagagcaatagctgcattttctgggaaaactgttgtcaaagttgcatgcggaactaaccatacagttgcagttgattccaatggctttgtttacacctggggcttcggtggatatggaaggttggggcatagagaacagaaggatgaatggcaacctcgccttgtagaagtcttccagaagcacaatgttctgcctcctaatgccattgtctcagctggttctgtgagttctgcatgcactgctggtggtggacagttgtacatgtggggaaagatgaagaatacaggcgatgattggatgtacccgaaacctgtgatggatttaagtggttggaacattcgctgcatggcttctggtaacatgcaccacattgttggtgctgatgattcttgcataagctggggtgtcgcccagaatggagagcttggttatgggcctaacgggcagaaatcatcagcaaatcccaaaaaggtggacattcttgagggcatgcatgttacaagcttgagaacactttctccagtgtcggctgtggatttggactgtctctgattgttgtggacagagcaaatgttggtgatcgacttggtcagctggaaatttatgatggtgacaccggtgctgaagtagagaaagtggaggtgcaagtaaccaagaaggcatctgccagcaccaactcacgtgccaacaagcgcaagaaaacgaaggatgtttctgaatctgaatccgaagaggatgatgatgatgatgaggatgaaagcggagacgatgaaaatggtggtgtagaagagtcaaagggcaggcgtggccgtaaacccgctaatagagggagaggcaggggaggcaaaaaggcgacccctgaggcaaagccatctggaaggggcagaggccgccccaagaaaaccgagagttctgctcagaaagccggaggaacctcgggcagaggaaaaagaggacggccacgcaagtgatggtccgccctacagtaatgcggcgttgaaaatcagtaacgcctgatgtgatcccattgacattgaggattcattttggtagcaatgcccgttgcactctgcccattttctcactctgattgttgcagctatccaatccaaagacattattagtctcttccccctcccccaatttccgaaatggggtttgccatcccattgtaagtctagaaatgcttaacatgcacatctgtgttcttcattgacgatgattttcttcagctttaggctattaatgaacccttgattcgagtgatttatttatcctgttcaatcacatggtccttgatgggtacttacatacat

SEQ ID NO: 15330 - DNA, 2118 bp, Zea Mays
atatatccacatagcgcacacctgcttgtgaaaagttcaatcttgagtgtcgcttgtttcaaatcccacctttgcttgctccccccggctcctcctcctcgtaccaaatctagggttcccgatcgaaatcctgcgccgccgccgccgccactgccgttggcgataatgtcggccagcaccgagcccgagaaggacgccgctgccgctgccgccaccgagggcgacgagaagacggaggcgaaggacagcggctccggctgggagctgctgtactgcggcgggacgagcttcgacgccatgggtcggaaggtggtgggcggggcgcagggcaacctggtgtcgccgactcggctgcggccgctcgtgggcgttgatatccgcttcgttgcctctggatgcactgcttgccactgtgttgctttagatgctggaggcaaatgttatacatggggtcgcaacgagaagggacagctagggcatggagatactcttctgcgtaacctgccgactgttgtttctcaactatcaaaatacaaaatcatcaaagcatgtgttggaagaaaccatacagtggttgtaactgatgatggcaaatccttatctttcggtcataacaagcatggacagttagggacgggttccttaaggaatgagattgagtcatcgccagtgtcctgtatcgttgcggaagcaaccaacgttgcatgtggggctgattttactgcctggttgtcatctgtggaaggctcttctatacttacagcaggtcttccccaatatggtcaactcgggcatggaactgataatgagtacaatgctaaagaatcgtctgtgaaactgacctatgaaccccagccccgtccaagagcaatagctgcattttctgggaaaactgttgtcaaagttgcatgcggaactaaccatacagttgcagttgattccaatggctttgtttacacctggggcttcggtggatatggaaggttggggcatagagaacagaaggatgaatggcaacctcgccttgtagaagtcttccagaagcacaatgttctgcctcctaatgccattgtctcagctggttctgtgagttctgcatgcactgctggtggtggacagttgtacatgtggggaaagatgaagaatacaggcgatgattggatgtacccgaaacctgtgatggatttaagtggttggaacattcgctgcatggcttctggtaacatgcaccacattgttggtgctgatgattcttgcataagctggggtgtcgcccagaatggagagcttggttatgggcctaacgggcagaaatcatcagcaaatcccaaaaaggtggacattcttgagggcatgcatgttacaagagcaaatgttggtgatcgacttggtcagctggaaatttatgatggtgacaccggtgctgaagtagagaaagtggaggtgcaagtaaccaagaaggcatctgccagcaccaactcacgtgccaacaagcgcaagaaaacgaaggatgtttctgaatctgaatccgaagaggatgatgatgatgatgaggatgaaagcggagacgatgaaaatggtggtgtagaagagtcaaagggcaggcgtggccgtaaacccgctaatagagggagaggcaggggaggcaaaaaggcgacccctgaggcaaagccatctggaaggggcagaggccgccccaagaaaaccgagagttctgctcagaaagccggaggaacctcgggcagaggaaaaagaggacggccacgcaagtgatggtccgccctacagtaatgcggcgttgaaaatcagtaacgcctgatgtgatcccattgacattgaggattcattttggtagcaatgcccgttgcactctgcccattttctcactctgattgttgcagctatccaatccaaagacattattagtctcttccccctcccccaatttccgaaatggggtttgccatcccattgtaagtctagaaatgcttaacatgcacatctgtgttcttcattgacgatgattttcttcagctttaggctattaatgaacccttgattcgagtgatttatttatcctgttcaatcacatggtccttgatgggtacttacatacat

SEQ ID NO: 15331 - DNA, 1116 bp, Zea Mays
tatcttccctgtattttagacggtgcatgcattttcttaaacctgagtttttacctatatgaatgtggtggacagttgtacatgtggggaaagatgaagaatacaggcgatgattggatgtacccgaaacctgtgatggatttaagtggttggaacattcgctgcatggcttctggtaacatgcaccacattgttggtgctgatgattcttgcataagctggggtgtcgcccagaatggagagcttggttatgggcctaacgggcagaaatcatcagcaaatcccaaaaaggtggacattcttgagggcatgcatgttacaagtgtcggctgtggatttggactgtctctgattgttgtggacagagcaaatgttggtgatcgacttggtcagctggaaatttatgatggtgacaccggtgctgaagtagagaaagtggaggtgcaagtaaccaagaaggcatctgccagcaccaactcacgtgccaacaagcgcaagaaaacgaaggatgtttctgaatctgaatccgaagaggatgatgatgatgatgaggatgaaagcggagacgatgaaaatggtggtgtagaagagtcaaagggcaggcgtggccgtaaacccgctaatagagggagaggcaggggaggcaaaaaggcgacccctgaggcaaagccatctggaaggggcagaggccgccccaagaaaaccgagagttctgctcagaaagccggaggaacctcgggcagaggaaaaagaggacggccacgcaagtgatggtccgccctacagtaatgcggcgttgaaaatcagtaacgcctgatgtgatcccattgacattgaggattcattttggtagcaatgcccgttgcactctgcccattttctcactctgattgttgcagctatccaatccaaagacattattagtctcttccccctcccccaatttccgaaatggggtttgccatcccattgtaagtctagaaatgcttaacatgcacatctgtgttcttcattgacgatgattttcttcagctttaggctattaatgaacccttgattcgagtgatttatttatcctgttcaatcacatggtccttgatgggtacttacatacat

SEQ ID NO: 15332 - DNA, 2947 bp, Zea Mays
aaatcttcttgcacagataacaaaagtactgagtaaaattaccatttagaacaaggccatatcagataaaagcatatggagctttcgtaggagatctacaaggcatcgagttttgaagaactctgatatctcagaacctgaaactgttagttccagcaaagcgaaggctgacattgcaccaaacaacaatgtttatacttcaacatattcttttgcctcggagaagcctctgcaacataacaagccaaatgaaaatgttctgcatcaagagaaaccagaggaaatgcctttgcatcaagatagctccgaaaagctgatggagaagccaattgaaaagcatattgacaaacttatggaagaacctgctgaccagataattgaaaaatcaattgaactacctactcaaaagataactgaaacaccaactgatgagccagctgaaaaaataaatgaaacaccaactggagaaccagctgaaaaaataatagaggcggcatctgaaaatacagaagggacaataaaaaatgcaaccgaagagacacatgaaatggcagttgaggaactaattgaagagccagaagaaactatttctgtttcatcaactgggctaaagcagggggaaaacacctcacttgttgaaggaagcagtgcagacgatgaggaagatcatttggagtgtgcagctactaatcttcagcctggcaatgacacttgccttgaaagggaagaggtactgaaccagaaggatctggtgaaactgcaagctgttatacgtggacatctagttagaaagcaggctttagaatctttacaatgtttgcttgcgattattaaaattcaagggttaatcagggctcatcaagcacaacattcaccaggaatgattcaggagactattgttcattcttcaggtgagaaattgcttcgcaatggatttgctctcaagctcatggacaacatgtcgacgtcaaaatccatttgcataaaatgtgatccttcagaatctgatgttacatgggaatggatggagaggtggacaaccttaattccaccaatcactgtggtgcacgtgccagagcataaagaaaatagtgagttgatgggtgaaactgtgaccgaacaagtgactgaacatgctcagtgtgatgaagacattgttgctttggactcagacatatgtttccccaagttggtggctgatgacgtgaaagaaacagtagagacatctgaatctagtaccttggaggctccagtgagtgttccagatgaaaccccaaagatggaaatgaaacatgatactgaatcagagttgatcgaaactactaatgttgacgctgagcaagtaactgaccaaaaggctgaaaatgatgtggacaaggcttttatgtccttgaatcaacaatatacccaagcagatgcatcgagggatccctgtccactttctgaaaaatttgaatcatccaaggaggacagtggcgatgcgtacaattctgagcagacactggagatggaaggtaaaaggtttgtggtgagaaagtcatgcaatccagcatttgctgctgcacaattgaaatttgaagagctgagtacaaattcgacagtcagcaggtccagcagcttgtcacatctggatggggcgagcaagtcaagggttcacgctcctagttcgcaagaagattgctcctcaaagcaagatggcacaggcatgccagatagatcggttggtcatgatactaaaatgattattgctgcatcagaatgtgggactgagatatcaatttcatccacactggactcaccagatagatcagaaggtgacggtggggagatcgtgttggagattggagctctggaaaatagaaactatgtcaccagcaaagctgataatgacttcaatactgtccatcccgaggtaaaaaatgctcctgaagtagaagcccagccgcagaagcaaatagaacagaacggccatgttcctgccctcgaaatagaagcccagccacaagacgagcttgttcaggaaccgcatgctgaaccggaaatgccaggtttgcatgaacgattggaaaaacctgtcgcatcttacgccacacctgaaggaactccaatgagccgaacgactatcactgaatctcaagaaacaccgtcaagtgaggtctctgttaataccaaaaagagcaggagcaaaaagcccaagccccatgcaagcaagaggtcgctggctagtcctggcagcgactcagtcggccggagcagcaccgacaacttctcaaaggaatcaaggcatcccaagagagagagctcaagcaaggctgctaaatccgaccacgtcgaacaagaacctcgcacgagcaacagcaacagcaacctgttgccaagctacatgcaatttacagaatctgcaagagccaaggcgtcgtcgtccccgaagatgagcccagatgtgcaggacagcaacccaaggaaaaggcactcgttgcccatgaccgacggcaagcatgactcgtcgcctcgcatgcagcgatcgtcgtcacatgctcagcaaaacgtcaagagcaacgggcctgctccacacagcgcgtctggaagtggcatatctgatgggtaggccgagcagcgtattcgaatgtctagatggctttcttgtgatgaactcctgccttctccgcacactccatctaactcgtcaagttttttatttttccttgattcgtcgttggaatactgagtatagttggaagaagggcagcagctgcctcttgatatgtgtaaatttgttggttgtgtacttgtgttatgtcactgatgtggtttctgtgtgtaatatatgtcgctttgacttgtcatgcaacattgaagagtatatggattggtctgttgtatttggcgacattgaagtttttgtgtgtgtgtgtgtggatatggctctcgttccatttctctctgt

SEQ ID NO: 15333 - DNA, 2951 bp, Zea Mays
aaatcttcttgcacagataacaaaagtactgagtaaaattaccatttagaacaaggccatatcagataaaagcatatggagctttcgtaggagatctacaaggcatcgagttttgaagaactctgatatctcagaacctgaaactgttagttccagcaaagcgaaggctgacattgcaccaaacaacaatgtttatacttcaacatattcttttgcctcggagaagcctctgcaacataacaagccaaatgaaaatgttctgcatcaagagaaaccagaggaaatgcctttgcatcaagatagctccgaaaagctgatggagaagccaattgaaaagcatattgacaaacttatggaagaacctgctgaccagataattgaaaaatcaattgaactacctactcaaaagataactgaaacaccaactgatgagccagctgaaaaaataaatgaaacaccaactggagaaccagctgaaaaaataatagaggcggcatctgaaaatacagaagggacaataaaaaatgcaaccgaagagacacatgaaatggcagttgaggaactaattgaagagccagaagaaactatttctgtttcatcaactgggctaaagcagggggaaaacacctcacttgttgaaggaagcagtgcagacgatgaggaagatcatttggagtgtgcagctactaatcttcagcctggcaatgacacttgccttgaaagggaagaggtactgaaccagaaggatctggtgaaactgcaagctgttatacgtggacatctagttagaaagcaggctttagaatctttacaatgtttgcttgcgattattaaaattcaagggttaatcagggctcatcaagcacaacattcaccaggaatgattcaggagactattgttcattcttcaggtgagaaattgcttcgcaatggatttgctctcaagctcatggacaacatgtcgacgtcaaaatccatttgcataaaatgtgatccttcagaatctgatgttacatgggaatggatggagaggtggacaaccttaattccaccaatcactgtggtgcacgtgccagagcataaagaaaatagtgagttgatgggtgaaactgtgaccgaacaagtgactgaacatgctcagtgtgatgaagacattgttgctttggactcagacatatgtttccccaagttggtggctgatgacgtgaaagaaacagtagagacatctgaatctagtaccttggaggctccagtgagtgttccagatgaaaccccaaagatggaaatgaaacatgatactgaatcagagttgatcgaaactactaatgttgacgctgagcaagtaactgaccaaaaggctgaaaatgatgtggacaaggcttttatgtccttgaatcaacaatatacccaagcagatgcatcgagggatccctgtccactttctgaaaaatttgaatcatccaaggaggacagtggcgatgcgtacaattctgagcagacactggagatggaaggtaaaaggtttgtggtgagaaagtcatgcaatccagcatttgctgctgcacaattgaaatttgaagagctgagtacaaattcgacagtcagcaggtccagcagcttgtcacatctggatggggcgagcaagtcaagggttcacgctcctagttcgcaagaagattgctcctcaaagcaagatggcacaggcatgccagatagatcggttggtcatgatactaaaatgattattgctgcatcagaatgtgggactgagatatcaatttcatccacactggactcaccagatagatcagaaggtgacggtggggagatcgtgttggagattggagctctggaaaatagaaactatgtcaccagcaaagctgataatgacttcaatactgtccatcccgaggtaaaaaatgctcctgaagtagaagcccagccgcagaagcaaatagaacagaacggccatgttcctgccctcgaaatagaagcccagccacaagacgagcttgttcaggaaccgcatgctgaaccggaaatgccaggtttgcatgaacgattggaaaaacctgtcgcatcttacgccacacctgaaggaactccaatgagccgaacgactatcactgaatctcaagaaacaccgtcaagtgaggtctctgttaataccaaaaagagcaggagcaaaaagcccaagccccatgcaagcaagaggtcgctggctagtcctggcagcgactcagtcggccggagcagcaccgacaacttctcaaaggaatcaaggcatcccaagagagagagctcaagcaaggctgctaaatccgaccacgtcgaacaagaacctcgcacgagcaacagcaacagcaacctgttgccaagctacatgcaatttacagaatctgcaagagccaaggcgtcgtcgtccccgaagatgagcccagatgtgcaggacagcaacccaaggaaaaggcactcgttgcccatgaccgacggcaagcatgactcgtcgcctcgcatgcagcgatcgtcgtcacatgctcagcaaaacgtcaagagcaacgggcctgctccacacagcgcgtctgacaggaagtggcatatctgatgggtaggccgagcagcgtattcgaatgtctagatggctttcttgtgatgaactcctgccttctccgcacactccatctaactcgtcaagttttttatttttccttgattcgtcgttggaatactgagtatagttggaagaagggcagcagctgcctcttgatatgtgtaaatttgttggttgtgtacttgtgttatgtcactgatgtggtttctgtgtgtaatatatgtcgctttgacttgtcatgcaacattgaagagtatatggattggtctgttgtatttggcgacattgaagtttttgtgtgtgtgtgtgtggatatggctctcgttccatttctctctgt

SEQ ID NO: 15334 - DNA, 647 bp, Zea Mays
attcaatccaagtacactagtatcatagaagaaaacaagccaacaagtcgaaagcagtggtagagatgccattcctgcacctgcatatgctctggaactggaactacaaggcaccaacagggctgagtgaagtctcaacagacaacaggcgaggtgagcatggaaaagcagacacgcaggcaggcctcattcccttttctggaagtcacaaaaggaagggacaaccgcacaagttcgacacaactgtgcccctgcccccaaactacacgttacaaccaccaccactgcactagaattcactgctgctgctgctgccacacacacacgcacacatgccgacatacatgaggaccaccgcatgcacgcatgcagtagctggagtctaaagcccgcccggccggcaacatgcatgctgcatagtatgcaaattcgctatctaataatagtaccgccagagatctcccaaacgctagctattgcctttctccagacatgcttctactacatactcctatgcctgatgcttactagtaactggcactagctactaacctaggacaatgacagcaacgcacgtcccagtggtagctcgcgttgctctcacatgctccctgcagcagggtaaggggagcaccatgagctgaggc

SEQ ID NO: 15335 - DNA, 187 bp, Zea Mays
ccgctgcctcctcccgctccaccgccgcccgcattggccgccatgcctctatctcagcgcagcggccttcctgagcgctcctgtgcagtgacctctccggtgtccggtctatggcaagagaggcgaaggagggttccttgtttataaggagggagtgcattggacctagaggctagatagctagaag

SEQ ID NO: 15336 - DNA, 1703 bp, Zea Mays
gaaatttgctctaaataacaaaacatagggcaagagcctagactgaggggccaggagagagggagaggccgaggagagagatagagagacaaaggggagagaccaagcgccagtgacacagagaaggggcggaggagagagagagagagagagagagagagagagagagagagagagagagagagagaggagaatcgcgggagggaggcggggtttttgcgtgatttgagttctccggttttccccacgctcccgccatggtgtccgaccaggagatcgccagctgcgtcgagtccgtcctccgaggctccgccggcgggcccggggaggtctcgctcaccgccgtgctgcagcaggcggaggccacgctcggcgtcgacctctcccacaaggcgggctttatccgcgaccagatggacctcttcttcggcccgcgcctccagccgcagccgctgaccacgccacagctggcgcctcccccgcctcaggccgtcgttgcccccgcggacgccgtgcctcagcctcagcctcagcatcagctccccgccatctctcccgtccctgtggtctccgcgccgccggccatggcgttctacccgccgccgccgctcgccttccgctacaccaccggcctcgctggggccgccacgggtgggaccgtctccttccagcagccagcccctggggctgggggcactgcttcccccaccgctgcaccgcaggtcgccggcgacaacaaggaaagttcttctaagcgaaaaagaggtggacctggtggtttaaataaagtttgcgcaatttcacctgaacttcagaccattgttggtgagactgccatgtcaagaactcagattgtgaagcagctctgggcatatatcaggcagaacaatcttcaagatcctgatgacaaaaggaagattatttgcaatgacgaacttcgtgtggtttttgaaactgacaacaccgacatgtttaaaatgaataaattattggctaagcacataaccccacttgacccaaaaggtcaacttcatgaagtaaaaagaatgaaggctcccaccatgtctcctcaacctggacgttccattgatcaaccctccatagttatttctgacgcactagcaaagttcattggaacagatggaacatttcctcacgattttgccctgaaatatctgtgggattacataaaagcaaaccaacttgaggatgtcatcaacgaatcaatattatgcgattcaaaacttcaagagctctttggctgtgagagcattcctatgtcaggactatcagaaatgcttggtcaccacttcatcaagaaaacatagcaaatcctcattaactgtctaagtggagtacaaatgtacaatggctgtggtggactgctggtggtctcttcttccagaagaaatttccattgtatttgtcgttgtcctcttcgcttttatggaaggtggtggtgcgcctatgggacttgattaactttattacctgaggggtagctgaaatgccaaagtaaaaaagaatgtcggttggttagatggtctaactagcactttcttagatctgggttcgattttctgtgtgagcgaattctaggctgagattactgtgttgcacatgttctacaatgttgatgagtatgggtggaatatagattcagtttttttaacctgcatcgtagaaagtatttttttcaatat

SEQ ID NO: 15337 - DNA, 1888 bp, Zea Mays
aacaaaacatagggcaagagcctagactgaggggccaggagagagggagaggccgaggagagagatagagagacaaaggggagagaccaagcgccagtgacacagagaaggggcggaggagagagagagagagagagagagagagagagagagagagagagagagagagagaggagaatcgcgggagggaggcggggtttttgcgtgatttgagttctccggttttccccacgctcccgccatggtgtccgaccaggagatcgccagctgcgtcgagtccgtcctccgaggctccgccggcgggcccggggaggtctcgctcaccgccgtgctgcagcaggcggaggccacgctcggcgtcgacctctcccacaaggcgggctttatccgcgaccagatggacctcttcttcggcccgcgcctccagccgcagccgctgaccacgccacagctggcgcctcccccgcctcaggccgtcgttgcccccgcggacgccgtgcctcagcctcagcctcagcatcagctccccgccatctctcccgtccctgtggtctccgcgccgccggccatggcgttctacccgccgccgccgctcgccttccgctacaccaccggcctcgctggggccgccacgggtgggaccgtctccttccagcagccagcccctggggctgggggcactgcttcccccaccgctgcaccgcaggtcgccggcgacaacaaggaaagttcttctaagcgaaaaagaggtggacctggtggtttaaataaagtttgcgcaatttcacctgaacttcagaccattgttggtgagactgccatgtcaagaactcagaaggtcaacttcatgaagtaaaaagaatgaaggctcccaccatgtctcctcaacctggacgttccattgatcaaccctccatagttatttctgacgcactagcaaagttcattggaacagatggaacatttcctcacgattttgccctgaaatatctgtgggattacataaaagcaaaccaacttgaggatgtcatcaacgaatcaatattatgcgattcaaaacttcaagagctctttggctgtgagagcattcctatgtcaggactatcagaaatgcttggtcaccacttcatcaagaaaacatagcaaatcctcattaactgatctaggattgcagtgtggcagataggcctaacattacaacatggtgttctttacagaatggacagcatagtttatgtatttcttcaattttgttgattatgaattgtgtccggcacatatcagattatttgcggtaagcctgtacattgttatgcgtgctggctactgctgtgttgtctggtgtaagtgtgtaaccttctctactgaattcgtagtgctaattcctaaatgtcattgctgactatgtaaagttaagctttctattcgagtgtcagattgttactcttaagtcttaaaagtcataagtttttctttgactaatattttaatgttgaggaaatccgactaaagtagttcacttccgaccagtctaagtggagtacaaatgtacaatggctgtggtggactgctggtggtctcttcttccagaagaaatttccattgtatttgtcgttgtcctcttcgcttttatggaaggtggtggtgcgcctatgggacttgattaactttattacctgaggggtagctgaaatgccaaagtaaaaaagaatgtcggttggttagatggtctaactagcactttcttagatctgggttcgattttctgtgtgagcgaattctaggctgagattactgtgttgcacatgttctacaatgttgatgagtatgggtggaatatagattcagtttttttaacctgcatcgtagaaagtatttttttcaatat

SEQ ID NO: 15338 - DNA, 1821 bp, Zea Mays
aacaaaacatagggcaagagcctagactgaggggccaggagagagggagaggccgaggagagagatagagagacaaaggggagagaccaagcgccagtgacacagagaaggggcggaggagagagagagagagagagagagagagagagagagagagagagagagagagagaggagaatcgcgggagggaggcggggtttttgcgtgatttgagttctccggttttccccacgctcccgccatggtgtccgaccaggagatcgccagctgcgtcgagtccgtcctccgaggctccgccggcgggcccggggaggtctcgctcaccgccgtgctgcagcaggcggaggccacgctcggcgtcgacctctcccacaaggcgggctttatccgcgaccagatggacctcttcttcggcccgcgcctccagccgcagccgctgaccacgccacagctggcgcctcccccgcctcaggccgtcgttgcccccgcggacgccgtgcctcagcctcagcctcagcatcagctccccgccatctctcccgtccctgtggtctccgcgccgccggccatggcgttctacccgccgccgccgctcgccttccgctacaccaccggcctcgctggggccgccacgggtgggaccgtctccttccagcagccagcccctggggctgggggcactgcttcccccaccgctgcaccgcaggtcgccggcgacaacaaggaaagttcttctaagcgaaaaagaggtggacctggtggtttaaataaagtttgcgcaatttcacctgaacttcagaccattgttggtgagactgccatgtcaagaactcagattgtgaagcagctctgggcatatatcaggcagaacaatcttcaagatcctgatgacaaaaggaagattatttgcaatgacgaacttcgtgtggtttttgaaactgacaacaccgacatgtttaaaatgaataaattattggctaagcacataaccccacttgacccaaaaggtcaacttcatgaagtaaaaagaatgaaggctcccaccatgtctcctcaacctggacgttccattgatcaaccctccatagttatttctgacgcactagcaaagttcattggaacagatggaacatttcctcacgattttgccctgaaatatctgtgggattacataaaagcaaaccaacttgaggatgtcatcaacgaatcaatattatgcgattcaaaacttcaagagctctttggctgtgagagcattcctatgtcaggactatcagaaatgcttggtcaccacttcatcaagaaaacatagcaaatcctcattaactgatctaggattgcagtgtggcagataggcctaacattacaacatggtgttctttacagaatggacagcatagtttatgtatttcttcaattttgttgattatgaattgtgtccggcacatatcagattatttgcgtctaagtggagtacaaatgtacaatggctgtggtggactgctggtggtctcttcttccagaagaaatttccattgtatttgtcgttgtcctcttcgcttttatggaaggtggtggtgcgcctatgggacttgattaactttattacctgaggggtagctgaaatgccaaagtaaaaaagaatgtcggttggttagatggtctaactagcactttcttagatctgggttcgattttctgtgtgagcgaattctaggctgagattactgtgttgcacatgttctacaatgttgatgagtatgggtggaatatagattcagtttttttaacctgcatcgtagaaagtatttttttcaatat

SEQ ID NO: 15339 - DNA, 1993 bp, Zea Mays
caacaatctcgcagtcctttcttcctccgacctccgcagcgaatcggaccaggggatagggttccgccgcgcctctccaaccaggcgccactcgccagggtctaggctgatcatggaaggaaacgtcgcagccgggaagaggtcccggacggagacggcgaacggggctgccggcggcgggaagcgctccaaagacatggagtcatttcaaactggtctatcaagcaaatcgaagccttgcaacaagtttttcagtacgattgggtgcccgtttggtgagggatgtcgttttctgcactttgtccctggcggttacccggcagttgcaaaaatgctcaatctaggtagccctgctgtatctgcgccatcaagaactcatgtggatcacgccgctcttactggcacctctcattcagcttcgtcaggcaagacacgcatgtgcaccaagtacaatactacagaaggctgcagatttggtgataagtgccactttgctcatagcgaaagagaacttgggaaaccagcgtacatgccttatggagaacctcctatgggcggtcgatttggaggccgacctgaacctgtgcagccagctgccatgggccctccagcaggaaactttggtgcctcggcgactgccaagatcagtgtggatgcgtctcttgccggtggcataattggtaagggcggggtcaacactaagcagataagcagagtcacaggcgtcaagctctgtatccgcgaccacgagtctagccccaacctgaagaacattgagctggaaggcaattttgaccagatcaagcaagccggcgaaatggtgagggacctcatcgcgaccatcagcacgagcatgccggcgaaaaactcatctgctgccgtggctccagcaggaggccgaggcggtggtctgggtagcaagagcaactacaagacgaagctatgcgagaacttcgcgaagggtgcctgtactttcggcgagcggtgccactttgcccatggcgagaacgagcagcggagtggtgctgtttgagagttgagtttaaagatgctgggggtttcgaggccttagtcagcgggaagaccactgagatgcagaggatcgatgtcaatgagcgaattgttggacttgagcgcttgaatccgacaccacgccccacaacatcgccgtttctggagggtcgatggaattttgaatggtttggtgatagcagtcctggagcatttgcggcccgccttttgtttgagaggtcgcctacatcggttgcacactttatgggacttgatgtgttgatcaaggatggatactccaagctctcatctaacctcaagtttctaaacacgatacaaagcaaattcctactgactactcaattgtccgttgagggccccatcaggatgaaagaggaatacgttgagggccttatagcgattcccagaatcaatgaagaatcattgcctgaacagttgaagggcttgcttggccaaactgcaggagctctacaacaacttcctagccctataagggaagctgtttcggaggggcttaaattgccactcggtggggcatttcaacgattattcatgatctcttacttggatgaagaaatattgattgtcagggacgctgctggagcaccagatgtcttaaccagactagaggggccacaaccgagtccaggtgatggcacagcagatgcagtgatatcagaatatgaaagctaatggctgattactaactgtaactccacacctagttcctgtttacggctcctttctcctttggtcgtttttctcaggcctgcgcatgtataaaggctgtagtgttgtcaacgataacgaccacttgagtgatttttacttgcatccctttcggcggctattctgattttttctgaatgcgagcaataatatcagatgaccatcatcattctttatatgaatcaatgtaaaaaaaaggctctgcttgttcaaagctaactgatacttccac

SEQ ID NO: 15340 - DNA, 1876 bp, Zea Mays
caatctcgcagtcctttcttcctccgacctccgcagcgaatcggaccaggggatagggttccgccgcgcctctccaaccaggcgccactcgccagggtctaggctgatcatggaaggaaacgtcgcagccgggaagaggtcccggacggagacggcgaacggggctgccggcggcgggaagcgctccaaagtacgattgggtgcccgtttggtgagggatgtcgttttctgcactttgtccctggcggttacccggcagttgcaaaaatgctcaatctaggtagccctgctgtatctgcgccatcaagaactcatgtggatcacgccgctcttactggcacctctcattcagcttcgtcaggcaagacacgcatgtgcaccaagtacaatactacagaaggctgcagatttggtgataagtgccactttgctcatagcgaaagagaacttgggaaaccagcgtacatgccttatggagaacctcctatgggcggtcgatttggaggccgacctgaacctgtgcagccagctgccatgggccctccagcaggaaactttggtgcctcggcgactgccaagatcagtgtggatgcgtctcttgccggtggcataattggtaagggcggggtcaacactaagcagataagcagagtcacaggcgtcaagctctgtatccgcgaccacgagtctagccccaacctgaagaacattgagctggaaggcaattttgaccagatcaagcaagccggcgaaatggtgagggacctcatcgcgaccatcagcacgagcatgccggcgaaaaactcatctgctgccgtggctccagcaggaggccgaggcggtggtctgggtagcaagagcaactacaagacgaagctatgcgagaacttcgcgaagggtgcctgtactttcggcgagcggtgccactttgcccatggcgagaacgagcagcggagtggtgctgtttgagagttgagtttaaagatgctgggggtttcgaggccttagtcagcgggaagaccactgagatgcagaggatcgatgtcaatgagcgaattgttggacttgagcgcttgaatccgacaccacgccccacaacatcgccgtttctggagggtcgatggaattttgaatggtttggtgatagcagtcctggagcatttgcggcccgccttttgtttgagaggtcgcctacatcggttgcacactttatgggacttgatgtgttgatcaaggatggatactccaagctctcatctaacctcaagtttctaaacacgatacaaagcaaattcctactgactactcaattgtccgttgagggccccatcaggatgaaagaggaatacgttgagggccttatagcgattcccagaatcaatgaagaatcattgcctgaacagttgaagggcttgcttggccaaactgcaggagctctacaacaacttcctagccctataagggaagctgtttcggaggggcttaaattgccactcgattgtcagggacgctgctggagcaccagatgtcttaaccagactagaggggccacaaccgagtccaggtgatggcacagcagatgcagtgatatcagaatatgaaagctaatggctgattactaactgtaactccacacctagttcctgtttacggctcctttctcctttggtcgtttttctcaggcctgcgcatgtataaaggctgtagtgttgtcaacgataacgaccacttgagtgatttttacttgcatccctttcggcggctattctgattttttctgaatgcgagcaataatatcagatgaccatcatcattctttatatgaatcaatgtaaaaaaaaggctctgcttgttcaaagctaactgatacttccac

SEQ ID NO: 15341 - DNA, 1942 bp, Zea Mays
caatctcgcagtcctttcttcctccgacctccgcagcgaatcggaccaggggatagggttccgccgcgcctctccaaccaggcgccactcgccagggtctaggctgatcatggaaggaaacgtcgcagccgggaagaggtcccggacggagacggcgaacggggctgccggcggcgggaagcgctccaaagtacgattgggtgcccgtttggtgagggatgtcgttttctgcactttgtccctggcggttacccggcagttgcaaaaatgctcaatctaggtagccctgctgtatctgcgccatcaagaactcatgtggatcacgccgctcttactggcacctctcattcagcttcgtcaggcaagacacgcatgtgcaccaagtacaatactacagaaggctgcagatttggtgataagtgccactttgctcatagcgaaagagaacttgggaaaccagcgtacatgccttatggagaacctcctatgggcggtcgatttggaggccgacctgaacctgtgcagccagctgccatgggccctccagcaggaaactttggtgcctcggcgactgccaagatcagtgtggatgcgtctcttgccggtggcataattggtaagggcggggtcaacactaagcagataagcagagtcacaggcgtcaagctctgtatccgcgaccacgagtctagccccaacctgaagaacattgagctggaaggcaattttgaccagatcaagcaagccggcgaaatggtgagggacctcatcgcgaccatcagcacgagcatgccggcgaaaaactcatctgctgccgtggctccagcaggaggccgaggcggtggtctgggtagcaagagcaactacaagacgaagctatgcgagaacttcgcgaagggtgcctgtactttcggcgagcggtgccactttgcccatggcgagaacgagcagcggagtggtgctgtttgagagttgaggtgccaactctagtttaaagatgctgggggtttcgaggccttagtcagcgggaagaccactgagatgcagaggatcgatgtcaatgagcgaattgttggacttgagcgcttgaatccgacaccacgccccacaacatcgccgtttctggagggtcgatggaattttgaatggtttggtgatagcagtcctggagcatttgcggcccgccttttgtttgagaggtcgcctacatcggttgcacactttatgggacttgatgtgttgatcaaggatggatactccaagctctcatctaacctcaagtttctaaacacgatacaaagcaaattcctactgactactcaattgtccgttgagggccccatcaggatgaaagaggaatacgttgagggccttatagcgattcccagaatcaatgaagaatcattgcctgaacagttgaagggcttgcttggccaaactgcaggagctctacaacaacttcctagccctataagggaagctgtttcggaggggcttaaattgccactcggtggggcatttcaacgattattcatgatctcttacttggatgaagaaatattgattgtcagggacgctgctggagcaccagatgtcttaaccagactagaggggccacaaccgagtccaggtgatggcacagcagatgcagtgatatcagaatatgaaagctaatggctgattactaactgtaactccacacctagttcctgtttacggctcctttctcctttggtcgtttttctcaggcctgcgcatgtataaaggctgtagtgttgtcaacgataacgaccacttgagtgatttttacttgcatccctttcggcggctattctgattttttctgaatgcgagcaataatatcagatgaccatcatcattctttatatgaatcaatgtaaaaaaaaggctctgcttgttcaaagctaactgatacttccac

SEQ ID NO: 15342 - DNA, 1929 bp, Zea Mays
caatctcgcagtcctttcttcctccgacctccgcagcgaatcggaccaggggatagggttccgccgcgcctctccaaccaggcgccactcgccagggtctaggctgatcatggaaggaaacgtcgcagccgggaagaggtcccggacggagacggcgaacggggctgccggcggcgggaagcgctccaaagtacgattgggtgcccgtttggtgagggatgtcgttttctgcactttgtccctggcggttacccggcagttgcaaaaatgctcaatctaggtagccctgctgtatctgcgccatcaagaactcatgtggatcacgccgctcttactggcacctctcattcagcttcgtcaggcaagacacgcatgtgcaccaagtacaatactacagaaggctgcagatttggtgataagtgccactttgctcatagcgaaagagaacttgggaaaccagcgtacatgccttatggagaacctcctatgggcggtcgatttggaggccgacctgaacctgtgcagccagctgccatgggccctccagcaggaaactttggtgcctcggcgactgccaagatcagtgtggatgcgtctcttgccggtggcataattggtaagggcggggtcaacactaagcagataagcagagtcacaggcgtcaagctctgtatccgcgaccacgagtctagccccaacctgaagaacattgagctggaaggcaattttgaccagatcaagcaagccggcgaaatggtgagggacctcatcgcgaccatcagcacgagcatgccggcgaaaaactcatctgctgccgtggctccagcaggaggccgaggcggtggtctgggtagcaagagcaactacaagacgaagctatgcgagaacttcgcgaagggtgcctgtactttcggcgagcggtgccactttgcccatggcgagaacgagcagcggagtggtgctgtttgagagttgagtttaaagatgctgggggtttcgaggccttagtcagcgggaagaccactgagatgcagaggatcgatgtcaatgagcgaattgttggacttgagcgcttgaatccgacaccacgccccacaacatcgccgtttctggagggtcgatggaattttgaatggtttggtgatagcagtcctggagcatttgcggcccgccttttgtttgagaggtcgcctacatcggttgcacactttatgggacttgatgtgttgatcaaggatggatactccaagctctcatctaacctcaagtttctaaacacgatacaaagcaaattcctactgactactcaattgtccgttgagggccccatcaggatgaaagaggaatacgttgagggccttatagcgattcccagaatcaatgaagaatcattgcctgaacagttgaagggcttgcttggccaaactgcaggagctctacaacaacttcctagccctataagggaagctgtttcggaggggcttaaattgccactcggtggggcatttcaacgattattcatgatctcttacttggatgaagaaatattgattgtcagggacgctgctggagcaccagatgtcttaaccagactagaggggccacaaccgagtccaggtgatggcacagcagatgcagtgatatcagaatatgaaagctaatggctgattactaactgtaactccacacctagttcctgtttacggctcctttctcctttggtcgtttttctcaggcctgcgcatgtataaaggctgtagtgttgtcaacgataacgaccacttgagtgatttttacttgcatccctttcggcggctattctgattttttctgaatgcgagcaataatatcagatgaccatcatcattctttatatgaatcaatgtaaaaaaaaggctctgcttgttcaaagctaactgatacttccac

SEQ ID NO: 15343 - DNA, 3060 bp, Zea Mays
caatctcgcagtcctttcttcctccgacctccgcagcgaatcggaccaggggatagggttccgccgcgcctctccaaccaggcgccactcgccagggtctaggctgatcatggaaggaaacgtcgcagccgggaagaggtcccggacggagacggcgaacggggctgccggcggcgggaagcgctccaaagacatggagtcatttcaaactggtctatcaagcaaatcgaagccttgcaacaagtttttcagtacgattgggtgcccgtttggtgagggatgtcgttttctgcactttgtccctggcggttacccggcagttgcaaaaatgctcaatctaggtagccctgctgtatctgcgccatcaagaactcatgtggatcacgccgctcttactggcacctctcattcagcttcgtcaggcaagacacgcatgtgcaccaagtacaatactacagaaggctgcagatttggtgataagtgccactttgctcatagcgaaagagaacttgggaaaccagcgtacatgccttatggagaacctcctatgggcggtcgatttggaggccgacctgaacctgtgcagccagctgccatgggccctccagcaggaaactttggtgcctcggcgactgccaagatcagtgtggatgcgtctcttgccggtggcataattggtaagggcggggtcaacactaagcagataagcagagtcacaggcgtcaagctctgtatccgcgaccacgagtctagccccaacctgaagaacattgagctggaaggcaattttgaccagatcaagcaagccggcgaaatggtgagggacctcatcgcgaccatcagcacgagcatgccggcgaaaaactcatctgctgccgtggctccagcaggaggccgaggcggtggtctgggtagcaagagcaactacaagacgaagctatgcgagaacttcgcgaagggtgcctgtactttcggcgagcggtgccactttgcccatggcgagaacgagcagcggagtggtgctgtttgagagttgaggtgccaactctaggcatgacatgtcctgtgctctccatttgcttctctgaattccctccttgtagcgttagacggttagactgtcgtattgcgatttcaatggattcaactgagttcagctttaagaaaacgttaatctgttgttcccctgaatgttgtgacttgtcagtaagttagcagctgctagccaatcttgtttggacggtcatacattcatcttaaatctttatgcattcatcttaatttatgtaccttggagtgatttgatatttaacctaaactaaattctatacgtactaaattattttaatacgtatatatagagagaggtgtagtgagagaagtcctgagaggtgggcggacaatagaagtagatggaggcaaaatatcagtcaaattttctctgctaccaccaccacggcaccgcaccaccggcggctgtagactgtagcacgagagagaaatctgtagcccagcagctcgtcaggcatggcagcctccgtggcgctgactccggcctatccagcgttcctccctgtccccttccgcgtccgccgcgacggccgggtgcgcctctcgccccgccgcccccgctactccgcggggcgctgcagagccatggcccagaccttccaggggggcgccgctgccagctacgcccgcgagatggagcgcctctccgccaaggagtccctgctcctcgcctttaaagatgctgggggtttcgaggccttagtcagcgggaagaccactgagatgcagaggatcgatgtcaatgagcgaattgttggacttgagcgcttgaatccgacaccacgccccacaacatcgccgtttctggagggtcgatggaattttgaatggtttggtgatagcagtcctggagcatttgcggcccgccttttgtttgagaggtcgcctacatcggttgcacactttatgggacttgatgtgttgatcaaggatggatactccaagctctcatctaacctcaagtttctaaacacggtaatgtcagaagattttagcagggtacctactattttgcatagtttaggggatccatctttgattctcaacattatgcttttatatgacatttatgtgtcgtgctagccagtatggcttataagatgcaggattcaccttctgtaatcaagctattcttctgtgtctatatctgctagtataatagatcgtgcgcaaaagctccatacactgagaatacttcataattataatgaagtcatttattagcacactgttagtgacctatatcatctgcaagctgattatttctgtatgattggggattgttttattgttgtactctcattctcacaatttagcaagtttattttttctgtttccagatacaaagcaaattcctactgactactcaattgtccgttgagggccccatcaggatgaaagaggaatacgttgagggccttatagcgattcccagaatcaatgaagaatcattgcctgaacagttgaagggcttgcttggccaaactgcaggagctctacaacaacttcctagccctataagggaagctgtttcggaggggcttaaattgccactcggtggggcatttcaacgattattcatgatctcttacttggatgaagaaatattgattgtcagggacgctgctggagcaccagatgtcttaaccagactagaggggccacaaccgagtccaggtgatggcacagcagatgcagtgatatcagaatatgaaagctaatggctgattactaactgtaactccacacctagttcctgtttacggctcctttctcctttggtcgtttttctcaggcctgcgcatgtataaaggctgtagtgttgtcaacgataacgaccacttgagtgatttttacttgcatccctttcggcggctattctgattttttctgaatgcgagcaataatatcagatgaccatcatcattctttatatgaatcaatgtaaaaaaaaggctctgcttgttcaaagctaactgatacttccac

SEQ ID NO: 15344 - DNA, 1327 bp, Zea Mays
cacaaccttttccctttctatcaatgtgtgctacattcctctttgtacaaacgggcatcgctgccatagtatataatacgtagctactgtatgtacaggtcagatgatatcggaacattctgttagagagcgatcgcagaactcgtggcagttgcaaatgctcatcagcatcaatcacctcttctccagttgtcagccagtcaggcgattgtctgctctctcttttgagatcctctcttcctttacctcctctagctcgtcctcatcactccgcttgcctgcttgctccttccagtaggcgatcaacttcttcaatctcatgatttcttttggagcaacatgcttgctcgtatcattaacaatgcatcgaacgcgtgaagcatacatcagcgagttgtaagtctcctccaagttagactctgctggtgaaacattcacaaacatcaaggtcttcgcattccctcccagagaatcactcataagcattgttaacttatggttccggtaaggtatatgttgtccatcagaagataaagcaccaataacatcagccaaagcagaaagagatttgtttatactttgtgcttctttcagttgctttcctgcggaaccagattttttcaccctctcagaaccagcaaggtccacaaaacttagctgttcaaacagaggaacactgtcaattcttccccgtaagtgtaatgtgaaacaaactctacaaaagcccaaggactgtttaggatgcaatagtttcacaggaaaccgtgtagttcgcagaaatatgagaaatcgcagctttccaaaggaggccataagcaacatactagtcttcctcttcctttttttttgtttggtacaagatattctcggcagcttgtctatttaaaataatcgtatcaactaagaggaacaagagaaagaactccacgctagcatactgtgtgcctttatacttcatattaaatcacacacaaaatttaaacatgcactgagactgcatattgcatagtatcaacaaaaaataataaaccaaagatcattatagatatgtagcactgtagggaactcccctacagttttcatggtaaaataaccaagatcatatgcataactagactgccgaggccaagataatacaaaaaacacatttttaaaaaaatcttattgaacaattgaaatatgactagttttaagtgtgttttccaggtaatgtttgccaacaacctccatcaaatcacagatgtattgtctacagcatgcaaaacttcaaccatgtccatgaagtgcccaggccacagatatagggagacagaacgttcaatatttt

SEQ ID NO: 15345 - DNA, 2507 bp, Zea Mays
gccataccatcacccacccgacatggtcgcaggtgagcctgcacttaatctgagactacaaaattgggctcaatcacgggtcgtgtcgtcccgacggacggaggaggaccgccgctagagctcgcgttgtcgcgccagctgctcccgtcgctcgtatatattactgcgaagtaaccctaactgccaccagcctcagcctcccctctcggctcccccacacggcactctagcccccagcctgccactcaaacagtacaccaccgccacaagctcgggccgaatatgtctacagggcagcagggctaccgctgccgccgcacttcaccggcaaagaacgccctccagatctaccctgcgatggagtccacggtgaacccgaaggcgtacccactggctgatgcgcagctaacgatgggtatcctcgatatcatccagcactccaccaactacaagcagctcaagaagggagcgaacgaagcgacgaataccctgaatagggggatatcagagtttgttgtgatggcggcggatacagagcctcttgagatcctactccacctccccttgttagctgaggataaggtactgatttttttctcgctttcctcttttgttttgtaatatggtgctgtgtgattatagcttggacgccatctaattgtcatgttggttgtttttctctctttcctcttttgtaattttatcccaaatgctatattaaaagattatgccaaatgcttaatagggttgttttcagttatttctcttaatattgcgttaggataaatttgtttggttggtgttgatacggcttctagcaaatatttttgttcaacttttggttgccaaatctttgtcttgctaatttttttaagctaaccaaacacagacactctatatacctgattatcatacttagagagcaaaatttaatctagattttttcatccacctcgttctacatatgaatcttttcatagttgtaataggcaagttattttgcaagttgattcttttactgacttaagtgcattaaaccaggaagcacatattaaattttgaagcactgaaattgtgccactgaaattttgaagcactttgttattaactaaggttgccacaaatcattaagtcaacacattaacccttgcaacagtgctacacgacaacatgtttttatattcagcaaactttggatgtggtagtactccacgtgtgtaaaatatccttttgctctttatttgcatggaatcacttgacaacaaaaatggtcattgaacaaatttattcattagtaaattagcctatgctgccatacatgaatgtcactgaacccattcatcattgagaatcacattcaaacccgcagtcgcaattcagcctttaatcaataataggcacttgtttgaggagaaacgtgctaaacaggaaactagcattatatattacacatataacaacaggtaggtgagtgcaacacacttacatagcccttgtagtgaagcaggacagagaggcaaagcacatttgtgcatgtcccagaaaattattcaccccctctatgccaaggtagtgcaggtgttatcttcggagacatggtgttgctgtgtcaactgcagggcacactacaactagcggccgagtagcaggagatcgctgctactcagagggccccaaactgcagtctaaaagttataagcaactgcagtcttgatatgataggctcaaatttggctaggttctgttttcgtgatagagaacattgctgctgcattcactctggcaaattttgttgaagttgttcataatgtccttattctcttttctccccttctctgagaccaacatgaaagaaagaaaattagtgcaaacttgattcactcagccgataccaccgcctggattggcagatccatgttttgtaaatttcttgattcaatgtttgggagtgggaacaacatgtatgcatcctcattcattaacctctaaaatgtgaactgtgatgccgagttttattattatatatttgttataaatatattttgtcatttgttttccgagacaaatctacatgccaatttcatcggttcgatctaattaattaaatttaagaagttgaaatggcagtaaggaattggagctctctccgcgcagtaaggaagcacgtgttgcggtttgagagctccaatctcctaatcatggttgagtttgtgtggagagagctccggtttgtgcctgaaggctccggtttcatgattttcattgacagtaaggaaccgatggcagtgcggagagagctctcaaatcatgattttcattagcagtaaggaaccgatggcagtgcggagtaagctgatttagaagtgcggagagagatatctcctaactaatgaaaaagttagctccaccgatggcagtaaggatataattttttcattggttgagtttgtgcctgaaggctgacagtggatctatttggcatatttgtgctgccatggtgctttcat

SEQ ID NO: 15346 - DNA, 1187 bp, Zea Mays
gttgcctacgcgcgagcgacgccggctccggctcggcaccgagcaaagaaaggcaaggaaaccatcagtctgccagtgtgccagccagaccccagtgcggggccctgactgccgagtgccgcccgcgcgcctataaaatccgaagcacacgcccatcggattcaccgccgacgcaggcagaggagcacacacacacacacacggccactccgcccccgctgctctcgcgttgccggccccgacagagacgaggcacggtcggctgctctcggttccccgcgcgcgcgctagctagaaggacgacctgcgctggtctcgccatggccgccaaggtggtgctgaagctggacctgcacgacaacagggacaagcagaaggtgctcaaggcagtctccactctccacggcatcgactccatcgcggtggacatgaaggagtccaagctgacggtggtcgggctggcggaccccgtcgacgtcgtgggcaggctgcgcaaggtcggctccgccgccatcgtctccgtcggcccggccacggaggagaaaaagaaagacggcgacaagaaggaggggggcggcgacaagaaggacgctgacaagaagggcgacgacaagaagcccccgccgcccccggtgtacccgtacccgtacccgtggcacgcgtacgccgccgccgccgccgccgcgcagtaccagtaccacccccggccgtacccgccccagtacgtcgtccacagcgccgaggaggaccccaactcctgcgtcatctgctgatctgatgccggcgtggcgcagcacagtcacagtcttcttttttgcacattcctatatttgttgttgttggcctgctctgcttgcctacctgctcgatcgaccgccacgtcgtcggtgatcgccgggaccggggcgggtgtggtggttggctgctccgctcgtctctatgctggcggtggggttggtcgttggcccgtgtccgcaggtcgttgcaattgcaatcatgcaggcgatccatccaaaagtacttgttgccttgtcggggttctcaggctgctgaccagcgtggtcgcgtagtgtgcatgcggttttttgtccttggctatttgcctattcggggtgtttgaggcatgaaactatatatatagagagagatttataaagattaattgaccttgtaatgtaaattataac

SEQ ID NO: 15347 - DNA, 946 bp, Zea Mays
gatccatttgaaccggaggctaccgctgcctcaagggcctcctcgctcgctcgccagtcgccacccgctcacggagacagagaggccgatggcgagctcgctggcccgcctgggagcggcgctgccacgcgcgcgcccacgcgctgcgacccgcaccctgccaccgccgcggtgggacgccgcggcgctcggcgcctcccgccgcgccgcaccgaacgataatgcgtgtgcaagtgcatacccaattggcataccaacggagaggtgcctagttcattccgacgttaaagtagcccctacatcggacttcaaggacagtagcaaatctgaaacttggaggatcaagatgctctacgacggtgattgccctctctgtatgcgtgaggtaaacatgctaagagaaagaaacaaatcctatggagcaataaagtttgttgacataagctcgaaagattactctccagatgacaatcagggccttgattatgaaactgcatttagaaaactgtacgaggaagtaggacttggatgggtttatgctgttactaagtatgagcctgtagctagcatggcaaatgcagtatatggtttgtgggcaaaataccgtatgcaaattacaggtcgacctccgctagaagagatcatggcatcccgaagagctgcaggcgaatgtaaagatgacaaagtatgcaagatgtgagcataaagatgttatactgtgctacatacctcgcctctagccatgctttatataggctaaggctcgtatatatggctttaacagtacaaataatcgcagttgtattagaaaaaaaaaggtgaatagcttatgtaatggtttatcaaagtacatatgattgtacatttgtatgtacactgtactggttcacgcatgtaaaaacgatccaccacagatcgagctgactcacattgtctgttctaccaa

SEQ ID NO: 15348 - DNA, 880 bp, Zea Mays
gatccatttgaaccggaggctaccgctgcctcaagggcctcctcgctcgctcgccagtcgccacccgctcacggagacagagaggccgatggcgagctcgctggcccgcctgggagcggcgctgccacgcgcgcgcccacgcgctgcgacccgcaccctgccaccgccgcggtgggacgccgcggcgctcggcgcctcccgccgcgccgcaccgaacgataatgcgtgtgcaagtgcatacccaattggcataccaacggagaggtgcctagttcattccgacgttaaagtagcccctacatcggacttcaaggacagtagcaaatctgaaacttggaggatcaagatgctctacgacggtgattgccctctctgtatgcgtgaggtaaacatgctaagagaaagaaacaaatcctatggagcaataaagtttgttgacataagctcgaaagattactctccagatgacaatcagggccttgattatgaaactgtagctagcatggcaaatgcagtatatggtttgtgggcaaaataccgtatgcaaattacaggtcgacctccgctagaagagatcatggcatcccgaagagctgcaggcgaatgtaaagatgacaaagtatgcaagatgtgagcataaagatgttatactgtgctacatacctcgcctctagccatgctttatataggctaaggctcgtatatatggctttaacagtacaaataatcgcagttgtattagaaaaaaaaaggtgaatagcttatgtaatggtttatcaaagtacatatgattgtacatttgtatgtacactgtactggttcacgcatgtaaaaacgatccaccacagatcgagctgactcacattgtctgttctaccaa

SEQ ID NO: 15349 - DNA, 4684 bp, Zea Mays
atgggctcatggcagaagaccccgtcgccgtcgccaccacacaaatccaaggcccaaggcccatggccggccgctactccaaacagcaacgtcctagccgacgagagcctccctccgccacctacccacccaccaactcccgcccgtcgcctccgcttggcttttcgtcgagcagttggttggcacctaaccccccagggccgcgggccagtaaggcgggagagtgaggcagaggcactgagccaaagccgggagatgaagaagctgtgccaaggcggcaagaaggggcggcgggtgcacccggcgccggcggacgcggacgcggccgtggcgctgccggccgccgtgctggccctggcgtcggcgctgacggccgaggagcaggaggtgctggcctacctcctgtcctgcggcggcgcggcggtcgtgggcggccgcccgcgccgccgccgcgggccccacccgccggagatgggctgcgcctgcttcggctgctacaagagcttctgggcgcgctgggacgcgtcgcccaacagccacctcatccaccgcatcatcgacgccgtcgaggacggcggccccccgcgccgcacgcaccggcgccggcgcggcggtgggcgccgcggtggcgacggcggcgcggggatgggcatggacatggacatgggccaccgccgccacggcgagtacgagggcgccggcgacgacgaggaggaggaggaggttgggggcagcagcatggacagcgacgtggacggggacgacgcgtcggtggccagcgagggtgactgcagcttcggcgacgccgagaagagcacggtggggaggctggtgcgcttcatcggggagaagtctgatgatgagcgtgcgaggatcgaaggtagcgccgggcgtttggaccggctgctctctgccccattggaggccgccaagggggagggagctcgcggtcgcggcggtgccatcccatgcctgcacctgcagaagccaaagcgagcagatgcagctccattgaccagccgcccagggaaaaagcaagctggtgtggctgggcagctggctgcggtcgcgcttggaaagggcgggaggcgctggcggcgtggcagcagctcgaggacaacggagcagcgactcatgctaggcggctgcgacccgctgccgcgccgccgctgcctggccccggcctccaagctcttccgccgcccgctgcccgtcaacgagtcgctctggacgctgtccgacgacggcaacgtccggtggagccgctaccactgccgtggctacaggtgcctgtccgccaggaaccagcgccgcgactacgaccgctgcgtggggtgcttcgacatggaccgcgagaggcagcggtgggccaaccgcaccgcgtcgtcgtccctcgccgacttcctcgtcgacgacgtgctcgcggcgaagccaggcgaggtgcgcatcgggctggacatgagcgtgggcacgggcagctttgcggcgcgcatgcgggagcgcggcgtgaccatcgtgtcggcggccatgaacctgggcgcgccgttcgcggagacgatcgcgctgcgcgggctggtgcccctgtacgcgaccatgagccagcggctgccgctgttcgacaacaccatggacctggtgcacacggcgaggctcttcgaggggtacaagaagcaccgctgggtcgtctccttcaagtccaaggacgaggtctacctgcaatggagatttggattgaatctgatgatagagcagaagttgaacagctggaggacaacaaaagagcagagtttgagtgcaattccgggggcaaatcgcaatatcctggactgggatactcgtgatccaagcttgggggctttacatgcaaaaaaaattcagttccgcaatatcctggactgggatactcgtgaacagctggagtttgagccatgcatgccgcgccgacatggtgagcaagagcgacggccagtagaaaccgctctcgaacgcgacgctgcagcaggcacaggcgaggtcccgctcatccagatcacaccggctcatcgacgacagcaatgccttctcgggcgccaccgccgcgacgcagtcctcgcacatgtctccggcgtccatgagccagcggtgggtcccgaagaggctgccgatgccgaggcgggagcagagcgcgcatggcggcgcgaggctgaagaagccggcgaagcgagctatgaggattaggattttggttttaaggtttttttagctcgagcatccttataaaaaattatttcaatggctgtttctttagagctagtttggcaactctattttcaaatagatttccattttcccaagaaaaagttaactaatttcccttgaaaaataaaaatcccttggaaaaatttagttgccaaactagcccctatattatttctctatgtgtcgcactacattataaatatcaagtaattgtaatggtgcttctttcctttaaatatgcgtattaattcttgcagcatttaagtttacatgcacatttagtgtatctatttacgtagtgaactgccaaatatcatgtgtaaagctatttttacaagtttattaaccacatttcttgtcacgcgcagggcaatttttcccaatcactatatgctcatatactcttctcaaatattgatgtggtatgcgagtaacaaaacaaaattaaaggtacctacaagatattgaccatggatctctattgtttgtagcatgatatataattcgaatgtgtgttaatcatggccaggtcgcacaatgtgtcatgctatatagtaaatatcaaataattgcaattgagcttcttttctgtgaataaaattcagctcaacataaataggtttagtagtgtgtgtttagtgttaatattttcatggcatttgttattaacaactttggaactaagttgattatatctctactcatacttttattatttccctttttacatcgataatttgtacatgtgtgtgcttattcattttcagagatcctgatatgagtttttttctctcctcaacaggtgagttgtaggtactatctgtctattgtatgatagttacgcttataaattctatatgtgcaatatattaatattgttgcttcgatgttgattgctttacaacagtttactgttgctcaagccatttattttcttttcgaaatctgcgctttcatacatattattagttgttggccacttactgttagcaaaaaaaacttacctaaaatctaagagcttagttgattgtattattaaccatacatttattgtttctctttacatcaagaattttcacttatgtgtgcttattaatttgcacagttgttagcatggcttttttatttatcttgctccctacaggtgagttgtatgtactatctacctgaccaacaacatttacgcttacgaattatttctatgtgatctattagtatttcttgttcgctattgattgcttcacacatctttgttgttgctcaggtcatatttttcaattgtacgtttgcatacagactaatagctacgcacagtccatttgttgttatcagaacaacaaaaaacttatatgtgcaccgatatatttattatttgtctttgcatcgatgattcacatggatatacacttattgagtttacaattttccataagattgttttattcctttgcaggtaagttctaaagcatgtctctttaattgacactatatacgtttatgtattttccaaacaagtttaaagtcatataggttactttgtggttgattaatatattatgtgtggtaaagtatatattctatgcgaagaagtggaaacgacctcatcgttgattgcggtgttccggtactcgctgttctaaattttttgctacagtaaggtacccctccctccttgattgtaggtaattcacacatgagtttatgttttaggttgttttttcctggaatactctatgtcgactaaacaatttaggttctttcgagttacattacatcgatgtaatcttcacacaaagtctcaacaatatttggttgctcacttacaccccaccctagattaacatgttctgaattttctttgttcactgctgcaattgacacatgctaaatggcaatttctttataatgatccaattgagtttgtaattgcacatgtttttgccaagtttcatcaagtactgctccaacagaacaagcaatcatggaatattgagctaaggcactggagtctcaagaaaaggtctaggaatcctaagaatggatggataacgatgcttaaatatggatgacatcatttatgtcttgataaccatctacaggccggtgatagtgttttttgacgttcattcatggggctcacctttctaatgtgtaagaaagaaaactacgttgatcttaatctgagttgtgtgttgatggtcgatgtagtaaagaaggggcacttagacattgttgttcatggatttatgtactgccaacaaaccctatcttctgattcttataggtggtgcctggttctaatggcttgcatgtattttatgcattgactacatgataagaaccgtgcacgttgttgatgacccaattattacctctgaatcaaggtaatgtttacctttaacgtgttgtcttttgttccatagaatcattgtggatgactgtttgt

SEQ ID NO: 15350 - DNA, 3993 bp, Zea Mays
atgggctcatggcagaagaccccgtcgccgtcgccaccacacaaatccaaggcccaaggcccatggccggccgctactccaaacagcaacgtcctagccgacgagagcctccctccgccacctacccacccaccaactcccgcccgtcgcctccgcttggcttttcgtcgagcagttggttggcacctaaccccccagggccgcgggccagtaaggcgggagagtgaggcagaggcactgagccaaagccgggagatgaagaagctgtgccaaggcggcaagaaggggcggcgggtgcacccggcgccggcggacgcggacgcggccgtggcgctgccggccgccgtgctggccctggcgtcggcgctgacggccgaggagcaggaggtgctggcctacctcctgtcctgcggcggcgcggcggtcgtgggcggccgcccgcgccgccgccgcgggccccacccgccggagatgggctgcgcctgcttcggctgctacaagagcttctgggcgcgctgggacgcgtcgcccaacagccacctcatccaccgcatcatcgacgccgtcgaggacggcggccccccgcgccgcacgcaccggcgccggcgcggcggtgggcgccgcggtggcgacggcggcgcggggatgggcatggacatggacatgggccaccgccgccacggcgagtacgagggcgccggcgacgacgaggaggaggaggaggttgggggcagcagcatggacagcgacgtggacggggacgacgcgtcggtggccagcgagggtgactgcagcttcggcgacgccgagaagagcacggtggggaggctggtgcgcttcatcggggagaagtctgatgatgagcgtgcgaggatcgaaggtagcgccgggcgtttggaccggctgctctctgccccattggaggccgccaagggggagggagctcgcggtcgcggcggtgccatcccatgcctgcacctgcagaagccaaagcgagcagatgcagctccattgaccagccgcccagggaaaaagcaagctggtgtggctgggcagctggctgcggtcgcgcttggaaagggcgggaggcgctggcggcgtggcagcagctcgaggacaacggagcagcgactcatgctaggcggctgcgacccgctgccgcgccgccgctgcctggccccggcctccaagctcttccgccgcccgctgcccgtcaacgagtcgctctggacgctgtccgacgacggcaacgtccggtggagccgctaccactgccgtggctacaggtgcctgtccgccaggaaccagcgccgcgactacgaccgctgcgtggggtgcttcgacatggaccgcgagaggcagcggtgggccaaccgcaccgcgtcgtcgtccctcgccgacttcctcgtcgacgacgtgctcgcggcgaagccaggcgaggtgcgcatcgggctggacatgagcgtgggcacgggcagctttgcggcgcgcatgcgggagcgcggcgtgaccatcgtgtcggcggccatgaacctgggcgcgccgttcgcggagacgatcgcgctgcgcgggctggtgcccctgtacgcgaccatgagccagcggctgccgctgttcgacaacaccatggacctggtgcacacggcgaggctcttcgaggggtacaagaagcaccgctgggtcgtctccttcaagtccaaggacgaggtctacctgcaatggagatttggattgaatctgatgatagagcagaagttgaacagctggaggacaacaaaagagcagagtttgagtgcaattccgggggcaaatcgcaatatcctggactgggatactcgtgatccaagcttgggggctttacatgcaaaaaaaattcagttccgcaatatcctggactgggatactcgtgaacagctggagtttgagccatgcatgccgcgccgacatggtgagcaagagcgacggccagtagaaaccgctctcgaacgcgacgctgcagcaggcacaggcgaggtcccgctcatccagatcacaccggctcatcgacgacagcaatgccttctcgggcgccaccgccgcgacgcagtcctcgcacatgtctccggcgtccatgagccagcggtgggtcccgaagaggctgccgatgccgaggcgggagcagagcgcgcatggcggcgcgaggctgaagaagccggcgaagcgagctatgaggattaggattttggttttaagggcaatttttcccaatcactatatgctcatatactcttctcaaatattgatgtggtatgcgagtaacaaaacaaaattaaagagatcctgatatgagtttttttctctcctcaacaggtgagttgtaggtactatctgtctattgtatgatagttacgcttataaattctatatgtgcaatatattaatattgttgcttcgatgttgattgctttacaacagtttactgttgctcaagccatttattttcttttcgaaatctgcgctttcatacatattattagttgttggccacttactgttagcaaaaaaaacttacctaaaatctaagagcttagttgattgtattattaaccatacatttattgtttctctttacatcaagaattttcacttatgtgtgcttattaatttgcacagttgttagcatggcttttttatttatcttgctccctacaggtgagttgtatgtactatctacctgaccaacaacatttacgcttacgaattatttctatgtgatctattagtatttcttgttcgctattgattgcttcacacatctttgttgttgctcaggtcatatttttcaattgtacgtttgcatacagactaatagctacgcacagtccatttgttgttatcagaacaacaaaaaacttatatgtgcaccgatatatttattatttgtctttgcatcgatgattcacatggatatacacttattgagtttacaattttccataagattgttttattcctttgcaggtaagttctaaagcatgtctctttaattgacactatatacgtttatgtattttccaaacaagtttaaagtcatataggttactttgtggttgattaatatattatgtgtggtaaagtatatattctatgcgaagaagtggaaacgacctcatcgttgattgcggtgttccggtactcgctgttctaaattttttgctacagtaaggtacccctccctccttgattgtaggtaattcacacatgagtttatgttttaggttgttttttcctggaatactctatgtcgactaaacaatttaggttctttcgagttacattacatcgatgtaatcttcacacaaagtctcaacaatatttggttgctcacttacaccccaccctagattaacatgttctgaattttctttgttcactgctgcaattgacacatgctaaatggcaatttctttataatgatccaattgagtttgtaattgcacatgtttttgccaagtttcatcaagtactgctccaacagaacaagcaatcatggaatattgagctaaggcactggagtctcaagaaaaggtctaggaatcctaagaatggatggataacgatgcttaaatatggatgacatcatttatgtcttgataaccatctacaggccggtgatagtgttttttgacgttcattcatggggctcacctttctaatgtgtaagaaagaaaactacgttgatcttaatctgagttgtgtgttgatggtcgatgtagtaaagaaggggcacttagacattgttgttcatggatttatgtactgccaacaaaccctatcttctgattcttataggtggtgcctggttctaatggcttgcatgtattttatgcattgactacatgataagaaccgtgcacgttgttgatgacccaattattacctctgaatcaaggtaatgtttacctttaacgtgttgtcttttgttccatagaatcattgtggatgactgtttgt

SEQ ID NO: 15351 - DNA, 4367 bp, Zea Mays
atgggctcatggcagaagaccccgtcgccgtcgccaccacacaaatccaaggcccaaggcccatggccggccgctactccaaacagcaacgtcctagccgacgagagcctccctccgccacctacccacccaccaactcccgcccgtcgcctccgcttggcttttcgtcgagcagttggttggcacctaaccccccagggccgcgggccagtaaggcgggagagtgaggcagaggcactgagccaaagccgggagatgaagaagctgtgccaaggcggcaagaaggggcggcgggtgcacccggcgccggcggacgcggacgcggccgtggcgctgccggccgccgtgctggccctggcgtcggcgctgacggccgaggagcaggaggtgctggcctacctcctgtcctgcggcggcgcggcggtcgtgggcggccgcccgcgccgccgccgcgggccccacccgccggagatgggctgcgcctgcttcggctgctacaagagcttctgggcgcgctgggacgcgtcgcccaacagccacctcatccaccgcatcatcgacgccgtcgaggacggcggccccccgcgccgcacgcaccggcgccggcgcggcggtgggcgccgcggtggcgacggcggcgcggggatgggcatggacatggacatgggccaccgccgccacggcgagtacgagggcgccggcgacgacgaggaggaggaggaggttgggggcagcagcatggacagcgacgtggacggggacgacgcgtcggtggccagcgagggtgactgcagcttcggcgacgccgagaagagcacggtggggaggctggtgcgcttcatcggggagaagtctgatgatgagcgtgcgaggatcgaaggtagcgccgggcgtttggaccggctgctctctgccccattggaggccgccaagggggagggagctcgcggtcgcggcggtgccatcccatgcctgcacctgcagaagccaaagcgagcagatgcagctccattgaccagccgcccagggaaaaagcaagctggtgtggctgggcagctggctgcggtcgcgcttggaaagggcgggaggcgctggcggcgtggcagcagctcgaggacaacggagcagcgactcatgctaggcggctgcgacccgctgccgcgccgccgctgcctggccccggcctccaagctcttccgccgcccgctgcccgtcaacgagtcgctctggacgctgtccgacgacggcaacgtccggtggagccgctaccactgccgtggctacaggtgcctgtccgccaggaaccagcgccgcgactacgaccgctgcgtggggtgcttcgacatggaccgcgagaggcagcggtgggccaaccgcaccgcgtcgtcgtccctcgccgacttcctcgtcgacgacgtgctcgcggcgaagccaggcgaggtgcgcatcgggctggacatgagcgtgggcacgggcagctttgcggcgcgcatgcgggagcgcggcgtgaccatcgtgtcggcggccatgaacctgggcgcgccgttcgcggagacgatcgcgctgcgcgggctggtgcccctgtacgcgaccatgagccagcggctgccgctgttcgacaacaccatggacctggtgcacacggcgaggctcttcgaggggtacaagaagcaccgctgggtcgtctccttcaagtccaaggacgaggtctacctgcaatggagatttggattgaatctgatgatagagcagaagttgaacagctggaggacaacaaaagagcagagtttgagtgcaattccgggggcaaatcgcaatatcctggactgggatactcgtgatccaagcttgggggctttacatgcaaaaaaaattcagttccgcaatatcctggactgggatactcgtgaacagctggagtttgagccatgcatgccgcgccgacatggtgagcaagagcgacggccagtagaaaccgctctcgaacgcgacgctgcagcaggcacaggcgaggtcccgctcatccagatcacaccggctcatcgacgacagcaatgccttctcgggcgccaccgccgcgacgcagtcctcgcacatgtctccggcgtccatgagccagcggtgggtcccgaagaggctgccgatgccgaggcgggagcagagcgcgcatggcggcgcgaggctgaagaagccggcgaagcgagctatgaggattaggattttggttttaaggtttttttagctcgagcatccttataaaaaattatttcaatggctgtttctttagagctagtttggcaactctattttcaaatagatttccattttcccaagaaaaagttaactaatttcccttgaaaaataaaaatcccttggaaaaatttagttgccaaactagcccctatattatttctctatgtgtcgcactacattataaatatcaagtaattgtaatggtgcttctttcctttaaatatgcgtattaattcttgcagcatttaagtttacatgcacatttagtgtatctatttacgtagtgaactgccaaatatcatgtgtaaagctatttttacaagtttattaaccacatttcttgtcacgcgcagggcaatttttcccaatcactatatgctcatatactcttctcaaatattgatgtggtatgcgagtaacaaaacaaaattaaagagatcctgatatgagtttttttctctcctcaacaggtgagttgtaggtactatctgtctattgtatgatagttacgcttataaattctatatgtgcaatatattaatattgttgcttcgatgttgattgctttacaacagtttactgttgctcaagccatttattttcttttcgaaatctgcgctttcatacatattattagttgttggccacttactgttagcaaaaaaaacttacctaaaatctaagagcttagttgattgtattattaaccatacatttattgtttctctttacatcaagaattttcacttatgtgtgcttattaatttgcacagttgttagcatggcttttttatttatcttgctccctacaggtgagttgtatgtactatctacctgaccaacaacatttacgcttacgaattatttctatgtgatctattagtatttcttgttcgctattgattgcttcacacatctttgttgttgctcaggtcatatttttcaattgtacgtttgcatacagactaatagctacgcacagtccatttgttgttatcagaacaacaaaaaacttatatgtgcaccgatatatttattatttgtctttgcatcgatgattcacatggatatacacttattgagtttacaattttccataagattgttttattcctttgcaggtaagttctaaagcatgtctctttaattgacactatatacgtttatgtattttccaaacaagtttaaagtcatataggttactttgtggttgattaatatattatgtgtggtaaagtatatattctatgcgaagaagtggaaacgacctcatcgttgattgcggtgttccggtactcgctgttctaaattttttgctacagtaaggtacccctccctccttgattgtaggtaattcacacatgagtttatgttttaggttgttttttcctggaatactctatgtcgactaaacaatttaggttctttcgagttacattacatcgatgtaatcttcacacaaagtctcaacaatatttggttgctcacttacaccccaccctagattaacatgttctgaattttctttgttcactgctgcaattgacacatgctaaatggcaatttctttataatgatccaattgagtttgtaattgcacatgtttttgccaagtttcatcaagtactgctccaacagaacaagcaatcatggaatattgagctaaggcactggagtctcaagaaaaggtctaggaatcctaagaatggatggataacgatgcttaaatatggatgacatcatttatgtcttgataaccatctacaggccggtgatagtgttttttgacgttcattcatggggctcacctttctaatgtgtaagaaagaaaactacgttgatcttaatctgagttgtgtgttgatggtcgatgtagtaaagaaggggcacttagacattgttgttcatggatttatgtactgccaacaaaccctatcttctgattcttataggtggtgcctggttctaatggcttgcatgtattttatgcattgactacatgataagaaccgtgcacgttgttgatgacccaattattacctctgaatcaaggtaatgtttacctttaacgtgttgtcttttgttccatagaatcattgtggatgactgtttgt

SEQ ID NO: 15352 - DNA, 2206 bp, Zea Mays
ttattatataaattgaagatatttgatgtcatttttatgaattttcatgtaagccgtaagcacaaatgcatggtatatcctgggcttctggataccagcagtgagtaggaaaagaacaagatggcttgtgtgcagcacataggcatcagaattgctgatgatcgcatcagcagcgacgcatgaaacagagctcaaacgacgactccaaaaccgagctagtgtggccctgcggacagatctgagcctgggagcgtctcgtattcgtagtttacgccactgccgcgagtcaacagcactctctcggcgttcccttgctgccttgtttcttgcgatggcgtgctacaaagtacaagaacgttgctctcgccctccttgtcgtgtggaacgacggccaaacaatgcagctattggcgcgtccgccgccgcacccgcacgcatttatatgagccgccgtggcgcctggacgattgccgtgtcatgtcccagctccctaatcgttgtgttgacgacgcccgcaggtgacagccgatatcgggattcgacgtcactaagctcgtcggtgggccagccgtcgcggagtgtgcgccgctagctgttggtacatacgtcgtagccgcatggcgtgcaccgtctcctgctcgcgcgtcttcgtcgtcaggtgctcggcgtccccctcgggtggcggtggcggcggcaatgccgtgagggtgaacggcgcggcacaccgcgcgccgctgcaggtcggggcggcgctggagacgtccatcaacaggtcgctggcggagctgagtccgccgctgctgccgctgctgcccacggacgacgccggcgaggagcgcagccggcagaacatcccgacggagaagcagaccgtggacccgttccggcaggcgctgatcgtggagggcggcgtgcggtaccagcagactctggtggtgcggtcgtacgaggtcggccccgacaagacggccactctggagacggtgctcaacctcctccaggagaccgcgctgaaccacgtctggatgtcagggctgctcggcgacggcttcggcgccacgcacggcatgatcaggaacaacctcatctgggttgtctccaggatgcacgtccaagtcgaccagtacccgatctggggagaggtgctggacatcgatacctgggtgggctcgtcggggaagaacggcatgcggcgggactggctcatccgtggccgcaactccggcgacgtcttcgtccgcgcaacaagcacgtgggtgatgatgaacaaggtgacgaggaggctgtccaagatgccggaggaggtccgggccgagatcgcgccgtggttcatcgaccgccatgccatctaccaggaggaagccacggacaagatcatcaagctcgacagcaacgccatgtacgtcgactccgaccttaagcccaagcgaagtgatctggatatgaaccaccacgtcaacaatgtcaaatacgtgaggtggatgcttgagactcttcctgatcacttccagcagcagaaccagctcagcagcatcatcctggagtacaggaaagagtgtgggagctcagatgtcgtgcagtccatctgtcaacctgatgacgactcgattccaccgcaagaagatgtcagtatggccatcgggccttcgctctcgccggaactcatcagtggccaccacagcttggcaggtgcgctccagcacagcccgatgaagtacacgcaccttctgcagctgaaagcaggcgacaagtacgaggagattgtgcgagggagaactacgtggaagaaaaaatcatataaagccccctgacgtgtctctttgaaatgtgctttgctatactattaaaaaaagaaggaaaaggttggattccactactatttcgtagttaggccctgcccggtttcgtttataatccacctatggatgaaaataaacgagaatcccaccaaacgtctaaattattttcgtttcttcacagaatcaacagttcaactgttgaactaataaacgagaatcgaataatgaacacaaattccagcacgagtagctgagtgcgggctcccaagctagtccccatcaagtccagctccagcatcagctattcgttgccaaattgatatgtctcatataatgaagactaaatgcaaggatcaactaaccggccttctcttgagaggcatttagacgactcttgatccatgact

SEQ ID NO: 15353 - DNA, 2474 bp, Zea Mays
ttattatataaattgaagatatttgatgtcatttttatgaattttcatgtaagccgtaagcacaaatgcatggtatatcctgggcttctggataccagcagtgagtaggaaaagaacaagatggcttgtgtgcagcacataggcatcagaattgctgatgatcgcatcagcagcgacgcatgaaacagagctcaaacgacgactccaaaaccgagctagtgtggccctgcggacagatctgagcctgggagcgtctcgtattcgtagtttacgccactgccgcgagtcaacagcactctctcggcgttcccttgctgccttgtttcttgcgatggcgtgctacaaagtacaagaacgttgctctcgccctccttgtcgtgtggaacgacggccaaacaatgcagctattggcgcgtccgccgccgcacccgcacgcatttatatgagccgccgtggcgcctggacgattgccgtgtcatgtcccagctccctaatcgttgtgttgacgacgcccgcaggtgacagccgatatcgggattcgacgtcactaagctcgtcggtgggccagccgtcgcggagtgtgcgccgctagctgttggtacatacgtcgtagccgcatggcgtgcaccgtctcctgctcgcgcgtcttcgtcgtcaggtgctcggcgtccccctcgggtggcggtggcggcggcaatgccgtgagggtgaacggcgcggcacaccgcgcgccgctgcaggtcggggcggcgctggagacgtccatcaacaggtcgctggcggagctgagtccgccgctgctgccgctgctgcccacggacgacgccggcgaggagcgcagccggcagaacatcccgacggagaagcagaccgtggacccgttccggcaggcgctgatcgtggagggcggcgtgcggtaccagcagactctggtggtgcggtcgtacgaggtcggccccgacaagacggccactctggagacggtgctcaacctcctccaggagaccgcgctgaaccacgtctggatgtcagggctgctcggcgacggcttcggcgccacgcacggcatgatcaggaacaacctcatctgggttgtctccaggatgcacgtccaagtcgaccagtacccgatctggggagaggtgctggacatcgatacctgggtgggctcgtcggggaagaacggcatgcggcgggactggctcatccgtggccgcaactccggcgacgtcttcgtccgcgcaacaaggcaagctagcctggtgacgaggaggctgtccaagatgccggaggaggtccgggccgagatcgcgccgtggttcatcgaccgccatgccatctaccaggaggaagccacggacaagatcatcaagctcgacagcaacgccatgtacgtcgactccgaccttaaggttagctcaccttgcttacttcgctaggtatgtatggaaccaaacaaacttgtcttgctcttaacgaagtttttgtactagtttcctaggacaaagttggaccaacgaaaacgagtcttagattaatgcaagtgaagtgacacattgtttttttgctcatataactgtctcgcatgtaacgactataatttaacacagtaagattagctaagttgttttactcggaataaaattgaggtgatccataagttgatatgaatgtggcacttatttgtagcccaagcgaagtgatctggatatgaaccaccacgtcaacaatgtcaaatacgtgaggtggatgcttgagactcttcctgatcacttccagcagcagaaccagctcagcagcatcatcctggagtacaggaaagagtgtgggagctcagatgtcgtgcagtccatctgtcaacctgatgacgactcgattccaccgcaagaagatgtcagtatggccatcgggccttcgctctcgccggaactcatcagtggccaccacagcttggcaggtgcgctccagcacagcccgatgaagtacacgcaccttctgcagctgaaagcaggcgacaagtacgaggagattgtgcgagggagaactacgtggaagaaaaaatcatataaagccccctgacgtgtctctttgaaatgtgctttgctatactattaaaaaaagaaggaaaaggttggattccactactatttcgtagttaggccctgcccggtttcgtttataatccacctatggatgaaaataaacgagaatcccaccaaacgtctaaattattttcgtttcttcacagaatcaacagttcaactgttgaactaataaacgagaatcgaataatgaacacaaattccagcacgagtagctgagtgcgggctcccaagctagtccccatcaagtccagctccagcatcagctattcgttgccaaattgatatgtctcatataatgaagactaaatgcaaggatcaactaaccggccttctcttgagaggcatttagacgactcttgatccatgact

SEQ ID NO: 15354 - DNA, 1413 bp, Zea Mays
aggaaagaaacagaatacaaattccatctcaaactcggtgttgtcgttcccttggcggctattcctggtgctcacgtcgcggcgatcttggtcgacggccacgggctgtgacagaacggtgggcgaggaggatgttggggtagacggcagcgtggatggcagaacgtgggcgagggttggtggggatggagggatagatgtggaagttgactctgaacttttaataaagtagtatagatttggagttggatgagtgctgcggatagcctgatcctgatgcaacacgacgaaagcaggatcaccggagtggcacagatctcacgtcctgtgtcgtcgtctgtctcgcgcgtgttcaagaactgagcccagcgggattggaaaaaagattcctcgcccaaccctaccccagtccccaggcgatctcgcatggccaccggaccgcggtctctccacgccctcctcggcggcggtgcaggcctcttccacctcttcctaatcttgaggtctcagatgcgattgttgaaaaagctgcaaatcatgctcttgtatggatcaataggctgctggctgttggtcatgacatcgccatcaagagagataggaaagtttttataaaggtgatactgattttgtgggtggtttcattcattggaatgctcttcaattttcttacgcttatttacattggtgtaatgctttctctgttggttccaccactctatgagaagtaccaggaccaggttgatgagaaggttggtgtagcgtacagtgtactatcaaggcacatagataccatcattaccagggctgggcaatcagccaagcagaagaagactgagtaaaagaaacgttttgctgtattgtggaacatccctggttgtccaatgaagttgacagtgggcctttcatctttgaccctctattccactaaaatgaaccctcgatatgctgatatgaggttttgatgtgcattacgggaaatgaggtggcttgtgtatttcctttttggacatggggtttactatgggtgcatatcgcactcggaatgatatcgagaaattgcgactcgtacatgcaattatgcaggctgcttgctctgttagtcatatgatctttccgtcagtgattttaagttttaggctgctccgaggaactttgcaggctgctccgagcaattatgcaggctgcttgctcattcgatgcccatctactggtagctcgttttctgaaatactactactccctccgtttctttttagttgtcgctggatagttcaattttgtactatccagcgacaactaaaacgaaacggagagagtacctaataaggtgtattctacatagacagttgcatatcatgtgaatggataggtatttctggcggcagttctgtttttgctttacctgtattt

SEQ ID NO: 15355 - DNA, 1681 bp, Zea Mays
aggaaagaaacagaatacaaattccatctcaaactcggtgttgtcgttcccttggcggctattcctggtgctcacgtcgcggcgatcttggtcgacggccacgggctgtgacagaacggtgggcgaggaggatgttggggtagacggcagcgtggatggcagaacgtgggcgagggttggtggggatggagggatagatgtggaagttgactctgaacttttaataaagtagtatagatttggagttggatgagtgctgcggatagcctgatcctgatgcaacacgacgaaagcaggatcaccggagtggcacagatctcacgtcctgtgtcgtcgtctgtctcgcgcgtgttcaagaactgagcccagcgggattggaaaaaagattcctcgcccaaccctaccccagtccccaggcgatctcgcatggccaccggaccgcggtctctccacgccctcctcggcggcggtgcagttgccgacttgctgctgtggcgacggaggaacgcctcggcggcagctgtggtgggcgccaccacggtctggttcgttttcgagcgcgcggggtacagcttcccctccgtcctctccaacgccctgctcctcctcgtcgccatcctcttcttctgggccaagtctgcgtcgctgctcaacagtttgtgacggactgctacaattggataatatctgtcagtgtgggtgtagcccattcctttcttcgagtagctcactaccaaaatactgcctcttccacctcttcctaatcttgaggtctcagatgcgattgttgaaaaagctgcaaatcatgctcttgtatggatcaataggctgctggctgttggtcatgacatcgccatcaagagagataggaaagtttttataaaggtgatactgattttgtgggtggtttcattcattggaatgctcttcaattttcttacgcttatttacattggtgtaatgctttctctgttggttccaccactctatgagaagtaccaggaccaggttgatgagaaggttggtgtagcgtacagtgtactatcaaggcacatagataccatcattaccagggctgggcaatcagccaagcagaagaagactgagtaaaagaaacgttttgctgtattgtggaacatccctggttgtccaatgaagttgacagtgggcctttcatctttgaccctctattccactaaaatgaaccctcgatatgctgatatgaggttttgatgtgcattacgggaaatgaggtggcttgtgtatttcctttttggacatggggtttactatgggtgcatatcgcactcggaatgatatcgagaaattgcgactcgtacatgcaattatgcaggctgcttgctctgttagtcatatgatctttccgtcagtgattttaagttttaggctgctccgaggaactttgcaggctgctccgagcaattatgcaggctgcttgctcattcgatgcccatctactggtagctcgttttctgaaatactactactccctccgtttctttttagttgtcgctggatagttcaattttgtactatccagcgacaactaaaacgaaacggagagagtacctaataaggtgtattctacatagacagttgcatatcatgtgaatggataggtatttctggcggcagttctgtttttgctttacctgtattt

SEQ ID NO: 15356 - DNA, 964 bp, Zea Mays
cggactgctacaattggataatatctgcctcttccacctcttcctaatcttgaggtctcagatgcgattgttgaaaaagctgcaaatcatgctcttgtatggatcaataggctgctggctgttggtcatgacatcgccatcaagagagataggaaagtttttataaaggtgatactgattttgtgggtggtttcattcattggaatgctcttcaattttcttacgcttatttacattggtgtaatgctttctctgttggttccaccactctatgagaagtaccaggaccaggttgatgagaaggttggtgtagcgtacagtgtactatcaaggcacatagataccatcattaccagggctgggcaatcagccaagcagaagaagactgagtaaaagaaacgttttgctgtattgtggaacatccctggttgtccaatgaagttgacagtgggcctttcatctttgaccctctattccactaaaatgaaccctcgatatgctgatatgaggttttgatgtgcattacgggaaatgaggtggcttgtgtatttcctttttggacatggggtttactatgggtgcatatcgcactcggaatgatatcgagaaattgcgactcgtacatgcaattatgcaggctgcttgctctgttagtcatatgatctttccgtcagtgattttaagttttaggctgctccgaggaactttgcaggctgctccgagcaattatgcaggctgcttgctcattcgatgcccatctactggtagctcgttttctgaaatactactactccctccgtttctttttagttgtcgctggatagttcaattttgtactatccagcgacaactaaaacgaaacggagagagtacctaataaggtgtattctacatagacagttgcatatcatgtgaatggataggtatttctggcggcagttctgtttttgctttacctgtattt

SEQ ID NO: 15357 - DNA, 997 bp, Zea Mays
ctggacttagtccttaagaggagctgtcgtcattcgttagggcttcatttatcttctaagcctcttccacctcttcctaatcttgaggtctcagatgcgattgttgaaaaagctgcaaatcatgctcttgtatggatcaataggctgctggctgttggtcatgacatcgccatcaagagagataggaaagtttttataaaggtgatactgattttgtgggtggtttcattcattggaatgctcttcaattttcttacgcttatttacattggtgtaatgctttctctgttggttccaccactctatgagaagtaccaggaccaggttgatgagaaggttggtgtagcgtacagtgtactatcaaggcacatagataccatcattaccagggctgggcaatcagccaagcagaagaagactgagtaaaagaaacgttttgctgtattgtggaacatccctggttgtccaatgaagttgacagtgggcctttcatctttgaccctctattccactaaaatgaaccctcgatatgctgatatgaggttttgatgtgcattacgggaaatgaggtggcttgtgtatttcctttttggacatggggtttactatgggtgcatatcgcactcggaatgatatcgagaaattgcgactcgtacatgcaattatgcaggctgcttgctctgttagtcatatgatctttccgtcagtgattttaagttttaggctgctccgaggaactttgcaggctgctccgagcaattatgcaggctgcttgctcattcgatgcccatctactggtagctcgttttctgaaatactactactccctccgtttctttttagttgtcgctggatagttcaattttgtactatccagcgacaactaaaacgaaacggagagagtacctaataaggtgtattctacatagacagttgcatatcatgtgaatggataggtatttctggcggcagttctgtttttgctttacctgtattt

SEQ ID NO: 15358 - DNA, 2616 bp, Zea Mays
gtcgtcttcatcacccgcacgctttcttccacttctcttttccttacttcccaaacccaccctcccaagtcccaagcccaccgaaccctactcaccaacccacccgcaggagaacggaaaaaaaaaatcgtgtcgaggcgactttcgccgccatggcaggcgatcccccgacggctgcggagaaggagaccctggtctcctccttcatcgagatcaccgccggccagaccctcgagactgccacccagttcctccagatgacgagctggcacctggaggaggcgctgcagctgttctacatcgacggcgaggccgcccacaccgccgcgcattcggtggacccgtcgcctgcggcggcggccccgtcggcactagcggcggcggccggggtggaagaggcgatgaggttcgctccacccccggcggctgcactgggcgatgcaatgtcgcatgggtttggggtcagggaggacgacgacgttcgcgcgcccctgccggtgaagagggagactctctacggcgagggaatcgtgtccgtcatgcgacctaatgcatcagctgcatttcgtaactttgaacaagaagcaagacaatctgctgtttgggactctgagcagaatgttgcatctagttctggtgataatcttgcttctttataccgtccaccttttcctttgatgttcaatggatcctttgacaaggtaagctgtatatcaattatatcatctcgttagtttatatgctcgtgaaaatctatgggcactattttgttatttgcatatatggaaagctgcacaacatataattgccactatgcttgtatctcagttggctgatgaatttcttgaaaaccataactatagagcaagtagctcggtgttagttggttaaatattctttaaattgtttcaccttctttaaaaatgaaacaataccataatactatatattttggatgtgttttgttgctaaaatagtggattgatgtctatagtagtgttctttcaaatttattattcaactacttgtgtgcccttaaactgcctttgagctgaaattaaatattgctgatattttctaattcttacgatttttcccaaatgtaggcaaagttagaggcttcttccctggacaaatggctattaatcaatttgcagtcgacagaggaatttagctctcacatgcttaaccgagacacttggggaaatgaagcggtggctcagttaattaggtcaaattttattttctggcaggtttactatgacaccagtgaggggaggaaggtatgcacctattaccatttggtgtccatgcctgctattctcctaattgaccccgtcaccgggcaaaaagtacatgcttggaatggaatggttcacccagaccgtttactcgaggatttactaccttacctggataaaggtccgaaggggcaccatgcagctcaacctcaaaagcgcccaaggaaagttgatcaggaagcttctacgggcaagcaaggcaaaatcgctgtagaggatgaggatgaagaactagcaagggcaatagcagcttcgctagaggtagtcattgaagcatcagacgccagtgatgatgatatggctgaagctgaacctgaggaggaaaatgagcccagcttaaacatcaagcctgattatcctcctctccctgaagaacctaaaggaagcagggagcttctctgcagggttgcgattcggctaccgaacaatcaaaggatccaaagaaacttccttcacacagatcctatcaagctcctgtggtcattctgcgctcctcaggttgaggacggggagaagagggctttccacttcgtacaggccattcctggagcatcccagaagctgcagtttggaagcgacctaactttcaggaaagctgggctggccaactcgatgatcaacctcttgtggggctgagacgcttccatcttgcgcttggaaggccttgatcaggacgtgtccagtgtcctccggatgggcttgaagatccagttatttttcattccttgaggattaactcttcatattctgctccgtcccctgggctgcatgttgaaatgctcctttttgccgttcgttcttgtgtctacacatacatcgctgtccccggtagggttttgcctcgatttagtgcacatatctatcagagattcaatctggtggtgtggggcgtgcgcatggtctggtgctttgctttgatgtttcccttttgtatggtcgtggcaaagtctgaaagggagatgcatgaaggcaggcagcgcaatcagattcacagctggacctggatccaaaaccatgaatgaatgagcaggcatggtccttggtgtgccccgtccaacctcacacagtggccgctcaaagctgccggcacaggacagcgtgcggatgcagatgcagtgatgggagatcgcaggcagggagagtagagcagagagagagggacatcacaaggttacgtccctttgatgaatcatcactgcccctccagagacattgtttcgttgcatgatttatatgttctatgacaccttttgtgaacttgcttgatgtatgactgtacctaataatctaatatgttcctttttaaaagagagat

SEQ ID NO: 15359 - DNA, 2168 bp, Zea Mays
acgctttcttccacttctcttttccttacttcccaaacccaccctcccaagtcccaagcccaccgaaccctactcaccaacccacccgcaggagaacggaaaaaaaaaatcgtgtcgaggcgactttcgccgccatggcaggcgatcccccgacggctgcggagaaggagaccctggtctcctccttcatcgagatcaccgccggccagaccctcgagactgccacccagttcctccagatgacgagctggcacctggaggaggcgctgcagctgttctacatcgacggcgaggccgcccacaccgccgcgcattcggtggacccgtcgcctgcggcggcggccccgtcggcactagcggcggcggccggggtggaagaggcgatgaggttcgctccacccccggcggctgcactgggcgatgcaatgtcgcatgggtttggggtcagggaggacgacgacgttcgcgcgcccctgccggtgaagagggagactctctacggcgagggaatcgtgtccgtcatgcgacctaatgcatcagctgcatttcgtaactttgaacaagaagcaagacaatctgctgtttgggactctgagcagaatgttgcatctagttctggtgataatcttgcttctttataccgtccaccttttcctttgatgttcaatggatcctttgacaaggcaaagttagaggcttcttccctggacaaatggctattaatcaatttgcagtcgacagaggaatttagctctcacatgcttaaccgagacacttggggaaatgaagcggtggctcagttaattaggtcaaattttattttctggcaggtttactatgacaccagtgaggggaggaaggtatgcacctattaccatttggtgtccatgcctgctattctcctaattgaccccgtcaccgggcaaaaagtacatgcttggaatggaatggttcacccagaccgtttactcgaggtccgaaggggcaccatgcagctcaacctcaaaagcgcccaaggaaagttgatcaggaagcttctacgggcaagcaaggcaaaatcgctgtagaggatgaggatgaagaactagcaagggcaatagcagcttcgctagaggtagtcattgaagcatcagacgccagtgatgatgatatggctgaagctgaacctgaggaggaaaatgagcccagcttaaacatcaagcctgattatcctcctctccctgaagaacctaaaggaagcagggagcttctctgcagggttgcgattcggctaccgaacaatcaaaggatccaaagaaacttccttcacacagatcctatcaagctcctgtggtcattctgcgctcctcaggttgaggacggggagaagagggctttccacttcgtacaggccattcctggagcatcccagaagctgcagtttggaagcgacctaactttcaggaaagctgggctggccaactcgatgatcaacctcttgtggggctgagacgcttccatcttgcgcttggaaggccttgatcaggacgtgtccagtgtcctccggatgggcttgaagatccagttatttttcattccttgaggattaactcttcatattctgctccgtcccctgggctgcatgttgaaatgctcctttttgccgttcgttcttgtgtctacacatacatcgctgtccccggtagggttttgcctcgatttagtgcacatatctatcagagattcaatctggtggtgtggggcgtgcgcatggtctggtgctttgctttgatgtttcccttttgtatggtcgtggcaaagtctgaaagggagatgcatgaaggcaggcagcgcaatcagattcacagctggacctggatccaaaaccatgaatgaatgagcaggcatggtccttggtgtgccccgtccaacctcacacagtggccgctcaaagctgccggcacaggacagcgtgcggatgcagatgcagtgatgggagatcgcaggcagggagagtagagcagagagagagggacatcacaaggttacgtccctttgatgaatcatcactgcccctccagagacattgtttcgttgcatgatttatatgttctatgacaccttttgtgaacttgcttgatgtatgactgtacctaataatctaatatgttcctttttaaaagagagat

SEQ ID NO: 15360 - DNA, 1124 bp, Zea Mays
cccgaaacccctatacgtaaataaaaaaaaatccataacgcaatcgcaaggcgctgcctccaccgccgccacctgcacatccatcgtcgccgttcgcgtctccggatcccgcgaccggagtccggaccctcatcccgcggccgcatattctcccgtccgtgccctcgcgtgcgctctgcccctccggcgtccgccgccgccgtcgccctacccgaggtgccgtggtctccatctcccggagcttcgccggcgacgagaatcttccagagccatgctgggcgcgcgtgtgcagctgaaggggtggcaacaggcagctgttgcatttggttctgcgtttggggccttgcttgaccctaggagggctgatcttatagctgctcttggagagactactgggaaaccagcgtttgagcgtgtgctgcaacgaatgaagaacagtgcagaagttctctcggagcgtccccgcgtggtatcctcgcaggtttcccatgcctgggacctgcctcagaacacatttggcgcggcgtatgctcagttcatgggatcaaggaacttctcaccagacgatcgcccgcctgtccgtttcatggacaccgatgagctcgcctacgtcgcgacacgtgctcgcgaggtgcacgacttttggcacgtgctgtttggtcttccgacgaacctgattggggagaccgccctcaaggtgatagagtttgaacagatgttcctcccaatgtgcatgctgtcagtcgtcgggggctctgcgaggttcagcgacaaacaaagggcgctgtttttccagcactacttcccatgggcaacaaaagctggtctcaagtgtactgatctgatgtctgtatattacgagaagcactttcacgaagacctggaggtagtgagaaggaactggggaatccttccttgccccagtcccaaaaagagcagtgtatagggcggcattttctgcgtgaactttctatctgtttcatctttggtttctgttagttgctcagttctttttggaatagcatcatgagctaatgttgatgaatactgatacgttaccgagttggaagtatggttagcaagttgatgtgcagtgctctggaataccaacatgttactttgat

SEQ ID NO: 15361 - DNA, 1129 bp, Zea Mays
cccgaaacccctatacgtaaataaaaaaaaatccataacgcaatcgcaaggcgctgcctccaccgccgccacctgcacatccatcgtcgccgttcgcgtctccggatcccgcgaccggagtccggaccctcatcccgcggccgcatattctcccgtccgtgccctcgcgtgcgctctgcccctccggcgtccgccgccgccgtcgccctacccgaggtgccgtggtctccatctcccggagcttcgccggcgacgagaatcttccagagccatgctgggcgcgcgtgtgcagctgaaggggtggcaacaggcagctgttgcatttggttctgcgtttggggccttgcttgaccctaggagggctgatcttatagctgctcttggagagactactgggaaaccagcgtttgagcgtgtgctgcaacgaatgaagaacagtgcagaaggcaggttctctcggagcgtccccgcgtggtatcctcgcaggtttcccatgcctgggacctgcctcagaacacatttggcgcggcgtatgctcagttcatgggatcaaggaacttctcaccagacgatcgcccgcctgtccgtttcatggacaccgatgagctcgcctacgtcgcgacacgtgctcgcgaggtgcacgacttttggcacgtgctgtttggtcttccgacgaacctgattggggagaccgccctcaaggtgatagagtttgaacagatgttcctcccaatgtgcatgctgtcagtcgtcgggggctctgcgaggttcagcgacaaacaaagggcgctgtttttccagcactacttcccatgggcaacaaaagctggtctcaagtgtactgatctgatgtctgtatattacgagaagcactttcacgaagacctggaggtagtgagaaggaactggggaatccttccttgccccagtcccaaaaagagcagtgtatagggcggcattttctgcgtgaactttctatctgtttcatctttggtttctgttagttgctcagttctttttggaatagcatcatgagctaatgttgatgaatactgatacgttaccgagttggaagtatggttagcaagttgatgtgcagtgctctggaataccaacatgttactttgat

SEQ ID NO: 15362 - DNA, 1128 bp, Zea Mays
cccgaaacccctatacgtaaataaaaaaaaatccataacgcaatcgcaaggcgctgcctccaccgccgccacctgcacatccatcgtcgccgttcgcgtctccggatcccgcgaccggagtccggaccctcatcccgcggccgcatattctcccgtccgtgccctcgcgtgcgctctgcccctccggcgtccgccgccgccgtcgccctacccgaggtgccgtggtctccatctcccggagcttcgccggcgacgagaatcttccagagccatgctgggcgcgcgtgtgcagctgaaggggtggcaacaggcagctgttgcatttggttctgcgtttggggccttgcttgaccctaggagggctgatcttatagctgctcttggagagactactgggaaaccagcgtttgagcgtgtgctgcaacgaatgaagaacagtgcagaaggaagttctctcggagcgtccccgcgtggtatcctcgcaggtttcccatgcctgggacctgcctcagaacacatttggcgcggcgtatgctcagttcatgggatcaaggaacttctcaccagacgatcgcccgcctgtccgtttcatggacaccgatgagctcgcctacgtcgcgacacgtgctcgcgaggtgcacgacttttggcacgtgctgtttggtcttccgacgaacctgattggggagaccgccctcaaggtgatagagtttgaacagatgttcctcccaatgtgcatgctgtcagtcgtcgggggctctgcgaggttcagcgacaaacaaagggcgctgtttttccagcactacttcccatgggcaacaaaagctggtctcaagtgtactgatctgatgtctgtatattacgagaagcactttcacgaagacctggaggtagtgagaaggaactggggaatccttccttgccccagtcccaaaaagagcagtgtatagggcggcattttctgcgtgaactttctatctgtttcatctttggtttctgttagttgctcagttctttttggaatagcatcatgagctaatgttgatgaatactgatacgttaccgagttggaagtatggttagcaagttgatgtgcagtgctctggaataccaacatgttactttgat

SEQ ID NO: 15363 - DNA, 1146 bp, Zea Mays
cccgaaacccctatacgtaaataaaaaaaaatccataacgcaatcgcaaggcgctgcctccaccgccgccacctgcacatccatcgtcgccgttcgcgtctccggatcccgcgaccggagtccggaccctcatcccgcggccgcatattctcccgtccgtgccctcgcgtgcgctctgcccctccggcgtccgccgccgccgtcgccctacccgaggtgccgtggtctccatctcccggagcttcgccggcgacgagaatcttccagcatctcggcgcgtgtagagccatgctgggcgcgcgtgtgcagctgaaggggtggcaacaggcagctgttgcatttggttctgcgtttggggccttgcttgaccctaggagggctgatcttatagctgctcttggagagactactgggaaaccagcgtttgagcgtgtgctgcaacgaatgaagaacagtgcagaaggcaggttctctcggagcgtccccgcgtggtatcctcgcaggtttcccatgcctgggacctgcctcagaacacatttggcgcggcgtatgctcagttcatgggatcaaggaacttctcaccagacgatcgcccgcctgtccgtttcatggacaccgatgagctcgcctacgtcgcgacacgtgctcgcgaggtgcacgacttttggcacgtgctgtttggtcttccgacgaacctgattggggagaccgccctcaaggtgatagagtttgaacagatgttcctcccaatgtgcatgctgtcagtcgtcgggggctctgcgaggttcagcgacaaacaaagggcgctgtttttccagcactacttcccatgggcaacaaaagctggtctcaagtgtactgatctgatgtctgtatattacgagaagcactttcacgaagacctggaggtagtgagaaggaactggggaatccttccttgccccagtcccaaaaagagcagtgtatagggcggcattttctgcgtgaactttctatctgtttcatctttggtttctgttagttgctcagttctttttggaatagcatcatgagctaatgttgatgaatactgatacgttaccgagttggaagtatggttagcaagttgatgtgcagtgctctggaataccaacatgttactttgat

SEQ ID NO: 15364 - DNA, 1939 bp, Zea Mays
actagagcagcgacgtgtccgccgactcccggatctctcctccaacccgttcagctgtgccgccggccgccgccctgggcctgggtcgcacaaattcgcgtccgcttcgtggtgcccgcccagccccaaccctcgtggtcgactggtcgttgaaacctattcgcaggaagaaaaaaaaacattcttgtccgccccggctccaggctgctagtctgcaaccccccatccacccgcgaagtctcccaccaccgcgccgatccgggggcgggcggcgggggggcctcttgctctctactccacccactcgcggcctcacccgtggatctacgcggtggccggcgggcgcgatggcggaggcggagcgggagcagcgcccgctgccggaggtggagcaatctgtcacgtccataccggaagatcatgaagcaacatgttggggctgtgggcttcggcttgtctttgcgagctactcacctatctacaagtgtgggtggtgtggagccgtcacgcagagcaacaaccagactgcaaggaaacctgatagtatatggttttcccactggaggcgcctacgggacaggctcttcgtggctgtgctcgtcctcttcatgctcttcgttatatgtggtggggtctgggcggtatatcctgttgttttctcagtcagcaagttctgtggcgtatttcactgcacggtagcagctgtgttggctgtatgtaccgtcacaagctattgcttggcctctttgaaatgtgcaggcgcaccaacagacataaggtggggcagctatcccgtggttgggaaaggggatcttgagaactataccttttgtacatactgtagcaaaccaaagccccccagagcacatcactgccggtcgtgtaaaatgtgcgtggtggacatggatcatcattgcccatttattggcaactgcgtgggagcatcaaaccatcaagtgtttgtggtttttctcatttctgtggttatcagttgctcttatgtcgctgggatgaccatatacgcgagctaccagatatggccctccattgaattcccagacctagcatcatcatctcgtcactcgatgagttcttggaaaacggtgctggagatgatcactacggttgcaggctccgccttcttcttgtcagccaggggtctagtcctggtgtatctggcgtttgctagctcgtcagtgaatgctggtatagctgtgttgctgtgccagcagctgagctatatctacgaagggaacacgtacctcagccgtctgagctcaccaccgaatgccttgcagcatggagagaggggtttgcagaacatcgttcggtttttcgggtgcccgtatccagtctccagagctgtgttgcgactgcggtactccaacgctgccaagttgcaggatgattcagggtcgaaacttctttagagagtgctatactctcgattaagacgccgtttcgagtcgagacagttctgttctgttactcggaaattgtgatttgtgaacctcactcagttgaccaccggcagatttgtctgaataactgaagccgttttaggatgcagcactcatgacaacccgtgttcgatctggaggaaggattagttgttcatgaggacgccactcgcattgattagactgcagcacctgaaattctgcatcaccatcactgccctttccaactcagcagagcttgaagatggcagcagcttcatccacagctggttgttgcagaagaaatgatcatcatgattaaatctgacagtagtggcttcgagagtgatgctaggatgttggagagaaaaaaaatgtgtcccgccatacctctttgatgttaattcactgacatgtatatatacgatcggaaacgttgtaacgttcacttgatgtaaattattagtcgattaatcatgcacgtgtccgttccgtggtat

SEQ ID NO: 15365 - DNA, 5224 bp, Zea Mays
caaacagcaggctgctactccttgggcgagagatagagagagagagggtgcggatcggagtgccggccggcagggcaggcgcacggaaatggagggcctggcagcctccgtccgtccgccatgagcccatgcccatccagcatccatgggcaggcagcaccagcagagggtgtggtcagaagagaggaccgagagagagagagagtaccggcccgtgcctctgcagtctggcactctggctgctgccgctgccgctgccgcaccacccgccagcccggttgggtggttacttgccgcaactagcagctatttatatgccccagcctctgtgggccgtttgcactcactccaaagcaaagcaaatctctctctctctctccatctctccacacacagccccttcgctgccgaggtccctcgccggacggggggtgaaggacgaaggggaagaaaggtgcgcgggcatgctttccacaggctttcttgaactgtgaactcgtgggcgtggtggtggtggtgctggtgctgggtgtgtgggacggaatgattggctcctcccagtcccagtcccagtcccacccaccaattctcttccccccgaccggccgtgaattgaattgaatcgaatcgcatcgctgagcttccccccggctcgctcacgcgacctgttgatggttcaagaaagcccatggaaaccatgcagcctccctcctgtgcagctgtgctctggtggcggagaattccgccggttccgggtgagggaattcagcagaccagccaccccgatgcggattcgtgtgtggaggagagttgcagttgcagcgacgactccaactccaacgaggggatccacgcctggactgttctgttccaacgaggggatccaactccaactcagcggcaggcagctagctgtcctgttcgaaattcaaaacccggccagatccgtgcttgcgctgctcgccggggctgctttgtccactcaggccatcgatctccagttccatgtatgctccaattttgttcttgttttttttaaaacaaactcagttccagtacctgagcatgagtcacagcttggtttaggcgtgtggtggcgtttgctgggcagatcagttattactcctccactccacaccactgcaccggccggcaccgctggtaacgcacgcaggtaggcggccaaggccatgccaatgtcatgcagcgggattgatccatgcgtcgtccattggcgccctgccctcggctagctgcggctgtgctggaaagagatctggtggccgaggaggaggagaaggcgaggacgaggacgagggacagaaaagcagcaaaaggctcttgtggttggcatgcctacaaccaacgtcccaaccaggagcctgaaaaataatccccggcataaagccatgtgacaggcgacagcgatgccatctgatccgttccgttcggttccccccagcaaaccgtggtgaaaatcacgcggcccccgctctgccatctacccctgcacgagtacgacggtacggcggctgctcctgcaccctgcactgcaggccttctgcaacgcgggaggcgggaggggatttcgcgcgattcccgagggtgaggcaagaatatatggggtatgtttgattttacttttggctttgctttttaccctctaaaaatcaaaagtcaaacctctaaaaatcaaaagtcaaatcaaatggctgcattcagaaatcatctttttctaaaagcacatttggacatgcttttagtggcttttaaatggaacatgtgaaaatatatatcgaaaaacttttaacgacttttagtagttttcaccgaacgatttttagctttttaacagctcgcagcccataacagttttttttcatagtcacagcccaaccaaacagacctatagtgctgctgagctgaatttatattgcatttttttcataccgcttactaccttttcttctcgatggagattattgtcacctgctggacatcaggggcgtccttaatgactgtctcacatagctagatgacgtggaacaaaaaaaataaaaatagtaatttatctcaccatcagtatttagtcttagctcgtcactagttagggggtgtttggttacaccccgctaaaatttagcctctgtcctatcgaatgtttaaacctccgttccgagtattaaatgtagtcggattataaaactaatttatcagccgaagattaaaagacgagacgaatctagttcagttggttgggtctatatttcatactcctatttaaaagtcaaacgcttgatgtgacccggactaaactttagcagtagcaaccaaacaccccgttattctcgttccaccggtacttggtcttagctcgtcactagttattctcgtttttcatatattttctatccagttaaaaaatagaatgtatagatagtaaaatagctagcaatagggattccctgacaatgcactgcggtccggggaggcgagtgggcagtgcaggtgagctacatgacctagccagtagccaggcgagcgagtttatacggatcacatgatccgcaatgatgggcggagcggagggaggccagttgacccacactgccactgggctgtgctgtgcagatccagagccggggcggggcggggaccaaccagatctcccacggggcatacgagatataccctatcctgcccgcgcacacgagcctgctagctttagcgcagcctagctagctcctccagactactactgtcctcttccagctctactcgacttgacggtgatagaatatatctcaattttgccaatattttatgtggcttaaaataaaatactcgagtatacaatacatcctgaaatcaatgcctatctatgataaaagatatcagctttttttttatctcacaccatatccaaccggcccagacacactcccgctccctctcccaccatcaaatccacaactcaaatccgactcatatccaaccgagcagaagactatgctctctttctctgtagcctgatgcaacaggtaatgcaatataacaatgccgacatcgatgaggacaaaaacatcgagaagtcactccacatttttccaaagaaacacatgaaggccatcttggtgatgcagatgctactagagatggcaacagatataatacccatcggattgtattattcgatatacatacccatcaaaaaaaatctaaccattggcaagtctctctaattggtctctttgacagaaatgttggagcagtaaagctcggggtggataataagtatgtcttggtcttgggaagaaccacatattccatgagaacaggtctaggtcaaatgttacttcactacgagctgcttcaacaactacctcaacacttagaaccaactgctctctaagtcacttgggagggtcaagtttgaggagcttggtgctagactcggaatggtttaaattcctcggaagacatcatagacttgatataatgattgaagacttgatgtcaacattttatcttcattattagcatctaatttagcagttctaatacattataactttctttgttccaaatctgttacctcgatcttaccatggtttagttggattcaaatgaaaaaaaatccaaaaaactatgtgaaccgtgctactaccataccagggatccaatccatcgatgcatgcagtgcaatacaagcactgaataagttctcctaggtacaggttacaggctacagaagaggaagggggaagatctcagctcagaagcccagtcagagctggctagctagctgctcttgcttcatttcaccgccccaaattcagcatcgctcgtacttgctgctactttaatggtagtgtttggttgaggaggcaagtagaacggagccgttccatccctgattctaggaacggagtcgctctattctatgtttggtaatctggaacggagaggttctgttttttgtttggttgcagagtgaacggaacggagcgtcactgtgggagcgggatgggaacggaacggctccgttccgttgattttttggagcggaatggttccggatctgagtagaatattccctaattggagtaatgccgttgtagttactttgtaaccaaacagcaacaaaactggaacagaacggcttcgttctacttggctcttcaaccaaacactatcttactgcttgctttcgctttcccttccttcctagtagcaggcagcagtagttcctacttcctagcaggcagcagcagcagctatttatgcagcagcagtgtgagacgacacattgaaaagcatctgatcctaaaggcgagccaacagcaaagagacgagacgagccccgggcggcccctacgttcctagtacaacatcagagaagtgtgtgatggttgctggtggtggtgtcagatcagcaagcaccaggtcttcagtctcctgctccatcaggaggtagaggtagctcgctcgctaggagctagctgcggaggaaagcgtcgaccttggcgttggtgctgcgggacaggaacttcatgcagatggacggccggcttggcgccggcgagggccaacacagactgcggcagcgtccagatgccgtcgccgcagatgaggcccgacgcgacggggggcgcgaatgccttggcccgggccgggtccaggcggtcccacacgaggcgcaccaggctgccgaagtaggggccgaggtaaaaggggatggacatggccatggtccatggacagcgggatgtaggcggcggcgcgggcgcgcgcgaggtcgcgtgccatgttgatggcgatggcggcggcttagaatgcgatgcagaggtcgagtcagtagcggggcagggttactcggaccccagcatgccgatgtcgcggaacgcgctgtagaagagccagaacacggacggcgccaccacgcagcccatggccgtgccgatcacctggctcacgaacatggaccgcggcgacgccagcgtcatgtacccggtcttgaagtcctgcgtcaggtccgacgccgtcgacacgatgccgatcatcacgctgcacacgccgccagacccgcgatgatgccgccgccgccgtctccgtcgtcggaggccgccgcccagccgcctaccgtcaagatggtcagcttgccgtacgtcgtggccagggaccggtccgtgagcccgtacgtacgcgttgcagaaggccagca

SEQ ID NO: 15366 - DNA, 860 bp, Zea Mays
ttgcgctcgcatgcccccgctcgcctgcgcctcccacgcccacacacccagccaccgccgaccacgctcgcggatctcgcccacaacaacgcgtgaccgagcccccgccgtgtctccttccatcctcgcgtatacgtcggcgtctccttccatatatgccaacggaggcgaccgcggaggccgctcccccgcgtgcacaacatcccgcgttcccctctcccccaggtcctgccgcagcgcgttgctcagtaccccagccactgcccgctagccccccccacacacatacccatcctcgccggcctcagcaccgcaaacgccgcccgcgcgtcacttccccgcccttcaatggtgtcctcctccccatcactcgggggcagcaaggcaaccgatggggacgtgtccaacttcactgccttcctccaggcctcgccgaagtcattcgtggtcgtcgagttcttcacccactggtgcaatggtcaccagcccagaaggtcatggtcgacccacgcgatgcaacccaattggatgaagctgggtttaggggccttcttcgttggtttgactgagtttcttcttagttaaataaacacaaagccgaccatggcagatgttatcggtttcgatctaggcacaccgaattcatgcatctccgtattggaatgaaaggtgtgtttttaacttgttcatcctaaaatctgccatattcagttgtttgtaaatgggttgttgtatccatctgtagtagatttcatgcttcaatcactaaaattagtttgggccagctgttgtatcaatatgtacttaatgtcatggtttgaaatagctacgatttgagtaaattttgtggcaattagctc

SEQ ID NO: 15367 - DNA, 334 bp, Zea Mays
ggaatggcttaccttcactccgtgtgtctcaatcgagggggagtcaccaacgaacgacccacaattggtaagcctcgttattcgactggattttttatttcacctttagagaatacttctcattacctaactgctttgttctcttgccatttctgattctgctgttatgatactgatggaatcctcattcgccgctgctaaggagtttgagcaggactagagaggagacgtcagttcttcctcctccgctcagtgcgaccattctccctgtccctcaactctgaactcttagaacaatgatgatcactgccactccccgctcattttttctgaa

SEQ ID NO: 15368 - DNA, 1574 bp, Zea Mays
gtgagccaaaccaaaccaaaccgcctccagctccagcctcctgtcctgctcccttcctcccctgcctgcctgccgcgcaccactccactcgagtgactcgagtcgtcctcctcccaccacctcccgtccgttgcgttgctcctgcccgcgcctcctccatccaccacaccagtccgtcgttaaagctgcggcatcggcagcacacgccgacgggtacaaggagcactcattgcctccccatctcgtgtaggctctccccctcctccgcgctccgtccgtctctcatcaccgttccgccgccgccccacctctccctcctctcgccgccgcctccgaacccgccacggcgcggcggagatccaaccggacggatctggatcgacctactccgacaccggtaaggaagccaccgcttgctagtccgatgcattgtccattctactctatgcgcaatcctgccctgccctgcgctcaaccgaaaatctctgtttccgcaatggatatcatgcatgtgatatatatggattcgtcagctcagtccatccactttacttctttgttttgctttcgctactagttttcgtatttccctccggttaattacaaggcctgactgttaacttctgggcctccttcttcagctttccgaagatagatagatagataacaaggttgtgctgtgcttgctgtctgttgggaagtggaggaagctcaataagttgatatccgcctcgagctcgagggaaccggtgggcagggccccccgatcacgagcatggacagaactgccaataatgcggtattggatatcgagagccttcctcaaccgcctgataaatgctgctctgggagtccgaagatgatcagggccttgtcgcgtaagggttcgaaccggatggagaggaggggcggcggcggcggcgagcaggagcaagaggatttggcgaaaaaacttgtcatcaaagttgtgccgtctcaactggagcagcagcccctgggtcagaacaaggcgctggtcgctccacattgcacacctgttcttgttgattctggggaagggaggagcaaaagattcattagccggttcacgtccatcaaccctcggaagattctcctcttgttcgcaacgctgtcgagcgtggggacaacgatactgatctacttcacgctggcgatcaacagcaaagcggaggcctagtcgcctggagacacccaccaccaccatttgcgtcggcgagcgggcggcggcagtacattccgagcttgagtttttatttttctctatttttgtttgtgaggtagctgccgcggcgagattagatgcagcctgccgctcaggtgtctgtatccattgactgagtgagagactgcttcagtgggtgtcattcttcctcgcgtgtatgtatattggtggaatcgttgatgtgacttttttagtcttcaattatgtgcagcagatcatgtatataacaggagatctgttgaagacagatcggcagagaagttcaattcggattaaaccggctgtttggactcctgcagttttaatgcatagagacaaaaaaaaactataa

SEQ ID NO: 15369 - DNA, 2139 bp, Zea Mays
gtgagccaaaccaaaccaaaccgcctccagctccagcctcctgtcctgctcccttcctcccctgcctgcctgccgcgcaccactccactcgagtgactcgagtcgtcctcctcccaccacctcccgtccgttgcgttgctcctgcccgcgcctcctccatccaccacaccagtccgtcgttaaagctgcggcatcggcagcacacgccgacgggtacaaggagcactcattgcctccccatctcgtgtaggctctccccctcctccgcgctccgtccgtctctcatcaccgttccgccgccgccccacctctccctcctctcgccgccgcctccgaacccgccacggcgcggcggagatccaaccggacggatctggatcgacctactccgacaccggtaaggaagccaccgcttgctagtccgatgcattgtccattctactctatgcgcaatcctgccctgccctgcgctcaaccgaaaatctctgtttccgcaatggatatcatgcatgtgatatatatggattcgtcagctcagtccatccactttacttctttgttttgctttcgctactagttttcgtatttccctccggttaattacaaggcctgactgttaacttctgggcctccttcttcagctttccgaagatagatagatagataacaaggttgtgctgtgcttgctgtctgttgggaagtggaggaagctcaataagttgatatccgcctcgagctcgagggaaccggtgggcaggtacctttaagatctgacccagttcttgtctccgctgttctaaattctcacaggttggttgcgcaacggtccaagaaatgagcctaaaccaaaagcaaaagaaaacaaccaaacctgtgcagcttttgttttgtttagcctgcgatgcgatgtgtccagtttgagctcgagtctcgagagcatgcatgtgttatcctttgtttttctcttttattctgccaccaacttgtcacattttgccggccgttacgtcgcgtagaatgggatcataatatatactccagtataaaacataaacaaacggctgcaaagctgcaggttttgtgttcctatcctagcacataggataggacatagccgctgcatgttgcgaaggatatgagcacgccaggtccagccattgatttcttgcttcctttttcggttgtagagtcagtgggcgcagcgcattgccttgccttgccttgcctcatgattctccgtttggtaaactcatatttatgaccatgaaggatgtggcctacattgctggatctgctgctacattggtggtgccactgatctgggccccccgatcacgagcatggacagaactgccaataatgcggtattggatatcgagagccttcctcaaccgcctgataaatgctgctctgggagtccgaagatgatcagggccttgtcgcgtaagggttcgaaccggatggagaggaggggcggcggcggcggcgagcaggagcaagaggatttggcgaaaaaacttgtcatcaaagttgtgccgtctcaactggagcagcagcccctgggtcagaacaaggcgctggtcgctccacattgcacacctgttcttgttgattctggggaagggaggagcaaaagattcattagccggttcacgtccatcaaccctcggaagattctcctcttgttcgcaacgctgtcgagcgtggggacaacgatactgatctacttcacgctggcgatcaacagcaaagcggaggcctagtcgcctggagacacccaccaccaccatttgcgtcggcgagcgggcggcggcagtacattccgagcttgagtttttatttttctctatttttgtttgtgaggtagctgccgcggcgagattagatgcagcctgccgctcaggtgtctgtatccattgactgagtgagagactgcttcagtgggtgtcattcttcctcgcgtgtatgtatattggtggaatcgttgatgtgacttttttagtcttcaattatgtgcagcagatcatgtatataacaggagatctgttgaagacagatcggcagagaagttcaattcggattaaaccggctgtttggactcctgcagttttaatgcatagagacaaaaaaaaactataa

SEQ ID NO: 15370 - DNA, 1709 bp, Zea Mays
gtgagccaaaccaaaccaaaccgcctccagctccagcctcctgtcctgctcccttcctcccctgcctgcctgccgcgcaccactccactcgagtgactcgagtcgtcctcctcccaccacctcccgtccgttgcgttgctcctgcccgcgcctcctccatccaccacaccagtccgtcgttaaagctgcggcatcggcagcacacgccgacgggtacaaggagcactcattgcctccccatctcgtgtaggctctccccctcctccgcgctccgtccgtctctcatcaccgttccgccgccgccccacctctccctcctctcgccgccgcctccgaacccgccacggcgcggcggagatccaaccggacggatctggatcgacctactccgacaccggtaaggaagccaccgcttgctagtccgatgcattgtccattctactctatgcgcaatcctgccctgccctgcgctcaaccgaaaatctctgtttccgcaatggatatcatgcatgtgatatatatggattcgtcagctcagtccatccactttacttctttgttttgctttcgctactagttttcgtatttccctccggttaattacaaggcctgactgttaacttctgggcctccttcttcagctttccgaagatagatagatagataacaaggttgtgctgtgcttgctgtctgttgggaagtggaggaagctcaataagttgatatccgcctcgagctcgagggaaccggtgggcagagtcagtgggcgcagcgcattgccttgccttgccttgcctcatgattctccgtttggtaaactcatatttatgaccatgaaggatgtggcctacattgctggatctgctgctacattggtggtgccactgatctgggccccccgatcacgagcatggacagaactgccaataatgcggtattggatatcgagagccttcctcaaccgcctgataaatgctgctctgggagtccgaagatgatcagggccttgtcgcgtaagggttcgaaccggatggagaggaggggcggcggcggcggcgagcaggagcaagaggatttggcgaaaaaacttgtcatcaaagttgtgccgtctcaactggagcagcagcccctgggtcagaacaaggcgctggtcgctccacattgcacacctgttcttgttgattctggggaagggaggagcaaaagattcattagccggttcacgtccatcaaccctcggaagattctcctcttgttcgcaacgctgtcgagcgtggggacaacgatactgatctacttcacgctggcgatcaacagcaaagcggaggcctagtcgcctggagacacccaccaccaccatttgcgtcggcgagcgggcggcggcagtacattccgagcttgagtttttatttttctctatttttgtttgtgaggtagctgccgcggcgagattagatgcagcctgccgctcaggtgtctgtatccattgactgagtgagagactgcttcagtgggtgtcattcttcctcgcgtgtatgtatattggtggaatcgttgatgtgacttttttagtcttcaattatgtgcagcagatcatgtatataacaggagatctgttgaagacagatcggcagagaagttcaattcggattaaaccggctgtttggactcctgcagttttaatgcatagagacaaaaaaaaactataa

SEQ ID NO: 15371 - DNA, 1383 bp, Zea Mays
gtgagccaaaccaaaccaaaccgcctccagctccagcctcctgtcctgctcccttcctcccctgcctgcctgccgcgcaccactccactcgagtgactcgagtcgtcctcctcccaccacctcccgtccgttgcgttgctcctgcccgcgcctcctccatccaccacaccagtccgtcgttaaagctgcggcatcggcagcacacgccgacgggtacaaggagcactcattgcctccccatctcgtgtaggctctccccctcctccgcgctccgtccgtctctcatcaccgttccgccgccgccccacctctccctcctctcgccgccgcctccgaacccgccacggcgcggcggagatccaaccggacggatctggatcgacctactccgacaccgctttccgaagatagatagatagataacaaggttgtgctgtgcttgctgtctgttgggaagtggaggaagctcaataagttgatatccgcctcgagctcgagggaaccggtgggcaggatgtggcctacattgctggatctgctgctacattggtggtgccactgatctgggccccccgatcacgagcatggacagaactgccaataatgcggtattggatatcgagagccttcctcaaccgcctgataaatgctgctctgggagtccgaagatgatcagggccttgtcgcgtaagggttcgaaccggatggagaggaggggcggcggcggcggcgagcaggagcaagaggatttggcgaaaaaacttgtcatcaaagttgtgccgtctcaactggagcagcagcccctgggtcagaacaaggcgctggtcgctccacattgcacacctgttcttgttgattctggggaagggaggagcaaaagattcattagccggttcacgtccatcaaccctcggaagattctcctcttgttcgcaacgctgtcgagcgtggggacaacgatactgatctacttcacgctggcgatcaacagcaaagcggaggcctagtcgcctggagacacccaccaccaccatttgcgtcggcgagcgggcggcggcagtacattccgagcttgagtttttatttttctctatttttgtttgtgaggtagctgccgcggcgagattagatgcagcctgccgctcaggtgtctgtatccattgactgagtgagagactgcttcagtgggtgtcattcttcctcgcgtgtatgtatattggtggaatcgttgatgtgacttttttagtcttcaattatgtgcagcagatcatgtatataacaggagatctgttgaagacagatcggcagagaagttcaattcggattaaaccggctgtttggactcctgcagttttaatgcatagagacaaaaaaaaactataa

SEQ ID NO: 15372 - DNA, 1895 bp, Zea Mays
gtgagccaaaccaaaccaaaccgcctccagctccagcctcctgtcctgctcccttcctcccctgcctgcctgccgcgcaccactccactcgagtgactcgagtcgtcctcctcccaccacctcccgtccgttgcgttgctcctgcccgcgcctcctccatccaccacaccagtccgtcgttaaagctgcggcatcggcagcacacgccgacgggtacaaggagcactcattgcctccccatctcgtgtaggctctccccctcctccgcgctccgtccgtctctcatcaccgttccgccgccgccccacctctccctcctctcgccgccgcctccgaacccgccacggcgcggcggagatccaaccggacggatctggatcgacctactccgacaccgctttccgaagatagatagatagataacaaggttgtgctgtgcttgctgtctgttgggaagtggaggaagctcaataagttgatatccgcctcgagctcgagggaaccggtgggcaggtacctttaagatctgacccagttcttgtctccgctgttctaaattctcacaggttggttgcgcaacggtccaagaaatgagcctaaaccaaaagcaaaagaaaacaaccaaacctgtgcagcttttgttttgtttagcctgcgatgcgatgtgtccagtttgagctcgagtctcgagagcatgcatgtgttatcctttgtttttctcttttattctgccaccaacttgtcacattttgccggccgttacgtcgcgtagaatgggatcataatatatactccagtataaaacataaacaaacggctgcaaagctgcaggttttgtgttcctatcctagcacataggataggacatagccgctgcatgttgcgaaggatatgagcacgccaggtccagccattgatttcttgcttcctttttcggttgtagagtcagtgggcgcagcgcattgccttgccttgccttgcctcatgattctccgtttggtaaactcatatttatgaccatgaaggatgtggcctacattgctggatctgctgctacattggtggtgccactgatctgggccccccgatcacgagcatggacagaactgccaataatgcggtattggatatcgagagccttcctcaaccgcctgataaatgctgctctgggagtccgaagatgatcagggccttgtcgcgtaagggttcgaaccggatggagaggaggggcggcggcggcggcgagcaggagcaagaggatttggcgaaaaaacttgtcatcaaagttgtgccgtctcaactggagcagcagcccctgggtcagaacaaggcgctggtcgctccacattgcacacctgttcttgttgattctggggaagggaggagcaaaagattcattagccggttcacgtccatcaaccctcggaagattctcctcttgttcgcaacgctgtcgagcgtggggacaacgatactgatctacttcacgctggcgatcaacagcaaagcggaggcctagtcgcctggagacacccaccaccaccatttgcgtcggcgagcgggcggcggcagtacattccgagcttgagtttttatttttctctatttttgtttgtgaggtagctgccgcggcgagattagatgcagcctgccgctcaggtgtctgtatccattgactgagtgagagactgcttcagtgggtgtcattcttcctcgcgtgtatgtatattggtggaatcgttgatgtgacttttttagtcttcaattatgtgcagcagatcatgtatataacaggagatctgttgaagacagatcggcagagaagttcaattcggattaaaccggctgtttggactcctgcagttttaatgcatagagacaaaaaaaaactataa

SEQ ID NO: 15373 - DNA, 3466 bp, Zea Mays
cttctgtgattcttttatgtacttccacccacgtttgttaacaccgctgatcctagttggggtgtctgcagcttgcacacctacaagagaatctgattagaatacattactttttatgagctaaaaaagatgtttttttactccaactgtaactctgaaaggcgtcaacaaacaatggatgcttcagtattgtgctccctgacggtcaggcaaacatgataaggctcgaagataaatcagtcaaaacaacatgaattttaatcatgaataatacacttcaacaaacagctggcgaactaagatgcatacgattagaaccttttaaacaaaatgcaaaacaaactgctacacgtaaacatgaatacatgcatgatgcatctgtcctacggaggttctcaaagatggctttattaccttgtgttattgaaaaggatatcacacgaaattaatatcatataggaatattatcattcatgcacagaagaaattaagaaaacaactaactaaagattcaggacactggctgccacacacaaacaagtacaatacataagcataagtggacttgcacgctacaactgaatcaataaaatatttgagactcaggcacttgtatgctttgttgataaatcttagaaactacagacaaatgttaagttcggaagaaaatattacactgcctcgcgagcaatccttactttcacacctcgattagttttttatatgttcaacctaacaactagtcctttcatctctcgcctcataagtgaagagtgaacccatggtcaagatgtaatactctggatctgctttcctcttcttgagagaacaaatagttcctgatatttagccaaccattcaacccttcaatggcactcggaccactcggtaactttactgagtaaaacaatataaactctctttaacatattatttgaaaattccatttcatgcaatttctattggtaggtgccaccatacagttacaatttgctgatttccggtaattttatcttgatatggctggagatagaatcaatgtccacattgtccacctgctagtgttattccttacacttctgcaaatcatgtcccgagaagtcttgaaagaaacaatgctaatcttctccatgcatcaagtgatcaacttaagtggtatgttcatcttcattaaccgtgttgagaaacatgatattgttagatctagagaccaggcccaccacattgacaaagtcatctattcaaatcagctcgatttgtgggactcagaaatgtatgagaccttggagttgagggatggagggtctgattatcttggcaaaggtgttcttaggatttgttctaccaggcaattttcccattcactgcacatgtattacacttgatatatatgccatgtagtatatatttgaagtatttttgctaggtagtttgtggcataagtttctttgaaaaacaacatgtattagtgtttgcaaccattacatatatcactcctccttcatgtgaatcaagagctttactcaaatgatctgaagtgagataatacttctacttatttctggtttttatgattttttattggatcctactttgtagataaatttacaattttgtgacaagaacattgctacttgataatttgcttttagtgagcaagcaagaaccagatcagaaattttatccataatttcgagttttactcgaacataagctaattgttgtctttttatgtgtgttagggcaaatgtatagacctatgactgctaccaaagaaacaaaggaattcaccgaattcttagaaggcccctgttggagctcctactgattgcaaaaaagtaaaaatgatcaagatatagcattgagtataatcaatgattttaggagggaaggcttttaactggggccatgatagcgttggccattggtggaggtgcttatgtgagtactacagatgaaggaaagttttgcggatggttattcaagtcaacagaacttgtgaacccactctttgcactgttggatgcagagtttgctcatagtttagctgttaaagcggctgcccatggatttgttccaagagaaaagagacctgatccatcagttcttggggttgaggtttggggaaggaagttttcaaacccaatcggtcttgctgctggctttgataaaaatgctgaggcagttgaaggtctcttaggcctgggatttggctttgtggaagttggctctgtgacacctcttcctcaagagggaaatcccaagcctcgaattttcagattaaaggagcatggtgctgtaatcaaccgatgcggattcaacagtgaaggaattgtagttgttgctaagcgtcttggggcacaacatggcaagaggaagatggaagaaacttcaagctccacgcttccctcaaccagcgacataaagcaaggaggaaaagcaggacctggaatcttgggagtcaatcttggcaagaacaagactagtgaagatgctgctgctgattatgtgcaaggggttcatacattgtcacaatatgctgattacttggtcataaatatttcttccccaaatactcctggtcttcgcaaattacaaggtagaaaacaactgaaagatcttgtgaagaaggtgcaagctgcacgggatgagatgcagtgggctgaagatggacctccaccattgctcgtgaagattgcaccagacttgtctaagcaggatcttgaggatattgctgcggttgctcttgctcttaggttggatggcctgattatatcaaacaccacagtttccagaccatcacctgcagataaacatccattggctcaggaaactggtggattaagtgggaagcctttgttggacttatctactaacattctcagggacatgtatatgcttacacggggcaagattcccctcataggctgtggtggcgtgagtagcggtgaggatgcatacaagaagatccgttccggagctacacttgttcaactttatactgctcttgcatatggtggtccagctcttatacccagaataaaggctgagctagcagaatgtttggaaagagacggtttcaaatctgtgcaggaagcagtcggcgctgatttccgatgatccctggcggatcgctgagaaggtctgaataaccgttccgttaaagttcatgtgattttgatgagaagcaagcaactttttttttgtgtgtgggcacgatgcttgccaattccatttgaccggtacttgaaaagaaataccgggttgaaactttgctgggggtgagttgagtaatgagcggctgtatcacgcgcgcgtacatgagcttttggttcttcttttcctggggttcacgtgtgggaatgggagcacctgccccgctgctcatcgagctccccaccgccccctttttggacgaactttccatggcctttttcggccgtccagatgacgtgatggaggagcc

SEQ ID NO: 15374 - DNA, 1943 bp, Zea Mays
cgcccgcaccgcactgctgcagagtttctgcacttctgcttgctccccacgcggccacgccgaacgggaatccggctcatcagcccctgcaccagcatcagcatcagcgccgccgccgccgccgccctcctcgcgctcttcacagtcctcccgcccttcccgcgcctggtctcccctcgcgttcccgatgtcatcttccaccgcactcgcgtggcgacgcaccctccgcaacgccctacttcgcggcttcccgcggcgcggcgcggcgcccgagcggtacgccagcacggcctccgcgtccggcgcggccgccgatgctgcagctgcagccgcgccgaagaaggtgcccccgtcaccccgcaagggaaggcttttaactggggccatgatagcgttggccattggtggaggtgcttatgtgagtactacagatgaaggaaagttttgcggatggttattcaagtcaacagaacttgtgaacccactctttgcactgttggatgcagagtttgctcatagtttagctgttaaagcggctgcccatggatttgttccaagagaaaagagacctgatccatcagttcttggggttgaggtttggggaaggaagttttcaaacccaatcggtcttgctgctggctttgataaaaatgctgaggcagttgaaggtctcttaggcctgggatttggctttgtggaagttggctctgtgacacctcttcctcaagagggaaatcccaagcctcgaattttcagattaaaggagcatggtgctgtaatcaaccgatgcggattcaacagtgaaggaattgtagttgttgctaagcgtcttggggcacaacatggcaagaggaagatggaagaaacttcaagctccacgcttccctcaaccagcgacataaagcaaggaggaaaagcaggacctggaatcttgggagtcaatcttggcaagaacaagactagtgaagatgctgctgctgattatgtgcaaggggttcatacattgtcacaatatgctgattacttggtcataaatatttcttccccaaatactcctggtcttcgcaaattacaaggtagaaaacaactgaaagatcttgtgaagaaggtgcaagctgcacgggatgagatgcagtgggctgaagatggacctccaccattgctcgtgaagattgcaccagacttgtctaagcaggatcttgaggatattgctgcggttgctcttgctcttaggttggatggcctgattatatcaaacaccacagtttccagaccatcacctgcagataaacatccattggctcaggaaactggtggattaagtgggaagcctttgttggacttatctactaacattctcagggacatgtatatgcttacacggggcaagattcccctcataggctgtggtggcgtgagtagcggtgaggatgcatacaagaagatccgttccggagctacacttgttcaactttatactgctcttgcatatggtggtccagctcttatacccagaataaaggctgagctagcagaatgtttggaaagagacggtttcaaatctgtgcaggaagcagtcggcgctgatttccgatgatccctggcggatcgctgagaaggtctgaataaccgttccgttaaagttcatgtgattttgatgagaagcaagcaactttttttttgtgtgtgggcacgatgcttgccaattccatttgaccggtacttgaaaagaaataccgggttgaaactttgctgggggtgagttgagtaatgagcggctgtatcacgcgcgcgtacatgagcttttggttcttcttttcctggggttcacgtgtgggaatgggagcacctgccccgctgctcatcgagctccccaccgccccctttttggacgaactttccatggcctttttcggccgtccagatgacgtgatggaggagcc

SEQ ID NO: 15375 - DNA, 1647 bp, Zea Mays
atttgcttctcactacctctagcggccctcactgtgcttgatgctgctgattcgttgcatgttttatgggaaggcttttaactggggccatgatagcgttggccattggtggaggtgcttatgtgagtactacagatgaaggaaagttttgcggatggttattcaagtcaacagaacttgtgaacccactctttgcactgttggatgcagagtttgctcatagtttagctgttaaagcggctgcccatggatttgttccaagagaaaagagacctgatccatcagttcttggggttgaggtttggggaaggaagttttcaaacccaatcggtcttgctgctggctttgataaaaatgctgaggcagttgaaggtctcttaggcctgggatttggctttgtggaagttggctctgtgacacctcttcctcaagagggaaatcccaagcctcgaattttcagattaaaggagcatggtgctgtaatcaaccgatgcggattcaacagtgaaggaattgtagttgttgctaagcgtcttggggcacaacatggcaagaggaagatggaagaaacttcaagctccacgcttccctcaaccagcgacataaagcaaggaggaaaagcaggacctggaatcttgggagtcaatcttggcaagaacaagactagtgaagatgctgctgctgattatgtgcaaggggttcatacattgtcacaatatgctgattacttggtcataaatatttcttccccaaatactcctggtcttcgcaaattacaaggtagaaaacaactgaaagatcttgtgaagaaggtgcaagctgcacgggatgagatgcagtgggctgaagatggacctccaccattgctcgtgaagattgcaccagacttgtctaagcaggatcttgaggatattgctgcggttgctcttgctcttaggttggatggcctgattatatcaaacaccacagtttccagaccatcacctgcagataaacatccattggctcaggaaactggtggattaagtgggaagcctttgttggacttatctactaacattctcagggacatgtatatgcttacacggggcaagattcccctcataggctgtggtggcgtgagtagcggtgaggatgcatacaagaagatccgttccggagctacacttgttcaactttatactgctcttgcatatggtggtccagctcttatacccagaataaaggctgagctagcagaatgtttggaaagagacggtttcaaatctgtgcaggaagcagtcggcgctgatttccgatgatccctggcggatcgctgagaaggtctgaataaccgttccgttaaagttcatgtgattttgatgagaagcaagcaactttttttttgtgtgtgggcacgatgcttgccaattccatttgaccggtacttgaaaagaaataccgggttgaaactttgctgggggtgagttgagtaatgagcggctgtatcacgcgcgcgtacatgagcttttggttcttcttttcctggggttcacgtgtgggaatgggagcacctgccccgctgctcatcgagctccccaccgccccctttttggacgaactttccatggcctttttcggccgtccagatgacgtgatggaggagcc

SEQ ID NO: 15376 - DNA, 1715 bp, Zea Mays
gcccgtgtccaccgcgtcctctcctgcccgtcgctcacgccgccaacactaccaggctaccagctcagctcgcgctcgtccggccgcctcctttcgcctgccagcacccaccatgccacacggccacaggggcatgcagcccgccacgacggtgctcgcggtgaaggcggccctggcgctggccgcggccgcgtccctggcgcgcctcgcagtcccgcgcctcgcgtccgcggccggcgccgtgctcccgcgcgtctgggccgccgcgcgcctctgcctcgtcccgccctacctcttcgtcaccgtgcacctcatcatcctcgtcatctggaagctgtcctccgaccacagccacgtccacgtccaccatcagcccggcgcgccgccatcgcccgctgcccacgcccgcgccgcggaggtgccggtgccgcccgtcaaggccaaggccaagcaggaggaggactgcgaggatctgcaggccgagttctcccccacgggctccggcggcggcggcagcgagtcctgcgtcaccacggagtccgacgaggacgcctcctcctccgccctcctggagcgggagcgggagccctcgcttgacggcgacgccgaccacgacctcgacgccacgtggaacgccatcatgcggaggacgcgccccgctcccgctgctcctgctcccgcgcagcaccagcaccagcaccaccaccaccaaccgccgagaacccgggacccgtcggtcggcgcggaggagatgaaccgccgcttcgacgacttcatcgagaagaaccgcaactccttcggccggcggtagctaggcctaggcgacctcccgacccgatcgatccagcctcgccgccgtacgatacatacgtacatagcacaagacgcatgcatctttggttgtggttgtttttttcttctctttttcatcttggtgtacatagcacaaggcacaagtaatttatatcttacctactcggtgagagtgaaacagcacagtaaaattccgtccttgatcaagactagtctcagtcggctgcttgattagcccgcgatgagtccggaggctgcctggcgacgccgagcttggcgtggctgccttccgtaagaaagcaagaaatttggtcggcttctgcgctggcagcccggtccgcctctttcgtctttccctttcggtgccaccaggatctaactgtagatcataccgtgtttgcttgaccgctgacgctggatactctgcctgcgagtggaaacgagcggctagttccagtcaaaagtaaaatcccctgaccaaggtgtagcctgaattttcagtgtcaacctatgtttttttccagtaaaatattacgtagaagtgattccatgtactagctgttagattctctctttcacgattgttgcccttgctggccttgcatctgttcgtcctttcctctttcttttttttcttttttttactgattataacagtgtgtccaagttcatataatatatataatactggtgaagtagtgggtcagtgattgcacacaaaccgttgctgccacatggtgtgtgcgtgtgagagaaggagatccacaggtcaatggccatgccactacctcgctccatgattctttctttttctttttcatggaatggtcagcggatgcctctctgttctacgttgctacagcctaaagcgtggttatgctcactgtctgtctcatgttaac

SEQ ID NO: 15377 - DNA, 2088 bp, Zea Mays
gccgcggcatatgctgggtttcgcccaggaatcgccatgacggggcgaatcccactgtccgctacagcagcactgcgagccactgaccggtgggcccgccttgctctctgcatgtgtatatgccggtgggaccacgtgtccagcgactccatccagtcctggagcctgcgcggctgcgccttgcatcgcatctccgtcgtcgtcctcgcccacggaatccgtccaattccccacgccgcccgtcgtccttttctataaaattcactccgccaccaaatctcgaatccccatcgcgctgcttttccaccgaccccgacgccgacgccgacgccaccgccgctccctccccagtccccactccccttcccgggccgcggagcagagatccggggcgccgcgcgatggcgaacatcgacatggcgaagatcctggcggacctggaccgcggcgccagcggcggcgacgcgcgggtgcccaagaccaagctcgtatgcacgctcggcccggcctcccgcaccgtgcccatgctcgagaagctgctccgcgccggcatgaacgtcgcgcgcttcaacttctcccacggcacccacgagtaccaccaggagacgctcgacaacctccgccaggccatgcacaacaccggcatcctctgcgccgtcatgctcgacaccaagggtcctgagatccgtacagggtttttgaaggatggtaaaccgattaagctaaccaagggtcaagaaatcactgtcaccactgattatgatatcaagggtgacgaaaatacgattgctatgagttacaagaaactgcctgttgacgtgaagcctggaaatgtcatactctgcgcagatggtactatctctctggccgttctatcttgtgatcctgatgctggaactgtgaggtgtagatgcgagaacactgcaatgcttggtgagagaaagaactgcaatctgccaggaattgttgtggatcttcctacattgactgagaaagataaagaagacattttgggctggggtgttccaaatgatattgacatgattgctctatcctttgtccgtaaaggatcagatttggtgactgtgagacaggttcttgggcagcatgccaagcgcattaagttgatgtcaaaggttgaaaaccaagagggtgttgtaaactttgatgagatcttgagggagactgatgcttttatggttgctagaggtgatcttggaatggagattcctgttgagaagattttccttgcgcagaagatgatgatctacaagtgcaacattgctggcaaacctgttgttaccgctacccagatgctcgagtcgatgatcaaatcccctaggcccacccgcgcagaggccactgacgttgcaaatgctgttcttgatggaactgactgtgtcatgctcagtggtgagagtgctgctggagcctaccccgaggtggctgtgaagatcatggctcgtatctgcatcgaggcagagtcttccctggaccacgaggcagttttcaaggccatgatcagctccgagggcccagctaggcacagcctgatctatagaggcctcattcccctcctcgctgagggctccgcgaaggctacggattcagagtcaaccgaggtgatcctggaggctgcgctcaagtcggccgtgcagaagcaactttgcaagcctggtgatgccattgtggctctccatcgtatcggcgtcgcctccgtcatcaagatctgcatcgtgaagtgatcaccgtgacttgactcctaagtcccaggggggtggttctcaccgctgggacctatgaaacaacttttctgcctcctttttaactgcatttttcggagacagataattactgtatgttgtaagcccgcttctgttgtttgcagctgcaagatgtctttttttttgtttacatagtttttgagctggtaaatgaggagggagaggactccattgatgttagtggtaataagatttgtatctacggagttcagttaaaaggcttttctacatgaaaatggtggaatgtgctgtatgtaggttcatgcccttgtttagtgtaaagatcatgtagatagatgtcggg

SEQ ID NO: 15378 - DNA, 2392 bp, Zea Mays
ccatccgtccacggaaagggaaagacatgcatcccagtccggcggccaccacggatgggtctctttgatcgcctcctcctcggcggcggcgatcgcagcagggggacggaggaccaggagcgcggcggcgccgaggcggccgccatggggtcagacgtgccgccgccgtcggccatccctcccctctcagccgccgcggcctccgtcgttcgccagtgcgcccggatcgcgggcgtgccggtggaccagctcctccggcgggtggacgcggaggagcaggcccgcgggccgctggagtacgccaggagcgtcgtggagtactgctcccacgtcgccctgcgcgtggaggccaggcgcccggaccacctcggcgacagggagttccacacgctcacctacgacatgatgctcgcctgggaggcgcccgacgaggagaccgacgccgtgttccagaaaacggcattcagtgttctccgtggagacgacgcggacgacgacgacagtgggtccatcttctattcaagcccgacgcagatggccattcaggcggacagttggacccgaggcatttgccaagattgctcctgcatgccctgccatggcacaccccatcaccgtccgtaacctgttcgacgcgatcaccaactccaccggaggacggctgcatttccttatctaccacaagtatctcagaatcctgaacgaggcgttctgctctgcgaagcgtgtgctaggggggcacagagccccagccctccagctctccgacgacgaagtgatccttgacatccacggcgctgcgacgaccaagccagttctccagcacatcggcacgtccacatggcctgggaggctcacgctgacgaaccacgcgctctacttcgaggctatcggcgtcgatttctcgtatggagaggccgtcgtgtatgatctggcaagggacttgaaacagtcggtgaaacgagagtccactgggccatggggtgctcacctcttcgacaaagctgtcatgtacaagtccagcctgacaagtgaacccgtgttctttgaattcccacaattcaaaggccacacccgccgagactactggtttgcggccatcaaagaggtgctgcacgcacacaagttcatcaggaagtacaagctcgccggtttccagaaggcggaggcgctctccgtcgcaacgctagggattctgcggtaccgcaccgtgaaagaggggttccacatactgccggcgcatttcaagaccatcctcgccttcaacctggcggagaaactgcccaagggggacaagattctggaggcactgtatggccagctcaagcagcactgcccgaggttcagaggaggccaggatcttggccagagcagttccgaggaactgatgcttgctgaccccttcccgctctctgcgtataccatggtgacgatgggtttgctgaagctgaaagaggaggacaacgccgaggagagggatttcgctgtgcgtgacgtgcagattggagggactagctcagttcagatggctctagagcgttcggttgggtattcgggtagagtggaagcggcaagggctacgcttgatcaggtcagagtggaagacatagacactaatgtagctgtcctaaaggaactactatttcctctgattgaaataggcaaaaggttgctcgctttgtctgggtgggaagagcccttcaagtcttatgtcttcttgttatgtttcctctacatggcttacagtggttggatctggctcatgtttcctggcttcttgcttggctctactatcttcatgctatggaacaaacactataggcatgggcgctcggtaggagcgtttgagatcataactcctcctcgaagaagaaccgtggaacagctcttagctctgcaacaggccatctcgcagctggaagcgcacgtgcaagcaggaaacatttttctcctgaagctccggtccctcatgcttgcagcgtttcctcagagcaccaacagagttgcagctgcactggttgctgtggctgcgatattcacgttcgtgcccttgaggaccatcgttctactaatccttctagaagaatacacaagacagatgccggtgaggaagaagagcagtgagaagctggtgaggagattgcgggagtggtggctccggatcccggctgcgcctgtacagcttgtaaagcctcgggagacgaggagatggagatccaggttgagatgagataagtaagccaaaaaatgttggtttgtttgcttttagttttacaccatgttccgtgcacattctttgagcggtagggatcttggtatcacgccttcaagtgaaagcaagaccttggtgtaagctgggactggttttaacaagcagaaacagatgaagaaa

SEQ ID NO: 15379 - DNA, 1984 bp, Zea Mays
gccactctcccgctcctcccatgtagccgccgctccctcccgtcgccagccgccgctctctgcccccacagcttctctctccctcccgcagctccttctctctccctcccgtggctctccttcctcctggccggccccagccgtgcaccgccacgccctttgaacaccgcctcgccctgcgcgcaccgccaccgcaccttggcataagtcaaggagtccatggagcgacgccttaactgggttcaagccttcaaggcgccagggcgacaccatagaggatgaagcggacgccttaggctacggagtaaggcgacctggatgcgttatcgcagatcctcgccttaccgtctatgcgtcgcttaagcgacgccttaacagcaacatcccttgaacaaagcatctacaagactgcaacattaggacagttaggcttgaaaaatgatgctggcgccgaggtaaatgggtttatgaaattatttctaggtacgaaattgctttcagctttcctctacaaattgcaatcaatttttgagatattgagtttgataatatatgtgttcttcattttcttgtaaccgttgcacactaacattttatcgaattatttgtgtgccgtcacaatgtacgagcgctctactaagcaaatatgtcaaacaagcaaaaagatgtctgatcttccttccagatgattaatatggtaagatggactgaattcaggcttgattcttttatactacattattcaaacatacaatcaacacagattacgatccatatatgctacatcagcaaataagtaacattagcgaataagtaacatttccttacaacagaaatggatatttatattctttctacacaagtggaacatgacagacttgggtcgatttgtaatcttttgaaatatttcttttacttctgcatattcttgcacacagtcttctctttttagaaggtgtacacttgttcatgttgatatccatatatgctaccttagtgggtaaacatttacttaaaggagacattggttattactgcaaaaatgcaactatatcatttctacatgactacaccagtgcaccatgttaattctttcagatgatttctgcctgttttgcatagccttgtatgttgtcttcttttatactgagggagctcagtggggaagacctaaaggtgaagactgtaagtttgtcattgagtcattttgactttttattgaatgataacatggatctgattgtccttttctgagtttttaattccttcctatttagtgccatttggacatgtggtagctggctgtcacattgatctgaattcctatatatattctttagatggcataatcattttatcgttgcaaaagttgtttcagataaaattatgtctgcataggttcccttgccccaaagaaactccatgttcagttcaagaccaaagtacaaaaagaaatcttcaacctacaatactactactccatttcattccttacaagcggaaaaactcagggagaagctgaggcaggagtgcctgcggaaggggacggaactggcgcatggggtggctgacgccctcttcgctgtaccacccaccgaggacctcgacggccctatcgtacacctcccattgcccgttgtccgactcccgcgcgagaagcatcttggtgctgggacctcactgccacgattagtagctgcaaaggttggggcagatgtaacactaacagacattgcgcagaatgcagaagtgagttccaattcgtctttggaatccttattgtttgatccttgtcagagcttttccagtatggtttggacctcactgccaggattagtagcttttaccaagtcttttggatcatgtggtggatatattgtcgcatcaaaggagataattcaacaccttaagcatagttgtccggcccatctatatgctacttccatgtcgccaccagcagtccaacaagaaaatatcaaaattg

SEQ ID NO: 15380 - DNA, 1277 bp, Zea Mays
ccgctctctgcccccacagcttctctctccctcccgcagctccttctctctccctcccgtggctctccttcctcctggccggccccagccgtgcaccgccacgccctttgaacaccgcctcgccctgcgcgcaccgccaccgcaccttggcataagtcaaggagtccatggagcgacgccttaactgggttcaagccttcaaggcgccagggcgacaccatagaggatgaagcggacgccttaggctacggagtaaggcgacctggatgcgttatcgcagatcctcgccttaccgtctatgcgtcgcttaagcgacgccttaacaggtctgtcaccaagagctggagttcaattctgcattttgctgcattttagatggcctgtaactcctaattcaccacgcacaggtactaactttttaaattcatcactgtcgtcgttgtcgcgcataagttttcgctctcctgcctaggctgaggcatcgagcgcgtcactgtcttcctcgacctctacaactagggatctacgtgaacatcaagattattgatgaagcaatattaattggagctgccctcaatgctggcgccgaggtaaatgggtttatgaaattatttctaggtacgaaattgctttcagctttcctctacaaattgcaatcaatttttgagatattgagtttgataatatatgtgttcttcattttcttgtaaccgttgcacactaacattttatcgaattatttgtgtgccgtcacaatgtacgagcgctctactaagcaaatatgtcaaacaagcaaaaagatgtctgatcttccttccagatgattaatatggttcccttgccccaaagaaactccatgttcagttcaagaccaaagtacaaaaagaaatcttcaacctacaatactactactccatttcattccttacaagcggaaaaactcagggagaagctgaggcaggagtgcctgcggaaggggacggaactggcgcatggggtggctgacgccctcttcgctgtaccacccaccgaggacctcgacggccctatcgtacacctcccattgcccgttgtccgactcccgcgcgagaagcatcttggtgctgggacctcactgccacgattagtagctgcaaaggttggggcagatgtaacactaacagacattgcgcagaatgcagaagagataattcaacaccttaagcatagttgtccggcccatctatatgctacttccatgtcgccaccagcagtccaacaagaaaatatcaaaattg

SEQ ID NO: 15381 - DNA, 369 bp, Zea Mays
gccgggcccaatctcatcgcagatcacggcgacaccgcggcgccaccaacgggaccccctgcccgcccttgcagcccggatctcgcgccccgccagtccctaacacgaggcggccgtacacactgcccggtgggggcaggcgccgccgctcggggtgacgcggagcagatgcgaagtgcgctggctggaggagggatgcggccgcgctggctggaggaggggatgtggctgcgctttcgggtttggtgcgcggtcgaggtggagggaggacggggaggggaaacggagctgtctggttggggccggccgggcgctgtgcggtgggggtggggaaggcaggacgcaggaggtggaagacgagagagatgg

SEQ ID NO: 15382 - DNA, 1314 bp, Zea Mays
ctcacccacgctccaaataaggcgcgcacgcaatccctgcgatggcgaggccaacccagaaatctcgccgcaatcccaccagcgtccttccacgcccttcaatcgcccaaattggcaccgcgaaagctgcaggcgaggcttatttggagcgtgagcgaaaaaatggagaatggcacagataatggagaatgggcatctcagtttctggacagataatggagaatggcacctctacaaccgctgattcttgttgccggaggaccgggacgggagtggcaccggcagcaagggtccgggcatccaactcctacctctacctcctcgccaagggcttgaacatcgtctaccagttctgcaaggcgtagagcgagatcgacaattacctacacctcatcccactcatcacgctcatcgacaatgcccgcattcgggtcggtaatctgctttcacctctctctcccttttctaccctagactggatatgggccttgtaggccttttcaatcagaaacactgatttcatatctgatgagaatatcctggtatcggggattgggtctcttggggtgcctagaatatcttcttttgaggttctaatagtcactacgggtgatttcatatctgatgagaatatcctggtatcgaggtttgggtctcttggggtgcctagaatctttgacgttttcattttttctacgcacccgcaatgttgtagttttatctttttttagatggggtaatgcatgtgaacctgtagatagttggtaggctaagttgaattctatatagtgtcgccaattgttttgctccagtgaaatgccattttttcttacctataccatgtttgtcttaatcttcatcttttcttgtcctagcgtttccctgtttccacatgttaaagtattgagagggaccaatgtgaatgttcttttgatgaggaagacaagaaagttcaagatgctctgttaaatcctgacccttgcacgaatcctacaatatagtgctcaagaagactctgtcatgctcctatccaaacttgtttttcaatgaggccctccaaaaggaaagtgagaagcttcaggttgagcttcaaagatcacagatcaacatgcatctgggtttgtgtgaggttattcaatactttaacgtgtggaaacagggaaagcaaattataaatcgttgagtgaagcggggtgaaaaaagcgcctgactgaagagtagtattatgttactcaacaaaagggcactgaaagagcattcacggggtctgtcaccaagagctggagttcaattctgcattttgctgcattttag

SEQ ID NO: 15383 - DNA, 909 bp, Zea Mays
atgtatcctgacgatgctggcgccgaggtaaatgggtttatgaaattatttctaggtacgaaattgctttcagctttcctctacaaattgcaatcaatttttgagatattgagtttgataatatatgtgttcttcattttcttgtaaccgttgcacactaacattttatcgaattatttgtgtgccgtcacaatgtacgagcgctctactaagcaaatatgtcaaacaagcaaaaagatgtctgatcttccttccagatgattaatatgccttgtatgttgtcttcttttatactgagggagctcagtggggaagacctaaaggttcccttgccccaaagaaactccatgttcagttcaagaccaaagtacaaaaagaaatcttcaacctacaatactactactccatttcattccttacaagcggaaaaactcagggagaagctgaggcaggagtgcctgcggaaggggacggaactggcgcatggggtggctgacgccctcttcgctgtaccacccaccgaggacctcgacggccctatcgtacacctcccattgcccgttgtccgactcccgcgcgagaagcatcttggtgctgggacctcactgccacgattagtagctgcaaaggttggggcagatgtaacactaacagacattgcgcagaatgcagaagtgagttccaattcgtctttggaatccttattgtttgatccttgtcagagcttttccagtatggtttggacctcactgccaggattagtagcttttaccaagtcttttggatcatgtggtggatatattgtcgcatcaaaggagataattcaacaccttaagcatagttgtccggcccatctatatgctacttccatgtcgccaccagcagtccaacaagaaaatatcaaaattg

SEQ ID NO: 15384 - DNA, 1474 bp, Zea Mays
atgtatcctgacgatgctggcgccgaggtaaatgggtttatgaaattatttctaggtacgaaattgctttcagctttcctctacaaattgcaatcaatttttgagatattgagtttgataatatatgtgttcttcattttcttgtaaccgttgcacactaacattttatcgaattatttgtgtgccgtcacaatgtacgagcgctctactaagcaaatatgtcaaacaagcaaaaagatgtctgatcttccttccagatgattaatatggtaagatggactgaattcaggcttgattcttttatactacattattcaaacatacaatcaacacagattacgatccatatatgctacatcagcaaataagtaacattagcgaataagtaacatttccttacaacagaaatggatatttatattctttctacacaagtggaacatgacagacttgggtcgatttgtaatcttttgaaatatttcttttacttctgcatattcttgcacacagtcttctctttttagaaggtgtacacttgttcatgttgatatccatatatgctaccttagtgggtaaacatttacttaaaggagacattggttattactgcaaaaatgcaactatatcatttctacatgactacaccagtgcaccatgttaattctttcagatgatttctgcctgttttgcatagccttgtatgttgtcttcttttatactgagggagctcagtggggaagacctaaaggtgaagactgtaagtttgtcattgagtcattttgactttttattgaatgataacatggatctgattgtccttttctgagtttttaattccttcctatttagtgccatttggacatgtggtagctggctgtcacattgatctgaattcctatatatattctttagatggcataatcattttatcgttgcaaaagttgtttcagataaaattatgtctgcataggttcccttgccccaaagaaactccatgttcagttcaagaccaaagtacaaaaagaaatcttcaacctacaatactactactccatttcattccttacaagcggaaaaactcagggagaagctgaggcaggagtgcctgcggaaggggacggaactggcgcatggggtggctgacgccctcttcgctgtaccacccaccgaggacctcgacggccctatcgtacacctcccattgcccgttgtccgactcccgcgcgagaagcatcttggtgctgggacctcactgccacgattagtagctgcaaaggttggggcagatgtaacactaacagacattgcgcagaatgcagaagattagtagcttttaccaagtcttttggatcatgtggtggatatattgtcgcatcaaaggagataattcaacaccttaagcatagttgtccggcccatctatatgctacttccatgtcgccaccagcagtccaacaagaaaatatcaaaattg

SEQ ID NO: 15385 - DNA, 773 bp, Zea Mays
atgtatcctgacgatgctggcgccgaggtaaatgggtttatgaaattatttctaggtacgaaattgctttcagctttcctctacaaattgcaatcaatttttgagatattgagtttgataatatatgtgttcttcattttcttgtaaccgttgcacactaacattttatcgaattatttgtgtgccgtcacaatgtacgagcgctctactaagcaaatatgtcaaacaagcaaaaagatgtctgatcttccttccagatgattaatatggttcccttgccccaaagaaactccatgttcagttcaagaccaaagtacaaaaagaaatcttcaacctacaatactactactccatttcattccttacaagcggaaaaactcagggagaagctgaggcaggagtgcctgcggaaggggacggaactggcgcatggggtggctgacgccctcttcgctgtaccacccaccgaggacctcgacggccctatcgtacacctcccattgcccgttgtccgactcccgcgcgagaagcatcttggtgctgggacctcactgccacgattagtagctgcaaaggttggggcagatgtaacactaacagacattgcgcagaatgcagaagattagtagcttttaccaagtcttttggatcatgtggtggatatattgtcgcatcaaaggagataattcaacaccttaagcatagttgtccggcccatctatatgctacttccatgtcgccaccagcagtccaacaagaaaatatcaaaattg

SEQ ID NO: 15386 - DNA, 676 bp, Zea Mays
atgtatcctgacgatgctggcgccgagccttgtatgttgtcttcttttatactgagggagctcagtggggaagacctaaaggtgaagactgttcccttgccccaaagaaactccatgttcagttcaagaccaaagtacaaaaagaaatcttcaacctacaatactactactccatttcattccttacaagcggaaaaactcagggagaagctgaggcaggagtgcctgcggaaggggacggaactggcgcatggggtggctgacgccctcttcgctgtaccacccaccgaggacctcgacggccctatcgtacacctcccattgcccgttgtccgactcccgcgcgagaagcatcttggtgctgggacctcactgccacgattagtagctgcaaaggttggggcagatgtaacactaacagacattgcgcagaatgcagaagtgagttccaattcgtctttggaatccttattgtttgatccttgtcagagcttttccagtatggtttggacctcactgccaggattagtagcttttaccaagtcttttggatcatgtggtggatatattgtcgcatcaaaggagataattcaacaccttaagcatagttgtccggcccatctatatgctacttccatgtcgccaccagcagtccaacaagaaaatatcaaaattg

SEQ ID NO: 15387 - DNA, 1094 bp, Zea Mays
atgtatcctgacgatgctggcgccgagccttgtatgttgtcttcttttatactgagggagctcagtggggaagacctaaaggtgaagactgtaagtttgtcattgagtcattttgactttttattgaatgataacatggatctgattgtccttttctgagtttttaattccttcctatttagtgccatttggacatgtggtagctggctgtcacattgatctgaattcctatatatattctttagatggcataatcattttatcgttgcaaaagttgtttcagataaaattatgtctgcataggttcccttgccccaaagaaactccatgttcagttcaagaccaaagtacaaaaagaaatcttcaacctacaatactactactccatttcattccttacaaggtttgtctttctttgatacaaattgcagaatgcactgaatagccttgaaatctttaaaaaagttgtactcacaccagcgcactaatgtcagttaggccatcaatgaagttatagaagtcactgatgtcataagttaggccattgggttgatatccctaatttttctttcataaagcccacaaatccctaccatttctgtttactgtaaaaagtaacttgtgtactttagaagggaaataaatcaagaagcatttctaactagaagttctatttaaatttttctgaagcggaaaaactcagggagaagctgaggcaggagtgcctgcggaaggggacggaactggcgcatggggtggctgacgccctcttcgctgtaccacccaccgaggacctcgacggccctatcgtacacctcccattgcccgttgtccgactcccgcgcgagaagcatcttggtgctgggacctcactgccacgattagtagctgcaaaggttggggcagatgtaacactaacagacattgcgcagaatgcagaagattagtagcttttaccaagtcttttggatcatgtggtggatatattgtcgcatcaaaggagataattcaacaccttaagcatagttgtccggcccatctatatgctacttccatgtcgccaccagcagtccaacaagaaaatatcaaaattg

SEQ ID NO: 15388 - DNA, 884 bp, Zea Mays
atgtatcctgacgatgctggcgccgaggtaaatgggtttatgaaattatttctaggtacgaaattgctttcagctttcctctacaaattgcaatcaatttttgagatattgagtttgataatatatgtgttcttcattttcttgtaaccgttgcacactaacattttatcgaattatttgtgtgccgtcacaatgtacgagcgctctactaagcaaatatgtcaaacaagcaaaaagatgtctgatcttccttccagatgattaatatgttgtttcagataaaattatgtctgcataggttcccttgccccaaagaaactccatgttcagttcaagaccaaagtacaaaaagaaatcttcaacctacaatactactactccatttcattccttacaagcggaaaaactcagggagaagctgaggcaggagtgcctgcggaaggggacggaactggcgcatggggtggctgacgccctcttcgctgtaccacccaccgaggacctcgacggccctatcgtacacctcccattgcccgttgtccgactcccgcgcgagaagcatcttggtgctgggacctcactgccacgattagtagctgcaaaggttggggcagatgtaacactaacagacattgcgcagaatgcagaagtgagttccaattcgtctttggaatccttattgtttgatccttgtcagagcttttccagtatggtttggacctcactgccaggattagtagcttttaccaagtcttttggatcatgtggtggatatattgtcgcatcaaaggagataattcaacaccttaagcatagttgtccggcccatctatatgctacttccatgtcgccaccagcagtccaacaagaaaatatcaaaattg

SEQ ID NO: 15389 - DNA, 987 bp, Zea Mays
atgtatcctgacgatgctggcgccgaggtaaatgggtttatgaaattatttctaggtacgaaattgctttcagctttcctctacaaattgcaatcaatttttgagatattgagtttgataatatatgtgttcttcattttcttgtaaccgttgcacactaacattttatcgaattatttgtgtgccgtcacaatgtacgagcgctctactaagcaaatatgtcaaacaagcaaaaagatgtctgatcttccttccagatgattaatatggttcccttgccccaaagaaactccatgttcagttcaagaccaaagtacaaaaagaaatcttcaacctacaatactactactccatttcattccttacaagcggaaaaactcagggagaagctgaggcaggagtgcctgcggaaggggacggaactggcgcatggggtggctgacgccctcttcgctgtaccacccaccgaggacctcgacggccctatcgtacacctcccattgcccgttgtccgactcccgcgcgagaagcatgtgtccgaggaggccggaaatcatctctttgtggagtcatgcattcctctacacgactacatgtacattattgtttcacaggacaatgctacagttacactcttatctaattcgcacgtatcatttttgcagcttggtgctgggacctcactgccacgattagtagctgcaaaggttggggcagatgtaacactaacagacattgcgcagaatgcagaagtgagttccaattcgtctttggaatccttattgtttgatccttgtcagagcttttccagtatggtttggacctcactgccaggattagtagcttttaccaagtcttttggatcatgtggtggatatattgtcgcatcaaaggagataattcaacaccttaagcatagttgtccggcccatctatatgctacttccatgtcgccaccagcagtccaacaagaaaatatcaaaattg

SEQ ID NO: 15390 - DNA, 1418 bp, Zea Mays
atgtatcctgacgatgctggcgccgaggtaaatgggtttatgaaattatttctaggtacgaaattgctttcagctttcctctacaaattgcaatcaatttttgagatattgagtttgataatatatgtgttcttcattttcttgtaaccgttgcacactaacattttatcgaattatttgtgtgccgtcacaatgtacgagcgctctactaagcaaatatgtcaaacaagcaaaaagatgtctgatcttccttccagatgattaatatgccttgtatgttgtcttcttttatactgagggagctcagtggggaagacctaaaggtgaagactgtaagtttgtcattgagtcattttgactttttattgaatgataacatggatctgattgtccttttctgagtttttaattccttcctatttagtgccatttggacatgtggtagctggctgtcacattgatctgaattcctatatatattctttagatggcataatcattttatcgttgcaaaagttgtttcagataaaattatgtctgcataggttcccttgccccaaagaaactccatgttcagttcaagaccaaagtacaaaaagaaatcttcaacctacaatactactactccatttcattccttacaaggtttgtctttctttgatacaaattgcagaatgcactgaatagccttgaaatctttaaaaaagttgtactcacaccagcgcactaatgtcagttaggccatcaatgaagttatagaagtcactgatgtcataagttaggccattgggttgatatccctaatttttctttcataaagcccacaaatccctaccatttctgtttactgtaaaaagtaacttgtgtactttagaagggaaataaatcaagaagcatttctaactagaagttctatttaaatttttctgaagcggaaaaactcagggagaagctgaggcaggagtgcctgcggaaggggacggaactggcgcatggggtggctgacgccctcttcgctgtaccacccaccgaggacctcgacggccctatcgtacacctcccattgcccgttgtccgactcccgcgcgagaagcatcttggtgctgggacctcactgccacgattagtagctgcaaaggttggggcagatgtaacactaacagacattgcgcagaatgcagaagtgagttccaattcgtctttggaatccttattgtttgatccttgtcagagcttttccagtatggtttggacctcactgccaggattagtagcttttaccaagtcttttggatcatgtggtggatatattgtcgcatcaaaggagataattcaacaccttaagcatagttgtccggcccatctatatgctacttccatgtcgccaccagcagtccaacaagaaaatatcaaaattg

SEQ ID NO: 15391 - DNA, 807 bp, Zea Mays
atgtatcctgacgatgctggcgccgagccttgtatgttgtcttcttttatactgagggagctcagtggggaagacctaaaggtgaagactgtaagtttgtcattgagtcattttgactttttattgaatgataacatggatctgattgtccttttctgagtttttaattccttcctatttagtgccatttggacatgtggtagctggctgtcacattgatctgaattcctatatatattctttagatggcataatcattttatcgttgcaaaagttgtttcagataaaattatgtctgcataggttcccttgccccaaagaaactccatgttcagttcaagaccaaagtacaaaaagaaatcttcaacctacaatactactactccatttcattccttacaagcggaaaaactcagggagaagctgaggcaggagtgcctgcggaaggggacggaactggcgcatggggtggctgacgccctcttcgctgtaccacccaccgaggacctcgacggccctatcgtacacctcccattgcccgttgtccgactcccgcgcgagaagcatcttggtgctgggacctcactgccacgattagtagctgcaaaggttggggcagatgtaacactaacagacattgcgcagaatgcagaagattagtagcttttaccaagtcttttggatcatgtggtggatatattgtcgcatcaaaggagataattcaacaccttaagcatagttgtccggcccatctatatgctacttccatgtcgccaccagcagtccaacaagaaaatatcaaaattg

SEQ ID NO: 15392 - DNA, 667 bp, Zea Mays
atgtatcctgacgatgctggcgccgagccttgtatgttgtcttcttttatactgagggagctcagtggggaagacctaaaggttcccttgccccaaagaaactccatgttcagttcaagaccaaagtacaaaaagaaatcttcaacctacaatactactactccatttcattccttacaagcggaaaaactcagggagaagctgaggcaggagtgcctgcggaaggggacggaactggcgcatggggtggctgacgccctcttcgctgtaccacccaccgaggacctcgacggccctatcgtacacctcccattgcccgttgtccgactcccgcgcgagaagcatcttggtgctgggacctcactgccacgattagtagctgcaaaggttggggcagatgtaacactaacagacattgcgcagaatgcagaagtgagttccaattcgtctttggaatccttattgtttgatccttgtcagagcttttccagtatggtttggacctcactgccaggattagtagcttttaccaagtcttttggatcatgtggtggatatattgtcgcatcaaaggagataattcaacaccttaagcatagttgtccggcccatctatatgctacttccatgtcgccaccagcagtccaacaagaaaatatcaaaattg

SEQ ID NO: 15393 - DNA, 762 bp, Zea Mays
atgtatcctgacgatgctggcgccgaggtaaatgggtttatgaaattatttctaggtacgaaattgctttcagctttcctctacaaattgcaatcaatttttgagatattgagtttgataatatatgtgttcttcattttcttgtaaccgttgcacactaacattttatcgaattatttgtgtgccgtcacaatgtacgagcgctctactaagcaaatatgtcaaacaagcaaaaagatgtctgatcttccttccagatgattaatatggttcccttgccccaaagaaactccatgttcagttcaagaccaaagtacaaaaagaaatcttcaacctacaatactactactccatttcattccttacaagcggaaaaactcagggagaagctgaggcaggagtgcctgcggaaggggacggaactggcgcatggggtggctgacgccctcttcgctgtaccacccaccgaggacctcgacggccctatcgtacacctcccattgcccgttgtccgactcccgcgcgagaagcatcttggtgctgggacctcactgccacgattagtagctgcaaagagcttttccagtatggtttggacctcactgccaggattagtagcttttaccaagtcttttggatcatgtggtggatatattgtcgcatcaaaggagataattcaacaccttaagcatagttgtccggcccatctatatgctacttccatgtcgccaccagcagtccaacaagaaaatatcaaaattg

SEQ ID NO: 15394 - DNA, 889 bp, Zea Mays
attatttctaggtacgaaattgctttcagctttcctctacaaattgcaatcaatttttgagatattgagtttgataatatatgtgttcttcattttcttgtaaccgttgcacactaacattttatcgaattatttgtgtgccgtcacaatgtacgagcgctctactaagcaaatatgtcaaacaagcaaaaagatgtctgatcttccttccagatgattaatatgatgatttctgcctgttttgcatagccttgtatgttgtcttcttttatactgagggagctcagtggggaagacctaaaggttcccttgccccaaagaaactccatgttcagttcaagaccaaagtacaaaaagaaatcttcaacctacaatactactactccatttcattccttacaagcggaaaaactcagggagaagctgaggcaggagtgcctgcggaaggggacggaactggcgcatggggtggctgacgccctcttcgctgtaccacccaccgaggacctcgacggccctatcgtacacctcccattgcccgttgtccgactcccgcgcgagaagcatcttggtgctgggacctcactgccacgattagtagctgcaaaggttggggcagatgtaacactaacagacattgcgcagaatgcagaagtgagttccaattcgtctttggaatccttattgtttgatccttgtcagagcttttccagtatggtttggacctcactgccaggattagtagcttttaccaagtcttttggatcatgtggtggatatattgtcgcatcaaaggagataattcaacaccttaagcatagttgtccggcccatctatatgctacttccatgtcgccaccagcagtccaacaagaaaatatcaaaattg

SEQ ID NO: 15395 - DNA, 2805 bp, Zea Mays
cccagctggagtccgaaccgaaggagcagagtgacgacgccccgccgcacgcatcgcagtcgcagcagcagtaacaaacaaggcacaagccgagcggaagctgtaacaacgacacgaaaccaacaaacctcgcgtataaatccgctcgccgtttgggcgcgccccaccgctctggtctgctcgccgccgacagaccacagccccggcccgcgcgcgccttgggtgggtgccggtgccggagcgacggcaatgccggaggcggcgcgggcgcggggcctgcgggaaccggcgggcgagggggaggcggagcaggaggacgagttctacgagtcgctggatcggatcctctcctcctcctgctcctccgcctccgcctccgacgacgacgccgaccaccgccgccgccgcagcaggcgccaccacctcctccaccagcaccagcaccagcaccagccgctgtcctccgcgtacgacgtctggatctccgagccaacctccgtggaggagcgccgccgcctcctgctccagcgcctgggcctcgcctccgacccgccgcctcgccgctcgccgtcgcctcccgcgtctaccccggcgtcgccaccggcgcccccggaggagcccagatccggcgccgggctcgggagccccccgctgacgcggaaccccagctccagcggcggggagcagcaatgccggatccggaacctggacgacggcacggagttcgaggtcggggaggtgcacgaggaggaggtggtgcgggaggtgggcaccggccgccacctcaccttcgaggagttcgagctctgcgttggccgctccccgatcgtgcacgagctcatgaagcggaccaccaccgcggcgtccgcgtccgcctccaatcacgccgcgcccgcggccagcaagccccggaggaagcccgggggcgggtggctgcggggcatcaggcagctggcgggcaccgtcgcgtacgggaggcgcggcgccgacgatggggacaaggagaaggagaaggagaagaaggagagggaggcgcggcgcctcagctctgccaccgatgacagcctcgatggcgccggctcgcgcgatgaattggctgcccactcgggctccgtgtggtgcatcaacttcagcctggatggacgataccttgccactgctggagaggatcgtgtgatccatgtttgggaggtgtctgagggagacagaaagggtgagttgctcggggaaggttcgctggcaaaggagaatggtggtggctgcagcccgtttctcacgtttcttgggaatgattcaccggagatcgctgcattgtcattcacctgcgctgacatggataagaagagaaggctgaggaagcagagcaatcggaagtctgtagggtctgatcatctggtcgttcctgagtgtgtgtttggtttcagagacaagccagtttgctcgcttctggggcatgccgctgatgttcttgatctgtcatggtccaaatctcagtacctgatctcatcctccatggacaaaactgttaagctctgggacatcactaccagtacctgtttaaaaacattctcacatacggactatgtgacttgcatccagttcaatcctgtggatgacaacttcttcattagtggatcactggatgagaaagttcggatttggagtgtccgtgaccgtaagattgaggattggaatgatcttcatgagatggttaccgctgcttgttattcccctgatggacaggttgcaatggtgggctctcacaagggatgctgtcatatatttgatacatctgagaagaagcttctgtacaaaagtcagatagatttaagaattaggaaaaagaaatctggccagaagaagataactggattccagtttgctcctggaagctcatcggaagttctgattacttctgcagattcaagaatacgtgttgttaacggcgatgaatttgttcacaagtttaaagggcttcggaacacgagtagccaaatctcagcttctgtagctccgaatgggaaatacatcatctgtgccagcgaggattctcacgtctatgtgtggagacatgacaacagttcccaccctagtaggaacaggatcacagttgatgtaaccaactcatatgagcatttccactgccatggcgtgaccgtggctgtcacatggcctggtgctgaagcccggggctcgtttggatctcgaagcagcaggcacagcgattcagatggagcagtgaactctggccgagacatcccagctgagaacagccagcacaattctgacgcaggcaccagtagacatccaggcgatagagcatccacatcctggcctgacgaaaagttaccgtcagccaagagcagccctggtcactgctcgtccgatctttgcattggagctatggatgtccagcgccggtctgcgtgggggttggtgattgtcacagctgggcggggaggcgagatcagggtgttccagaattttggcttcccggttcaagtgtaaagctagcgtgagtgagatcatgcagatagggtttgtttggttctttactgtatataccatcggtagatgtagattgccgacagttttacgaaaacttccctgtgtttctctgtctccttgggtgcttcaagattgtacccccagaaccacactatcatatagttagcaatatcacttgttgatacaatacacagagctctgtaactgtatgcttagcacacatcaacttaatttgttctcatcatgtatttttctacacacagtgatgtacaaaatgaaaatatttttcaaattcat

SEQ ID NO: 15396 - DNA, 2728 bp, Zea Mays
cgacgccccgccgcacgcatcgcagtcgcagcagcagtaacaaacaaggcacaagccgagcggaagctgtaacaacgacacgaaaccaacaaacctcgcgtataaatccgctcgccgtttgggcgcgccccaccgctctggtctgctcgccgccgacagaccacagccccggcccgcgcgcgccttgggtgggtgccggtgccggagcgacggcaatgccggaggcggcgcgggcgcggggcctgcgggaaccggcgggcgagggggaggcggagcaggaggacgagttctacgagtcgctggatcggatcctctcctcctcctgctcctccgcctccgcctccgacgacgacgccgaccaccgccgccgccgcagcaggcgccaccacctcctccaccagcaccagcaccagcaccagccgctgtcctccgcgtacgacgtctggatctccgagccaacctccgtggaggagcgccgccgcctcctgctccagcgcctgggcctcgcctccgacccgccgcctcgccgctcgccgtcgcctcccgcgtctaccccggcgtcgccaccggcgcccccggaggagcccagatccggcgccgggctcgggagccccccgctgacgcggaaccccagctccagcggcggggagcagcaatgccggatccggaacctggacgacggcacggagttcgaggtcggggaggtgcacgaggaggaggtggtgcgggaggtgggcaccggccgccacctcaccttcgaggagttcgagctctgcgttggccgctccccgatcgtgcacgagctcatgaagcggaccaccaccgcggcgtccgcgtccgcctccaatcacgccgcgcccgcggccagcaagccccggaggaagcccgggggcgggtggctgcggggcatcaggcagctggcgggcaccgtcgcgtacgggaggcgcggcgccgacgatggggacaaggagaaggagaaggagaagaaggagagggaggcgcggcgcctcagctctgccaccgatgacagcctcgatggcgccggctcgcgcgatgaattggctgcccactcgggctccgtgtggtgcatcaacttcagcctggatggacgataccttgccactgctggagaggatcgtgtgatccatgtttgggaggtgtctgagggagacagaaagggtgagttgctcggggaaggttcgctggcaaaggagaatggtggtggctgcagcccgtttctcacgtttcttgggaatgattcaccggagatcgctgcattgtcattcacctgcgctgacatggataagaagagaaggctgaggaagcagagcaatcggaagtctgtagggtctgatcatctggtcgttcctgagtgtgtgtttggtttcagagacaagccagtttgctcgcttctggggcatgccgctgatgttcttgatctgtcatggtccaaatctcagtacctgatctcatcctccatggacaaaactgttaagctctgggacatcactaccagtacctgtttaaaaacattctcacatacggactatgtgacttgcatccagttcaatcctgtggatgacaacttcttcattagtggatcactggatgagaaagttcggatttggagtgtccgtgaccgtaagattgaggattggaatgatcttcatgagatggttaccgctgcttgttattcccctgatggacaggttgcaatggtgggctctcacaagggatgctgtcatatatttgatacatctgagaagaagcttctgtacaaaagtcagatagatttaagaattaggaaaaagaaatctggccagaagaagataactggattccagattcaagaatacgtgttgttaacggcgatgaatttgttcacaagtttaaagggcttcggaacacgagtagccaaatctcagcttctgtagctccgaatgggaaatacatcatctgtgccagcgaggattctcacgtctatgtgtggagacatgacaacagttcccaccctagtaggaacaggatcacagttgatgtaaccaactcatatgagcatttccactgccatggcgtgaccgtggctgtcacatggcctggtgctgaagcccggggctcgtttggatctcgaagcagcaggcacagcgattcagatggagcagtgaactctggccgagacatcccagctgagaacagccagcacaattctgacgcaggcaccagtagacatccaggcgatagagcatccacatcctggcctgacgaaaagttaccgtcagccaagagcagccctggtcactgctcgtccgatctttgcattggagctatggatgtccagcgccggtctgcgtgggggttggtgattgtcacagctgggcggggaggcgagatcagggtgttccagaattttggcttcccggttcaagtgtaaagctagcgtgagtgagatcatgcagatagggtttgtttggttctttactgtatataccatcggtagatgtagattgccgacagttttacgaaaacttccctgtgtttctctgtctccttgggtgcttcaagattgtacccccagaaccacactatcatatagttagcaatatcacttgttgatacaatacacagagctctgtaactgtatgcttagcacacatcaacttaatttgttctcatcatgtatttttctacacacagtgatgtacaaaatgaaaatatttttcaaattcat

SEQ ID NO: 15397 - DNA, 1533 bp, Zea Mays
gtcgattcgagttccgctcgccttcgtcttcgtctcgacccacggcccacggcccacggtccatcagcgttcgtcctcccttcctctagcgcctgctgcctctctcactccatggcgtggatctggatggtcctcgcggcgggagccgtgctcctgtgggcgatctctttggggcgggtcctctcctccgccgcgccgtcctgtgtgccctcgagcccgcagttcatgccccctctcagcggtgacaggaggagccggaacgtgctgctggtcgtcgcccaccccgacgacgagtccatgttcttcgctccaaccattcttttcctcaagtcgaaaggccacagtattcacattctgtgcatgtctcgaggtaatgctgatggtctgggagatactcgtaaggaagaattgtaccacgcctgtgtcagcctcaagattccacatgaacaagtcaaagtcttggaccacccaaaattgcaggatggatttcatgagaaatgggaccatggactagtagcagaacttaccatggagcatgtccaactgtgggccattgacacgattgttacatttgattcatatggagtatcaggtcatccaaaccacaaagatgttcatcacggcatatggttagttcagttgtctggtttaacactgcatgattagccacatgcatgaattgctgaaatggtttgttaacattgggactccgatatgttgggcatcagacctgttgttctttgactgtgcacaacttatgcttatttcatttacttgtgtatttttatgctacacatatgcatgtcacatttatgaggtagtttcgtattttcttcactcagagtctaaaatctttatttctatatgaacagcaagtttctccatacgaacaggcaagggaacgtggaagcttgggaactagcaagtctcagtattcttcgcaagtacagtggtccgattgacatttggctttcttcattgacgtccttcgcatggacaaaacagccaatctatactctagttaacagtagcccgtccagaagctatgaggcaatggctgcacacagaagtcagtgggtttggtttagaagattgtttgtcatgttctcgagttatacatacataaatatgctacggagaatttaacatgtgatgtggcgtcataccatgataccagagcaagccgccattgtcgtctccaatgttgtacttgtgcatcgtcaattgtacatctatatgtatcactggattttagttgtacattctctatagacagtgctcatagggtgactgtagaatttcttttccccaatccagaattgcactgaatggctgaaatacagttgtctttcaaaagaaactgaaatacagtgatgctcactggcttagcttatgggtatggtcaaacgattctggttcgagtttgacgtccttggggaactgaccgctaactaatccttttgtactactgcgtctgtcccaaaagatgcaattatatgtttggatcaagtctaacttaaaaatatgttacca

SEQ ID NO: 15398 - DNA, 1219 bp, Zea Mays
gtcgattcgagttccgctcgccttcgtcttcgtctcgacccacggcccacggcccacggtccatcagcgttcgtcctcccttcctctagcgcctgctgcctctctcactccatggcgtggatctggatggtcctcgcggcgggagccgtgctcctgtgggcgatctctttggggcgggtcctctcctccgccgcgccgtcctgtgtgccctcgagcccgcagttcatgccccctctcagcggtgacaggaggagccggaacgtgctgctggtcgtcgcccaccccgacgacgagtccatgtaatgctgatggtctgggagatactcgtaaggaagaattgtaccacgcctgtgtcagcctcaagattccacatgaacaagtcaaagtcttggaccacccaaaattgcaggatggatttcatgagaaatgggaccatggactagtagcagaacttaccatggagcatgtccaactgtgggccattgacacgattgttacatttgattcatatggagtatcaggtcatccaaaccacaaagatgttcatcacggcatatgcaagtttctccatacgaacaggcaagggaacgtggaagcttgggaactagcaagtctcagtattcttcgcaagtacagtggtccgattgacatttggctttcttcattgacgtccttcgcatggacaaaacagccaatctatactctagttaacagtagcccgtccagaagctatgaggcaatggctgcacacagaagtcagtgggtttggtttagaagattgtttgtcatgttctcgagttatacatacataaatatgctacggagaatttaacatgtgatgtggcgtcataccatgataccagagcaagccgccattgtcgtctccaatgttgtacttgtgcatcgtcaattgtacatctatatgtatcactggattttagttgtacattctctatagacagtgctcatagggtgactgtagaatttcttttccccaatccagaattgcactgaatggctgaaatacagttgtctttcaaaagaaactgaaatacagtgatgctcactggcttagcttatgggtatggtcaaacgattctggttcgagtttgacgtccttggggaactgaccgctaactaatccttttgtactactgcgtctgtcccaaaagatgcaattatatgtttggatcaagtctaacttaaaaatatgttacca

SEQ ID NO: 15399 - DNA, 1147 bp, Zea Mays
cacacaaatgcgcccgcacccgccaacgccaccaccagtgacaagtcaagtccaccaggccgggccgcgaatctctgcgtccccttcgccaaccatggcctccttcttcgccgacgacggcaccgatgacctcccacgcaccacttcccaccccttcgactccgatgacttcggcgccgccgcggccgacgtcgccgccgccgacggatacggcggaaaaaatgctatggaacttgagaaaaaagaacagaaggagagggagctacgtgcccaaataattgctgaagccgaagaattcaagaaagccttttttgagaagaggatacagaactgtgcgtcaaacatggtgaacaacagagagagggagaagatttttgtagccagccaggagaaattccacgccggcgcagacaagcagtactggaaatcgatttcagatctcatcccacatgaaatagccaccatcgagaagcgggggaagaaagacaaggacaagaagccatccatcacagttgtccagggccccaagcctggcaagcccaccgacctgtcccggatgcgccatatcttggtgaagctgaagcatgctccgccgccacatatgttgcagcctccaccaccagcacctgctgctaaagagggcacaaaggatggcagcgccaaaggtggtggaaaggacggcgccaaagaaggcggcgcggcagccccagcaaacggcgccaagcagcctgctgagagccaagaaaccaccgccaatggcccctcggaggcggagaaagagcagcctgcagcctcggagtgaccggaaagggtgtctttattaagacatacacaagagccttaactgtcagtagatggaaaagcgtgttttatttcagataatttccagactcgtctttcccgcgctgctgatctttttgtagaggagatctgcatccggatgtctttacatcatagcgcagaacattcatgattgtatcaccacagcagttgtatgtttactgctttcccccttgcccaagtgttgccttcactgagatgctgcctgtgatatcaagttcagacctgaaactgttactgagagttcgactgaataatactcctatgatatgtcaccgcgctaatacgacagtaatctcaagatgtg

SEQ ID NO: 15400 - DNA, 1000 bp, Zea Mays
caactttgtcaccttgcaaaatgtgtgcacttcctaacatgatatagtctatgacacaattgtctgttgaaaaaatgctatggaacttgagaaaaaagaacagaaggagagggagctacgtgcccaaataattgctgaagccgaagaattcaagaaagccttttttgagaagaggatacagaactgtgcgtcaaacatggtgaacaacagagagagggagaagatttttgtagccagccaggagaaattccacgccggcgcagacaagcagtactggaaatcgatttcagatctcatcccacatgaaatagccaccatcgagaagcgggggaagaaagacaaggacaagaagccatccatcacagttgtccagggccccaagcctggcaagcccaccgacctgtcccggatgcgccatatcttggtgaagctgaagcatgctccgccgccacatatgttgcagcctccaccaccagcacctgctgctaaagagggcacaaaggatggcagcgccaaaggtggtggaaaggacggcgccaaagaaggcggcgcggcagccccagcaaacggcgccaagcagcctgctgagagccaagaaaccaccgccaatggcccctcggaggcggagaaagagcagcctgcagcctcggagtgaccggaaagggtgtctttattaagacatacacaagagccttaactgtcagtagatggaaaagcgtgttttatttcagataatttccagactcgtctttcccgcgctgctgatctttttgtagaggagatctgcatccggatgtctttacatcatagcgcagaacattcatgattgtatcaccacagcagttgtatgtttactgctttcccccttgcccaagtgttgccttcactgagatgctgcctgtgatatcaagttcagacctgaaactgttactgagagttcgactgaataatactcctatgatatgtcaccgcgctaatacgacagtaatctcaagatgtg

SEQ ID NO: 15401 - DNA, 1216 bp, Zea Mays
ctagctagtcctgcctttgtctttgatctagataagtcggtttaaggtcgcgaccaacctgttcctacgaccggtggaagcgtgcgacgtttccgctatcgctttcgaggctacggacgcgcggcccatctattctccagcccaagcggcgctcgcggcccccgttctatggcggcagcagtgcagcggatttctcgagggactacgacggggcctgcctccagatgcgcatgtcctacagccccgccgcccacttcttcctcttcctcgtgcagtggaccgactgcagcctagccggcgcgctcgggctgctcaggatcctaatctacaaggtttatgtagatgggagtaccaccatgtcgacgcacgagaggaaagcgagcatcagggagttttatgctgttatctttccctccctgatgcaactgcccaaggggatcagcgacgtggacgaccggaggcagaaggcggcgtgcacggagaggtaccggaggagggacgaggacgagggcaagaggccggtttcggaggccgacatcgaaagggaggaagagtgcggcatctgcatggagatgaacggcaaggtggtgctgcccagctgcagccatgccatgtgcatcaagtgctaccgccaatggcgatcaagatcgcaatcctgccccttctgtcgggacagcctgaaacgagtgaactccggggacctgtggatgctcaccgactgccgggacgtggtcgacatggcgacggtgacgagggagaacatcaggcgtctgttcatgtacgtcgagaagctgcccctcgtcgccccggacaacatcttctacgcctacgattctcatgtaaaatagctggagctagctgtagtgtagcagcacaccatctgtgctgtgctgtgctgtgctgtgttgtgttctgagagtgatgacgcatgatttatcgattattcatgcagaggggtagagggtgttcctcgtcctagctaggacgtggctaaacgcttggaccggggtgcggactctgacgacagacctttttcagtctatctaactgggtgtacagtctgctcaggtcctgtaaatataatgtctgtgcatatttatggcttcaaatgccccgttgtttttcagctggatatatttgtgtctccaactgttctgctttttattttcttgcttactgccaagctgtgatgctcaagttttctggatggaatggt

SEQ ID NO: 15402 - DNA, 2032 bp, Zea Mays
aactaagtgggtgaagcccgtgggccccatgatcacctagttgcgtcgtattccttatggtggatgatgtcgtcatcgtgggtcccgagcgtcatcatttgggctacaccgaccctaggccttcatagcctgagactagtcgttacgccctgctagcggtttgtgcacttaggcctaattccgataggtcacgagtgcaccgtacaccgggggacgtgcgggccgtaaatgcgtcgcaatccgatgggttcctaggctatgagtgttgccagtccgaggggctcgtacgtcatgaggtgtaggcagaccgacgccctgatgtggctcagcgccaaacatagttaatgcggccagtcaattatgacgggttggtctcgggctagccaagggatccacaagagtggtttctcttcggctcacctgacccctatctagttccttcatgcccgacctaggctcggtgccacgaagctcgtctaggggtgggtacttttagaccagacattacctatctcctccagctgactaacgggccccaattgccagaggattttccctaacacgttcactaactgatgagcaccagggaccgtgatcttatccccgacattagcccccctcctctcgggggcttttcttaggtcagggcgttgccttgccccttatcctagcgcacactttcatagtttcgtgcatttggtgtttcgtctcgttccatacatggcgcttggaatccatctcgttccgctacgcctcacacctttctataaatgattctttcctcgagcgactttgacatactttgccttgttcccttcgctaaaggatggtttcttcgtgatcccctatggacccaaaaaaagtgtcgtgcggaggagcagcccccacgtgttgcgtcctcttaggcagaggatgatcgaatcaggccaagttatttcgatgggccaaaggaaagacttcaggctgcctttttgtctgggcggggttccaatcctctcgtcctagaccccctcggatctcggggagagtctggtcgctaccaatgcgacgctcgaaaatgctgacagcgagctagccttccttcgcgcccgtctagcagaggcagaccgctgtgtcgtggaactagagctggaggtcgccggcctccgtgagggtgcggatgtggggtggtcgcctttgttcgggcccggagcgtcgaccgagaagagtgcctccgcgtcgctaaccttgacaagttttagatattagtggtgcctgctatatcttccataccatatgttcttcaattctcaagcagtctctcttactccacaaacatgtgtctttggaggactgatctatttggagtgacacagtggcatcagctactgataccattgcaggtttagggcggtattctgcgtctagacgagtttatttgggcctcgagccaactataaccgtaggttcttcaagtatcgagaccttgatgatgatttcatgctaacaaagacctaaatcctttgtttctcgttctcattttttaacttaatctatgacatctaccattaaatacatagtattgtaagttcatcgaatgggtgtctcggtgtatcgtgatacgctaatttgatcaaaaagttgtctggttgacagaaaaaaacaatggttgataatgttttagcatttttgagacatgtcatttgcactagctgtatgcatataaaagaggataaagttcttaaacacgttgtaaataaaaggtaactaaacttagagggtccgacctatttgaatttgagggcacatttgttttcctcctagattatataaattggattagtgtcgaaggatagacgggtaaaatatcaatttgagaatacaaagaagctagtattgtgtagcttatttgtgatcctaaaataatattttagtctccgaccctcccatcatactcaaatttatataatctaagagggaaacaaacatggtcaaagtttggttaggactactaaaaagttggttcataaaaagccgagagagatgtttatat

SEQ ID NO: 15403 - DNA, 1434 bp, Zea Mays
ggccgtggctgcgctggccccgtatgggccccgcgcgtcagtcgcggctttctcgcgtcgcccccggacccggggatgggagggacgcgtgcccgtgctcctccagtcctccgtccgcactcccactcccactcccacagccggtctccctctacccacgcaacgaatacaatacaaacagagggaagggagcgagcgggaagccaaggtggggaaagcagggaagcgaggccaagtggagcggagcggggcttcggctgggttccgcgcgcggccgctcgctacttccagtgttccatggtgtgggtgtgggcggctgtggcgatagccggagcctgaagcggcgggtggtgtgtggtgggcgcaaggagccacacggagcaggccgccacggcgaggaggaggaggaagaggaggagatggtcgtctgctccacgcgcaagtcgttcaaggactcgctcaaggtgctcgaggccgacatccagcacgccaacacccttgcagcggatttctcgagggactacgacggggcctgcctccagatgcgcatgtcctacagccccgccgcccacttcttcctcttcctcgtgcagtggaccgactgcagcctagccggcgcgctcgggctgctcaggatcctaatctacaagcttcgttgtgcaggtttatgtagatgggagtaccaccatgtcgacgcacgagaggaaagcgagcatcagggagttttatgctgttatctttccctccctgatgcaactgcccaaggggatcagcgacgtggacgaccggaggcagaaggcggcgtgcacggagaggtaccggaggagggacgaggacgagggcaagaggccggtttcggaggccgacatcgaaagggaggaagagtgcggcatctgcatggagatgaacggcaaggtggtgctgcccagctgcagccatgccatgtgcatcaagtgctaccgccaatggcgatcaagatcgcaatcctgccccttctgtcgggacagcctgaaacgagtgaactccggggacctgtggatgctcaccgactgccgggacgtggtcgacatggcgacggtgacgagggagaacatcaggcgtctgttcatgtacgtcgagaagctgcccctcgtcgccccggacaacatcttctacgcctacgattctcataggggtagagggtgttcctcgtcctagctaggacgtggctaaacgcttggaccggggtgcggactctgacgacagacctttttcagtctatctaactgggtgtacagtctgctcaggtcctgtaaatataatgtctgtgcatatttatggcttcaaatgccccgttgtttttcagctggatatatttgtgtctccaactgttctgctttttattttcttgcttactgccaagctgtgatgctcaagttttctggatggaatggt

SEQ ID NO: 15404 - DNA, 1398 bp, Zea Mays
cccgtatgggccccgcgcgtcagtcgcggctttctcgcgtcgcccccggacccggggatgggagggacgcgtgcccgtgctcctccagtcctccgtccgcactcccactcccactcccacagccggtctccctctacccacgcaacgaatacaatacaaacagagggaagggagcgagcgggaagccaaggtggggaaagcagggaagcgaggccaagtggagcggagcggggcttcggctgggttccgcgcgcggccgctcgctacttccagtgttccatggtgtgggtgtgggcggctgtggcgatagccggagcctgaagcggcgggtggtgtgtggtgggcgcaaggagccacacggagcaggccgccacggcgaggaggaggaggaagaggaggagatggtcgtctgctccacgcgcaagtcgttcaaggactcgctcaaggtgctcgaggccgacatccagcacgccaacaccctcggatttctcgagggactacgacggggcctgcctccagatgcgcatgtcctacagccccgccgcccacttcttcctcttcctcgtgcagtggaccgactgcagcctagccggcgcgctcgggctgctcaggatcctaatctacaaggtttatgtagatgggagtaccaccatgtcgacgcacgagaggaaagcgagcatcagggagttttatgctgttatctttccctccctgatgcaactgcccaaggggatcagcgacgtggacgaccggaggcagaaggcggcgtgcacggagaggtaccggaggagggacgaggacgagggcaagaggccggtttcggaggccgacatcgaaagggaggaagagtgcggcatctgcatggagatgaacggcaaggtggtgctgcccagctgcagccatgccatgtgcatcaagtgctaccgccaatggcgatcaagatcgcaatcctgccccttctgtcgggacagcctgaaacgagtgaactccggggacctgtggatgctcaccgactgccgggacgtggtcgacatggcgacggtgacgagggagaacatcaggcgtctgttcatgtacgtcgagaagctgcccctcgtcgccccggacaacatcttctacgcctacgattctcataggggtagagggtgttcctcgtcctagctaggacgtggctaaacgcttggaccggggtgcggactctgacgacagacctttttcagtctatctaactgggtgtacagtctgctcaggtcctgtaaatataatgtctgtgcatatttatggcttcaaatgccccgttgtttttcagctggatatatttgtgtctccaactgttctgctttttattttcttgcttactgccaagctgtgatgctcaagttttctggatggaatggt

SEQ ID NO: 15405 - DNA, 1345 bp, Zea Mays
tgggagggacgcgtgcccgtgctcctccagtcctccgtccgcactcccactcccactcccacagccggtctccctctacccacgcaacgaatacaatacaaacagagggaagggagcgagcgggaagccaaggtggggaaagcagggaagcgaggccaagtggagcggagcggggcttcggctgggttccgcgcgcggccgctcgctacttccagtgttccatggtgtgggtgtgggcggctgtggcgatagccggagcctgaagcggcgggtggtgtgtggtgggcgcaaggagccacacggagcaggccgccacggcgaggaggaggaggaagaggaggagatggtcgtctgctccacgcgcaagtcgttcaaggactcgctcaaggtgctcgaggccgacatccagcacgccaacacccttgcagcggatttctcgagggactacgacggggcctgcctccagatgcgcatgtcctacagccccgccgcccacttcttcctcttcctcgtgcagtggaccgactgcagcctagccggcgcgctcgggctgctcaggatcctaatctacaaggtttatgtagatgggagtaccaccatgtcgacgcacgagaggaaagcgagcatcagggagttttatgctgttatctttccctccctgatgcaactgcccaaggggatcagcgacgtggacgaccggaggcagaaggcggcgtgcacggagaggtaccggaggagggacgaggacgagggcaagaggccggtttcggaggccgacatcgaaagggaggaagagtgcggcatctgcatggagatgaacggcaaggtggtgctgcccagctgcagccatgccatgtgcatcaagtgctaccgccaatggcgatcaagatcgcaatcctgccccttctgtcgggacagcctgaaacgagtgaactccggggacctgtggatgctcaccgactgccgggacgtggtcgacatggcgacggtgacgagggagaacatcaggcgtctgttcatgtacgtcgagaagctgcccctcgtcgccccggacaacatcttctacgcctacgattctcataggggtagagggtgttcctcgtcctagctaggacgtggctaaacgcttggaccggggtgcggactctgacgacagacctttttcagtctatctaactgggtgtacagtctgctcaggtcctgtaaatataatgtctgtgcatatttatggcttcaaatgccccgttgtttttcagctggatatatttgtgtctccaactgttctgctttttattttcttgcttactgccaagctgtgatgctcaagttttctggatggaatggt

SEQ ID NO: 15406 - DNA, 1602 bp, Zea Mays
ctccctctacccacgcaacgaatacaatacaaacagagggaagggagcgagcgggaagccaaggtggggaaagcagggaagcgaggccaagtggagcggagcggggcttcggctgggttccgcgcgcggccgctcgctacttccagtgttccatggtgtgggtgtgggcggctgtggcgatagccggagcctgaagcggcgggtggtgtgtggtgggcgcaaggagccacacggagcaggccgccacggcgaggaggaggaggaagaggaggagatggtcgtctgctccacgcgcaagtcgttcaaggactcgctcaaggtgctcgaggccgacatccagcacgccaacaccctgtgagtgcccccggccccgtttccatcccggccgccccgaattcacgctcgccgcagctgccgcctgccgcagatcgatctccgcgggctccgcccgccccgattccatcctgaccgaaaccggggcggcgaaataaagttgctccagtgggtgggtggggtgggtatgctacagtggcggttgagctctcatgtcatgtcatgtcgtgtcacgccgcgcgcatgagcgagcggtgggcgccgacgatcgggctggcacaccacctgccttcctgacgcgtgccttccctcgtgctgactgctcgctcgctcaaacaactcgacagtgcagcggatttctcgagggactacgacggggcctgcctccagatgcgcatgtcctacagccccgccgcccacttcttcctcttcctcgtgcagtggaccgactgcagcctagccggcgcgctcgggctgctcaggatcctaatctacaaggtttatgtagatgggagtaccaccatgtcgacgcacgagaggaaagcgagcatcagggagttttatgctgttatctttccctccctgatgcaactgcccaaggggatcagcgacgtggacgaccggaggcagaaggcggcgtgcacggagaggtaccggaggagggacgaggacgagggcaagaggccggtttcggaggccgacatcgaaagggaggaagagtgcggcatctgcatggagatgaacggcaaggtggtgctgcccagctgcagccatgccatgtgcatcaagtgctaccgccaatggcgatcaagatcgcaatcctgccccttctgtcgggacagcctgaaacgagtgaactccggggacctgtggatgctcaccgactgccgggacgtggtcgacatggcgacggtgacgagggagaacatcaggcgtctgttcatgtacgtcgagaagctgcccctcgtcgccccggacaacatcttctacgcctacgattctcataggggtagagggtgttcctcgtcctagctaggacgtggctaaacgcttggaccggggtgcggactctgacgacagacctttttcagtctatctaactgggtgtacagtctgctcaggtcctgtaaatataatgtctgtgcatatttatggcttcaaatgccccgttgtttttcagctggatatatttgtgtctccaactgttctgctttttattttcttgcttactgccaagctgtgatgctcaagttttctggatggaatggt

SEQ ID NO: 15407 - DNA, 2188 bp, Zea Mays
cacgggcagaaagggacgcgactcgtcagggcgattccgattacgagtagacgggcaggacaggacaagggaggaacggcggcggcggcgcagggcagggtaaaccatggcggcatcggccaagggacggctcgtgcccgtgctcgcggtggcggcggcgctcgcggccgtgctcctctaccgcgcgcccttctccaagagcttgggcggcgaagggtgcagcctcctcccgcacgaccacttctggatcgccagcgaccgcgtcgtcacgctcggacgcgtcggccccgccgcagtagaggtcaaaggagggctcatcaacgccatcgccgtcggggactaccggagcttcgtgctccgccgaccgctccttgactacggggacgccgtcatcatgcccggcctcatcgacgtgcatgcccatctggatgagcctggacgtgccgagtgggaaggcttctccaatggcacaagagcagctgcggcaggtgggataacgacgctggtggatatgccactcaacagcttcccgtcaacagtctctgaagaaactctcaaactgaagctggaagcagctcgggataagctatatgttgatgtggggttttggggaggccttgtgccagagaatgccttcaacccaagtgctttggagggcctcctaaaggcaggcgttttaggactcaagtcttttatgtgcccctcaggcatcaacgactttcccatgacaaattcaactcatatcgaagaaggattggttacactggcaaaatacaagagatctttacttatccatgcagaacgtatacctgaggctgaggatcatgatttgcaagaagatgaattagatcctcggtcctatatgacgtatctgaagtctagaccaccatcatgggaggaagcggctatcagagatctgcaacgtgcaatgaaggatacggagttggggggtcggtccgaaggagctcatattcacattgttcatctatcagatgcaaaaactagcttggaacttatgaaggttgaatggcatcatatgaaatttgccatgccccttttccatgacttatctgaacctatggtttcaacgcccagaaacaaaatccacataaatgaatggagggaatatgtgcaactattgttatggacaagatcatacatatgccagtttatttctagttacttttttttctttcaatcaaaggtgtttttggtcggttttacttactacaattctctttgcttgtaggatgctaaacgcagtggtgcaagtctgtctatagaaacatgccctcattacctggcattttcgtctgaagaagttccagatggagatactcgctttaaatgttctcctcccatacgtgatgacacaaacagagaaaatctttggaaagctctgcttgatggacacatagacatgctaagttcagaccactcaccatccactcctgacctcaaactaatggaggaaggcgactttttaagggcatggggaggcatatcatcattgcagtttgtcctcccggtgacatggtcatatgggcgaaagtatggcgttactctgaatcagctagcctcatggtggagcgaaaggccagccaagcttgcaggccaaaagaataagggagctattctaccaggataccatgctgacattgtagtatggaaacccgaaacagagtttcaacttgacaacaaccatgctatatatcataaacatcagaatatttcagcgtatttaggaaagcaactttctggtaaggtcctgtcgacttttgtgagaggaaatcttgtgtttgctgaagacaagcatgcaaatgctgcttgtggtgttcctatcctcgctaagtaacatacaggtggatccagaactgccattgttgatccgtagtgtatacaatcgtatgcacgtgtcaatttgtaggttgctctcctgtatataattgaactcattcatgtcattgttatatagtagcaatctatttatattggcacacattttgccttgatccctaattagactatcattagtttttttttctattgatattgtcagcattcgggagaaggcatactctccagaatgctaacaaaatatccgctgagacttcatcagtagaagataaactcatagtctgatgaaatagataagatggtggtatgacacagtcccttcaacgcccag

SEQ ID NO: 15408 - DNA, 1861 bp, Zea Mays
cacgggcagaaagggacgcgactcgtcagggcgattccgattacgagtagacgggcaggacaggacaagggaggaacggcggcggcggcgcagggcagggtaaaccatggcggcatcggccaagggacggctcgtgcccgtgctcgcggtggcggcggcgctcgcggccgtgctcctctaccgcgcgcccttctccaagagcttgggcggcgaagggtgcagcctcctcccgcacgaccacttctggatcgccagcgaccgcgtcgtcacgctcggacgcgtcggccccgccgcagtagaggtcaaaggagggctcatcaacgccatcgccgtcggggactaccggagcttcgtgctccgccgaccgctccttgactacggggacgccgtcatcatgcccggcctcatcgacgtgcatgcccatctggatgagcctggacgtgccgagtgggaaggcttctccaatggcacaagagcagctgcggcaggtgggataacgacgctggtggatatgccactcaacagcttcccgtcaacagtctctgaagaaactctcaaactgaagctggaagcagctcgggataagctatatgttgatgtggggttttggggaggccttgtgccagagaatgccttcaacccaagtgctttggagggcctcctaaaggcaggcgttttaggactcaagtcttttatgtgcccctcaggcatcaacgactttcccatgacaaattcaactcatatcgaagaaggattggttacactggcaaaatacaagagatctttacttatccatgcagaacgtatacctgaggctgaggatcatgatttgcaagaagatgaattagatcctcggtcctatatgacgtatctgaagtctagaccaccatcatgggaggaagcggctatcagagatctgcaacgtgcaatgaaggatacggagttggggggtcggtccgaaggagctcatattcacattgttcatctatcagatgcaaaaactagcttggaacttatgaaggatgctaaacgcagtggtgcaagtctgtctatagaaacatgccctcattacctggcattttcgtctgaagaagttccagatggagatactcgctttaaatgttctcctcccatacgtgatgacacaaacagagaaaatctttggaaagctctgcttgatggacacatagacatgctaagttcagaccactcaccatccactcctgacctcaaactaatggaggaaggcgactttttaagggcatggggaggcatatcatcattgcagtttgtcctcccggtgacatggtcatatgggcgaaagtatggcgttactctgaatcagctagcctcatggtggagcgaaaggccagccaagcttgcaggccaaaagaataagaatatttcagcgtatttaggaaagcaactttctggtaaggtcctgtcgacttttgtgagaggaaatcttgtgtttgctgaagacaagcatgcaaatgctgcttgtggtgttcctatcctcgctaagtaacatacaggtggatccagaactgccattgttgatccgtagtgtatacaatcgtatgcacgtgtcaatttgtaggttgctctcctgtatataattgaactcattcatgtcattgttatatagtagcaatctatttatattggcacacattttgccttgatccctaattagactatcattagtttttttttctattgatattgtcagcattcgggagaaggcatactctccagaatgctaacaaaatatccgctgagacttcatcagtagaagataaactcatagtctgatgaaatagataagatggtggtatgacacagtcccttcaacgcccag

SEQ ID NO: 15409 - DNA, 1312 bp, Zea Mays
cagcttgcagacagcattgaaacttctacatgttgtaacttcttttatgtgcccctcaggcatcaacgactttcccatgacaaattcaactcatatcgaagaaggattggttacactggcaaaatacaagagatctttacttatccatgcagaacgtatacctgaggctgaggatcatgatttgcaagaagatgaattagatcctcggtcctatatgacgtatctgaagtctagaccaccatcatgggaggaagcggctatcagagatctgcaacgtgcaatgaaggatacggagttggggggtcggtccgaaggagctcatattcacattgttcatctatcagatgcaaaaactagcttggaacttatgaaggatgctaaacgcagtggtgcaagtctgtctatagaaacatgccctcattacctggcattttcgtctgaagaagttccagatggagatactcgctttaaatgttctcctcccatacgtgatgacacaaacagagaaaatctttggaaagctctgcttgatggacacatagacatgctaagttcagaccactcaccatccactcctgacctcaaactaatggaggaaggcgactttttaagggcatggggaggcatatcatcattgcagtttgtcctcccggtgacatggtcatatgggcgaaagtatggcgttactctgaatcagctagcctcatggtggagcgaaaggccagccaagcttgcaggccaaaagaataagggagctattctaccaggataccatgctgacattgtagtatggaaacccgaaacagagtttcaacttgacaacaaccatgctatatatcataaacatcagaatatttcagcgtatttaggaaagcaactttctggtaaggtcctgtcgacttttgtgagaggaaatcttgtgtttgctgaagacaagcatgcaaatgctgcttgtggtgttcctatcctcgctaagtaacatacaggtggatccagaactgccattgttgatccgtagtgtatacaatcgtatgcacgtgtcaatttgtaggttgctctcctgtatataattgaactcattcatgtcattgttatatagtagcaatctatttatattggcacacattttgccttgatccctaattagactatcattagtttttttttctattgatattgtcagcattcgggagaaggcatactctccagaatgctaacaaaatatccgctgagacttcatcagtagaagataaactcatagtctgatgaaatagataagatggtggtatgacacagtcccttcaacgcccag

SEQ ID NO: 15410 - DNA, 769 bp, Zea Mays
ttgcgcccgtttggttgccaaaaccaaaagcagaggggaaagtgccgtcagctctgactctcgggcacttggctgacgacccgttctctctttgcaactgcaactgcaacgcaccaagaaactgccggcgatcgatcggggcaaggagataaacatggtgcacgggaagctggaggtcctcctcgtctccgccaagggactcgaggacaccgatttcctcaataacatggaccccttcgtgatccttacctgccgcacccaagagcagaaaagcagcgtcgcaaatggaagcgagcccgaatggaacgagaccttcgtcttcaccgtctccgacgacaccccgcagctgcacctcaagatcatggacagcgacctcaccaacgacgatttcgtcggcgaagcaaccatccccctggaggccgtgtttcaggaaggcagccttcccccggcggttcacccggtcgtcaaggaggagaagtactgcggagaggtcaagctcgcgctcaccttcactccagcagcggaaactcgccgccctgatgacaacgaggaggggccgccttacagcagctggagttgatctatctgccatgggatgcatgcatcatatatatccaccaagagaagagaggataattaattaatctactcaagagaagaatcagtgttgctgttatgcgaccctctatctatctatatatatgtgcttaatttgtcatgaacgactgccaatataaaataaactattcagagttgtttgcacgtaact

SEQ ID NO: 15411 - DNA, 912 bp, Zea Mays
ttgcgcccgtttggttgccaaaaccaaaagcagaggggaaagtgccgtcagctctgactctcgggcacttggctgacgacccgttctctctttgcaactgcaactgcaacgcaccaagaaactgccggcgatcgatcggggcaaggagataaacatggtgcacgggaagctggaggtcctcctcgtctccgccaagggactcgaggacaccgatttcctcagtaaacctctcttccctctctctctctctctcgctgtctcgcatagcttcctcctcctgcggcctactgaaaccaagctctggattttgactaattaacctgcctggaccgtcaaataaagagcatcagctggatcgataacatggaccccttcgtgatccttacctgccgcacccaagagcagaaaagcagcgtcgcaaatggagcaggaagcgagcccgaatggaacgagaccttcgtcttcaccgtctccgacgacaccccgcagctgcacctcaagatcatggacagcgacctcaccaacgacgatttcgtcggcgaagcaaccatccccctggaggccgtgtttcaggaaggcagccttcccccggcggttcacccggtcgtcaaggaggagaagtactgcggagaggtcaagctcgcgctcaccttcactccagcagcggaaactcgccgccctgatgacaacgaggaggggccgccttacagcagctggagttgatctatctgccatgggatgcatgcatcatatatatccaccaagagaagagaggataattaattaatctactcaagagaagaatcagtgttgctgttatgcgaccctctatctatctatatatatgtgcttaatttgtcatgaacgactgccaatataaaataaactattcagagttgtttgcacgtaact

SEQ ID NO: 15412 - DNA, 954 bp, Zea Mays
tagacttcttcaccatgttgcaaaaaaaggcactggcacaagcctggacgccgttgctgctgccattcaagttttggaggatgatcccgtcacaaatgctggtcgtggttcaaatttgactgagagtggtcacgtggaatgcgatgcaagcatcatggatggaagtactggttcttttggagctgttggagctattagagatcagatgtaaagaatccaatccaagtcgctttgcacttggcaaaggaacaaatggcgggaccgtcattgcttggtcggataccccccatgtttctggttggtgagggagcatatcaatgggcaaaatctaaaggaatggacctagttgaatctacatcggaggctaatagttggttggtgactgagaatgcaagagcgcagtgggtgaaatacacatcattgcttgttaataccaaaaaatcactatatcatagtactggttctggttcagaacatcattcagttcaattggaagcacaaggaactgaatctgagaatattgctgatgcaaagaacatatttacagagtcattcatgggagacaatacagatcacataacggatactgttggggttattttgtgtagatagctacggaaatgtagcatcaggtgcatctagtggtggtattgccctgaaggtagatggccgggttgggttagcagctatgtttggctctgggtgctgggcctcgtccaaaggaccctttggtacaccattcgtagttgcttgttgtgcaactggagctggagaacacttgattagaggatttgctgcccgtgaaagttgcatctcatcgtcgttgtcacaatctggtcctgcttctgcgtgcactaaagttctccgctctgtggttcaaagcagcagcaagatgtctcatgatacaggcgctgggtcttgctagttcaggctgatgttgtaaaggtgggtatt

SEQ ID NO: 15413 - DNA, 1382 bp, Zea Mays
ctcaaaaaatcgaggagttttcatctcatgcaattttgacatcaaacgaaacacatcatggttcaagacagaatctcagtgctaaaattgaaagcagccaatacagggttctaaagttggaaagagtagcttttggtgtctcatgtttgtaaataactccttcctcccatctgatctgaaacaatgcgcatcctttgccccccttttgatgagaaaaatacgaaccctaaaatctcagctccacaagggtccccgtccacaatggccaccggcggcggcgcgaacgagacggccgtcggcgccggggaggagaacgcgagcgcttccaggatccccacccgcaggttcttcgtggcgctgcacgtgggcgccggcttccacgctccggcgaacgagaaggcgtaccgcagggccatgaagcgcgcctgcctagccgctgcggccgttctccgcgagggcactggcacaagcctggacgccgttgctgctgccattcaagttttggaggatgatcccgtcacaaatgctggtcgtggttcaaatttgactgagagtggtcacgtggaatgcgatgcaagcatcatggatggaagtactggttcttttggagctgttggagctattagagatcagatgtaaagaatccaatccaagtcgctttgcacttggcaaaggaacaaatggcgggaccgtcattgcttggtcggataccccccatgtttctggttggtgagggagcatatcaatgggcaaaatctaaaggaatggacctagttgaatctacatcggaggctaatagttggttggtgactgagaatgcaagagcgcagtgggtgaaatacacatcattgcttgttaataccaaaaaatcactatatcatagtactggttctggttcagaacatcattcagttcaattggaagcacaaggaactgaatctgagaatattgctgatgcaaagaacatatttacagagtcattcatgggagacaatacagatcacataacggatactgttggggttattttgtgtagatagctacggaaatgtagcatcaggtgcatctagtggtggtattgccctgaaggtagatggccgggttgggttagcagctatgtttggctctgggtgctgggcctcgtccaaaggaccctttggtacaccattcgtagttgcttgttgtgcaactggagctggagaacacttgattagaggatttgctgcccgtgaaagttgcatctcatcgtcgttgtcacaatctggtcctgcttctgcgtgcactaaagttctccgctctgtggttcaaagcagcagcaagatgtctcatgatacaggcgctgggtcttgctagttcaggctgatgttgtaaaggtgggtatt

SEQ ID NO: 15414 - DNA, 1378 bp, Zea Mays
aaaaatcgaggagttttcatctcatgcaattttgacatcaaacgaaacacatcatggttcaagacagaatctcagtgctaaaattgaaagcagccaatacagggttctaaagttggaaagagtagcttttggtgtctcatgtttgtaaataactccttcctcccatctgatctgaaacaatgcgcatcctttgccccccttttgatgagaaaaatacgaaccctaaaatctcagctccacaagggtccccgtccacaatggccaccggcggcggcgcgaacgagacggccgtcggcgccggggaggagaacgcgagcgcttccaggatccccacccgcaggttcttcgtggcgctgcacgtgggcgccggcttccacgctccggcgaacgagaaggcgtaccgcagggccatgaagcgcgcctgcctagccgctgcggccgttctccgcgagggcactggcacaagcctggacgccgttgctgctgccattcaagttttggaggatgatcccgtcacaaatgctggtcgtggttcaaatttgactgagagtggtcacgtggaatgcgatgcaagcatcatggatggaagtactggttcttttggagctgttggagctattagagatgtaaagaatccaatccaagtcgctttgcacttggcaaaggaacaaatggcgggaccgtcattgcttggtcggataccccccatgtttctggttggtgagggagcatatcaatgggcaaaatctaaaggaatggacctagttgaatctacatcggaggctaatagttggttggtgactgagaatgcaagagcgcagtgggtgaaatacacatcattgcttgttaataccaaaaaatcactatatcatagtactggttctggttcagaacatcattcagttcaattggaagcacaaggaactgaatctgagaatattgctgatgcaaagaacatatttacagagtcattcatgggagacaatacagatcacataacggatactgttggggttattttgtgtagatagctacggaaatgtagcatcaggtgcatctagtggtggtattgccctgaaggtagatggccgggttgggttagcagctatgtttggctctgggtgctgggcctcgtccaaaggaccctttggtacaccattcgtagttgcttgttgtgcaactggagctggagaacacttgattagaggatttgctgcccgtgaaagttgcatctcatcgtcgttgtatggtcacaatctggtcctgcttctgcgtgcactaaagttctccgctctgtggttcaaagcagcagcaagatgtctcatgatacaggcgctgggtcttgctagttcaggctgatgttgtaaaggtgggtatt

SEQ ID NO: 15415 - DNA, 2365 bp, Zea Mays
gagttttcatctcatgcaattttgacatcaaacgaaacacatcatggttcaagacagaatctcagtgctaaaattgaaagcagccaatacagggttctaaagttggaaagagtagcttttggtgtctcatgtttgtaaataactccttcctcccatctgatctgaaacaatgcgcatcctttgccccccttttgatgagaaaaatacgaaccctaaaatctcagctccacaagggtccccgtccacaatggccaccggcggcggcgcgaacgagacggccgtcggcgccggggaggagaacgcgagcgcttccaggatccccacccgcaggttcttcgtggcgctgcacgtgggcgccggcttccacgctccggcgaacgagaaggcgtaccgcagggccatgaagcgcgcctgcctagccgctgcggccgttctccgcgagggcactggcacaagcctggacgccgttgctgctgccattcaagttttggaggatgatcccgtcacaaatgctggtcgtggttcaaatttgactgagagtggtcacgtggaatgcgatgcaagcatcatggatggaagtactggttcttttggagctgttggagctattagagatgtaaagaatccaatccaagtcgctttgcacttggcaaaggaacaaatggcgggaccgtcattgcttggtcggataccccccatgtttctggttggtgagggagcatatcaatgggcaaaatctaaaggaatggacctagttgaatctacatcggaggctaatagttggttggtgactgagaatgcaagagcgcagtgggtgaaatacacatcattgcttgttaataccaaaaaatcactatatcatagtactggttctggttcagaacatcattcagttcaattggaagcacaaggttacctccatgtttacttgctacttatcttattcaattcgagtcacactttaaagttttagtaatctgtatggcacttccaccttctgtaagttgaaatatcatctggaacttaactgaacttgaatatttaactttatttccatagcatgatgatattgaatgactgttgtctagtttgagcacttggtcctacactgtgcttctattttattagttgccagattgtattctgctaggtatttacttttgttcattatcttgtaatttcattttctctccagcaatattcaagctgttcttcttgaaatacaattttgattggtttattgtgaactagtcatgcaacatattggtttcccccatataattcaaagactgtttatggatgaagtggagtgttggagtagggctggtgcaaagcaacttgagagccttggtctcccggctgcctttaatagggtcagggctatttctagcgcctagtgctgtgacagctgaggtcgtcctattgcagcatgagatgaggatagagttccctgtctgtattgaggttctggtctagtgtgttattttgccttgttcgggcattgtattgtggtccactttggacctttctctctcttattataatgatgtgcagctctcctgcgcgtgcgagaaaaaaacatattggtttactgcttttcacaaggtctctcagaagatcatatatatacaattgccatctttttcatggacacaatcacacaatgtccaacagatatcagcagtggttggtctgagttcagttggacatttattaattatcctaacacattaatttatttcagtactcaaatttttagttattctgaccagtcttaggaatgtggtactgatgttacattcttgcacttgttttgtgctatgatagtgatagtgatttttggactgtcttttcagcaactaaaaggattcctgctccacctgtccacctaacctgtgtccatttcattgtaggaactgaatctgagaatattgctgatgcaaagaacatatttacagagtcattcatgggagacaatacagatcacataacggatactgttggggttattttgtgtagatagctacggaaatgtagcatcaggtgcatctagtggtggtattgccctgaaggtagatggccgggttgggttagcagctatgtttggctctgggtgctgggcctcgtccaaaggaccctttggtacaccattcgtagttgcttgttgtgcaactggagctggagaacacttgattagaggatttgctgcccgtgaaagttgcatctcatcgtcgttgtcacaatctggtcctgcttctgcgtgcactaaagttctccgctctgtggttcaaagcagcagcaagatgtctcatgatacaggcgctgggtcttgctagttcaggctgatgttgtaaaggtgggtatt

SEQ ID NO: 15416 - DNA, 1199 bp, Zea Mays
gagttttcatctcatgcaattttgacatcaaacgaaacacatcatggttcaagacagaatctcagtgctaaaattgaaagcagccaatacagggttctaaagttggaaagagtagcttttggtgtctcatgtttgtaaataactccttcctcccatctgatctgaaacaatgcgcatcctttgccccccttttgatgagaaaaatacgaaccctaaaatctcagctccacaagggtccccgtccacaatggccaccggcggcggcgcgaacgagacggccgtcggcgccggggaggagaacgcgagcgcttccaggatccccacccgcaggttcttcgtggcgctgcacgtgggcgccggcttccacgctccggcgaacgagaaggcgtaccgcagggccatgaagcgcgcctgcctagccgctgcggccgttctccgcgagggcactggcacaagcctggacgccgttgctgctgccattcaagttttggaggatgatcccgtcacaaatgctggtcgtggttcaaatttgactgagagtggtcacgtggaatgcgatgcaagcatcatggatggaagtactggttcttttggagctgttggagctattagagatgtaaagaatccaatccaagtcgctttgcacttggcaaaggaacaaatggcgggaccgtcattgcttggtcggataccccccatgtttctggttggtgagggagcatatcaatgggcaaaatctaaaggaatggacctagttgaatctacatcggaggctaatagttggttggtgactgagaatgcaagagcgcagtgggtgaaatacacatcattgcttgttaataccaaaaaatcactatatcatagtactggttctggttcagaacatcattcagttcaattggaagcacaaggaactgaatctgagaatattgctgatgcaaagaacatatttacagagtcattcatgggagacaatacagatcacataacggatactgttggggttattttgtgtagatagctacggaaatgtagcatcaggtgcatctagtggtggtattgccctgaaggtcacaatctggtcctgcttctgcgtgcactaaagttctccgctctgtggttcaaagcagcagcaagatgtctcatgatacaggcgctgggtcttgctagttcaggctgatgttgtaaaggtgggtatt

SEQ ID NO: 15417 - DNA, 2866 bp, Zea Mays
gcgattctatgtggagtcatcggtgtcggctgacaccaacgattttggcaaaatcacttataccccatgttttttcaccatggttgaccccaataaaaaaatgcattgaccccggcggctggtgctaatcactctatagactatagttaatcagcccagcagatagcaagcgcgagcgccgagcgccgagcggcccagcttgcccagttgattagtccttgcgtgtcttgcgatagcccacagcccagcagtagtccaccaacgaagcgtcgatctgtcttcatttctgacggctcgcggacggcgcggcgccaccaccaaagcgtcgatccatcttctcgtttctcagggctcgcggacggcgcagcacagttttatcttcctttcctcgccctcgccaggccggcaccggtaggctgcaaggtatcgcgccgccgcgttggacctcctccaagtctccaactcacgttatgccagggaaccaaagtttgatggaacggtttttgaaaagaaaattgcctccagctagtgactctaatgatcctggtgccgatggagagacatcaagaaggggagcaaatgcatcaaacactaaccttgaccgtacagcgagtcatcgtcctttgcgagtttcacgaaaccaggtaaactttgatgagcttccttacgatccagcagatagaagaagcatatctgattacataggacaaaagctccaagatgaaattagaaagaagtatttgatcagaggtccttttagaccacctgttggctttaaatatccacagaagatcatagcaggtcatgcacgtcggtttcaacctgaatggttcacaaaatatgattggttagagtacagtataaaagtagataaatgtttttgcctgcaatgctacttattcagagatagcaatgagggccaaggtggtaatgatgcatttgtaaaagatggttgggatggctttaacaaattgaaaaggctccaagatcatgtaggcaccggacctgacagttttcataacacggcagtaaaaagatgcgacaatttgatgaagcctaatcagtccattgatagtgctattggcaagcaacagaatatcactaaggagcagtatcttattagattaaatacttctattgatgccgtccgatacttgttgcatcaaggcttagccttccgtggtcacgatgaatcagaaaagtctaaaaatcaaggaaattttcgggagttggtgaagcttttggcaaagcaaaatgacaaaagaaataaggccctggggctggggaacgcccaaatgttggcctcagaaatccaaaaggatattgcaaattgttttgccgagataatagtgaagtctatcattgaagaaattggtggtgacgtcttttgtttattggtagatgagtcatctgatgtttctggtaaggaacaaatggctgttgttttgagatatgttagcaagcttgggttaataaaagagagacttattggtgtagttcatgtgaaagagacctcagcttcatgtcttaaatctaacattgatagtttgtttggcaagtatggattgagcataaaacaagttagaggacaaggttacgatggagctagcaatatgaggggtgaattcaatggtttaagagctttaatattgagggaaaatagctctgcatattacatccactgctttgctcaccaactccagttagttattgttgcggtagcaaaaaaaaatgatgatattagtgatttctttgatatggtatccttattaataaatgttgctggagcttcttgcaaaagaaaggatatgattcgagaatgtcagcaagaaagagttagcaaagccatatgtagtggacaacttagaagcggaacggggttaaatcaagaacaatcacttcaaagagccggtgacactcgttggtcgtctcattttaaaacccttcagaggttaagcagtttgttccctgatgtaattgaagttctccaatacgttgaaaaagaaggtccaaatgatgccaagagacgccaagcacgtggtctcatggactatttgatggattttgactttgtgtttcacttgcagttaatgttgcttattttgggccatgcaaatgctttgtcattgtcattacaaaggaaagataaagacattttagaggccatggtagaggtgaagttaacaaagcagagatttcagcaaattagggatgatggttgggattctctattagaggatgtgttatccttttgtgaaaaacatggtattccgaagttggacatggatcatgagtacattaatcgccacaagcctaggcaaagaaccaaccgaactaactatcaacactatagatatgattgcttgaaccctgttattgacttacagcttatagagttcaatgatcgtttcaatgagcccagtggaactagatgatctcagtagtgaacttcattgttacattgataatgtgagagctgatgcaagatttgctcaattgggtactatttctgagcacggtaaactaatggtggatacaaaaaaacatcttgctttttcattggtctatcggcttctcaaacttgtgctagttctccctattgcaactgcatcagtagagagatcattttcagcaatgaaaattgtgaagacggtcctacgaaaccggatcggtgatgactttatgaatgattgtgtcattagcttcatggaacaagaacttcttgatacaatttcaaataatgatgtgatagttcgattccagaagatggatggacacaatcgtagagtgaaattataaaagggtttgataattatgagtcgtaagtccgaccccggtggagatttatcctagattcgcccctgtg

SEQ ID NO: 15418 - DNA, 2912 bp, Zea Mays
gttttttcaccatggttgaccccaataaaaaaatgcattgaccccggcggctggtgctaatcactctatagactatagttaatcagcccagcagatagcaagcgcgagcgccgagcgccgagcggcccagcttgcccagttgattagtccttgcgtgtcttgcgatagcccacagcccagcagtagtccaccaacgaagcgtcgatctgtcttcatttctgacggctcgcggacggcgcggcgccaccaccaaagcgtcgatccatcttctcgtttctcagggctcgcggacggcgcagcacagttttatcttcctttcctcgccctcgccaggccggcaccggtaggctgcaaggtatcgcgccgccgcgttggacctcctccaagtctccaactcacgttatgccagggaaccaaagtttgatggaacggtttttgaaaagaaaattgcctccagctagtgactctaatgatcctggtgccgatggagagacatcaagaaggggagcaaatgcatcaaacactaaccttgaccgtacagcgagtcatcgtcctttgcgagtttcacgaaaccaggtaaactttgatgagcttccttacgatccagcagatagaagaagcatatctgattacataggacaaaagctccaagatgaaattagaaagaagtatttgatcagaggtccttttagaccacctgttggctttaaatatccacagaagatcatagcaggtcatgcacgtcggtttcaacctgaatggttcacaaaatatgattggttagagtacagtataaaagtagataaatgtttttgcctgcaatgctacttattcagagatagcaatgagggccaaggtggtaatgatgcatttgtaaaagatggttgggatggctttaacaaattgaaaaggctccaagatcatgtaggcaccggacctgacagttttcataacacggcagtaaaaagatgcgacaatttgatgaagcctaatcagtccattgatagtgctattggcaagcaacagaatatcactaaggagcagtatcttattagattaaatacttctattgatgccgtccgatacttgttgcatcaaggcttagccttccgtggtcacgatgaatcagaaaagtctaaaaatcaaggaaattttcgggagttggtgaagcttttggcaaagcaaaatgacaaaagaaataaggccctggggctggggaacgcccaaatgttggcctcagaaatccaaaaggatattgcaaattgttttgccgagataatagtgaagtctatcattgaagaaattggtggtgacgtcttttgtttattggtagatgagtcatctgatgtttctggtaaggaacaaatggctgttgttttgagatatgttagcaagcttgggttaataaaagagagacttattggtgtagttcatgtgaaagagacctcagcttcatgtcttaaatctaacattgatagtttgtttggcaagtatggattgagcataaaacaagttagaggacaaggttacgatggagctagcaatatgaggggtgaattcaatggtttaagagctttaatattgagggaaaatagctctgcatattacatccactgctttgctcaccaactccagttagttattgttgcggtagcaaaaaaaaatgatgatattagtgatttctttgatatggtatccttattaataaatgttgctggagcttcttgcaaaagaaaggatatgattcgagaatgtcagcaagaaagagttagcaaagccatatgtagtggacaacttagaagcggaacggggttaaatcaagaacaatcacttcaaagagccggtgacactcgttggtcgtctcattttaaaacccttcagaggttaagcagtttgttccctgatgtaattgaagttctccaatacgttgaaaaagaaggtccaaatgatgccaagagacgccaagcacgtggtctcatggactatttgatggattttgactttgtgtttcacttgcagttaatgttgcttattttgggccatgcaaatgctttgtcattgtcattacaaaggaaagataaagacattttagaggccatggtagaggtgaagttaacaaagcagagatttcagcaaattagggatgatggttgggattctctattagaggatgtgttatccttttgtgaaaaacatggtattccgaagttggacatggatcatgagtacattaatcgccacaagcctaggcaaagaaccaaccgaactaactatcaacactatagatatgattgcttgaaccctgttattgacttacagcttatagagttcaatgatcgtttcaatgaggtgaattctgaattgcttacccacatggctgcttttagtcccaataattcttttggtgcctttaaacatgagagtttgatggaattggctaaggcataccctgatgatttcagcccagtggaactagatgatctcagtagtgaacttcattgttacattgataatgtgagagctgatgcaagatttgctcaattgggtactatttctgagcacggtaaactaatggtggatacaaaaaaacatcttgctttttcattggtctatcggcttctcaaacttgtgctagttctccctattgcaactgcatcagtagagagatcattttcagcaatgaaaattgtgaagacggtcctacgaaaccggatcggtgatgactttatgaatgattgtgtcattagcttcatggaacaagaacttcttgatacaatttcaaataatgatgtgatagttcgattccagaagatggatggacacaatcgtagagtgaaattataaaaggggtttgataattatgagtcgtaagtccgaccccggtggagatttatcctagattcgcccctgtg

SEQ ID NO: 15419 - DNA, 2574 bp, Zea Mays
ctatagttaatcagcccagcagatagcaagcgcgagcgccgagcgccgagcggcccagcttgcccagttgattagtccttgcgtgtcttgcgatagcccacagcccagcagtagtccaccaacgaagcgtcgatctgtcttcatttctgacggctcgcggacggcgcggcgccaccaccaaagcgtcgatccatcttctcgtttctcagggctcgcggacggcgcagcacagttttatcttcctttcctcgccctcgccaggccggcaccggtaggctgcaaggtatcgcgccgccgcgttggacctcctccaagtctccaactcacgttatgccagggaaccaaagtttgatggaacggtttttgaaaagaaaattgcctccagctagtgactctaatgatcctggtgccgatggagagacatcaagaaggggagcaaatgcatcaaacactaaccttgaccgtacagcgagtcatcgtcctttgcgagtttcacgaaaccagtaaaaagatgcgacaatttgatgaagcctaatcagtccattgatagtgctattggcaagcaacagaatatcactaaggagcagtatcttattagattaaatacttctattgatgccgtccgatacttgttgcatcaaggcttagccttccgtggtcacgatgaatcagaaaagtctaaaaatcaaggaaattttcgggagttggtgaagcttttggcaaagcaaaatgacaaaagaaataaggccctggggctggggaacgcccaaatgttggcctcagaaatccaaaaggatattgcaaattgttttgccgagataatagtgaagtctatcattgaagaaattggtggtgacgtcttttgtttattggtagatgagtcatctgatgtttctggtaaggaacaaatggctgttgttttgagatatgttagcaagcttgggttaataaaagagagacttattggtgtagttcatgtgaaagagacctcagcttcatgtcttaaatctaacattgatagtttgtttggcaagtatggattgagcataaaacaagttagaggacaaggttacgatggagctagcaatatgaggggtgaattcaatggtttaagagctttaatattgagggaaaatagctctgcatattacatccactgctttgctcaccaactccagttagttattgttgcggtagcaaaaaaaaatgatgatattagtgatttctttgatatggtatccttattaataaatgttgctggagcttcttgcaaaagaaaggatatgattcgagaatgtcagcaagaaagagttagcaaagccatatgtagtggacaacttagaagcggaacggggttaaatcaagaacaatcacttcaaagagccggtgacactcgttggtcgtctcattttaaaacccttcagaggttaagcagtttgttccctgatgtaattgaagttctccaatacgttgaaaaagaaggtccaaatgatgccaagagacgccaagcacgtggtctcatggactatttgatggattttgactttgtgtttcacttgcagttaatgttgcttattttgggccatgcaaatgctttgtcattgtcattacaaaggaaagataaagacattttagaggccatggtagaggtgaagttaacaaagcagagatttcagcaaattagggatgatggttgggattctctattagaggatgtgttatccttttgtgaaaaacatggtattccgaagttggacatggatcatgagtacattaatcgccacaagcctaggcaaagaaccaaccgaactaactatcaacactatagatatgattgcttgaaccctgttattgacttacagcttatagagttcaatgatcgtttcaatgaggtgaattctgaattgcttacccacatggctgcttttagtcccaataattcttttggtgcctttaaacatgagagtttgatggaattggctaaggcataccctgatgatttcagcccagtggaactagatgatctcagtagtgaacttcattgttacattgataatgtgagagctgatgcaagatttgctcaattgggtactatttctgagcacggtaaactaatggtggatacaaaaaaacatcttgctttttcattggtctatcggcttctcaaacttgtgctagttctccctattgcaactgcatcagtagagagatcattttcagcaatgaaaattgtgaagacggtcctacgaaaccggatcggtgatgactttatgaatgattgtgtcattagcttcatggaacaagaacttcttgatacaatttcaaataatgatgtgatagttcgattccagaagatggatggacacaatcgtagagtgaaattataaaaggtacacttgtaaaagcttattttatcatgttatgtttttgctaattttgtctttttattatacgtgttaaattttatcattatattatcaatattcgttatgtcaccctattatgcatagggtttgataattatgagtcgtaagtccgaccccggtggagatttatcctagattcgcccctgtg

SEQ ID NO: 15420 - DNA, 2658 bp, Zea Mays
agcgccgagcggcccagcttgcccagttgattagtccttgcgtgtcttgcgatagcccacagcccagcagtagtccaccaacgaagcgtcgatctgtcttcatttctgacggctcgcggacggcgcggcgccaccaccaaagcgtcgatccatcttctcgtttctcagggctcgcggacggcgcagcacagttttatcttcctttcctcgccctcgccaggccggcaccggtaggctgcaaggtatcgcgccgccgcgttggacctcctccaagtctccaactcacgttatgccagggaaccaaagtttgatggaacggtttttgaaaagaaaattgcctccagctagtgactctaatgatcctggtgccgatggagagacatcaagaaggggagcaaatgcatcaaacactaaccttgaccgtacagcgagtcatcgtcctttgcgagtttcacgaaaccagagatagcaatgagggccaaggtggtaatgatgcatttgtaaaagatggttgggatggctttaacaaattgaaaaggctccaagatcatgtaggcaccggacctgacagttttcataacacggcagtaaaaagatgcgacaatttgatgaagcctaatcagtccattgatagtgctattggcaagcaacagaatatcactaaggagcagtatcttattagattaaatacttctattgatgccgtccgatacttgttgcatcaaggcttagccttccgtggtcacgatgaatcagaaaagtctaaaaatcaaggaaattttcgggagttggtgaagcttttggcaaagcaaaatgacaaaagaaataaggccctggggctggggaacgcccaaatgttggcctcagaaatccaaaaggatattgcaaattgttttgccgagataatagtgaagtctatcattgaagaaattggtggtgacgtcttttgtttattggtagatgagtcatctgatgtttctggtaaggaacaaatggctgttgttttgagatatgttagcaagcttgggttaataaaagagagacttattggtgtagttcatgtgaaagagacctcagcttcatgtcttaaatctaacattgatagtttgtttggcaagtatggattgagcataaaacaagttagaggacaaggttacgatggagctagcaatatgaggggtgaattcaatggtttaagagctttaatattgagggaaaatagctctgcatattacatccactgctttgctcaccaactccagttagttattgttgcggtagcaaaaaaaaatgatgatattagtgatttctttgatatggtatccttattaataaatgttgctggagcttcttgcaaaagaaaggatatgattcgagaatgtcagcaagaaagagttagcaaagccatatgtagtggacaacttagaagcggaacggggttaaatcaagaacaatcacttcaaagagccggtgacactcgttggtcgtctcattttaaaacccttcagaggttaagcagtttgttccctgatgtaattgaagttctccaatacgttgaaaaagaaggtccaaatgatgccaagagacgccaagcacgtggtctcatggactatttgatggattttgactttgtgtttcacttgcagttaatgttgcttattttgggccatgcaaatgctttgtcattgtcattacaaaggaaagataaagacattttagaggccatggtagaggtgaagttaacaaagcagagatttcagcaaattagggatgatggttgggattctctattagaggatgtgttatccttttgtgaaaaacatggtattccgaagttggacatggatcatgagtacattaatcgccacaagcctaggcaaagaaccaaccgaactaactatcaacactatagatatgattgcttgaaccctgttattgacttacagcttatagagttcaatgatcgtttcaatgaggtgaattctgaattgcttacccacatggctgcttttagtcccaataattcttttggtgcctttaaacatgagagtttgatggaattggctaaggcataccctgatgatttcagcccagtggaactagatgatctcagtagtgaacttcattgttacattgataatgtgagagctgatgcaagatttgctcaattgggtactatttctgagcacggtaaactaatggtggatacaaaaaaacatcttgctttttcattggtctatcggcttctcaaacttgtgctagttctccctattgcaactgcatcagtagagagatcattttcagcaatgaaaattgtgaagacggtcctacgaaaccggatcggtgatgactttatgaatgattgtgtcattagcttcatggaacaagaacttcttgatacaatttcaaataatgatgtgatagttcgattccagaagatggatggacacaatcgtagagtgaaattataaaaggtacacttgtaaaagcttattttatcatgttatgtttttgctaattttgtctttttattatacgtgttaaattttatcattatattatcaatattcgttatgtcaccctattatgcatagggtttgataattatgagtcgtaagtccgaccccggtggagatttatcctagattcgcccctgtg

SEQ ID NO: 15421 - DNA, 2533 bp, Zea Mays
attatccacggaatggaatcgaatcgtccaggaaaggggaggaccggagcgagagcgagatggtagtggtggccgccgcggccgcacgcggccgcgctgtaaagcccctgttcctcgtcctcgtccaccacagccgccccgcgccccgcctcccccgccgaaccgcccgcgcccggccgctgcgcttcctctcctgctcgacctcagcgccgccgctgttcgcagccgtcgcatccatggactcgccgccccagggttaccgcaccaacgtcggcatctgcctcgccgacccatccctcaccaagattttctcggcttctaggatcgacattcctagcgcgtggcagatgcctcagggtggtatagatgcaggggaagaaccaagggcggctgccttcagggaattgagagaagagactggtgtcacatccgcagagatcgtggctgaggctcccgtctggttaacatatgatttcccgccagatgtcagaaccaaactgaatgccaggtggggaaccgattggaaaggccaagctcaaaaatggtttttatttaggcttactggaaatgacgatgagattaaccttaatggtgatggatctgagaagccagagtttggtgaatggacatggatgacacccaaggaagttatcgaaaaggcagttgatttcaagaaacctgtatatgaggaagcattgaaacactttgccccctacctgcagtcagatccagccgcttcatcatagaagatttggccaatttgcttgcatccctgctgtatctggacccccaataatttgacacgacgcaatgtagccatgaggtgtgctatacaatttgatagtgtgtggcctgtttgagtgaattatatatgccagcattggatcctcgccctctacttagtcacataagtatacaataagtggtggaaacagtttcagccaatctggaacatggtggccagtgtatcttgtctgccaatgactgaatgctttaggttgaagcaataccataattccagagagactgcggtacagcaacctcaggttatgtggggggtcgtcggcaaaacgacgctcgtttggcattggctacggcagaaactagtgtctggctgccattggttgtgggaggagcagaggaaaacaaattgttggttacactctgtactactgcgtcatgatattgtcggctttcgctttgtggcttttggaggaaaactggagatgtggcagctttggctttacgcatcttggaggaacaggagatataaacacacgcatttcgtttttttttttgttgagttgctgtgctccgtcttcgctgcagaatccagatcaaatgtggtggtggtggtgctgctgctgctggctacacgaatgtggatagcagcatttgtcgtccttgaatgcctgccgagaaagcaacgaattccaacactgtgcgaaaacaggcaagggggaggaccgggagacaagagagacacatgtactgctgcttattatcccatggatggaatgatggatgcatctgatccgatcaccggccgtctgccgaggtgaaggactcggcgaagccggcggggcgggcggggatgctgcccttgctgtcgtccaggctcatgacgctcccgccgccgtccgtcaggccgccggcctccgcgtcctgccagctcttcaccatctgcagcagcggcaggtgcaggtcgatgcccaggtagtcctcggcctcgtccttgacttggcgctggaaagatgaagctcaacaactttatggagaaatggaagagaagcattccttcaggaatgtgctgtccggatcttgagatgcttgaaggggaagtgttgtgtgaaaagcttggggctgagacctgggtgcatgctttcagtgttactgatctgccactggcgcctgctgagaggttcgcagcacttttccgtgatcaggacattggaatggtagaaaaaatagctatggaccttgcagatatagcttatggtgataatgcacactggaagttgcggaaccttgttaaggaggggcatcatgtcttaatcttttcgcagacccgtaaaatgctgaaccttattcaggacttccaagagggtcctggagctccaatatttttactaaccacacaagttggtggacttggacttaccaaggcagcacgcgtcatagtagttgatcctgcttggaacccaagtacagacaatcaaagcgtagatcgtgcttaccgaattggccagaacaaagatgtgattgtatacagctatcttgtttgtgccctcaggagattccagagctttttagtttgccacaacaaggttttgatgtttccctcacgcataagcagttgcaagaagagcatggtcaacaagttgttatgtaagagatctgttttagctgaacttcctttaatcgagcacggttaatttgattttgatgatagtattatgtgccactatcacataaatttgaaatattagtggtgtcaatcagacagaacctgcgaatcgcaaaagtgttgaat

SEQ ID NO: 15422 - DNA, 2317 bp, Zea Mays
attatccacggaatggaatcgaatcgtccaggaaaggggaggaccggagcgagagcgagatggtagtggtggccgccgcggccgcacgcggccgcgctgtaaagcccctgttcctcgtcctcgtccaccacagccgccccgcgccccgcctcccccgccgaaccgcccgcgcccggccgctgcgcttcctctcctgctcgacctcagcgccgccgctgttcgcagccgtcgcatccatggactcgccgccccagggttaccgcaccaacgtcggcatctgcctcgccgacccatccctcaccaagattttctcggcttctaggatcgacattcctagcgcgtggcagatgcctcagggtggtatagatgcaggggaagaaccaagggcggctgccttcagggaattgagagaagagactggtgtcacatccgcagagatcgtggctgaggctcccgtctggttaacatatgatttcccgccagatgtcagaaccaaactgaatgccaggtggggaaccgattggaaaggccaagctcaaaaatggtttttatttaggcttactggaaatgacgatgagattaaccttaatggtgatggatctgagaagccagagtttggtgaatggacatggatgacacccaaggaagttatcgaaaaggcagttgatttcaagaaacctgtatatgaggaagcattgaaacactttgccccctacctgcagtcagatccagccgcttcatcatagaagatttggccaatttgcttgcatccctgctgtatctggacccccaataatttgacacgacgcaatgtagccatgaggtgtgctatacaatttgatagtgtgtggcctgtttgagtgaattatatatgccagcattggatcctcgccctctacttagtcacataagtatacaataagtggtggaaacagtttcagccaatctggaacatggtggccagtgtatcttgtctgccaatgactgaatgctttaggttgaagcaataccataattccagagagactgcggtacagcaacctcaggttatgtggggggtcgtcggcaaaacgacgctcgtttggcattggctacggcagaaactagtgtctggctgccattggttgtgggaggagcagaggaaaacaaattgttggttacactctgtactactgcgtcatgatattgtcggctttcgctttgtggcttttggaggaaaactggagatgtggcagctttggctttacgcatcttggaggaacaggagatataaacacacgcatttcgtttttttttttgttgagttgctgtgctccgtcttcgctgcagaatccagatcaaatgtggtggtggtggtgctgctgctgctggctacacgaatgtggatagcagcatttgtcgtccttgaatgcctgccgagaaagcaacgaattccaacactgtgcgaaaacaggcaagggggaggaccgggagacaagagagacacatgtactgctgcttattatcccatggatggaatgatggatgcatctgatccgatcaccggccgtctgccgagtgttactgatctgccactggcgcctgctgagaggttcgcagcacttttccgtgatcaggacattggaatggtagaaaaaatagctatggaccttgcagatatagcttatggtgataatgcacactggaagttggtcaggatgtctcatgcaaactatcattcatcatgtctttgctgcggaaccttgttaaggaggggcatcatgtcttaatcttttcgcagacccgtaaaatgctgaaccttattcaggaagcaatattattagagggctacaagtttttgcgcgaccaaggtttctgagcgcgaaaggattgtgaaggacttccaagagggtcctggagctccaatatttttactaaccacacaagttggtggacttggacttaccaaggcagcacgcgtcatagtagttgatcctgcttggaacccaagtacagacaatcaaagcgtagatcgtgcttaccgaattggccagaacaaagatgtgattgtatacagctatcttgtttgtgccctcaggagattccagagctttttagtttgccacaacaaggttttgatgtttccctcacgcataagcagttgcaagaagagcatggtcaacaagttgttatgtaagagatctgttttagctgaacttcctttaatcgagcacggttaatttgattttgatgatagtattatgtgccactatcacataaatttgaaatattagtggtgtcaatcagacagaacctgcgaatcgcaaaagtgttgaat

SEQ ID NO: 15423 - DNA, 2193 bp, Zea Mays
attatccacggaatggaatcgaatcgtccaggaaaggggaggaccggagcgagagcgagatggtagtggtggccgccgcggccgcacgcggccgcgctgtaaagcccctgttcctcgtcctcgtccaccacagccgccccgcgccccgcctcccccgccgaaccgcccgcgcccggccgctgcgcttcctctcctgctcgacctcagcgccgccgctgttcgcagccgtcgcatccatggactcgccgccccagggttaccgcaccaacgtcggcatctgcctcgccgacccatccctcaccaagattttctcggcttctaggatcgacattcctagcgcgtggcagatgcctcagatgcaggggaagaaccaagggcggctgccttcagggaattgagagaagagactggtgtcacatccgcagagatcgtggctgaggctcccgtctggttaacatatgatttcccgccagatgtcagaaccaaactgaatgccaggtggggaaccgattggaaaggccaagctcaaaaatggtttttatttaggcttactggaaatgacgatgagattaaccttaatggtgatggatctgagaagccagagtttggtgaatggacatggatgacacccaaggaagttatcgaaaaggcagttgatttcaagaaacctgtatatgaggaagcattgaaacactttgccccctacctgcagtcagatccagccgcttcatcatagaagatttggccaatttgcttgcatccctgctgtatctggacccccaataatttgacacgacgcaatgtagccatgaggtgtgctatacaatttgatagtgtgtggcctgtttgagtgaattatatatgccagcattggatcctcgccctctacttagtcacataagtatacaataagtggtggaaacagtttcagccaatctggaacatggtggccagtgtatcttgtctgccaatgactgaatgctttaggttgaagcaataccataattccagagagactgcggtacagcaacctcaggttatgtggggggtcgtcggcaaaacgacgctcgtttggcattggctacggcagaaactagtgtctggctgccattggttgtgggaggagcagaggaaaacaaattgttggttacactctgtactactgcgtcatgatattgtcggctttcgctttgtggcttttggaggaaaactggagatgtggcagctttggctttacgcatcttggaggaacaggagatataaacacacgcatttcgtttttttttttgttgagttgctgtgctccgtcttcgctgcagaatccagatcaaatgtggtggtggtggtgctgctgctgctggctacacgaatgtggatagcagcatttgtcgtccttgaatgcctgccgagaaagcaacgaattccaacactgtgcgaaaacaggcaagggggaggaccgggagacaagagagacacatgtactgctgcttattatcccatggatggaatgatggatgcatctgatccgatcaccggccgtctgccgagtgttactgatctgccactggcgcctgctgagaggttcgcagcacttttccgtgatcaggacattggaatggtagaaaaaatagctatggaccttgcagatatagcttatggtgataatgcacactggaagttgcggaaccttgttaaggaggggcatcatgtcttaatcttttcgcagacccgtaaaatgctgaaccttattcaggacttccaagagggtcctggagctccaatatttttactaaccacacaagttggtggacttggacttaccaaggcagcacgcgtcatagtagttgatcctgcttggaacccaagtacagacaatcaaagcgtagatcgtgcttaccgaattggccagaacaaagatgtgattgtatacagctatcttgtttgtgccctcaggagattccagagctttttagtttgccacaacaaggttttgatgtttccctcacgcataagcagttgcaagaagagcatggtcaacaagttgttatgtaagagatctgttttagctgaacttcctttaatcgagcacggttaatttgattttgatgatagtattatgtgccactatcacataaatttgaaatattagtggtgtcaatcagacagaacctgcgaatcgcaaaagtgttgaat

SEQ ID NO: 15424 - DNA, 3589 bp, Zea Mays
attatccacggaatggaatcgaatcgtccaggaaaggggaggaccggagcgagagcgagatggtagtggtggccgccgcggccgcacgcggccgcgctgtaaagcccctgttcctcgtcctcgtccaccacagccgccccgcgccccgcctcccccgccgaaccgcccgcgcccggccgctgcgcttcctctcctgctcgacctcagcgccgccgctgttcgcagccgtcgcatccatggactcgccgccccagggttaccgcaccaacgtcggcatctgcctcgccgacccatccctcaccaagattttctcggcttctaggatcgacattcctagcgcgtggcagatgcctcagggtggtatagatgcaggggaagaaccaagggcggctgccttcagggaattgagagaagagactggtgtcacatccgcagagatcgtggctgaggctcccgtctggttaacatatgatttcccgccagatgtcagaaccaaactgaatgccaggtggggaaccgattggaaaggccaagctcaaaaatggtttttatttaggcttactggaaatgacgatgagattaaccttaatggtgatggatctgagaagccagagtttggtgaatggacatggatgacacccaaggaagttatcgaaaaggcagttgatttcaagaaacctgtatatgaggaagcattgaaacactttgccccctacctgcagtcagatccagccgcttcatcatagaagatttggccaatttgcttgcatccctgctgtatctggacccccaataatttgacacgacgcaatgtagccatgaggtgtgctatacaatttgatagtgtgtggcctgtttgagtgaattatatatgccagcattggatcctcgccctctacttagtcacataagtatacaataagtggtggaaacagtttcagccaatctggaacatggtggccagtgtatcttgtctgccaatgactgaatgctttaggttgaagcaataccataattccagagagactgcggtacagcaacctcaggttatgtggggggtcgtcggcaaaacgacgctcgtttggcattggctacggcagaaactagtgtctggctgccattggttgtgggaggagcagaggaaaacaaattgttggttacactctgtactactgcgtcatgatattgtcggctttcgctttgtggcttttggaggaaaactggagatgtggcagctttggctttacgcatcttggaggaacaggagatataaacacacgcatttcgtttttttttttgttgagttgctgtgctccgtcttcgctgcagaatccagatcaaatgtggtggtggtggtgctgctgctgctggctacacgaatgtggatagcagcatttgtcgtccttgaatgcctgccgagaaaggttggtggtggtagagagagagagagaggagttcttctctcctctcgtctcgtctacctctgtgttctcttctctctcgcctcctcagatgggatggcattacatgtttccttcctggagaagaggctaccgaggccttttcttggtgacgtcgatgcgccaccagccccagtcactgccactgcccactgggaccaaccccgcggacggaggaccacttgtacaccaggtcgatcacgaccataccgtgggctggcctgcagatcttcaagtatacgtgccagtctttatcttggcataaacagatagtaccagtgcacgtagcctctagccagagtgcatgagtcaaagcgctatattctctgtagtgaagtgaagcacgcacgcacgttgcttttccttcactccatcggccaccaagttattaatgcattgcatgccagctggcccatctgattcctagcgacaggaacatcattaagcaactagtactagagtaatgtaggttgatgtcgatgatgtgtcccctcagaatttttgttgacactcgttgctggacctggacctgactagatggcggatggggggccattaccatcatccattcattgtgcgtgcagtactcctgctaccgcctccacggctctccatccatccatccatccatttgcatgcatgacccatcaagtatggaggaagcattacactacacatgtcttggccgaccatattctgctcgacggaaaaaagccagagattggagtctcaacactgactggaattacacatgaaaaaaaaaacaaatgagatgcctaccaccaatgccaaaaaaaaaaaaaaaaactaggaaacatatcatcatgatcatgtatctacaaagcagagcaggagaagaagaagcataaggttgtgcacatggacgacgttcgtttgtacctacagcaacgaattccaacactgtgcgaaaacaggcaagggggaggaccgggagacaagagagacacatgtactgctgcttattatcccatggatggaatgatggatgcatctgatccgatcaccggccgtctgccgaggtgaaggactcggcgaagccggcggggcgggcggggatgctgcccttgctgtcgtccaggctcatgacgctcccgccgccgtccgtcaggccgccggcctccgcgtcctgccagctcttcaccatctgcagcagcggcaggtgcaggtcgatgcccaggtagtcctcggcctcgtccttgacttggcgctggaaagatgaagctcaacaactttatggagaaatggaagagaagcattccttcaggaatgtgctgtccggatcttgagatgcttgaaggggaagtgttgtgtgaaaagcttggggctgagacctgggtgcatgctttcagtgttactgatctgccactggcgcctgctgagaggttcgcagcacttttccgtgatcaggacattggaatggtagaaaaaatagctatggaccttgcagatatagcttatggtgataatgcacactggaagttggtcaggatgtctcatgcaaactatcattcatcatgtctttgctgcggaaccttgttaaggaggggcatcatgtcttaatcttttcgcagacccgtaaaatgctgaaccttattcaggaagcaatattattagagggctacaagtttttgcgcgaccaaggtttctgagcgcgaaaggattgtgaaggacttccaagagggtcctggagctccaatatttttactaaccacacaagttggtggacttggacttaccaaggcagcacgcgtcatagtagttgatcctgcttggaacccaagtacagacaatcaaagcgtagatcgtgcttaccgaattggccagaacaaagatgtgattgtatacagctatcttgtttgtgccctcaggagattccagagctttttagtttgccacaacaaggttttgatgtttccctcacgcataagcagttgcaagaagagcatggtcaacaagttgttatgtaagagatctgttttagctgaacttcctttaatcgagcacggttaatttgattttgatgatagtattatgtgccactatcacataaatttgaaatattagtggtgtcaatcagacagaacctgcgaatcgcaaaagtgttgaat

SEQ ID NO: 15425 - DNA, 2167 bp, Zea Mays
attatccacggaatggaatcgaatcgtccaggaaaggggaggaccggagcgagagcgagatggtagtggtggccgccgcggccgcacgcggccgcgctgtaaagcccctgttcctcgtcctcgtccaccacagccgccccgcgccccgcctcccccgccgaaccgcccgcgcccggccgctgcgcttcctctcctgctcgacctcagcgccgccgctgttcgcagccgtcgcatccatggactcgccgccccagggttaccgcaccaacgtcggcatctgcctcgccgacccatccctcaccaagattttctcggcttctaggatcgacattcctagcgcgtggcagatgcctcagggtggtatagatgcaggggaagaaccaagggcggctgccttcagggaattgagagaagagactggtgtcacatccgcagagatcgtggctgaggctcccgtctggttaacatatgatttcccgccagatgtcagaaccaaactgaatgccaggtttttatttaggcttactggaaatgacgatgagattaaccttaatggtgatggatctgagaagccagagtttggtgaatggacatggatgacacccaaggaagttatcgaaaaggcagttgatttcaagaaacctgtatatgaggaagcattgaaacactttgccccctacctgcagtcagatccagccgcttcatcatagaagatttggccaatttgcttgcatccctgctgtatctggacccccaataatttgacacgacgcaatgtagccatgaggtgtgctatacaatttgatagtgtgtggcctgtttgagtgaattatatatgccagcattggatcctcgccctctacttagtcacataagtatacaataagtggtggaaacagtttcagccaatctggaacatggtggccagtgtatcttgtctgccaatgactgaatgctttaggttgaagcaataccataattccagagagactgcggtacagcaacctcaggttatgtggggggtcgtcggcaaaacgacgctcgtttggcattggctacggcagaaactagtgtctggctgccattggttgtgggaggagcagaggaaaacaaattgttggttacactctgtactactgcgtcatgatattgtcggctttcgctttgtggcttttggaggaaaactggagatgtggcagctttggctttacgcatcttggaggaacaggagatataaacacacgcatttcgtttttttttttgttgagttgctgtgctccgtcttcgctgcagaatccagatcaaatgtggtggtggtggtgctgctgctgctggctacacgaatgtggatagcagcatttgtcgtccttgaatgcctgccgagaaagcaacgaattccaacactgtgcgaaaacaggcaagggggaggaccgggagacaagagagacacatgtactgctgcttattatcccatggatggaatgatggatgcatctgatccgatcaccggccgtctgccgagtgttactgatctgccactggcgcctgctgagaggttcgcagcacttttccgtgatcaggacattggaatggtagaaaaaatagctatggaccttgcagatatagcttatggtgataatgcacactggaagttgcggaaccttgttaaggaggggcatcatgtcttaatcttttcgcagacccgtaaaatgctgaaccttattcaggacttccaagagggtcctggagctccaatatttttactaaccacacaagttggtggacttggacttaccaaggcagcacgcgtcatagtagttgatcctgcttggaacccaagtacagacaatcaaagcgtagatcgtgcttaccgaattggccagaacaaagatgtgattgtatacagctatcttgtttgtgccctcaggagattccagagctttttagtttgccacaacaaggttttgatgtttccctcacgcataagcagttgcaagaagagcatggtcaacaagttgttatgtaagagatctgttttagctgaacttcctttaatcgagcacggttaatttgattttgatgatagtattatgtgccactatcacataaatttgaaatattagtggtgtcaatcagacagaacctgcgaatcgcaaaagtgttgaat

SEQ ID NO: 15426 - DNA, 1459 bp, Zea Mays
attatccacggaatggaatcgaatcgtccaggaaaggggaggaccggagcgagagcgagatggtagtggtggccgccgcggccgcacgcggccgcgctgtaaagcccctgttcctcgtcctcgtccaccacagccgccccgcgccccgcctcccccgccgaaccgcccgcgcccggccgctgcgcttcctctcctgctcgacctcagcgccgccgctgttcgcagccgtcgcatccatggactcgccgccccagggttaccgcaccaacgtcggcatctgcctcgccgacccatccctcaccaagattttctcggcttctaggatcgacattcctagcgcgtggcagatgcctcagggtggtatagatgcaggggaagaaccaagggcggctgccttcagggaattgagagaagagactggtgtcacatccgcagagatcgtggctgaggctcccgtctggttaacatatgatttcccgccagatgtcagaaccaaactgaatgccaggtggggaaccgattggaaaggccaagctcaaaaatggtttttatttaggcttactggaaatgacgatgagattaaccttaatggtgatggatctgagaagccagagtttggtgaatggacatggatgacacccaaggaagttatcgaaaaggcagttgatttcaagaaacctgtatatgaggaagcattgaaacactttgccccctacctgcagtcagatccagccgcttcatcatagaagatttggccaatttgcttgcatccctgctgtatctggacccccaataatttgacacgacgcaatgtagccatgaggtgtgctatacaatttgatagtgtgtggcctgtttgagtgaattatatatgccagcattggatcctcgccctctacttagtcacataagtatacaataagtggtggaaacagtttcagccaatctggaacatggtggccagtgtatcttgtctgccaatgactgaatgctttaggttgaagcaataccataattccagagagactgcggtacagcaacctcaggttatgtggggggtccattggatcctcgccctctacttagtcacataagtatacaataagtggtggaaacagtttcagccaatctggaacatggtggccagtgtatcttgtctgccaatgactgaatgctttaggttgaagcagtaccataactctagagagactgctgtacagcaacctcaggtttatagcactggctacggcagataccagtgtctggctggctggctggcatttgttgtggggagcacagaggaaaacaaattgttggttacactctgtactactgcgtcatgatattgtcggctttggcttttggaggaactggagatttatttggcagctttggctttatggttcttggaggaacaggagattcacacatgcattttgcttttttttttttttttttt

SEQ ID NO: 15427 - DNA, 795 bp, Zea Mays
ttcaacctattggtgaccgttctttttggccgaaggtggatttttcaaaggaggtatgtgcaccaatggctaaaagaacggttggacgacaaaggaaaaacagaatgaagagttgtctagagggtggcagtgggacaaaaagaaaggtcacacagaatgctcaaggaacaactaagataaaaagacagtacacttgtccaagctgtggtcaactaggtcatcggaagaccagttataaatgccctttgaatggaacaaagaagaggaagaggaaaccaaggaagaatactacgaaaaattagatcccgaaagagttgcggacttctacatcacaacctagtacttcaaataaagatgtagaaactggtggcgatgaactagtgcttgttcaaaccggtggccaagcagacagcaatgctgatgcagatctagtgcttgttcaaaccggtggccatgaagacagcaatgctgatgcagatctagtccgtgttgaaactggtggccaagcagaacttgtgcgtgttgaaacccctcctagttatccacccagaagtttgaagtggcttgtgaagaaaattactccgaggaagaaaatgaagcgtgatgtgcaaagggagtagctagaagtggcttgtgaaatctgtgaaacaatctgttttctgttctccacccagaagcgtgaagcgtgaagtggcttgtgaaatctgtttctatccgtttgtgaacaatctgttttctgtttgtatccgtttgtgaaatctgtttgtatccgtttgtgaacaatatgttttctgt

SEQ ID NO: 15428 - DNA, 1332 bp, Zea Mays
cgccggttcgcccacctggccttcagcttccagcgcatcgttcttctccgtgctcgccagtgggttgctgacagagatggtagtggccgccgcggccgcactctacctcgctgtaaagcccctgcccctcgtcctcgtcctcgtccaccacagccgccccgcgccctcctccgcgctccgcctcccccgccgaaccgccagcgcctggctgccgcgcttcccctcctgctcgacctcagcgccgccgccgttcgcagccgtcgcatccatggacgcgccgccccagggttaccgcaccaacgtcggcatctgcctcgccgacccatccctcaccaagattttctcggcttctaggatcgacattcctagcgcgtggcagatgcctcagggtggtatagatgcaggggaagaaccaagggcggctgccttcagggaattgagagaagaaactggtgtcacatccgcagagatcgtggctgaggctcctgtctggttaacatatgatttccccatggatgtgagaaccaagctgaatgccaggtagggaaccgattggaaaggccaagctcaaaaatggtttttatttaggcttactggaaatgatgatgagattaaccttaatggtgatggatctgagaagccagagtttggtgaatggacatggatgactccccaggaagttattgaaaaggcagttgatttcaagaaacctgtatatgaggaagcattgaaacactttgccccctacctacagtcagatcccgccgcttcatcatagaagattcgaccaatttgcatacattatattttttttttatttggaaactaccctgctgtatctggacccccaataatttgacacgacgcattggagccatggaggtgtgctacaatttgatagtgtgtggcctgtttcagtgaattatatatgccagcattggatcctcgccctctacttagtcacataagtatacaataagtggtggaaacagttcagccaatctggaacatggtggccagtgtatcttgtctgccaatgactgaatgctttaggttgaagcagtaccataactctagagagactgctgtacagcaacctcaggtttatagcactggctacggcagataccagtgtctggctggctggctggcatttgttgtggggagcacagaggaaaacaaattgttggttacactctgtactactgcgtcatgatattgtcggctttggcttttggaggaactggagatttatttggcagctttggctttatggttcttggaggaacaggagattcacacatgcattttgcttttttttttttttttttt

SEQ ID NO: 15429 - DNA, 1238 bp, Zea Mays
cgccggttcgcccacctggccttcagcttccagcgcatcgttcttctccgtgctcgccagtgggttgctgacagagatggtagtggccgccgcggccgcactctacctcgctgtaaagcccctgcccctcgtcctcgtcctcgtccaccacagccgccccgcgccctcctccgcgctccgcctcccccgccgaaccgccagcgcctggctgccgcgcttcccctcctgctcgacctcagcgccgccgccgttcgcagccgtcgcatccatggacgcgccgccccagggttaccgcaccaacgtcggcatctgcctcgccgacccatccctcaccaagattttctcggcttctaggatcgacattcctagcgcgtggcagatgcctcagggtggtatagatgcaggggaagaaccaagggcggctgccttcagggaattgagagaagaaactggtgtcacatccgcagagatcgtggctgaggtttttatttaggcttactggaaatgatgatgagattaaccttaatggtgatggatctgagaagccagagtttggtgaatggacatggatgactccccaggaagttattgaaaaggcagttgatttcaagaaacctgtatatgaggaagcattgaaacactttgccccctacctacagtcagatcccgccgcttcatcatagaagattcgaccaatttgcatacattatattttttttttatttggaaactaccctgctgtatctggacccccaataatttgacacgacgcattggagccatggaggtgtgctacaatttgatagtgtgtggcctgtttcagtgaattatatatgccagcattggatcctcgccctctacttagtcacataagtatacaataagtggtggaaacagtttcagccaatctggaacatggtggccagtgtatcttgtctgccaatgactgaatgctttaggttgaagcagtaccataactctagagagactgctgtacagcaacctcaggtttatagcactggctacggcagataccagtgtctggctggctggctggcatttgttgtggggagcacagaggaaaacaaattgttggttacactctgtactactgcgtcatgatattgtcggctttggcttttggaggaactggagatttatttggcagctttggctttatggttcttggaggaacaggagattcacacatgcattttgcttttttttttttttttttt

SEQ ID NO: 15430 - DNA, 2368 bp, Zea Mays
ccctacgcccaccccacccgacccgggcacacaacaccaattcaccaaacttctcaagactgtcactgtccactccaccacctcacttgcgatgcgaacaagagcaaagccctgaaatccttctccccctgcacgcacctgcagacctgctctctcgcgcgcatctcccgtgcccctcactgtttagtggcgacgactgggcgacagtcgccgccgccgcccgctaggggccgtgcccctggtctccatcttcgggcgcttcgcccaccagatatgagcagctggcaattcgattttgaggccattatttgataacccgggacaagtgcactgttacctgaccattttagcttgttcagatggctacacagttgccatgcttcacacagctcagtccaccgtcttgtagttggataaaagatgtcgggaactgcaaggctacgcctgatagggtagccagaagtgcccgagctttgggccactgtcacttccggtgctgtgcaggcccccgtagtgcaaactctttcaagaagaaagactctttcgagaagaaagactctttcctcgaacttcatccggaggtatctctgctccgtggcgagaagagtgccgaggttgtgccaatgaaaggttcctctgatgggggtctgttagagggactgggggtgccgccggaccgaaatgattacagtgaggctaagatcaaggtagttggagttggaggcgggggttcgaatgcagtcaatcggatgattgagagctccatgaacggcgttgagttttggatcgtgaacactgatgtgcaggccataagaatgtctcctgtgctcccccacaatagactgcagattggacaggagttgactcgaggcctgggcgctgggggaaaccctgatattgggatgaatgcagcaaaggagagcagcgagtccattcaggaagctctttttggtgctgacatggtttttgtgacggctggaatgggtggaggaactggaactggaggtgctcctgtgattgctggaatagccaagtccatgggtatactaaccgttggcatagtcacaacgcctttctcgttcgaggggagaagacgggcagttcaagctcaggagggaatagcagcattgagaaatagtgtggacaccctaatcgtcatcccaaatgataagttgctgtctgctgtttctccaaatacacctgtaactgaagcatttaatctggctgatgatattcttcgtcaaggcattcgtggcatatctgatataattacggttcctgggttggttaatgttgattttgctgacgtacgtgctatcatgcaaaatgcagggtcatccttgatgggtatagggactgctacaggaaagtcaagagcaagggatgctgctcttaacgccatccagtcgccgctgcttgatattggaattgaaagagccacaggcattgtgtggaatatcactgggggaactgacctgactttgtttgaggtttggtccagccattttctagtattctccacacaatgtagattgtttttccgacttgaattttgttaattttacatacatcttagctaacatggcaaaactgagcatgctttgtatttgactttgcttgccctttcgtgtttcaaaagactgggaaaaaacattcacgatcagctcctagggtcatgttctctatcatgtttgtttttataagcaataggggttaagaaatcagaggtgcttgcatttttgttgctttcaggtgaatgctgcggccgaaattatctacgaccttgtcgatccaaacgctaatctgatatttggcgccgtcatagacccgtcactgagtgggcaggtgagcataaccttgatagctactggcttcaaacggcaggatgaaccagaaggccgcgtgtcgaagggtgggcaacaaggtgagaatggccgacgcccatccccagcagagggcagcagcacggtggagatcccagagttcctgcgacgaagaggaccttctcgcttcccacgagtttgactgtcctgtcctgcacctgtatgatatgctccacccacccttaggtcagaattagatgatcttgtatggcacctagtcttctctaggcatcgatcgtctctagcggtttgttctttctagttttctttttttccccgccaccaattcttatggttatggtcatcaataatgtgtagctgctgtgagctctctagcgctatatgtaatgtagtccgtggagaatgtgttttccctgttacactggatctgattagaatggtagctgaagaagtgatggttgcctgcattagtatggtagctgaccaaggccatgtttgttttcctcccagattaaatattccag

SEQ ID NO: 15431 - DNA, 2105 bp, Zea Mays
accccacccgacccgggcacacaacaccaattcaccaaacttctcaagactgtcactgtccactccaccacctcacttgcgatgcgaacaagagcaaagccctgaaatccttctccccctgcacgcacctgcagacctgctctctcgcgcgcatctcccgtgcccctcactgtttagtggcgacgactgggcgacagtcgccgccgccgcccgctaggggccgtgcccctggtctccatcttcgggcgcttcgcccaccagatatgagcagctggcaattcgattttgaggccattatttgataacccgggacaagtgcactgttacctgaccattttagcttgttcagatggctacacagttgccatgcttcacacagctcagtccaccgtcttgtagttggataaaagatgtcgggaactgcaaggctacgcctgatagggtagccagaagtgcccgagctttgggccactgtcacttccggtgctgtgcaggcccccgtagtgcaaactctttcaagaagaaagactctttcgagaagaaagactctttcctcgaacttcatccggaggtatctctgctccgtggcgagaagagtgccgaggttgtgccaatgaaaggttcctctgatgggggtctgttagagggactgggggtgccgccggaccgaaatgattacagtgaggctaagatcaaggtagttggagttggaggcgggggttcgaatgcagtcaatcggatgattgagagctccatgaacggcgttgagttttggatcgtgaacactgatgtgcaggccataagaatgtctcctgtgctcccccacaatagactgcagattggacaggagttgactcgaggcctgggcgctgggggaaaccctgatattgggatgaatgcagcaaaggagagcagcgagtccattcaggaagctctttttggtgctgacatggtttttgtgacggctggaatgggtggaggaactggaactggaggtgctcctgtgattgctggaatagccaagtccatgggtatactaaccgttggcatagtcacaacgcctttctcgttcgaggggagaagacgggcagttcaagctcaggagggaatagcagcattgagaaatagtgtggacaccctaatcgtcatcccaaatgataagttgctgtctgctgtttctccaaatacacctgtaactgaagcatttaatctggctgatgatattcttcgtcaaggcattcgtggcatatctgatataattacggttcctgggttggttaatgttgattttgctgacgtacgtgctatcatgcaaaatgcagggtcatccttgatgggtatagggactgctacaggaaagtcaagagcaagggatgctgctcttaacgccatccagtcgccgctgcttgatattggaattgaaagagccacaggcattgtgtggaatatcactgggggaactgacctgactttgtttgaggtgaatgctgcggccgaaattatctacgaccttgtcgatccaaacgctaatctgatatttggcgccgtcatagacccgtcactgagtgggcaggtgagcataaccttgatagctactggcttcaaacggcaggatgaaccagaaggccgcgtgtcgaaggtacctcttggtgggcaacaaggtgagaatggccgacgcccatccccagcagagggcagcagcacggtggagatcccagagttcctgcgacgaagaggaccttctcgcttcccacgagtttgactgtcctgtcctgcacctgtatgatatgctccacccacccttaggtcagaattagatgatcttgtatggcacctagtcttctctaggcatcgatcgtctctagcggtttgttctttctagttttctttttttccccgccaccaattcttatggttatggtcatcaataatgtgtagctgctgtgagctctctagcgctatatgtaatgtagtccgtggagaatgtgttttccctgttacactggatctgattagaatggtagctgaagaagtgatggttgcctgcattagtatggtagctgaccaaggccatgtttgttttcctcccagattaaatattccag

SEQ ID NO: 15432 - DNA, 2359 bp, Zea Mays
gcggacaagcccgccggcctcgtgcacgtcaagggctggggtcttgggtctcggcgcgcgcggcggcgacgaggtcgcggcgaccctggcggaggagggcagccgcctgcacgccatccgcgccgcgctagaggacatcgaggaccacttcgagtgcttgcttatactataaaaccatacttgtttgcgtctgtggaatgtgcacacccatgggaatttttcttgatggtccactgctgacatgcacagacatctcttctaccactgccatctcaaaggccatgctgctataccagcggtagctgcaacgattcatctagttgtggcaaattttggcacatccccaacactcgagagatcaagaaagcaaagacatgccaaccttcaaaatgcattgagaattttggaccttgtaccatccaagcatcatcatgaccaagaggaagttccgtcacatcaccgccttatcaatggctgtatgggtgacatctcggcagtccaatcaagactgcacactatgcgtaagggtaaagagagttttgctaactcaagctcaaatcaagcacagcctaaacacagtaacattgtctcaaataatacctcagtttgccccttcataactagactcacaaaggaggacatgtttatgcaaattgtggagttacataggagtggacaaattagttcagatgcatccattttggtatctgcactgagttactgtgctgctgagaaaattgttaccccaattggaaatcgctcatcgggttttccaaaatatgacagcaaaaagtaccgtgacatggacagcattaatttctggctatgcccaggataatcaggtggaaccgtgtctccatttatttgcactgatgaggcactctgtgtgcaagcccaatgacgtcacattcgcaactatcttcagtgtctgcactaatcatgcatttcttgtacttggtaaaagtgtgcaagccctacagatgagaatgggttttgattcgtatgtgcatgtgtccaatgcattgatatcaatgtatgcaaagtgcgggagtattggtgaagcacgagctgtatttgagagcattagatgcaaagacttggtctcatggaactccttgatctttggatattcacagcatggccttgctgagcattgcctatatttgctaagagaaatggaagggcatataacaccggatgcaatctccttcctaggtgtgctctcatcatgccggcatgcatgccttgtggcagagggccgacggtgcttcagggcaatgattgaacatggagtagtaccagagatagatcactactcatgtatggtggatctttttggccgtgcagggctgcttgatgaagcatgggatctgatccagacgatgcccatgcctccaaatggtgttgtatggggctcccttctagcttcctgtagggtgcatggaagcacttggatcggcatacaagctgcagagcaccgtctaaagctggaaccaagttgtgctgcaattcatgttcagctagcgaatttgtatgggagcattgggtgctgggatgatgtggcaagagtgaggaaggtgatgaaggagagagggctgaaaacaaacatcgggtgcagttggatagaagttggcaataaagtttatacatttacagcagaaaacagatcaaagaaccaggtaaacaatgtcctggttgttcttgattgcttgcagtcacatatggatcacgagtatgatatactactgatcgagggtctggattgggattatcctgagcatatcaagttaagtttaaacactatataaatttgaagatgattgctcgttatgttcaagttcatttgaagaggcactcaataggaattgacatcacacctcaaatatctgcaacctagatgtaacatatgtaagtttaacacctgtgtttgagcatttgaaacgattagatttgctcagtttacttttatctgagctactgctgatatccatattcattttgtaccaactgtattaacctagattagggtggttgtaattatctaaagtagtgtttggtttaggagcgagatggaattgagcggcggagtgactattttcctaatatgctgaatctcgacgactctaagggctagtttggcaaccgcatttttccatggtattttcaatttcccaagtgaaaataaactaattttctttgggaaaacgaaaaacccttgagaaaatgtggttcctaaactagtctaaaaaaaactagtcctaaaaggagaatgttcctctctctactttttccgaaaattatcataatgaggccttttcccctgaccgggagcatcaacatgactgcagagattgtgccg

SEQ ID NO: 15433 - DNA, 1998 bp, Zea Mays
gcggacaagcccgccggcctcgtgcacgtcaagggctggggtcttgggtctcggcgcgcgcggcggcgacgaggtcgcggcgaccctggcggaggagggcagccgcctgcacgccatccgcgccgcgctagaggacatcgaggaccacttcgagtgcttgcttatactataaaaccatacttgtttgcgtctgtggaatgtgcacacccatgggaatttttcttgatggtccactgctgacatgcacagacatctcttctaccactgccatctcaaaggccatgctgctataccagcggtagctgcaacgattcatctagttgtggcaaattttggcacatccccaacactcgagagatcaagaaagcaaagacatgccaaccttcaaaatgcattgagaattttggaccttgtaccatccaagcatcatcatgaccaagaggaagttccgtcacatcaccgccttatcaatggctgtatgggtgacatctcggcagtccaatcaagactgcacactatgcgtaagggtaaagagagttttgctaactcaagctcaaatcaagcacagcctaaacacagtaacattgtctcaaataatacctcagtttgccccttcataactagactcacaaaggaggacatgtttatgcaaattgtggagttacataggagtggacaaattagttcagatgcatccattttggtatctgcactgagttactgtgctgctgagaaaattgttaccccaattggaaatcgctcatcgggttttccaaaatatgacagcaaaaagtaccgtgacatggacagcattaatttctggctatgcccaggataatcaggtggaaccgtgtctccatttatttgcactgatgaggcactctgtgtgcaagcccaatgacgtcacattcgcaactatcttcagtgtctgcactaatcatgcatttcttgtacttggtaaaagtgtgcaagccctacagatgagaatgggttttgattcgtatgtgcatgtgtccaatgcattgatatcaatgtatgcaaagtgcgggagtattggtgaagcacgagctgtatttgagagcattagatgcaaagacttggtctcatggaactccttgatctttggatattcacagcatggccttgctgagcattgcctatatttgctaagagaaatggaagggcatataacaccggatgcaatctccttcctaggtgtgctctcatcatgccggcatgcatgccttgtggcagagggccgacggtgcttcagggcaatgattgaacatggagtagtaccagagatagatcactactcatgtatggtggatctttttggccgtgcagggctgcttgatgaagcatgggatctgatccagacgatgcccatgcctccaaatggtgttgtatggggctcccttctagcttcctgtagggtgcatggaagcacttggatcggcatacaagctgcagagcaccgtctaaagctggaaccaagttgtgctgcaattcatgttcagctagcgaatttgtatgggagcattgggtgctgggatgatgtggcaagagtgaggaaggtgatgaaggagagagggctgaaaacaaacatcgggtgcagttggatagaagttggcaataaagtttatacatttacagcagaaaacagatcaaagaaccaggtaaacaatgtcctggttgttcttgattgcttgcagtcacatatggatcacgagtatgatatactactgatcgagggtctggattgggattatcctgagcatatcaagttaagtttaaacactatataaatttgaagatgattgctcgttatgttcaagttcatttgaagaggcactcaataggaattgacatcacacctcaaatatctgcaacctagatgtaacatatctacggaggaaatgatccatccatcggatccattcaatttcaaaggcggcgactctgtcgtcctcacttcgtcttcaatcacaaattaag

SEQ ID NO: 15434 - DNA, 994 bp, Zea Mays
aaaaaatatactaaatgttgattgaatcatccaaccaaacgccagcatcccgagatcatagatacaacccaatgtagagtattattaggagcgatggggacggaaccaagtggacaaaccgcccgctgatgcgaaagaatcccgtgccgagtcatttccggatacattattactcctgtctcgtctagtctgcactagccgccattgaatgcccagcagctccactccatcgatgagctctctcagtgcttgccaccgcaacaaagacaccaggcagtggacaaagagaccatggaagcttagatcacgcaaggaattcaatcactatgctagaatccaaatcaacgcgcacacaatgcctttagattctacaatcgtctatttggattggatccctactctaacttttaagcatcatgatggcaacacagcgatgactttgaaatgttccttttcctttttttctcatatcagtgcctcttgccagtttttttcttttctttctatccaacaatcgagcagtggttacatagcatagatgttattattgacatgtatagctgaagaccgatagtgataacagtggagcatgtcctgttactaattactacattgaaaccacatgtaaataaaaaaggacctagccatatgaacccagtaactcacaacttcaaatatggttgtcagttcacaagaaattaaagacaactagtaacaaggttaacactacgacattttttttttcaaagcaaacatccagtgaacaacattgatataccacggtataatatgaatatacgatcgagctcaataatgatcaaacgctgtaaattttgacactatcaaagcaaacctttcaagttttcaacaagcaagtaaagaatggccgaaagaaatgaattatttcaattagttacatagaaaattgcaggtctccccccccaaaaaaatccatccccacaatgtcagcagttaaagatgtaaacagaagagt

SEQ ID NO: 15435 - DNA, 427 bp, Zea Mays
atgaggcgacgggggagaaggagtggtaggggaggaagtgggcgaaggggaggcggagccaggtgcggcgcgcggggtcgaaggcgtggaggcagccgccgccgtcgggacgcgggtggcggaggaggaggaggcgcaggctggggagcagcgcgaggagctgcggcgagagggtctcgtggaagaggcgcgagacggggcggcacacgacggcgtcgcgcagctgcaggcggagcagcacgttgtggagcgcgtccggcggcaggtggtggatcggcggcgggggctgcgcttccgcgggcggggcggggccagaaccggcggccatggtggattcggggtggggttaggtggggaacacaccggggcgcggagaagaagacgaggccgggggtggttagttcaatccactcgcgtaccacacgct

SEQ ID NO: 15436 - DNA, 2484 bp, Zea Mays
gcctctgcgtctcttattccctctcttttttttttatagtacaacacaatccacccgcgtcggcacgagcacccacagcagttggcgcgcaccaaaaccctaccctccctctgctctcagccgccaacgccatgggctccaccgccgctgcctccgtgctcccggtgtccgccggctccggcgagaacctcgtcctcatcctcgactacggctcgcagtacacgcacctcatcacccgccgcgtgcgccagctcggcgtcctctccctctgcgtgtccggcacggcgccgctcgcctccctggagggcctccgcccacgcgccgtcatcctctccggcgggccccactcagtccacgcccccggggcgcccgccttccccgagggattcctgggcttcgcggctgccgcgggcgcgcacgtgctcggcgtctgctatgggatgcagctcctcgtgcagtcccttggaggcgccgttgtgtccggggagcgccaggagtacgggaaaatggacgttgaggtgacggcggcctcctccgcgctctacgggcaggcggagaccgggaagcgccagacggtgtggatgagccatggcgacgaggtggttaggctgccggaagggttcgaggtggttgctcgcagcgtgcagggagccgtcgcggccattgagaaccgggagaatcgcttttatgggctccaataccaccccgaggtggtgttgattcaacggtcgccgccactctcgttcacaaggcgataggagataggcttcactgtgtttttgttgataatggtctattaaggagggagagcgagtaatgacaacctttgaaagtgatttgcacctgccagtgacatgtgttgatgcctcagagcaatttctcagcaagttaaagggtgtcgaagacccagagaagaaaagaaagatcattggcagggaattcatagctgtctttgatgactttgctcacaagctggaacagaagataggaaaaaggcccgaatatttagttcaagggactttgtaccctgatgtaattgaatcatgcccacctcctgggagtggaaggacacattcccacaccatcaaaagccatcacaacgtaggtggccttccaaaagatatgaaattaaaacttattgaaccactcaagctcctattcaaggacgaggtgcggaagttggggggtattttgaatgtcccagattcatttttgaagcgacacccatttcctgggcctggtcttgcagtacgtgtcctaggtgatgttacacaaggcaatgctttggaggttcttcgtcaggtggacgagatatttgttcagtctattaaagacgcaggcctgtatgataaaatttggcaagcttttgctgtgttcttgccagtacagacagttggagttcagggtgaccagcgaacccactccaatgccgttgttttaagggcaatcaccagtgaggatggcatgactgcagattggtactattttgagcatgcattcctggtagatgtggtaaacaagatttgcaacaatgtgcgtggcatcaaccgcgtttgccaggacatcacatctaagccgcctgcaacggtggagtgggagtaggaggatgggagggaccctatggtctggtctgtctgtctgtcttgggttaaaacccgctatgtcatgtcactgctctcaacacgttgcatggatgtcacaaatagcaagcagttaagagtgaccattcgtcagtcaatacattaggtttatcatgaattgtttgttacttaatacaaggactgcattgcatggattgtaaagtgtaaccaccagtagctaagccttgtagacaacgacaaagcatgggaggatggccctggggttgaacaccagcagctcctccaggttggagtacaccccggccgaccccgcaaccgagtcgtactctgactcctcggcggcgtcggcgacggcctcctcctctggtaccgcttctttgggccgcttcacccttcccgcgatgacccggcacaccagcatcgcccttggagtggtttcctcatccagtccggcgccagcctccgcagcgtcgtgcgcgcggccgctcgtggccatggtcagcaccccgccgctgctgaagccgtcgcggatgatgccgcacgctgcgcaggtccccgcggcgtcgcagaggtgcgtggcgccgttgaggccgagcgagcaggccagggtggcgcagtggaaccggagcagctcgttgccgtcggcggtgcagcgcgggtgcctgttgctgttggccgccgctaccgccagctgctcggcgcccgccctggccttgacagcgtcacggtactcctcgaagcgggccagcgttctgggcgtgttgttcaccttgaggatgcggtcgaccttgcacacggggctctgcttcttgagccagctggactggaagatgatctcgatgatgttgcggctcgtgtcatcagtgccaagctcggacactgc

SEQ ID NO: 15437 - DNA, 1863 bp, Zea Mays
tgacgagaactcgctgcggagcacttaaagtggcgaagccagacgaggaaaatattacaatcgcaaataacttcatccgcaccagaggcgttctccctcccccgctgcaccttctgtcacgagtccctcgcccggtgcggcgcgccgcctgctcgacgaaatggggcagtgggacgcgctagtggacgccgcgctcgcgaggctggaggccaggagcctgctacgtgccacgcgccccatcgcgctcgcggcgccgaccgcggcgccgaggaccttcgacggcccggggccttgggaccatgccgccgtcgagatccgcctcgaccgcgacaccctgcaccagtggctggccgaaggcgatgaggcgggtggacaggaagaacagctggatggaaacctgatcctcttctcagggaatgactacatgggcctcagctcgcatccggcagtccgtgaggctgctgtgaagttggtgcttgccaggcagctcaagattatggcatggggccaagaggctcggcgttgatatgtggttatactacttatcacaaattggtggaggaatcattagcacgactgaagaaaaaagaggattgccttctttgccccactggattttctgccaacatggctgcaattacagccctggggagtattacctctcttttgtcccctggaagaaaacctgcagagcacgagagaattgccatcttctcagatgcgctgaaccatgcttcaatcattgatgggattcgccttttggagcggcagcaagaagcattagtgtttgtgtacaagcactgtgacatgttccatctcgatttcctgctgtccagttgctcattggaaaagaaagttgttgtcacagatagcctgttcagcatggatggtgatttcgctccatttcctgaacttattaaattacgcagaaagtatggttatttgttggtcatcgatgatgctcatgggacacttgtttgcggtgagaatggtggtggtgcagctgagctgtttgaatgtgaaaaggacattgacataggtgttggcaccttaagcaaggctgccggctgccagggtggttttataacatgcagcactcaatggaaaaggctgattcagtcgcgaggtcgctcgttcatattttcaactgctttgccagtgccagttgttgcttctgtgcatgcggcactctatgtctcgagtaaggagacatggcggagatcagtgatctggaggcatgtgcagtattttgcctcattgaccaagctcgagataactagtcccataatttccattgtggttggaagtgaagcaggagcgctcagggctagcaggtatttgctaagatctggatttcatgttacaccaatcagaccacccacggtgccacccaactcgtgcaggctgagaatcactcttagtgcttcccattcctcggacgacatcaaaaggctggttgatgcactcacaccatggctccctgtcaaatatggtaatgggagctatgctacagcttcgaaactctaacccatcggaggagagtctggtatcctgcggaaagaggcggcatgctagtgggtggttgacgcgtacgcatttatatattctgtggcgtgacgcctacgtccttccccatttataagcaaatactactgttttgttagataccaatgttgaaataggcttattattattattattattagcaagacaccgtcgtgacaccataaatatttaggttgcatctagttttggaacgattttctctattttctataatgggatgatctcacgaagcaatattattgtttgtaatgaggatggagccatcttggggtgatcatcatcaaaacacaagtaaaa

SEQ ID NO: 15438 - DNA, 1831 bp, Zea Mays
tgacgagaactcgctgcggagcacttaaagtggcgaagccagacgaggaaaatattacaatcgcaaataacttcatccgcaccagaggcgttctccctcccccgctgcaccttctgtcacgagtccctcgcccggtgcggcgcgccgcctgctcgacgaaatggggcagtgggacgcgctagtggacgccgcgctcgcgaggctggaggccaggagcctgctacgtgccacgcgccccatcgcgctcgcggcgccgaccgcggcgccgaggaccttcgacggcccggggccttgggaccatgccgccgtcgagatccgcctcgaccgcgacaccctgcaccagtggctggccgaagatttggttaggcgatgaggcgggtggacaggaagaacagctggatggaaacctgatcctcttctcagggaatgactacatgggcctcagctcgcatccggcagtccgtgaggctgctgtgaaggcagctcaagattatggcatggggccaagaggctcggcgttgatatgtggttatactacttatcacaaattggtggaggaatcattagcacgactgaagaaaaaagaggattgccttctttgccccactggattttctgccaacatggctgcaattacagccctggggagtattacctctcttttgtcccctggaagaaaacctgcagagcacgagagaattgccatcttctcagatgcgctgaaccatgcttcaatcattgatgggattcgccttttggagcggcagcaagaagcattagtgtttgtgtacaagcactgtgacatgttccatctcgatttcctgctgtccagttgctcattggaaaagaaagttgttgtcacagatagcctgttcagcatggatggtgatttcgctccatttcctgaacttattaaattacgcagaaagctcatgggacacttgtttgcggtgagaatggtggtggtgcagctgagctgtttgaatgtgaaaaggacattgacataggtgttggcaccttaagcaaggctgccggctgccagggtggttttataacatgcagcactcaatggaaaaggctgattcagtcgcgaggtcgctcgttcatattttcaactgctttgccagtgccagttgttgcttctgtgcatgcggcactctatgtctcgagtaaggagacatggcggagatcagtgatctggaggcatgtgcagtattttgcctcattgaccaagctcgagataactagtcccataatttccattgtggttggaagtgaagcaggagcgctcagggctagcaggtatttgctaagatctggatttcatgttacaccaatcagaccacccacggtgccacccaactcgtgcaggctgagaatcactcttagtgcttcccattcctcggacgacatcaaaaggctggttgatgcactcacaccatggctccctgtcaaatatggtaatgggagctatgctacagcttcgaaactctaacccatcggaggagagtctggtatcctgcggaaagaggcggcatgctagtgggtggttgacgcgtacgcatttatatattctgtggcgtgacgcctacgtccttccccatttataagcaaatactactgttttgttagataccaatgttgaaataggcttattattattattattattagcaagacaccgtcgtgacaccataaatatttaggttgcatctagttttggaacgattttctctattttctataatgggatgatctcacgaagcaatattattgtttgtaatgaggatggagccatcttggggtgatcatcatcaaaacacaagtaaaa

SEQ ID NO: 15439 - DNA, 578 bp, Zea Mays
tatctatatatgtgacacacgctttttttctgttctccatcgtcaaccccacgcatggccgcatgcaactttttgcctgcattggtgcgtcttgtgcggttgagaaaatagaggaaagaaatatcatatgggtcccacttcctattttctctcttggcgtaatctgcatgctacccaaaccaaccacgctcggcctctctctccagtctccacccaccgcgcatgccatgcgtcgtagctgcgcatcgcgcccaccaggccgcccaatctcctattcatcttctccaaactgcctctccccacccatctcgcccatgttcgcgaaacccagagccgaaccgcccccagtcgacctcggctctccggcgagctgccctccatgtcctggccacacagtcgttcgtcgcgccgatcgcccaggaagatctgtgatgcgctcgtcgttgccgagatcgcgattcgtttatgagcttcgaggaatcgatgatcaagcatggcgacagagtgatcgaactcttcgagttctacgtgattgaagaccctgagcatctgtttggtgaaggcaagtgtcctctgac

SEQ ID NO: 15440 - DNA, 2007 bp, Zea Mays
ctgtcagccgagccaagttccgaatgggggtggcttggcttggctggctacaagtcactcaaattgaaataagactgaaacggacaaaggcaaacacagcaagcaaagcaggaatcggaggtagacgacgaccaccacggggataacaaccaaacctcccaaataccatccacgaacgaaagggaagggaaggtcgtttaggcggcgcgccgaggccgtggctatggaccccaacggcggcggcgacaccatcctcggcgatcccctccttcccctctcgcagtccagcaagcagcagcaggatcctctcgccggcgtctccgactaccttgggcggtccgtgcaccgcggaagctccgggggatggagatccgcgctcttcgtcgtggtccaacgcctccgccgccgcctccgtcaacgcctggtccggcacggcctgcatcatgcccctgctcggcgccttcctcgccgacgcctacctgggccgctaccgatccgtcatcatcgcctgcaccctctacgtcctgggttatggtatgctgacgctgtcggcgacggtgccggcgctgcagccgtcgcacatgccctgcagggaggatggcgtctcgtcgtcgtcatgccaacccgggtggccgcaggtggccttcttctacgtgtccctgtacctgatcgccatcgcgcagggcgccgacaagccgtgcgggctggctttcgcggcggaccagttcgacgcggagcaccagggggagcgcgcctcccgcgggtccctattcaactggtggttcttctgcatggccatcggcatctccgtgtcagtctccgtggtgggctacatccaggagtacgtcgggtgggggctcggcttcggcgtcccctgcgccatcgtgctctgcgccttcctcgtcttcctgttgggcaccccgacgtaccgcctgtacgcacccacgccggaagccaagtccccgttccgccgcctggcacgcggcctggccgccaacgccaacaaaacaggaggcctctccgcctcgcattcggaggaggaggaagcggcagcagacgcgcggtgcgtgctgcgcctgctgcccatctgggcggcgagcctggcgtacggcgtggtgtacgcgcagattatgacgctgttcaacaagcaggggcgcaccctggaccgccacatcggggacggccttgagctgcctccggcggcgctgcagacgctgggccccgcgagcatcctgctgttcgtgcctgtttacgaccgcgcggtggtgccggcgctgcggtgggcgacgggcaacccgtcggggctgagcatgctgcagcgcgtgggcgcgggcatggcggtgtcgctggcgggcgtggcggtggccgcgctggtggaggcgcggcggctggcgatggcgcgggagcacgggttggtggacgacccgtcggcgacggtgcccatgagctgggcgtggatcgtgccgcagtacgccatgatgggggtggcggacgtgctggccgtggtgggcctgcaggagctcttctacgaccagatgcccgacgggctccgcagcctggggctggcgctctacctcagcgtcatgggcatcgggggattcatcagcagtctgctcatctccctcatcgacggcgtcaccggcagcggtggcggggacagctggttcgccgacaacctcaaccgcgcgcacgtcgactacttctactggctgctggcggggctcagcgccgtcgaactcgcgctcttcctctactttgcgcgctcctacgtctacaagcacaagcccaattaatcctgctagtgcagtctgtacagatgaatggaaagcagatgcaggcatgcagcccgtcgtcttcatgttttacttgtccttgtaaaacaaggcaaactcagctcaaagtcaaattcagattctagcccccaataattttcgtcggccgccgcgtggctcgctatccggacatggtggccgctcatcgcgcttcttctgctcttgcagctcgctg

SEQ ID NO: 15441 - DNA, 2117 bp, Zea Mays
gaaaaatccgctacgtacaagtcgaccgagtgaggaagttgaactaattgccgagcgaagaagcaaaaatcatatcaatagccatagaagcacatcattagtcttgcgcttttcactagtttggattcggacttcctgagctccgccgattccttcctcctccacctcctctcctcccccagccgccgccgctgctcatcttatctttatctcatccccatcgcccgcccttgctccgcccccgggaatcgtcgatggcggcgtcggcgttgtggcagccgcaggagcaggggctccgcgagatctgcgcccacctggaggcgcatatctcacccaactctgaccaggcccgcatctggcagcagctccagcagtacagccagttccccgacttcaacaattacctactcttcatcctggcccgcggagaggggaaatctattgaagttagacaggcagctggtctattactgaaaaacaatctgcgaacgacttacatttccatgcaatcttcatcccagcattatgttaagtctgagctgttaccatgtataggggcaaccaatagggcaattagatccacagttggaacagtgatcagtgtgcttttccaaattgtacgagttgctggatggattgagttgtttcaggcactccataagtgtttggagagtaatgacctggatcacatggaaggtgctatggatgcgatatacaagatctgtgaggatgtccctgaagagcttgatgttgatgttcctggtttgtctgaacgaccgatcaacgtgtttatgccaagaatactgcagtttttccagtcaccacatgcaagtttgagaaaactatcattgggtatcataaaccagtacatagtagtgatgccatcggcactctacatgtctatggatcagtatattcagggattattcaaccttgcaaaggactcttcagcagatgttcggaaactggtttgttcagcctgggttcagctcattgaagttcgcccatcaattttggagccacatcttaaaaatgttactgaattgattctgcaagctaataaagattcagatgatgaagttgctctggaagcttgtgagttctggtctgcatactgtgatgtgagcatgcctcctgaaggtttacaggagttcttgccgcacttaatcccgactttgttgtcgaacatggtatatgctgacggcgatgagtcccttgatgatgctgaggaagatgaatcctttccagacagggaccaggatttgaagccccgcttccatgattctcgattgcatggatcggaaactggagatgacgatgatgatgctgatgctgtaaatgtctggaacctgcggaagtgtagtgctgctgggttggatgttctctctaatgtgtttggtgacagcatccttccaactttaatgccattgattgagcaaaacttggctcgaacagatgatgattcttggaaggagagggaaactgctgttttatgtctaggcgctatagcagaggggtgcattagtggtctatacccacaccttcctcagattgttgcctttctaatcccacttcttgatgataaatttcctcttatacggagtattacgtgttggacgctctctcgatacagcaaattcattgttcagagccttgatcatccaaatggacgcggacaatttgataagattcttatgggagtgctcagaaggatattggatactaacaaaagagtgcaagaggctgcttgttcggcgtttgcaatccttgaagaggaagcttctgaagaattagtaccccatttggaagtaattttgcagcacctcatgtgtgcctatagaaaataccagagacgaaatctccggatactctatgacgccctcggtaccctggctgatgctgttggagcagaattaaatcaggcaaaatatctagacatatttatgccgcctttaatcacaaagtggcagcaactttccaattatgacaaagatctatttccactccttgaatgctttacatctatcgcacagtttggagtaggagctgcttttagttgcttattgtggttccaaactagaagaacctgaataattagaaggatttctacagttttg

SEQ ID NO: 15442 - DNA, 5156 bp, Zea Mays
gaaaaatccgctacgtacaagtcgaccgagtgaggaagttgaactaattgccgagcgaagaagcaaaaatcatatcaatagccatagaagcacatcattagtcttgcgcttttcactagtttggattcggacttcctgagctccgccgattccttcctcctccacctcctctcctcccccagccgccgccgctgctcatcttatctttatctcatccccatcgcccgcccttgctccgcccccgggaatcgtcgatggcggcgtcggcgttgtggcagccgcaggagcaggggctccgcgagatctgcgcccacctggaggcgcatatctcacccaactctgaccaggcccgcatctggcagcagctccagcagtacagccagttccccgacttcaacaattacctactcttcatcctggcccgcggagaggggaaatctattgaagttagacaggcagctggtctattactgaaaaacaatctgcgaacgacttacatttccatgcaatcttcatcccagcattatgttaagtctgagctgttaccatgtataggggcaaccaatagggcaattagatccacagttggaacagtgatcagtgtgcttttccaaattgtacgagttgctggatggattgagttgtttcaggcactccataagtgtttggagagtaatgacctggatcacatggaaggtgctatggatgcgatatacaagatctgtgaggatgtccctgaagagcttgatgttgatgttcctggtttgtctgaacgaccgatcaacgtgtttatgccaagaatactgcagtttttccagtcaccacatgcaagtttgagaaaactatcattgggtatcataaaccagtacatagtagtgatgccatcggcactctacatgtctatggatcagtatattcagggattattcaaccttgcaaaggactcttcagcagatgttcggaaactggtttgttcagcctgggttcagctcattgaagttcgcccatcaattttggagccacatcttaaaaatgttactgaattgattctgcaagctaataaagattcagatgatgaagttgctctggaagcttgtgagttctggtctgcatactgtgatgtgagcatgcctcctgaaggtttacaggagttcttgccgcacttaatcccgactttgttgtcgaacatggtatatgctgacggcgatgagtcccttgatgatgctgaggaagatgaatcctttccagacagggaccaggatttgaagccccgcttccatgattctcgattgcatggatcggaaactggagatgacgatgatgatgctgatgctgtaaatgtctggaacctgcggaagtgtagtgctgctgggttggatgttctctctaatgtgtttggtgacagcatccttccaactttaatgccattgattgagcaaaacttggctcgaacagatgatgattcttggaaggagagggaaactgctgttttatgtctaggcgctatagcagaggggtgcattagtggtctatacccacaccttcctcagattgttgcctttctaatcccacttcttgatgataaatttcctcttatacggagtattacgtgttggacgctctctcgatacagcaaattcattgttcagagccttgatcatccaaatggacgcggacaatttgataagattcttatgggagtgctcagaaggatattggatactaacaaaagagtgcaagaggctgcttgttcggcgtttgcaatccttgaagaggaagcttctgaagaattagtaccccatttggaagtaattttgcagcacctcatgtgtgcctatagaaaataccagagacgaaatctccggatactctatgacgccctcggtaccctggctgatgctgttggagcagaattaaatcaggcaaaatatctagacatatttatgccgcctttaatcacaaagtggcagcaactttccaattatgacaaagatctatttccactccttgaatgctttacatctatcgcacaggcattgggaccaggatttgctcagtttgcggaaccagtgtttcaaaggtgcattaatcttatccattcgcaacagttgtcaaagattgatcctactgcagctggtgcggtgtatgatagagaattcattgtttgttcgttggacctactatcaggacttgcagaaggtcttggcgctggtattgaaagtcttgtaagttcttgtctttgcatatggtatcattttcctttccaagtacattttagacatgatcacacaaacacaccactcacatacccacatgggtgcgtcaggggtggagttcaattatttaatcactgggttcaatcatactatcatattggggccatgctgaatatgtacttagaggaagaatttgctattgttaaaggggaactatagtgtattaaacaaaagtcatcagggccagctggctctgatggaagcacgtagctccgcccctggggtgtatcctagcacacatctaaactagggaggcctactcacagaatgtatcacatgcgatgatgtgagccttaagatctgagtgggttaaatcctaaacaactgactacacttggttctctttcggtagtatctgatgtttttgctgtatacgcatgaatctcttattccatttgaacttgttaatgtgagacaatacactgattgttccaatatctactgtattgtttacagaaactatcagttctgttacatggggctgtaccatgggtgccgagtagattgtccagctggtaattttgctggtagctgagtttaggcatttttaaacaagttccaattttgtctgtatagcatgtagcctggatgaatgttaggtgcgactcctcaggcttgagatctcacttctcactggaatacctggatatgtttttcttttccaatagaaagagttagttccacttgttatgttggttttaccaatgactgtcatatagcgaagtctgagtttattgaaactaagtgctgatgctcggccatgatactgtgcagtaataaaattgaattaaatccttccatctctcacccctctccaacctgtctatccgtccttcgacccaccatctttcactattacctttctagcattgagtttgggcttgcaaaaccttcgccgcaccattcatgtcatggcctggctgcctgagaccgtgtgcattgtggcacacctatggacatgtggttcgacttccacctttcttaaactcggagcaggtgcacacaatagccacccatttgagttgagcgctgaacctctctatggccagtatagtggccatgtgcaattctgctcaggtgaacagtgcgcgtgcattcctgttcacaacgggctcaaggtgggtatgttgcccgtttgttggttagagattagaccagattgcgctgttttctatttccttaatccaagagagctttattcaaggtcaagtctttccatgtcactaagcaaggaatagattgaagtttctagttacctccctgccctttgtggggtatagtcacactattgtggatttgtggtttagagccaaataaagtatggctgtgacatctgcactttcttgaagggcaattactctgaagaattttcctttgtttgctgattatacttaaaattttagtaccaaatatgcataagttcgataggtatcttttctttgttgtaggttgcacagagcaatttgagagatctacttttgcaatgctgcatggatgaagcagctgatgttcgacaaagtgcccttgcacttcttggagacctttctagggtttgcccaatacatttgcatccacgccttcaagaatttcttactgttgcagcgaagcaactgaaccctcaatctgtgaaggatgcggtatcagtagctaacaatgcttgttgggctattggagaattagcaatcaagattggcaaagaaatagcgcctgtggtgatcaccgttgtttcgtgcttggttcccattctaaaatccccagagggttcgaacaagtcacttgttgaaaacagcgcgatcactcttgggaggcttagctgggtgtgtccagacatcgtggcccctcatatggagcatttcatgcaagcatggtgcaaggcgttgtgcatgatcagagatgattttgagaaagaggactcgtttcatggattgtgtgcaatggtggcagcaaaccctacaggaggcgccggttcattagcttacatctgccaggcctgtgcgagttggactgagataaaaagtgaaggtcttcacaatgaggtgtgccagattctgaatggctacaagcagctgcttggaaacggtgggtgggaacaatgcatggccaccctgcaaccggatgttgtgcagaaattagctagatacggagtatgatggcagtggtcgtgtggtttcatcatctttttacgctggagacagagatcaggatggttggttgggtcacttgctcgtccctcccgcctcccagtcccaggcaaggcgacattgatgaaagaaaggtttttgtagcgtgtaattcttttcttcctcttcctcttagcagcaacaccaagcttttcatggatttcagttggcctgcattaaacatattaacatgtaaggattcgaggaacacatggtggaacacaaaatgcaaaaaagtagggaaaggtaattgttgggggccttcgtcttccaaaggtcctcaaaaacacgactaacatgtttttcaagtataatatactgttacaggaaccttcgactttgagatgaagatgcgcacggtatgaaaggcacggtctggaagattgatgaatcagttccgaagctatggatgaagaagcttcggcttagcgcaaagacggtgatggagaatgaaaccgacctaaaggggaaaagactgcttagtcctcgacagattactccttagtcaatagtaaatgtcaaggacatgaatgtaattttacccaggctgcgtcctgtgcctataaatagatgaacagtaacacaatattgttcacgctgatttgtaatcactcgcacgtcgctcttggattcttacattctgtcaagccgaagatacaaatgtaattcaatattattaatgtttgttcatgatcatata

SEQ ID NO: 15443 - DNA, 4639 bp, Zea Mays
ctacgtacaagtcgaccgagtgaggaagttgaactaattgccgagcgaagaagcaaaaatcatatcaatagccatagaagcacatcattagtcttgcgcttttcactagtttggattcggacttcctgagctccgccgattccttcctcctccacctcctctcctcccccagccgccgccgctgctcatcttatctttatctcatccccatcgcccgcccttgctccgcccccgggaatcgtcgatggcggcgtcggcgttgtggcagccgcaggagcaggggctccgcgagatctgcgcccacctggaggcgcatatctcacccaactctgaccaggcccgcatctggcagcagctccagcagtacagccagttccccgacttcaacaattacctactcttcatcctggcccgcggagaggggaaatctattgaagttagacaggcagctggtctattactgaaaaacaatctgcgaacgacttacatttccatgcaatcttcatcccagcattatgttaagtctgagctgttaccatgtataggggcaaccaatagggcaattagatccacagttggaacagtgatcagtgtgcttttccaaattgtacgagttgctggatggattgagttgtttcaggcactccataagtgtttggagagtaatgacctggatcacatggaaggtgctatggatgcgatatacaagatctgtgaggatgtccctgaagagcttgatgttgatgttcctggtttgtctgaacgaccgatcaacgtgtttatgccaagaatactgcagtttttccagtcaccacatgcaagtttgagaaaactatcattgggtatcataaaccagtacatagtagtgatgccatcggcactctacatgtctatggatcagtatattcagggattattcaaccttgcaaaggactcttcagcagatgttcggaaactggtttgttcagcctgggttcagctcattgaagttcgcccatcaattttggagccacatcttaaaaatgttactgaattgattctgcaagctaataaagattcagatgatgaagttgctctggaagcttgtgagttctggtctgcatactgtgatgtgagcatgcctcctgaaggtttacaggagttcttgccgcacttaatcccgactttgttgtcgaacatggtatatgctgacggcgatgagtcccttgatgatgctgaggaagatgaatcctttccagacagggaccaggatttgaagccccgcttccatgattctcgattgcatggatcggaaactggagatgacgatgatgatgctgatgctgtaaatgtctggaacctgcggaagtgtagtgctgctgggttggatgttctctctaatgtgtttggtgacagcatccttccaactttaatgccattgattgagcaaaacttggctcgaacagatgatgattcttggaaggagagggaaactgctgttttatgtctaggcgctatagcagaggggtgcattagtggtctatacccacaccttcctcagattgttgcctttctaatcccacttcttgatgataaatttcctcttatacggagtattacgtgttggacgctctctcgatacagcaaattcattgttcagagccttgatcatccaaatggacgcggacaatttgataagattcttatgggagtgctcagaaggatattggatactaacaaaagagtgcaagaggctgcttgttcggcgtttgcaatccttgaagaggaagcttctgaagaattagtaccccatttggaagtaattttgcagcacctcatgtgtgcctatagaaaataccagagacgaaatctccggatactctatgacgccctcggtaccctggctgatgctgttggagcagaattaaatcaggcaaaatatctagacatatttatgccgcctttaatcacaaagtggcagcaactttccaattatgacaaagatctatttccactccttgaatgctttacatctatcgcacaggcattgggaccaggatttgctcagtttgcggaaccagtgtttcaaaggtgcattaatcttatccattcgcaacagttgtcaaagattgatcctactgcagctggtgcggtgtatgatagagaattcattgtttgttcgttggacctactatcaggacttgcagaaggtcttggcgctggtattgaaagtcttaaactatcagttctgttacatggggctgtaccatgggtgccgagtagattgtccagctggtaattttgctggtagctgagtttaggcatttttaaacaagttccaattttgtctgtatagcatgtagcctggatgaatgttaggtgcgactcctcaggcttgagatctcacttctcactggaatacctggatatgtttttcttttccaatagaaagagttagttccacttgttatgttggttttaccaatgactgtcatatagcgaagtctgagtttattgaaactaagtgctgatgctcggccatgatactgtgcagtaataaaattgaattaaatccttccatctctcacccctctccaacctgtctatccgtccttcgacccaccatctttcactattacctttctagcattgagtttgggcttgcaaaaccttcgccgcaccattcatgtcatggcctggctgcctgagaccgtgtgcattgtggcacacctatggacatgtggttcgacttccacctttcttaaactcggagcaggtgcacacaatagccacccatttgagttgagcgctgaacctctctatggccagtatagtggccatgtgcaattctgctcaggtgaacagtgcgcgtgcattcctgttcacaacgggctcaaggtgggtatgttgcccgtttgttggttagagattagaccagattgcgctgttttctatttccttaatccaagagagctttattcaaggtcaagtctttccatgtcactaagcaaggaatagattgaagtttctagttacctccctgccctttgtggggtatagtcacactattgtggatttgtggtttagagccaaataaagtatggctgtgacatctgcactttcttgaagggcaattactctgaagaattttcctttgtttgctgattatacttaaaattttagtaccaaatatgcataagttcgataggtatcttttctttgttgtaggttgcacagagcaatttgagagatctacttttgcaatgctgcatggatgaagcagctgatgttcgacaaagtgcccttgcacttcttggagacctttctagggtttgcccaatacatttgcatccacgccttcaagaatttcttactgttgcagcgaagcaactgaaccctcaatctgtgaaggatgcggtatcagtagctaacaatgcttgttgggctattggagaattagcaatcaagattggcaaagaaatagcgcctgtggtgatcaccgttgtttcgtgcttggttcccattctaaaatccccagagggttcgaacaagtcacttgttgaaaacagcgcgatcactcttgggaggcttagctgggtgtgtccagacatcgtggcccctcatatggagcatttcatgcaagcatggtgcaaggcgttgtgcatgatcagagatgattttgagaaagaggactcgtttcatggattgtgtgcaatggtggcagcaaaccctacaggaggcgccggttcattagcttacatctgccaggcctgtgcgagttggactgagataaaaagtgaaggtcttcacaatgaggtgtgccagattctgaatggctacaagcagctgcttggaaacggtgggtgggaacaatgcatggccaccctgcaaccggatgttgtgcagaaattagctagatacggagtatgatggcagtggtcgtgtggtttcatcatctttttacgctggagacagagatcaggatggttggttgggtcacttgctcgtccctcccgcctcccagtcccaggcaaggcgacattgatgaaagaaaggtttttgtagcgtgtaattcttttcttcctcttcctcttagcagcaacaccaagcttttcatggatttcagttggcctgcattaaacatattaacatgtaaggattcgaggaacacatggtggaacacaaaatgcaaaaaagtagggaaaggtaattgttgggggccttcgtcttccaaaggtcctcaaaaacacgactaacatgtttttcaagtataatatactgttacaggaaccttcgactttgagatgaagatgcgcacggtatgaaaggcacggtctggaagattgatgaatcagttccgaagctatggatgaagaagcttcggcttagcgcaaagacggtgatggagaatgaaaccgacctaaaggggaaaagactgcttagtcctcgacagattactccttagtcaatagtaaatgtcaaggacatgaatgtaattttacccaggctgcgtcctgtgcctataaatagatgaacagtaacacaatattgttcacgctgatttgtaatcactcgcacgtcgctcttggattcttacattctgtcaagccgaagatacaaatgtaattcaatattattaatgtttgttcatgatcatata

SEQ ID NO: 15444 - DNA, 3937 bp, Zea Mays
gtcgaccgagtgaggaagttgaactaattgccgagcgaagaagcaaaaatcatatcaatagccatagaagcacatcattagtcttgcgcttttcactagtttggattcggacttcctgagctccgccgattccttcctcctccacctcctctcctcccccagccgccgccgctgctcatcttatctttatctcatccccatcgcccgcccttgctccgcccccgggaatcgtcgatggcggcgtcggcgttgtggcagccgcaggagcaggggctccgcgagatctgcgcccacctggaggcgcatatctcacccaactctgaccaggcccgcatctggcagcagctccagcagtacagccagttccccgacttcaacaattacctactcttcatcctggcccgcggagaggggaaatctattgaagttagacaggcagctggtctattactgaaaaacaatctgcgaacgacttacatttccatgcaatcttcatcccagcattatgttaagtctgagctgttaccatgtataggggcaaccaatagggcaattagatccacagttggaacagtgatcagtgtgcttttccaaattgtacgagttgctggatggattgagttgtttcaggcactccataagtgtttggagagtaatgacctggatcacatggaaggtgctatggatgcgatatacaagatctgtgaggatgtccctgaagagcttgatgttgatgttcctggtttgtctgaacgaccgatcaacgtgtttatgccaagaatactgcagtttttccagtcaccacatgcaagtttgagaaaactatcattgggtatcataaaccagtacatagtagtgatgccatcggcactctacatgtctatggatcagtatattcagggattattcaaccttgcaaaggactcttcagcagatgttcggaaactggtttgttcagcctgggttcagctcattgaagttcgcccatcaattttggagccacatcttaaaaatgttactgaattgattctgcaagctaataaagattcagatgatgaagttgctctggaagcttgtgagttctggtctgcatactgtgatgtgagcatgcctcctgaaggtttacaggagttcttgccgcacttaatcccgactttgttgtcgaacatggtatatgctgacggcgatgagtcccttgatgatgctgaggaagatgaatcctttccagacagggaccaggatttgaagccccgcttccatgattctcgattgcatggatcggaaactggagatgacgatgatgatgctgatgctgtaaatgtctggaacctgcggaagtgtagtgctgctgggttggatgttctctctaatgtgtttggtgacagcatccttccaactttaatgccattgattgagcaaaacttggctcgaacagatgatgattcttggaaggagagggaaactgctgttttatgtctaggcgctatagcagaggggtgcattagtggtctatacccacaccttcctcagattgttgcctttctaatcccacttcttgatgataaatttcctcttatacggagtattacgtgttggacgctctctcgatacagcaaattcattgttcagagccttgatcatccaaatggacgcggacaatttgataagattcttatgggagtgctcagaaggatattggatactaacaaaagagtgcaagaggctgcttgttcggcgtttgcaatccttgaagaggaagcttctgaagaattagtaccccatttggaagtaattttgcagcacctcatgtgtgcctatagaaaataccagagacgaaatctccggatactctatgacgccctcggtaccctggctgatgctgttggagcagaattaaatcaggcaaaatatctagacatatttatgccgcctttaatcacaaagtggcagcaactttccaattatgacaaagatctatttccactccttgaatgctttacatctatcgcacaggcattgggaccaggatttgctcagtttgcggaaccagtgtttcaaaggtgcattaatcttatccattcgcaacagttgtcaaagattgatcctactgcagctggtgcggtgtatgatagagaattcattgtttgttcgttggacctactatcaggacttgcagaaggtcttggcgctggtattgaaagtcttgttgcacagagcaatttgagagatctacttttgcaatgctgcatggatgaagcagctgatgttcgacaaagtgcccttgcacttcttggagacctttctagggtttgcccaatacatttgcatccacgccttcaagaatttcttactgttgcagcgaagcaactgaaccctcaatctgtgaaggatgcggtatcagtagctaacaatgcttgttgggctattggagaattagcaatcaagattggcaaagaaatagcgcctgtggtgatcaccgttgtttcgtgcttggttcccattctaaaatccccagagggttcgaacaagtcacttgttgaaaacagcgcgatcactcttgggaggcttagctgggtgtgtccagacatcgtggcccctcatatggagcatttcatgcaagcatggtgcaaggcgttgtgcatgatcagagatgattttgagaaagaggactcgtttcatggattgtgtgcaatggtggcagcaaaccctacaggaggcgccggttcattagcttacatctgccaggcctgtgcgagttggactgagataaaaagtgaaggtcttcacaatgaggtgtgccagattctgaatggctacaagcagctgcttggaaacggtgggtgggaacaatgcatggccaccctgcaaccggatgttgtgcagaaattagctagatacggagtatgatggcagtggtcgtgtggtttcatcatctttttacgctggagacagagatcaggatggttggttgggtcacttgctcgtccctcccgcctcccagtcccaggcaaggcgacattgatgaaagaaaggtttttgtagcgtgtaattcttttcttcctcttcctcttagcaggtgagtccaaaattacattaccaattcatttttgcccaataataaaagatgaagatccatgggatttgtttatcccccactcccttgtttctgttactaaccatcttcggcagcctattcatacccttgtttgtagtacaatctacaatacaaaacggtgacatttttagagaccatagatatgggtgaactagaactactactatacactgtggtcggtcaccgtttgttttgcactgtagattgtactgtttgtaaagtgtagattagatatagactagtcatatgcccgtacattgctacggtttttatatataacatagaatagatctctattatattaaaggatcagtttcaatggtcgttttgcgtcaatatttttttaaaaaaacatctatatttctttagaatcaacctgcactcctataatatcttctctactactataatatgagagtttatataaaaaataaggtgaaatcatgtataagttagtgtttgaaccttgttggctctacattcacacccacataatcaataacatatattttatgttttattaaaataaaatttattctatgttatatataaaaaccgtagcaatgcacggccatataactagtccatatttaatctacactcttaaggtgtttttttgaaaaatattgatgaaaccacacgaccaaggtataccagttggttgtccgtgcattaccacggctcacaataatatccacgtaaactatccaccaaaaagatcctaagatttttttattgattgtctctactctccgcataatatttttttatttgactaattaatattgtttacttcatccaatatgtcttggtacaacacag

SEQ ID NO: 15445 - DNA, 3556 bp, Zea Mays
gtcgaccgagtgaggaagttgaactaattgccgagcgaagaagcaaaaatcatatcaatagccatagaagcacatcattagtcttgcgcttttcactagtttggattcggacttcctgagctccgccgattccttcctcctccacctcctctcctcccccagccgccgccgctgctcatcttatctttatctcatccccatcgcccgcccttgctccgcccccgggaatcgtcgatggcggcgtcggcgttgtggcagccgcaggagcaggggctccgcgagatctgcgcccacctggaggcgcatatctcacccaactctgaccaggcccgcatctggcagcagctccagcagtacagccagttccccgacttcaacaattacctactcttcatcctggcccgcggagaggggaaatctattgaagttagacaggcagctggtctattactgaaaaacaatctgcgaacgacttacatttccatgcaatcttcatcccagcattatgttaagtctgagctgttaccatgtataggggcaaccaatagggcaattagatccacagttggaacagtgatcagtgtgcttttccaaattgtacgagttgctggatggattgagttgtttcaggcactccataagtgtttggagagtaatgacctggatcacatggaaggtgctatggatgcgatatacaagatctgtgaggatgtccctgaagagcttgatgttgatgttcctggtttgtctgaacgaccgatcaacgtgtttatgccaagaatactgcagtttttccagtcaccacatgcaagtttgagaaaactatcattgggtatcataaaccagtacatagtagtgatgccatcggcactctacatgtctatggatcagtatattcagggattattcaaccttgcaaaggactcttcagcagatgttcggaaactggtttgttcagcctgggttcagctcattgaagttcgcccatcaattttggagccacatcttaaaaatgttactgaattgattctgcaagctaataaagattcagatgatgaagttgctctggaagcttgtgagttctggtctgcatactgtgatgtgagcatgcctcctgaaggtttacaggagttcttgccgcacttaatcccgactttgttgtcgaacatggtatatgctgacggcgatgagtcccttgatgatgctgaggaagatgaatcctttccagacagggaccaggatttgaagccccgcttccatgattctcgattgcatggatcggaaactggagatgacgatgatgatgctgatgctgtaaatgtctggaacctgcggaagtgtagtgctgctgggttggatgttctctctaatgtgtttggtgacagcatccttccaactttaatgccattgattgagcaaaacttggctcgaacagatgatgattcttggaaggagagggaaactgctgttttatgtctaggcgctatagcagaggggtgcattagtggtctatacccacaccttcctcagattgttgcctttctaatcccacttcttgatgataaatttcctcttatacggagtattacgtgttggacgctctctcgatacagcaaattcattgttcagagccttgatcatccaaatggacgcggacaatttgataagattcttatgggagtgctcagaaggatattggatactaacaaaagagtgcaagaggctgcttgttcggcgtttgcaatccttgaagaggaagcttctgaagaattagtaccccatttggaagtaattttgcagcacctcatgtgtgcctatagaaaataccagagacgaaatctccggatactctatgacgccctcggtaccctggctgatgctgttggagcagaattaaatcaggcaaaatatctagacatatttatgccgcctttaatcacaaagtggcagcaactttccaattatgacaaagatctatttccactccttgaatgctttacatctatcgcacaggcattgggaccaggatttgctcagtttgcggaaccagtgtttcaaaggtgcattaatcttatccattcgcaacagttgtcaaagattgatcctactgcagctggtgcggtgtatgatagagaattcattgtttgttcgttggacctactatcaggacttgcagaaggtcttggcgctggtattgaaagtcttgttgcacagagcaatttgagagatctacttttgcaatgctgcatggatgaagcagctgatgttcgacaaagtgcccttgcacttcttggagacctttctagggtttgcccaatacatttgcatccacgccttcaagaatttcttactgttgcagcgaagcaactgaaccctcaatctgtgaaggatgcggtatcagtagctaacaatgcttgttgggctattggagaattagcaatcaagattggcaaagaaatagcgcctgtggtgatcaccgttgtttcgtgcttggttcccattctaaaatccccagagggttcgaacaagtcacttgttgaaaacagcgcgatcactcttgggaggcttagctgggtgtgtccagacatcgtggcccctcatatggagcatttcatgcaagcatggtgcaaggcgttgtgcatgatcagagatgattttgagaaagaggactcgtttcatggattgtgtgcaatggtggcagcaaaccctacaggaggcgccggttcattagcttacatctgccaggcctgtgcgagttggactgagataaaaagtgaaggtcttcacaatgaggtgtgccagattctgaatggctacaagcagctgcttggaaacggtgggtgggaacaatgcatggccaccctgcaaccggatgttgtgcagaaattagctagatacggagtatgatggcagtggtcgtgtggtttcatcatctttttacgctggagacagagatcaggatggttggttgggtcacttgctcgtccctcccgcctcccagtcccaggcaaggcgacattgatgaaagaaaggtttttgtagcgtgtaattcttttcttcctcttcctcttagcagcaacaccaagcttttcatggatttcagttggcctgcattaaacatattaacatgtaaggattcgaggaacacatggtggaacacaaaatgcaaaaaagtagggaaaggaaccttcgactttgagatgaagatgcgcacggtatgaaaggcacggtctggaagattgatgaatcagttccgaagctatggatgaagaagcttcggcttagcgcaaagacggtgatggagaatgaaaccgacctaaaggggaaaagactgcttagtcctcgacagattactccttagtcaatagtaaatgtcaaggacatgaatgtaattttacccaggctgcgtcctgtgcctataaatagatgaacagtaacacaatattgttcacgctgatttgtaatcactcgcacgtcgctcttggattcttacattctgtcaagccgaagatacaaatgtaattcaatattattaatgtttgttcatgatcatata

SEQ ID NO: 15446 - DNA, 3529 bp, Zea Mays
gtcgaccgagtgaggaagttgaactaattgccgagcgaagaagcaaaaatcatatcaatagccatagaagcacatcattagtcttgcgcttttcactagtttggattcggacttcctgagctccgccgattccttcctcctccacctcctctcctcccccagccgccgccgctgctcatcttatctttatctcatccccatcgcccgcccttgctccgcccccgggaatcgtcgatggcggcgtcggcgttgtggcagccgcaggagcaggggctccgcgagatctgcgcccacctggaggcgcatatctcacccaactctgaccaggcccgcatctggcagcagctccagcagtacagccagttccccgacttcaacaattacctactcttcatcctggcccgcggagaggggaaatctattgaagttagacaggcagctggtctattactgaaaaacaatctgcgaacgacttacatttccatgcaatcttcatcccagcattatgttaagtctgagctgttaccatgtataggggcaaccaatagggcaattagatccacagttggaacagtgatcagtgtgcttttccaaattgtacgagttgctggatggattgagttgtttcaggcactccataagtgtttggagagtaatgacctggatcacatggaaggtgctatggatgcgatatacaagatctgtgaggatgtccctgaagagcttgatgttgatgttcctggtttgtctgaacgaccgatcaacgtgtttatgccaagaatactgcagtttttccagtcaccacatgcaagtttgagaaaactatcattgggtatcataaaccagtacatagtagtgatgccatcggcactctacatgtctatggatcagtatattcagggattattcaaccttgcaaaggactcttcagcagatgttcggaaactggtttgttcagcctgggttcagctcattgaagttcgcccatcaattttggagccacatcttaaaaatgttactgaattgattctgcaagctaataaagattcagatgatgaagttgctctggaagcttgtgagttctggtctgcatactgtgatgtgagcatgcctcctgaaggtttacaggagttcttgccgcacttaatcccgactttgttgtcgaacatggtatatgctgacggcgatgagtcccttgatgatgctgaggaagatgaatcctttccagacagggaccaggatttgaagccccgcttccatgattctcgattgcatggatcggaaactggagatgacgatgatgatgctgatgctgtaaatgtctggaacctgcggaagtgtagtgctgctgggttggatgttctctctaatgtgtttggtgacagcatccttccaactttaatgccattgattgagcaaaacttggctcgaacagatgatgattcttggaaggagagggaaactgctgttttatgtctaggcgctatagcagaggggtgcattagtggtctatacccacaccttcctcagattgttgcctttctaatcccacttcttgatgataaatttcctcttatacggagtattacgtgttggacgctctctcgatacagcaaattcattgttcagagccttgatcatccaaatggacgcggacaatttgataagattcttatgggagtgctcagaaggatattggatactaacaaaagagtgcaagaggctgcttgttcggcgtttgcaatccttgaagaggaagcttctgaagaattagtaccccatttggaagtaattttgcagcacctcatgtgtgcctatagaaaataccagagacgaaatctccggatactctatgacgccctcggtaccctggctgatgctgttggagcagaattaaatcaggcaaaatatctagacatatttatgccgcctttaatcacaaagtggcagcaactttccaattatgacaaagatctatttccactccttgaatgctttacatctatcgcacaggcattgggaccaggatttgctcagtttgcggaaccagtgtttcaaaggtgcattaatcttatccattcgcaacagttgtcaaagattgatcctactgcagctggtgcggtgtatgatagagaattcattgtttgttcgttggacctactatcaggacttgcagaaggtcttggcgctggtattgaaagtcttgttgcacagagcaatttgagagatctacttttgcaatgctgcatggatgaagcagctgatgttcgacaaagtgcccttgcacttcttggagacctttctagggtttgcccaatacatttgcatccacgccttcaagaatttcttactgttgcagcgaagcaactgaaccctcaatctgtgaaggatgcggtatcagtagctaacaatgcttgttgggctattggagaattagcaatcaagattggcaaagaaatagcgcctgtggtgatcaccgttgtttcgtgcttggttcccattctaaaatccccagagggttcgaacaagtcacttgttgaaaacagcgcgatcactcttgggaggcttagctgggtgtgtccagacatcgtggcccctcatatggagcatttcatgcaagcatggtgcaaggcgttgtgcatgatcagagatgattttgagaaagaggactcgtttcatggattgtgtgcaatggtggcagcaaaccctacaggaggcgccggttcattagcttacatctgccaggcctgtgcgagttggactgagataaaaagtgaaggtcttcacaatgaggtgtgccagattctgaatggctacaagcagctgcttggaaacggtgggtgggaacaatgcatggccaccctgcaaccggatgttgtgcagaaattagctagatacggagtatgatggcagtggtcgtgtggtttcatcatctttttacgctggagacagagatcaggatggttggttgggtcacttgctcgtccctcccgcctcccagtcccaggcaaggcgacattgatgaaagaaaggtttttgtagcgtgtaattcttttcttcctcttcctcttagcagttggcctgcattaaacatattaacatgtaaggattcgaggaacacatggtggaacacaaaatgcaaaaaagtagggaaaggaaccttcgactttgagatgaagatgcgcacggtatgaaaggcacggtctggaagattgatgaatcagttccgaagctatggatgaagaagcttcggcttagcgcaaagacggtgatggagaatgaaaccgacctaaaggggaaaagactgcttagtcctcgacagattactccttagtcaatagtaaatgtcaaggacatgaatgtaattttacccaggctgcgtcctgtgcctataaatagatgaacagtaacacaatattgttcacgctgatttgtaatcactcgcacgtcgctcttggattcttacattctgtcaagccgaagatacaaatgtaattcaatattattaatgtttgttcatgatcatata

SEQ ID NO: 15447 - DNA, 1603 bp, Zea Mays
cttgcgcttttcactagtttggattcggacttcctgagctccgccgattccttcctcctccacctcctctcctcccccagccgccgccgctgctcatcttatctttatctcatccccatcgcccgcccttgctccgcccccgggaatcgtcgatggcggcgtcggcgttgtggcagccgcaggagcaggggctccgcgagatctgcgcccacctggaggcgcatatctcacccaactctgaccaggcccgcatctggcagcagctccagcagtacagccagttccccgacttcaacaattacctactcttcatcctggcccgcggagaggggaaatctattgaagttagacaggcagctggtctattactgaaaaacaatctgcgaacgacttacatttccatgcaatcttcatcccagcattatgttaagtctgagctgttaccatgtataggggcaaccaatagggcaattagatccacagttggaacagtgatcagtgtgcttttccaaattgtacgagttgctggatggattgagttgtttcaggcactccataagtgtttggagagtaatgacctggatcacatggaaggtgctatggatgcgatatacaagatctgtgaggatgtccctgaagagcttgatgttgatgttcctggtttgtctgaacgaccgatcaacgtgtttatgccaagaatactgcagtttttccagtcaccacatgcaagtttgagaaaactatcattgggtatcataaaccagtacatagtagtgatgccatcggcactctacatgtctatggatcagtatattcagggattattcaaccttgcaaaggactcttcagcagatgttcggaaactggtttgttcagcctgggttcagctcattgaagttcgcccatcaattttggaggtctgcatactgtgatgtgagcatgcctcctgaaggtttacaggagttcttgccgcacttaatcccgactttgttgtcgaacatggtatatgctgacggcgatgagtcccttgatgatgctgaggaagatgaatcctttccagacagggaccaggatttgaagccccgcttccatgattctcgattgcatggatcggaaactggagatgacgatgatgatgctgatgctgtaaatgtctggaacctgcggaagtgtagtgctgctgggttggatgttctctctaatgtgtttggtgacagcatccttccaactttaatgccattgattgagcaaaacttggctcgaacagatgatgattcttggaaggagagggaaactgctgttttatgtctaggcgctatagcagaggggtgcattagtggtctatacccacaccttcctcagattgttgcctttctaatcccacttcttgatgataaatttcctcttatacggagtattacgtgttggacgctctctcgatacagcaaattcattgttcagagccttgatcatccaaatggacgcggacaatttgataagattcttatgggagtgctcagaaggatattggatactaacaaaagagtgcaagaggctgcttgttcggcgtttgcaatccttgaagagatcctcatctgtattc

SEQ ID NO: 15448 - DNA, 1929 bp, Zea Mays
cttgcgcttttcactagtttggattcggacttcctgagctccgccgattccttcctcctccacctcctctcctcccccagccgccgccgctgctcatcttatctttatctcatccccatcgcccgcccttgctccgcccccgggaatcgtcgatggcggcgtcggcgttgtggcagccgcaggagcaggggctccgcgagatctgcgcccacctggaggcgcatatctcacccaactctgaccaggcccgcatctggcagcagctccagcagtacagccagttccccgacttcaacaattacctactcttcatcctggcccgcggagaggggaaatctattgaagttagacaggcagctggtctattactgaaaaacaatctgcgaacgacttacatttccatgcaatcttcatcccagcattatgttaagtctgagctgttaccatgtataggggcaaccaatagggcaattagatccacagttggaacagtgatcagtgtgcttttccaaattgtacgagttgctggatggattgagttgtttcaggcactccataagtgtttggagagtaatgacctggatcacatggaaggtgctatggatgcgatatacaagatctgtgaggatgtccctgaagagcttgatgttgatgttcctggtttgtctgaacgaccgatcaacgtgtttatgccaagaatactgcagtttttccagtcaccacatgcaagtttgagaaaactatcattgggtatcataaaccagtacatagtagtgatgccatcggcactctacatgtctatggatcagtatattcagggattattcaaccttgcaaaggactcttcagcagatgttcggaaactggtttgttcagcctgggttcagctcattgaagttcgcccatcaattttggaggtctgcatactgtgatgtgagcatgcctcctgaaggtttacaggagttcttgccgcacttaatcccgactttgttgtcgaacatggtatatgctgacggcgatgagtcccttgatgatgctgaggaagatgaatcctttccagacagggaccaggatttgaagccccgcttccatgattctcgattgcatggatcggaaactggagatgacgatgatgatgctgatgctgtaaatgtctggaacctgcggaagtgtagtgctgctgggttggatgttctctctaatgtgtttggtgacagcatccttccaactttaatgccattgattgagcaaaacttggctcgaacagatgatgattcttggaaggagagggaaactgctgttttatgtctaggcgctatagcagaggggtgcattagtggtctatacccacaccttcctcagattgttgcctttctaatcccacttcttgatgataaatttcctcttatacggagtattacgtgttggacgctctctcgatacagcaaattcattgttcagagccttgatcatccaaatggacgcggacaatttgataagattcttatgggagtgctcagaaggatattggatactaacaaaagagtgcaagaggctgcttgttcggcgtttgcaatccttgaagaggaagcttctgaagaattagtaccccatttggaagtaattttgcagcacctcatgtgtgcctatagaaaataccagagacgaaatctccggatactctatgacgccctcggtaccctggctgatgctgttggagcagaattaaatcaggcaaaatatctagacatatttatgccgcctttaatcacaaagtggcagcaactttccaattatgacaaagatctatttccactccttgaatgctttacatctatcgcacagtttggagtaggagctgcttttagttgcttattgtggttccaaactagaagaacctgaataattagaaggatttctacagttttg

SEQ ID NO: 15449 - DNA, 2018 bp, Zea Mays
cttgcgcttttcactagtttggattcggacttcctgagctccgccgattccttcctcctccacctcctctcctcccccagccgccgccgctgctcatcttatctttatctcatccccatcgcccgcccttgctccgcccccgggaatcgtcgatggcggcgtcggcgttgtggcagccgcaggagcaggggctccgcgagatctgcgcccacctggaggcgcatatctcacccaactctgaccaggcccgcatctggcagcagctccagcagtacagccagttccccgacttcaacaattacctactcttcatcctggcccgcggagaggggaaatctattgaagttagacaggcagctggtctattactgaaaaacaatctgcgaacgacttacatttccatgcaatcttcatcccagcattatgttaagtctgagctgttaccatgtataggggcaaccaatagggcaattagatccacagttggaacagtgatcagtgtgcttttccaaattgtacgagttgctggatggattgagttgtttcaggcactccataagtgtttggagagtaatgacctggatcacatggaaggtgctatggatgcgatatacaagatctgtgaggatgtccctgaagagcttgatgttgatgttcctggtttgtctgaacgaccgatcaacgtgtttatgccaagaatactgcagtttttccagtcaccacatgcaagtttgagaaaactatcattgggtatcataaaccagtacatagtagtgatgccatcggcactctacatgtctatggatcagtatattcagggattattcaaccttgcaaaggactcttcagcagatgttcggaaactggtttgttcagcctgggttcagctcattgaagttcgcccatcaattttggagccacatcttaaaaatgttactgaattgattctgcaagctaataaagattcagatgatgaagttgctctggaagcttgtgagttctggtctgcatactgtgatgtgagcatgcctcctgaaggtttacaggagttcttgccgcacttaatcccgactttgttgtcgaacatggtatatgctgacggcgatgagtcccttgatgatgctgaggaagatgaatcctttccagacagggaccaggatttgaagccccgcttccatgattctcgattgcatggatcggaaactggagatgacgatgatgatgctgatgctgtaaatgtctggaacctgcggaagtgtagtgctgctgggttggatgttctctctaatgtgtttggtgacagcatccttccaactttaatgccattgattgagcaaaacttggctcgaacagatgatgattcttggaaggagagggaaactgctgttttatgtctaggcgctatagcagaggggtgcattagtggtctatacccacaccttcctcagattgttgcctttctaatcccacttcttgatgataaatttcctcttatacggagtattacgtgttggacgctctctcgatacagcaaattcattgttcagagccttgatcatccaaatggacgcggacaatttgataagattcttatgggagtgctcagaaggatattggatactaacaaaagagtgcaagaggctgcttgttcggcgtttgcaatccttgaagaggaagcttctgaagaattagtaccccatttggaagtaattttgcagcacctcatgtgtgcctatagaaaataccagcagagacgaaatctccggatactctatgacgccctcggtaccctggctgatgctgttggagcagaattaaatcaggcaaaatatctagacatatttatgccgcctttaatcacaaagtggcagcaactttccaattatgacaaagatctatttccactccttgaatgctttacatctatcgcacagtttggagtaggagctgcttttagttgcttattgtggttccaaactagaagaacctgaataattagaaggatttctacagttttg

SEQ ID NO: 15450 - DNA, 3444 bp, Zea Mays
cttgcgcttttcactagtttggattcggacttcctgagctccgccgattccttcctcctccacctcctctcctcccccagccgccgccgctgctcatcttatctttatctcatccccatcgcccgcccttgctccgcccccgggaatcgtcgatggcggcgtcggcgttgtggcagccgcaggagcaggggctccgcgagatctgcgcccacctggaggcgcatatctcacccaactctgaccaggcccgcatctggcagcagctccagcagtacagccagttccccgacttcaacaattacctactcttcatcctggcccgcggagaggggaaatctattgaagttagacaggcagctggtctattactgaaaaacaatctgcgaacgacttacatttccatgcaatcttcatcccagcattatgttaagtctgagctgttaccatgtataggggcaaccaatagggcaattagatccacagttggaacagtgatcagtgtgcttttccaaattgtacgagttgctggatggattgagttgtttcaggcactccataagtgtttggagagtaatgacctggatcacatggaaggtgctatggatgcgatatacaagatctgtgaggatgtccctgaagagcttgatgttgatgttcctggtttgtctgaacgaccgatcaacgtgtttatgccaagaatactgcagtttttccagtcaccacatgcaagtttgagaaaactatcattgggtatcataaaccagtacatagtagtgatgccatcggcactctacatgtctatggatcagtatattcagggattattcaaccttgcaaaggactcttcagcagatgttcggaaactggtttgttcagcctgggttcagctcattgaagttcgcccatcaattttggagccacatcttaaaaatgttactgaattgattctgcaagctaataaagattcagatgatgaagttgctctggaagcttgtgagttctggtctgcatactgtgatgtgagcatgcctcctgaaggtttacaggagttcttgccgcacttaatcccgactttgttgtcgaacatggtatatgctgacggcgatgagtcccttgatgatgctgaggaagatgaatcctttccagacagggaccaggatttgaagccccgcttccatgattctcgattgcatggatcggaaactggagatgacgatgatgatgctgatgctgtaaatgtctggaacctgcggaagtgtagtgctgctgggttggatgttctctctaatgtgtttggtgacagcatccttccaactttaatgccattgattgagcaaaacttggctcgaacagatgatgattcttggaaggagagggaaactgctgttttatgtctaggcgctatagcagaggggtgcattagtggtctatacccacaccttcctcagattgttgcctttctaatcccacttcttgatgataaatttcctcttatacggagtattacgtgttggacgctctctcgatacagcaaattcattgttcagagccttgatcatccaaatggacgcggacaatttgataagattcttatgggagtgctcagaaggatattggatactaacaaaagagtgcaagaggctgcttgttcggcgtttgcaatccttgaagaggaagcttctgaagaattagtaccccatttggaagtaattttgcagcacctcatgtgtgcctatagaaaataccagagacgaaatctccggatactctatgacgccctcggtaccctggctgatgctgttggagcagaattaaatcaggcattgggaccaggatttgctcagtttgcggaaccagtgtttcaaaggtgcattaatcttatccattcgcaacagttgtcaaagattgatcctactgcagctggtgcggtgtatgatagagaattcattgtttgttcgttggacctactatcaggacttgcagaaggtcttggcgctggtattgaaagtcttgttgcacagagcaatttgagagatctacttttgcaatgctgcatggatgaagcagctgatgttcgacaaagtgcccttgcacttcttggagacctttctagggtttgcccaatacatttgcatccacgccttcaagaatttcttactgttgcagcgaagcaactgaaccctcaatctgtgaaggatgcggtatcagtagctaacaatgcttgttgggctattggagaattagcaatcaagattggcaaagaaatagcgcctgtggtgatcaccgttgtttcgtgcttggttcccattctaaaatccccagagggttcgaacaagtcacttgttgaaaacagcgcgatcactcttgggaggcttagctgggtgtgtccagacatcgtggcccctcatatggagcatttcatgcaagcatggtgcaaggcgttgtgcatgatcagagatgattttgagaaagaggactcgtttcatggattgtgtgcaatggtggcagcaaaccctacaggaggcgccggttcattagcttacatctgccaggcctgtgcgagttggactgagataaaaagtgaaggtcttcacaatgaggtgtgccagattctgaatggctacaagcagctgcttggaaacggtgggtgggaacaatgcatggccaccctgcaaccggatgttgtgcagaaattagctagatacggagtatgatggcagtggtcgtgtggtttcatcatctttttacgctggagacagagatcaggatggttggttgggtcacttgctcgtccctcccgcctcccagtcccaggcaaggcgacattgatgaaagaaaggtttttgtagcgtgtaattcttttcttcctcttcctcttagcagcaacaccaagcttttcatggatttcagttggcctgcattaaacatattaacatgtaaggattcgaggaacacatggtggaacacaaaatgcaaaaaagtagggaaaggtaattgttgggggccttcgtcttccaaaggtcctcaaaaacacgactaacatgtttttcaagtataatatactgttacaggaaccttcgactttgagatgaagatgcgcacggtatgaaaggcacggtctggaagattgatgaatcagttccgaagctatggatgaagaagcttcggcttagcgcaaagacggtgatggagaatgaaaccgacctaaaggggaaaagactgcttagtcctcgacagattactccttagtcaatagtaaatgtcaaggacatgaatgtaattttacccaggctgcgtcctgtgcctataaatagatgaacagtaacacaatattgttcacgctgatttgtaatcactcgcacgtcgctcttggattcttacattctgtcaagccgaagatacaaatgtaattcaatattattaatgtttgttcatgatcatata

SEQ ID NO: 15451 - DNA, 1311 bp, Zea Mays
gctaagtcgagatagaaggggcgagcgcgctgcgctatccatcccaccatccattctctgccaagctttccgactcccagccaacacgaaatggcggcggcggccgcacccgtgtccctggtcttcttgtgcacgcgtgggcagcagcagctggtacttgtcgacgccaccaagccccctctgcccctgcgcagccgcgctttctccgtccgcgccgctcagcagcagcagcagcagcagcaccgcgcccgcccacggccccctcgcaggaacaagccccccggacccgcgcgccgtccgcccagggtccctctggaccaagatgaatacgacggcggctatgatgaccgggaggaggggaggttcgctgggggcacccgggccgccgccatgcccaagccaccggccggcttcgtgctggatgaccagggcaggtgcatcgccgcagcatccaagcgcatcgtcaccatcatcgacgacaccaacaaccgccccttggagtgcataatcaggagagtattccggagctcgcaggaccacgactgcatgcttctctgcccagttgacatgcctgtgcaggtcctcaagagcacaaatttcagtggctgggtagctgtcgatgacgaccaactcaagcaaatcattccatctgtgatggatgccagggagtacttgtacaggaagaggaagagagactcgtctgattgtagtagaatagaatggaatggaatggaatggagtgcatttgcaactgtaagcagctgcaacctgcaatacttggagtggagtgatggacaacgcagttgataagcaactgctgctgctaatctttgtctagtgtaggatagatagctcaatgggacgatcaaagctatttatgatgtgctcatgtgtttgaattaattaataaaattaccccaatctgaatagaatacctggtggatggaagaaatgaagcaaaatacccccactgcaaccgttttttcttttgaattttcaagcgtattgagtccttttttactaataataaagaaagattttattaaaattttaaaccatattacatcggcttgcctgatggtattgacgaaaactgcatattagtttctcaggcagggcgcaggcacatacatatacatccatctcaaattcgtgtggatctgcccaaggatggaggtcatctcactatacaagcaagcaatgcagtagtgtaaaacagtcacgatctatggataaataagaagcaaccaacccaatacagactactgaccaacttcttctcttgtagcatggacatgatcttccaaaatc

SEQ ID NO: 15452 - DNA, 1667 bp, Zea Mays
gctaagtcgagatagaaggggcgagcgcgctgcgctatccatcccaccatccattctctgccaagctttccgactcccagccaacacgaaatggcggcggcggccgcacccgtgtccctggtcttcttgtgcacgcgtgggcagcagcagctggtacttgtcgacgccaccaagccccctctgcccctgcgcagccgcgctttctccgtccgcgccgctcagcagcagcagcagcagcagcaccgcgcccgcccacggccccctcgcaggaacaagccccccggacccgcgcgccgtccgcccagggtccctctggaccaagatgaatacgacggcggctatgatgaccgggaggaggggaggttcgctgggggcacccgggccgccgccatgcccaagccaccggccggcttcgtgctggatgaccagggcaggtgcatcgccgcagcatccaagcgcatcgtcaccatcatcgacgacaccaacaaccgccccttggagtgcataatcaggagagtattccggagctcgcaggaccacgactgcatgcttctctgcccagttgacatgcctgtgcaggtcctcaagagcacaaatttcagtggctgggtcgatgacgaccaactcaagcaaatcattccatctgttgcctatgcccttgccagagtacatatgcactttgtagaaagcggattctgttatacagcaaggggtggcttctgctttcctgaagaggccattcaagagtttcatgattccggtgaaggtgtgccttttgaaggtgtagagatttgctgcttcaatttggatggtgcacactatatgatttatacaccagttgatcctcttctttttgtcgcaatcaaggataaggatggtgtgctacgcatcgctgaggatgatctgatggaagaccctgcagttctggatgcggtagatgaagagacagaatttacagctctagtggaggaggaggaggcccttcttgaaacggtacttggtgaaaggtgatggatgccagggagtacttgtacaggaagaggaagagagactcgtctgattgtagtagaatagaatggaatggaatggaatggagtgcatttgcaactgtaagcagctgcaacctgcaatacttggagtggagtgatggacaacgcagttgataagcaactgctgctgctaatctttgtctagtgtaggatagatagctcaatgggacgatcaaagctatttatgatgtgctcatgtgtttgaattaattaataaaattaccccaatctgaatagaatacctggtggatggaagaaatgaagcaaaatacccccactgcaaccgttttttcttttgaattttcaagcgtattgagtccttttttactaataataaagaaagattttattaaaattttaaaccatattacatcggcttgcctgatggtattgacgaaaactgcatattagtttctcaggcagggcgcaggcacatacatatacatccatctcaaattcgtgtggatctgcccaaggatggaggtcatctcactatacaagcaagcaatgcagtagtgtaaaacagtcacgatctatggataaataagaagcaaccaacccaatacagactactgaccaacttcttctcttgtagcatggacatgatcttccaaaatc

SEQ ID NO: 15453 - DNA, 1673 bp, Zea Mays
gctaagtcgagatagaaggggcgagcgcgctgcgctatccatcccaccatccattctctgccaagctttccgactcccagccaacacgaaatggcggcggcggccgcacccgtgtccctggtcttcttgtgcacgcgtgggcagcagcagctggtacttgtcgacgccaccaagccccctctgcccctgcgcagccgcgctttctccgtccgcgccgctcagcagcagcagcagcagcagcaccgcgcccgcccacggccccctcgcaggaacaagccccccggacccgcgcgccgtccgcccagggtccctctggaccaagatgaatacgacggcggctatgatgaccgggaggaggggaggttcgctgggggcacccgggccgccgccatgcccaagccaccggccggcttcgtgctggatgaccagggcaggtgcatcgccgcagcatccaagcgcatcgtcaccatcatcgacgacaccaacaaccgccccttggagtgcataatcaggagagtattccggagctcgcaggaccacgactgcatgcttctctgcccagttgacatgcctgtgcaggtcctcaagagcacaaatttcagtggctgggtagctgtcgatgacgaccaactcaagcaaatcattccatctgttgcctatgcccttgccagagtacatatgcactttgtagaaagcggattctgttatacagcaaggggtggcttctgctttcctgaagaggccattcaagagtttcatgattccggtgaaggtgtgccttttgaaggtgtagagatttgctgcttcaatttggatggtgcacactatatgatttatacaccagttgatcctcttctttttgtcgcaatcaaggataaggatggtgtgctacgcatcgctgaggatgatctgatggaagaccctgcagttctggatgcggtagatgaagagacagaatttacagctctagtggaggaggaggaggcccttcttgaaacggtacttggtgaaaggtgatggatgccagggagtacttgtacaggaagaggaagagagactcgtctgattgtagtagaatagaatggaatggaatggaatggagtgcatttgcaactgtaagcagctgcaacctgcaatacttggagtggagtgatggacaacgcagttgataagcaactgctgctgctaatctttgtctagtgtaggatagatagctcaatgggacgatcaaagctatttatgatgtgctcatgtgtttgaattaattaataaaattaccccaatctgaatagaatacctggtggatggaagaaatgaagcaaaatacccccactgcaaccgttttttcttttgaattttcaagcgtattgagtccttttttactaataataaagaaagattttattaaaattttaaaccatattacatcggcttgcctgatggtattgacgaaaactgcatattagtttctcaggcagggcgcaggcacatacatatacatccatctcaaattcgtgtggatctgcccaaggatggaggtcatctcactatacaagcaagcaatgcagtagtgtaaaacagtcacgatctatggataaataagaagcaaccaacccaatacagactactgaccaacttcttctcttgtagcatggacatgatcttccaaaatc

SEQ ID NO: 15454 - DNA, 840 bp, Zea Mays
gattaacgattctggtggggagggaaagggaacgggagcgggaggggaatccaattgcgatggcctccgactcgggcgatttcggtggggagaacaagtcgttggaaacggcgaggcggctgctggaggagaccttcacgagtgaggcagaggcggaggcgctaccgagcttgccctcggggttctacgacgccttcgtcctgaggggaatccgcgtcgtccaggccctccagcccggcacactcctctgccacttcaacgtgccctccagactactcaactcgggcggcttcctgcacggcggcgcaaccgcctccctcgtggatctggttgcctccgccgccttcgccactgccgggctacgcaccaggggctcaccccttgagatgaacatctcctaccttgatgctgcttttgctgatagattgatatcgaggcgaaggttcttcgcgctggcaaggcagtaggggttgccgttgtggaactgaagaagaaatctggcaaaatcatcgcccaagctcgctactccaaatatcttggtgttagtaaactctgaatcatgatgctgcctcccatatatacggggatatggtagcagcaagcaagcagggtgtggtttggttcgacagcaagtgttgttactactctacattatatcttggtgttagtaaactctgaatcatgatgctgtattactgttactcaaccatcatctcagctacttattattcttgtgttatgagtcttcctcggattgcattaaactaaactacagtatacagcaaatacttgtatatatgtatgagcctgagcttcaggcattgcatgtggatgtgtggc

SEQ ID NO: 15455 - DNA, 2300 bp, Zea Mays
ggttggttggggtggaggaccgtcgccttccccgtttcgtcttccggtcctcgttttatcccctcgcccttgcactcctccgccgcacccctttcctccttccgccctccgccgcgcctggctttctcccttcccgagaggccacgctccatccccgcccgcgctgcctcccctggcgatcggcggcgaccgcggcccaacgaaagcgtcgtggtcggccgacgctgggcggactgggaacaagcgccaatggggatcgcggtggtggctctacacaccatgccgggggcgttcaccacccactccccggcatccattctgtcccttcggccagactttacgaggataaacagccgcaccaattcggtgccaaacgccaggacactgcaaggcgtcctaaggatcccgaggctgaggtcggtcaggcggctgtgccagcggatcgatgaccgggttacagaggggaacggtccttgggtcaaggatgccatgaataacgctagccaggttcttggcgacatcagcgtgcttggtcaagctgtaagtggcaatggtggtctaaatgggagtgctgccaagactccacctcagaggcggaagtcctcttcggttgaggatgaggcctgggaacttctgcaggagtcaatggtttactattgtggcagtcctgttgggacgattgctgccaacgatccaaatgacagtgatccggtgaactacgatcaggtgtttattcgggacttcataccatccggcattgcttttctacttaagggggaatatgaaattgtgcgtaatttcattctacacacacttcagcttcagagctgggaaaaaacaatggactgccatagtccaggtcaaggtttaatgcccgccagcttcaaagtgcggacaattccacttgatggtgatgaggatgcaactgaggaggtcttggatcctgattttggggaagccgcaataggccgtgtggcacctgttgattcaggtctatggtggatcatattgctgagggcatacggaaaatgttcaggggatctgtcagtacaagagagaattgatgtccagaccggaatgaaaatgattctgaagctttgcttagctgatggtttcgacatgttccctacattgctcgtaacagatggttcatgcatgattgatcgtcgaatgggaatccatgggcacccacttgaaattcaggcactcttctattcagccctcttgtgtgcgcgtgagatgttgactcaagaagatggatcagctgacttaatccgtgccctgaacaatagacttattgcactgtcctttcatatcagagagtactattggcttgacatgcaaaaattgaatgagatatatcgatataaaacagaagaatattcttatgatgctgtcaacaagttcaacatttaccctgatcagatttctccatggcttgttgagtggatacctcctaagggtggttactttattggaaacctccagccagctcatatggacttccgattcttttcactgggaaatttatggtcaatagtaagcagcttggcaacaactcatcagtcgcatgccattttagaccttattgagtctaaatggtctgatttagttgcagagatgccactaaagatatgctatcctgctcttgaaaaccaggaatggaaaatcatcactgggagtgaccctaaaaacacgccttggtcataccacaatggaggatcctggccaacattactgtggcagtggcatgcatcaagatgaacagaccagaacttgctgccaaagctatagaagtagctgagaggcgaatcgctactgacaaatggccggagtactacgacaccaagagagcacgattcattgggaaacagtcgcggctgtaccaaacgtggtctattgctgggttcctagtagccaagctactaatagaaaagccagacgctgctaggattctgtggaacgatgaggatgctgaaatccttaatgcttcgagcacaaacagaaaacgtggcaagaaagtgttgaagaaaacatacatcgtgtgagttctcgcagcaagttcgattaaattcctcagttagcatttttaagttgtaatataggaagtgttgtccctgtatataaacttaaatgaggttgcatttttgctggggagggtgcctgctgttggaattggatgctgttattgtcgatgcatctggctttgcaacaaatcatagacctgcctcgtagtttcgctatacactttatttggcatgacaagttttcggagtctcattaccggactgaagccatat

SEQ ID NO: 15456 - DNA, 2151 bp, Zea Mays
ggttggttggggtggaggaccgtcgccttccccgtttcgtcttccggtcctcgttttatcccctcgcccttgcactcctccgccgcacccctttcctccttccgccctccgccgcgcctggctttctcccttcccgagaggccacgctccatccccgcccgcgctgcctcccctggcgatcggcggcgaccgcggcccaacgaaagcgtcgtggtcggccgacgctgggcggactgggaacaagcgccaatggggatcgcggtggtggctctacacaccatgccgggggcgttcaccacccactccccggcatccattctgtcccttcggccagactttacgaggataaacagccgcaccaattcggtgccaaacgccaggacactgcaaggcgtcctaaggatcccgaggctgaggtcggtcaggcggctgtgccagcggatcgatgaccgggttacagaggggaacggtccttgggtcaaggatgccatgaataacgctagccaggttcttggcgacatcagcgtgcttggtcaagctgtaagtggcaatggtggtctaaatgggagtgctgccaagactccacctcagaggcggaagtcctcttcggttgaggatgaggcctgggaacttctgcaggagtcaatggtttactattgtggcagtcctgttgggacgattgctgccaacgatccaaatgacagtgatccggtgaactacgatcaggtgtttattcgggacttcataccatccggcattgcttttctacttaagggggaatatgaaattagctgggaaaaaacaatggactgccatagtccaggtcaaggtttaatgcccgccagcttcaaagtgcggacaattccacttgatggtgatgaggatgcaactgaggaggtcttggatcctgattttggggaagccgcaataggccgtgtggcacctgttgattcaggtctatggtggatcatattgctgagggcatacggaaaatgttcaggggatctgtcagtacaagagagaattgatgtccagaccggaatgaaaatgattctgaagctttgcttagctgatggtttcgacatgttccctacattgctcgtaacagatggttcatgcatgattgatcgtcgaatgggaatccatgggcacccacttgaaattcaggcactcttctattcagccctcttgtgtgcgcgtgagatgttgactcaagaagatggatcagctgacttaatccgtgccctgaacaatagacttattgcactgtcctttcatatcagagagtactattggcttgacatgcaaaaattgaatgagatatatcgatataaaacagaagaatattcttatgatgctgtcaacaagttcaacatttaccctgatcagatttctccatggcttgttgagtggatacctcctaagggtggttactttattggaaacctccagccagctcatatggacttccgattcttttcactgggaaatttatggtcaatagaatggaaaatcatcactgggagtgaccctaaaaacacgccttggtcataccacaatggaggatcctggccaacattactgtggcagctcacagtggcatgcatcaagatgaacagaccagaacttgctgccaaagctatagaagtagctgagaggcgaatcgctactgacaaatggccggagtactacgacaccaagagagcacgattcattgggaaacagtcgcggctgtaccaaacgtggtctattgctgggttcctagtagccaagctactaatagaaaagccagacgctgctaggattctgtggaacgatgaggatgctgaaatccttaatgcttcgagcacaaacagaaaacgtggcaagaaagtgttgaagaaaacatacatcgtgtgagttctcgcagcaagttcgattaaattcctcagttagcatttttaagttgtaatataggaagtgttgtccctgtatataaacttaaatgaggttgcatttttgctggggagggtgcctgctgttggaattggatgctgttattgtcgatgcatctggctttgcaacaaatcatagacctgcctcgtagtttcgctatacactttatttggcatgacaagttttcggagtctcattaccggactgaagccatat

SEQ ID NO: 15457 - DNA, 2246 bp, Zea Mays
ggttggttggggtggaggaccgtcgccttccccgtttcgtcttccggtcctcgttttatcccctcgcccttgcactcctccgccgcacccctttcctccttccgccctccgccgcgcctggctttctcccttcccgagaggccacgctccatccccgcccgcgctgcctcccctggcgatcggcggcgaccgcggcccaacgaaagcgtcgtggtcggccgctgtcacgcttcttgcagacgctgggcggactgggaacaagcgccaatggggatcgcggtggtggctctacacaccatgccgggggcgttcaccacccactccccggcatccattctgtcccttcggccagactttacgaggataaacagccgcaccaattcggtgccaaacgccaggacactgcaaggcgtcctaaggatcccgaggctgaggtcggtcaggcggctgtgccagcggatcgatgaccgggttacagaggggaacggtccttgggtcaaggatgccatgaataacgctagccaggttcttggcgacatcagcgtgcttggtcaagctgtaagtggcaatggtggtctaaatgggagtgctgccaagactccacctcagaggcggaagtcctcttcggttgaggatgaggcctgggaacttctgcaggagtcaatggtttactattgtggcagtcctgttgggacgattgctgccaacgatccaaatgacagtgatccggtgaactacgatcaggtgtttattcgggacttcataccatccggcattgcttttctacttaagggggaatatgaaattgtgcgtaatttcattctacacacacttcagcttcagagctgggaaaaaacaatggactgccatagtccaggtcaaggtttaatgcccgccagcttcaaagtgcggacaattccacttgatggtgatgaggatgcaactgaggaggtcttggatcctgattttggggaagccgcaataggccgtgtggcacctgttgattcaggtctatggtggatcatattgctgagggcatacggaaaatgttcaggggatctgtcagtacaagagagaattgatgtccagaccggaatgaaaatgattctgaagctttgcttagctgatggtttcgacatgttccctacattgctcgtaacagatggttcatgcatgattgatcgtcgaatgggaatccatgggcacccacttgaaattcaggcactcttctattcagccctcttgtgtgcgcgtgagatgttgactcaagaagatggatcagctgacttaatccgtgccctgaacaatagacttattgcactgtcctttcatatcagagagtactattggcttgacatgcaaaaattgaatgagatatatcgatataaaacagaagaatattcttatgatgctgtcaacaagttcaacatttaccctgatcagatttctccatggcttgttgagtggatacctcctaagggtggttactttattggaaacctccagccagctcatatggacttccgattcttttcactgggaaatttatggtcaataagatgccactaaagatatgctatcctgctcttgaaaaccaggaatggaaaatcatcactgggagtgaccctaaaaacacgccttggtcataccacaatggaggatcctggccaacattactgtggcagctcacagtggcatgcatcaagatgaacagaccagaacttgctgccaaagctatagaagtagctgagaggcgaatcgctactgacaaatggccggagtactacgacaccaagagagcacgattcattgggaaacagtcgcggctgtaccaaacgtggtctattgctgggttcctagtagccaagctactaatagaaaagccagacgctgctaggattctgtggaacgatgaggatgctgaaatccttaatgcttcgagcacaaacagaaaacgtggcaagaaagtgttgaagaaaacatacatcgtgtgagttctcgcagcaagttcgattaaattcctcagttagcatttttaagttgtaatataggaagtgttgtccctgtatataaacttaaatgaggttgcatttttgctggggagggtgcctgctgttggaattggatgctgttattgtcgatgcatctggctttgcaacaaatcatagacctgcctcgtagtttcgctatacactttatttggcatgacaagttttcggagtctcattaccggactgaagccatat

SEQ ID NO: 15458 - DNA, 2187 bp, Zea Mays
ggttggttggggtggaggaccgtcgccttccccgtttcgtcttccggtcctcgttttatcccctcgcccttgcactcctccgccgcacccctttcctccttccgccctccgccgcgcctggctttctcccttcccgagaggccacgctccatccccgcccgcgctgcctcccctggcgatcggcggcgaccgcggcccaacgaaagcgtcgtggtcggccgacgctgggcggactgggaacaagcgccaatggggatcgcggtggtggctctacacaccatgccgggggcgttcaccacccactccccggcatccattctgtcccttcggccagactttacgaggataaacagccgcaccaattcggtgccaaacgccaggacactgcaaggcgtcctaaggatcccgaggctgaggtcggtcaggcggctgtgccagcggatcgatgaccgggttacagaggggaacggtccttgggtcaaggatgccatgaataacgctagccaggttcttggcgacatcagcgtgcttggtcaagctgtaagtggcaatggtggtctaaatgggagtgctgccaagactccacctcagaggcggaagtcctcttcggttgaggatgaggcctgggaacttctgcaggagtcaatggtttactattgtggcagtcctgttgggacgattgctgccaacgatccaaatgacagtgatccggtgaactacgatcaggtgtttattcgggacttcataccatccggcattgcttttctacttaagggggaatatgaaattgtgcgtaatttcattctacacacacttcagcttcagagctgggaaaaaacaatggactgccatagtccaggtcaaggtttaatgcccgccagcttcaaagtgcggacaattccacttgatggtgatgaggatgcaactgaggaggtcttggatcctgattttggggaagccgcaataggccgtgtggcacctgttgattcaggtctatggtggatcatattgctgagggcatacggaaaatgttcaggggatctgtcagtacaagagagaattgatgtccagaccggaatgaaaatgattctgaagctttgcttagctgatggtttcgacatgttccctacattgctcgtaacagatggttcatgcatgattgatcgtcgaatgggaatccatgggcacccacttgaaattcaggcactcttctattcagccctcttgtgtgcgcgtgagatgttgactcaagaagatggatcagctgacttaatccgtgccctgaacaatagacttattgcactgtcctttcatatcagagagtactattggcttgacatgcaaaaattgaatgagatatatcgatataaaacagaagaatattcttatgatgctgtcaacaagttcaacatttaccctgatcagatttctccatggcttgttgagtggatacctcctaagggtggttactttattggaaacctccagccagctcatatggacttccgattcttttcactgggaaatttatggtcaatagaatggaaaatcatcactgggagtgaccctaaaaacacgccttggtcataccacaatggaggatcctggccaacattactgtggcagctcacagtggcatgcatcaagatgaacagaccagaacttgctgccaaagctatagaagtagctgagaggcgaatcgctactgacaaatggccggagtactacgacaccaagagagcacgattcattgggaaacagtcgcggctgtaccaaacgtggtctattgctgggttcctagtagccaagctactaatagaaaagccagacgctgctaggattctgtggaacgatgaggatgctgaaatccttaatgcttcgagcacaaacagaaaacgtggcaagaaagtgttgaagaaaacatacatcgtgtgagttctcgcagcaagttcgattaaattcctcagttagcatttttaagttgtaatataggaagtgttgtccctgtatataaacttaaatgaggttgcatttttgctggggagggtgcctgctgttggaattggatgctgttattgtcgatgcatctggctttgcaacaaatcatagacctgcctcgtagtttcgctatacactttatttggcatgacaagttttcggagtctcattaccggactgaagccatat

SEQ ID NO: 15459 - DNA, 2205 bp, Zea Mays
ggttggttggggtggaggaccgtcgccttccccgtttcgtcttccggtcctcgttttatcccctcgcccttgcactcctccgccgcacccctttcctccttccgccctccgccgcgcctggctttctcccttcccgagaggccacgctccatccccgcccgcgctgcctcccctggcgatcggcggcgaccgcggcccaacgaaagcgtcgtggtcggccgctgtcacgcttcttgcagacgctgggcggactgggaacaagcgccaatggggatcgcggtggtggctctacacaccatgccgggggcgttcaccacccactccccggcatccattctgtcccttcggccagactttacgaggataaacagccgcaccaattcggtgccaaacgccaggacactgcaaggcgtcctaaggatcccgaggctgaggtcggtcaggcggctgtgccagcggatcgatgaccgggttacagaggggaacggtccttgggtcaaggatgccatgaataacgctagccaggttcttggcgacatcagcgtgcttggtcaagctgtaagtggcaatggtggtctaaatgggagtgctgccaagactccacctcagaggcggaagtcctcttcggttgaggatgaggcctgggaacttctgcaggagtcaatggtttactattgtggcagtcctgttgggacgattgctgccaacgatccaaatgacagtgatccggtgaactacgatcaggtgtttattcgggacttcataccatccggcattgcttttctacttaagggggaatatgaaattgtgcgtaatttcattctacacacacttcagcttcagagctgggaaaaaacaatggactgccatagtccaggtcaaggtttaatgcccgccagcttcaaagtgcggacaattccacttgatggtgatgaggatgcaactgaggaggtcttggatcctgattttggggaagccgcaataggccgtgtggcacctgttgattcaggtctatggtggatcatattgctgagggcatacggaaaatgttcaggggatctgtcagtacaagagagaattgatgtccagaccggaatgaaaatgattctgaagctttgcttagctgatggtttcgacatgttccctacattgctcgtaacagatggttcatgcatgattgatcgtcgaatgggaatccatgggcacccacttgaaattcaggcactcttctattcagccctcttgtgtgcgcgtgagatgttgactcaagaagatggatcagctgacttaatccgtgccctgaacaatagacttattgcactgtcctttcatatcagagagtactattggcttgacatgcaaaaattgaatgagatatatcgatataaaacagaagaatattcttatgatgctgtcaacaagttcaacatttaccctgatcagatttctccatggcttgttgagtggatacctcctaagggtggttactttattggaaacctccagccagctcatatggacttccgattcttttcactgggaaatttatggtcaatagaatggaaaatcatcactgggagtgaccctaaaaacacgccttggtcataccacaatggaggatcctggccaacattactgtggcagctcacagtggcatgcatcaagatgaacagaccagaacttgctgccaaagctatagaagtagctgagaggcgaatcgctactgacaaatggccggagtactacgacaccaagagagcacgattcattgggaaacagtcgcggctgtaccaaacgtggtctattgctgggttcctagtagccaagctactaatagaaaagccagacgctgctaggattctgtggaacgatgaggatgctgaaatccttaatgcttcgagcacaaacagaaaacgtggcaagaaagtgttgaagaaaacatacatcgtgtgagttctcgcagcaagttcgattaaattcctcagttagcatttttaagttgtaatataggaagtgttgtccctgtatataaacttaaatgaggttgcatttttgctggggagggtgcctgctgttggaattggatgctgttattgtcgatgcatctggctttgcaacaaatcatagacctgcctcgtagtttcgctatacactttatttggcatgacaagttttcggagtctcattaccggactgaagccatat

SEQ ID NO: 15460 - DNA, 1266 bp, Zea Mays
ctccacctcatgggcacaaatacttggttggtagctccgcctcgcaagctttgctcggcggggacatggttggtcactccgcctcatcggtttgccgggtggtggcttggtcggcagcctcacctggctaacttgctcgacggggacttggttggtagcctcgtctcgctgacttgcttgtcggagacttggtcggccgctccgcccgccggcttgctcgccgaggacctggtttgataataaggttacgagcttacttagggtacctcgtccttggtaccccacaagttctattgctaaaattgctttgaagagaggagtacaacttaccactagtgagagggtggttgaagatattgaaaaattaacaggtggtgtgatgctttcaaggaacaatatttatagtcttctatagagggaaggatttcttgtcctcacaacttgcagcggcgctactagagagggaaagattagcaaagtcacgccaagatgaagaggaagcatggcaaaaatcagtgtcttatttttcaagtgtcgaggcatatctacagtatactgtagctagtactctaggagagactctggacgctaactctaaatatggaagtgatcgaacttgataagaatcatgcggaaacaatggcaagaattgttgaagttgtgcaaggacatgctgacctctcgtaagaaatctagagtggaagttatcactttgcacagataaatatagagaaagctgaaagggtattaggaaaggttgcgacagcccacaggccgccagctgaagattctagacctcctgaaacaataacagatgaagagaggtccatgtttcgaaaacttggtctaaggatcaaggcatttctgctcctcgctttatgagactttgttctggcatgatgtggctgttaaagttttctccaagcaagaatattcagaagaagtgatatcgacctttagacaagaggtagacatccatcatcagcaacaacttatgccaatttctaataatatatatggatatgcagatcagctttgagctgtagagtaatctacactaaaccctaaaccccaaaccctgcccgcgccccaccattcacggccacgtccgccaccgacatccttcgcgcatgcgccccaccattcacgcctctgcgcgctagccccgccaattcccttccatcccgcctcttccccgccccgactcctctcagctcgtctcctctttcccacgagacgacttaactccctctcccaaaccctagg

SEQ ID NO: 15461 - DNA, 1860 bp, Zea Mays
tcgggctgggcttgttggcctcgcctcggttggtgccctctctgccgccgcggacgagagtcgccaccaccaccaccatccagccagccccttcccttccccagcagcagtctccagccgcagccatggccaagccaccgccgcccacctccacctccgaccccgcgctccccaccactgctacaaccacctcgtcggcccccaagtcgtcgtctcgcccctccccccgcccccggggcctcctcgatccgctcgcagcctccgcgcgctccctcctcgcctcggcgcgccgctccccggtcaccacgttagccgccgccttcttcctcctcgcgctcgtcatgtacggcgaggacgcccgcaccatcgccgagctctccatcgacgactacctctacccggacgccgacctctacaacgtctccggcctgccgcccctcgcgctgcccccgctcacctgcgacctctccagcggcagatgggtcttcgacaacgtctccgttccggcgtaccgggagaaagactgcaccttcctcaccaagcaggtctcctgcctcgccaacggccgccccgacgacatgtggcagtactggagatggcagcccaacgagtgctccctccccacgttcgacgctcggagattcatggaggcgatgcgcgggaagcggctcatgttcgtgggggactcgctgaaccgcaaccagtgggagtcgctggtgtgcctcgtgcagtccatcctgtccaagggcaggaagaagatcgtcaagcggggctccttcaacaccttctacgccaaggagtaccgcgccacgctcgagttctactgggcgcccttcctcgtcgagtccaactctgacaaccccaacttccacagcatcaaggaacggatcatcagtcccgagcggatcgaggcgcacgccaagcactggaaggatgctgactacctcgtcttcaacacctacatctggtggatgaacaacgccgatatcaaagagacccaattcgaggtactggtctgacaacgatgaggttcccaggattgaggcgtacggccgtgtgttcaagacatggtctgattggctcaatgacaacatcgatcctgcccgaacgtccatcttcttcatgacgatttctcctcctcacctcagcccacagaattggggaaacccggacggtatcaaatgtgtaagagagacgcttccatatcagaactacagccaacacttggatctttaccatgacatgcggctgtatgacttagtggtcaatgtggccagctccatggagaaggtcccagtgacagtgatcaatatcacaaggatgtcagattaccggaaggacgcccacacgtccctgtacaccatccggcaagggaagctgctgacgcctaagcagaaggcagaccccgagaagttcgcggattgcatccactggtgccttcctggcgtgccggacgtgtggaaccaaatactctacacgaggattctttcgaaatcatcatggcattctaattttagcccccctccatcccagtctctgcctcttcctccccaatgagaatcagaagtgggggcttggtttttgtcggagaatgtatgatttttcattctttttccttcctttttgggtagattgagtaaaatgatagcacgaaaaggaaaatgaatgttctgattactgatggtatagcatgtaagaagattcagctgaagtgtaaattagttgtgagttagccaattgagaaaacaacagcgacctagtataaagtgcatatacatatactgctggttcacaggcaaaattacctatatataagccttttttcctgatggatgaaaaaaatgtgcctatctttttttt

SEQ ID NO: 15462 - DNA, 1790 bp, Zea Mays
tcgggctgggcttgttggcctcgcctcggttggtgccctctctgccgccgcggacgagagtcgccaccaccaccaccatccagccagccccttcccttccccagcagcagtctccagccgcagccatggccaagccaccgccgcccacctccacctccgaccccgcgctccccaccactgctacaaccacctcgtcggcccccaagtcgtcgtctcgcccctccccccgcccccggggcctcctcgatccgctcgcagcctccgcgcgctccctcctcgcctcggcgcgccgctccccggtcaccacgttagccgccgccttcttcctcctcgcgctcgtcatgtacggcgaggacgcccgcaccatcgccgagctctccatcgacgactacctctacccggacgccgacctctacaacgtctccggcctgccgcccctcgcgctgcccccgctcacctgcgacctctccagcggcagatgggtcttcgacaacgtctccgttccggcgtaccgggagaaagactgcaccttcctcaccaagcaggtctcctgcctcgccaacggccgccccgacgacatgtggcagtactggagatggcagcccaacgagtgctccctccccacgttcgacgctcggagattcatggaggcgatgcgcgggaagcggctcatgttcgtgggggactcgctgaaccgcaaccagtgggagtcgctggtgtgcctcgtgcagtccatcctgtccaagggcaggaagaagatcgtcaagcggggctccttcaacaccttctacgccaaggacatcaaggaacggatcatcagtcccgagcggatcgaggcgcacgccaagcactggaaggatgctgactacctcgtcttcaacacctacatctggtggatgaacaacgccgatatcaaagtcaggagacccaattcgaggtactggtctgacaacgatgaggttcccaggattgaggcgtacggccgtgtgttcaagacatggtctgattggctcaatgacaacatcgatcctgcccgaacgtccatcttcttcatgacgatttctcctcctcacctcagcccacagaattggggaaacccggacggtatcaaatgtgtaagagagacgcttccatatcagaactacagccaacacttggatctttaccatgacatgcggctgtatgacttagtggtcaatgtggccagctccatggagaaggtcccagtgacagtgatcaatatcacaaggatgtcagattaccggaaggacgcccacacgtccctgtacaccatccggcaagggaagctgctgacgcctaagcagaaggcagaccccgagaagttcgcggattgcatccactggtgccttcctggcgtgccggacgtgtggaaccaaatactctacacgaggattctttcgaaatcatcatggcattctaattttagcccccctccatcccagtctctgcctcttcctccccaatgagaatcagaagtgggggcttggtttttgtcggagaatgtatgatttttcattctttttccttcctttttgggtagattgagtaaaatgatagcacgaaaaggaaaatgaatgttctgattactgatggtatagcatgtaagaagattcagctgaagtgtaaattagttgtgagttagccaattgagaaaacaacagcgacctagtataaagtgcatatacatatactgctggttcacaggcaaaattacctatatataagccttttttcctgatggatgaaaaaaatgtgcctatctttttttt

SEQ ID NO: 15463 - DNA, 2090 bp, Zea Mays
tcccctcttcagtctttgctctcaactgctgccatggcaaacgcatccgacagcgatattccatccgtcactcacgacctcgacgaggatgaagaattcgacgacgacgacctcgatgacgaagacgacgatggcggcgaacccctcgcgtcctcatccgaggcggctcgcctagaggccgtgctccggcgtctcaccgcggacgaggtccggatccgggtgcaccaggtcacgatccggggctgcgcccgcacgcgccgcgccgcggtcgaggcggcggtcggcccggacgtgtcgcgcgccgccaccgtgcgggacctcgtgcgcgccgccgccgccgctggtgaccggctccgttgcctcggcgccttcgacacagtctcgatcaccctcgacgcggcgccgcccgggatccctggcagcgccgtcgtcgtcctcattgatgttgcggaggcccgcggccgcgctgccggtgatttcggcgtcttcgccaacacacagagtagatcatgctcacttgaaggttcagtgaagttgaagaacctatttggatactgtgagacctgggatgcatcaggcgctcttgaattagataagacagcagaactaagtgccggagtccaaatgcctaggatcggagcaataccaactcccttgatggctagaatatcgtttgtatctgacgactggttaaagtcctcactgaaagaacacttgatgggcgtttctgtcggcttgctctccaccataaaccacaacattgcttacaatttgacatggagaaagttaactgatccaacacgcatgtcatccaattctgtacaagaggaattaggacatagccttttgtcctctattaagtacgcgtacaaggttgaccgaagggactcaagcataagacctgcacgcggatatgcttttatgtcgacttctcaagttggagggcttgcaccagggagcaaatattcacgttttcttaggcaggaatttgatcttcgagtggctttgcctctgggtgtgctgaatggtgctctcaacgccggagtggctgcgggagtcatccatccattggaaaggggatctgcaggatctgtctcaccacttgtagaaagatttaacttgggtggtaatagggctctcgtgtgccgcttgggtggaccatcttcactattaggcttcaaaacaagagggctacgggcagcaacagagtccagaacacaagaccccaacactcctggcaatggcacttccccttcccctgagctaaatggtcttggaggtgaagtagcggtgacagccttcgccgacctgtcatttgatctgcctctgaagccgctcagggagctgggaatccatggtcatgcttttgtctgtgctggaaatcttggtagattaacggagtgtgatctgcggaagttccctgttactgaattcctgcagacgttcagaagttgtgcaggatggggcgtagttgtgccgaccagactgttccgcgtagaatgaattactgctacatcctaaaacagcttgatcatgacggggggaagacaggcatacagttgaacttctcatcctcctaatttgtaagatgaaaccaaacagagccctagtggtaacaaagctccttgtaaacatctcaatggcaaacctcaaaaaaccggatttattaataaaaaataaggtcaaaaaccggatgtgaaagattacgtaaaaaaaaaaccggagttctttagactttcatggtccactgtctgcgtttgaatgacagccagaaactcggctttgcattggggatcttgtatgttgactatttgctcctctccagtctccaccatatctatatgggagtgatgaagcatttggctaggcagacagtctccatccccatctactgtccgtcttgttcttgtatgagctgcagcatcagccattttcatgtctaagctgacattcttgtaacttgagaattattaaggagggaataagtaagtttttatagaatttcttttttttaataaaaaaactacagagtgcgtttgtaacgtacagtgcgagagtaaaagaaatcaaaacagcacattcaatcgaat

SEQ ID NO: 15464 - DNA, 2110 bp, Zea Mays
ccacgccccagtgagagctcagtttcccctcttcagtctttgctctcaactgctgccatggcaaacgcatccgacagcgatattccatccgtcactcacgacctcgacgaggatgaagaattcgacgacgacgacctcgatgacgaagacgacgatggcggcgaacccctcgcgtcctcatccgaggcggctcgcctagaggccgtgctccggcgtctcaccgcggacgaggtccggatccgggtgcaccaggtcacgatccggggctgcgcccgcacgcgccgcgccgcggtcgaggcggcggtcggcccggacgtgtcgcgcgccgccaccgtgcgggacctcgtgcgcgccgccgccgccgctggtgaccggctccgttgcctcggcgccttcgacacagtctcgatcaccctcgacgcggcgccgcccgggatccctggcagcgccgtcgtcgtcctcattgatgttgcggaggcccgcggccgcgctgccggtgatttcggcgtcttcgccaacacacagatcatgctcacttgaaggttcagtgaagttgaagaacctatttggatactgtgagacctgggatgcatcaggcgctcttgaattagataagacagcagaactaagtgccggagtccaaatgcctaggatcggagcaataccaactcccttgatggctagaatatcgtttgtatctgacgactggttaaagtcctcactgaaagaacacttgatgggcgtttctgtcggcttgctctccaccataaaccacaacattgcttacaatttgacatggagaaagttaactgatccaacacgcatgtcatccaattctgtacaagaggaattaggacatagccttttgtcctctattaagtacgcgtacaaggttgaccgaagggactcaagcataagacctgcacgcggatatgcttttatgtcgacttctcaagttggagggcttgcaccagggagcaaatattcacgttttcttaggcaggaatttgatcttcgagtggctttgcctctgggtgtgctgaatggtgctctcaacgccggagtggctgcgggagtcatccatccattggaaaggggatctgcaggatctgtctcaccacttgtagaaagatttaacttgggtggtaatagggctctcgtgtgccgcttgggtggaccatcttcactattaggcttcaaaacaagagggctacgggcagcaacagagtccagaacacaagaccccaacactcctggcaatggcacttccccttcccctgagctaaatggtcttggaggtgaagtagcggtgacagccttcgccgacctgtcatttgatctgcctctgaagccgctcagggagctgggaatccatggtcatgcttttgtctgtgctggaaatcttggtagattaacggagtgtgatctgcggaagttccctgttactgaattcctgcagacgttcagaagttgtgcaggatggggcgtagttgtgccgaccagactgttccgcgtagagatgaattactgctacatcctaaaacagcttgatcatgacggggggaagacaggcatacagttgaacttctcatcctcctaatttgtaagatgaaaccaaacagagccctagtggtaacaaagctccttgtaaacatctcaatggcaaacctcaaaaaaccggatttattaataaaaaataaggtcaaaaaccggatgtgaaagattacgtaaaaaaaaaaccggagttctttagactttcatggtccactgtctgcgtttgaatgacagccagaaactcggctttgcattggggatcttgtatgttgactatttgctcctctccagtctccaccatatctatatgggagtgatgaagcatttggctaggcagacagtctccatccccatctactgtccgtcttgttcttgtatgagctgcagcatcagccattttcatgtctaagctgacattcttgtaacttgagaattattaaggagggaataagtaagtttttatagaatttcttttttttaataaaaaaactacagagtgcgtttgtaacgtacagtgcgagagtaaaagaaatcaaaacagcacattcaatcgaat

SEQ ID NO: 15465 - DNA, 2143 bp, Zea Mays
gtcaatcttcagaagagaagcaaagcaacagaccacgccccagtgagagctcagtttcccctcttcagtctttgctctcaactgctgccatggcaaacgcatccgacagcgatattccatccgtcactcacgacctcgacgaggatgaagaattcgacgacgacgacctcgatgacgaagacgacgatggcggcgaacccctcgcgtcctcatccgaggcggctcgcctagaggccgtgctccggcgtctcaccgcggacgaggtccggatccgggtgcaccaggtcacgatccggggctgcgcccgcacgcgccgcgccgcggtcgaggcggcggtcggcccggacgtgtcgcgcgccgccaccgtgcgggacctcgtgcgcgccgccgccgccgctggtgaccggctccgttgcctcggcgccttcgacacagtctcgatcaccctcgacgcggcgccgcccgggatccctggcagcgccgtcgtcgtcctcattgatgttgcggaggcccgcggccgcgctgccggtgatttcggcgtcttcgccaacacacagagtagatcatgctcacttgaaggttcagtgaagttgaagaacctatttggatactgtgagacctgggatgcatcaggcgctcttgaattagataagacagcagaactaagtgccggagtccaaatgcctaggatcggagcaataccaactcccttgatggctagaatatcgtttgtatctgacgactggttaaagtcctcactgaaagaacacttgatgggcgtttctgtcggcttgctctccaccataaaccacaacattgcttacaatttgacatggagaaagttaactgatccaacacgcatgtcatccaattctgtacaagaggaattaggacatagccttttgtcctctattaagtacgcgtacaaggttgaccgaagggactcaagcataagacctgcacgcggatatgcttttatgtcgacttctcaagttggagggcttgcaccagggagcaaatattcacgttttcttaggaatttgatcttcgagtggctttgcctctgggtgtgctgaatggtgctctcaacgccggagtggctgcgggagtcatccatccattggaaaggggatctgcaggatctgtctcaccacttgtagaaagatttaacttgggtggtaatagggctctcgtgtgccgcttgggtggaccatcttcactattaggcttcaaaacaagagggctacgggcagcaacagagtccagaacacaagaccccaacactcctggcaatggcacttccccttcccctgagctaaatggtcttggaggtgaagtagcggtgacagccttcgccgacctgtcatttgatctgcctctgaagccgctcagggagctgggaatccatggtcatgcttttgtctgtgctggaaatcttggtagattaacggagtgtgatctgcggaagttccctgttactgaattcctgcagacgttcagaagttgtgcaggatggggcgtagttgtgccgaccagactgttccgcgtagagatgaattactgctacatcctaaaacagcttgatcatgacggggggaagacaggcatacagttgaacttctcatcctcctaatttgtaagatgaaaccaaacagagccctagtggtaacaaagctccttgtaaacatctcaatggcaaacctcaaaaaaccggatttattaataaaaaataaggtcaaaaaccggatgtgaaagattacgtaaaaaaaaaaccggagttctttagactttcatggtccactgtctgcgtttgaatgacagccagaaactcggctttgcattggggatcttgtatgttgactatttgctcctctccagtctccaccatatctatatgggagtgatgaagcatttggctaggcagacagtctccatccccatctactgtccgtcttgttcttgtatgagctgcagcatcagccattttcatgtctaagctgacattcttgtaacttgagaattattaaggagggaataagtaagtttttatagaatttcttttttttaataaaaaaactacagagtgcgtttgtaacgtacagtgcgagagtaaaagaaatcaaaacagcacattcaatcgaat

SEQ ID NO: 15466 - DNA, 3338 bp, Zea Mays
ctcgagctctcgcactcctccgtcgtcctccaaaccctaggccagaccagagctgaagtcgagcggaagtccaagcaaaaaaccttgtccttgcgggtgtcaagtctgtaaccttacatgatgatggcaaagtcgagctatgggacttgtcaagcaatttcttcctctcagagaaggatattgggcaaaaccgtgctcatgcttgtgttccaaagctacaggagcttaacaatgctgtcatcatctctaccgtaactggtgatttgaccaaggaacaactttctaactttcaggctgtggtctttactgatatcagcatagaaaaagcagttgagtatgatgaatactgtcatagccaccagccgccaattgctttcattaagtccgaagtttgtggcctttttggcagtgttttctgtgactttggtcctgagttcactgttttggatgtcgatggcgaggaaccacatacaggaattgtggcatcaatcagcaacgacaatccagcacttgtttcttgtgtggatgatgaacgtctggagttccaggatggtgatctagttgttttctccgaagtgcatggaatgaccgaactcaatgatggaaaaccaagaaagattaagaatgcaaggccttattcttttactctagaagaagacaccacctcatatggcacttactttagaggtggtattgtcacacaggtgaagccaccaaaggttcttaaattcaaaaccttgaaggatgcaatcaaggagccaggagaatttctcatgagtgatttctccaagtttgaccggccacctcttctacatttggccttccaagctttggacaaatttaggtctgagttggcacgatttcctattgctgggtcagatgatgatgcacagaagctgatagaccttgctattagtattaacgaaactcttggtgatagtaagcttgaagaaattgacaagaagctcctgcagcatttcgccagtggttccagggctgttttgaatcctatggctgcaatgtttggcggtattgtaggccaggaggttgttaaagcatgctcagggaaattccatccactttaccagttcttctactttgattctgtcgaatctctgccagttgaaccgttggagcctagtgatttgaagccagagaacagtagacatgatgcacaaattagtgtctttggggctcagcttcaaaagaaactggagcagtcaaaaatcttcatggttggttctggggctcttggatgtgaatttttgaagaaccttgcgttaatgggtatttcttgcagtcaaaatgggaagctgactgtgacagatgatgatgttatagagaaaagcaatctcagtcgccagtttctcttccgtgactggaacattggacagcccaagtccacagttgctgcaactgccgctatggcaattaatcccgagcttcatgtggaggcccttcagaatagagcaagtcctgagactgaaaatgtgtttaatgatgccttttgggagagcttggatgctgttgttaatgcattggacaatgtcactgcaagaatgtacattgactctagatgtgtatatttccagaagccacttcttgaatcaggtactctgggtgccaagtgcaacacacagatggtcattcctcacttaacagaaaactatggggcatccagagatccaccagaaaagcaggcacctatgtgcactgtacattcatttcctcacaatattgatcactgcctgacatgggccagatctgagtttgagggtctacttgagaagactcccactgaagtaaatgcttttctgtcgaaccctggtggatatgcaaccacagcaagaactgctggtgatgcacaggctagagaccaacttgagcgagttattgaatgccttgagacagacaagtgtgagacattccaagattgtattacctgggcccggttgaagtttgaggattatttctccaaccgtgtaaagcagctgacattcacttttcctgaagacgcaatgactagctctggtgctcctttctggtctgctcctaagcggttcccgcgaccactggagttctcatcttctgactcaagtcaccttaacttcttgttggctgcttctatattaagggcagagacatttggaatacccatacctggttgggcgaaaaacccaaagaaactagctgaagctgtggacaaggtcattgttccggatttccatccaaaagagggtgttaagatagagacagatgagaaggctactagcctatcctctgcgtctgttgatgatgctgccgtcattgaagagcttattgcaaagctgcaagcaatttctaaaacattgtcaccaggattccgtatgaaccctatacagtttgagaaggatgatgataccaatttccatatggacttgattgctggttttgctaacatgcgggccaggaactacagcatccctgaagttgacaagttgaaggcgaagttcatagcgggaagaatcatcccggccatcgccacctcaactgcgatggccaccggccttgtctgcctggagctttacaaggtccttgctggtgggcacaaggttgaagactaccggaacacatttgcgaacctcgcaatccccctcttctccatggcggagcctgtgccgcccaagaccatgaagcaccaagacatgtcctggaccgtgtgggaccggtggaccgtaactggcaacatgacgctgagggagctcctggagtggctgaaggagaaggggttgaacgcgtacagcatatcctgcgggacctcgctgctgtacaactccatgttcccgagacacaaggagcggctggacaagaaggtggtggatgtggccagggaggtggccaaggtggaggtgccttcctaccgccgccatctggacgttgtggtggcctgtgaggatgacgatgacaatgacgtcgacatcccgcttgtgtctatttacttccggtaaagaggagggtgtcgctacctgtttacatggaacctgtctgtgcgatgtttatcagaaggatcgagtctataagttgcgcatgcaaccgagaactaggctgtgttcaatgtaaacacatactgatgagtctataagttggctgggaatcgtcgccgagatttgggttcaccgttatggaattcttggagcatataaaacatcgtgatagttattgcatgtcaatgtcactgctagatgttgttgtcctcatgcatgtatcggtgtgactcttattgtgcttgggtgcatttgcttcaatgcatgtgacgtgctctctttagatttcggaaactacagaaatgttagggcctc

SEQ ID NO: 15467 - DNA, 3755 bp, Zea Mays
gttgagctttattatacttttagcagaagctgtgccctccgtctccctctcgagctctcgcactcctccgtcgtcctccaaaccctaggccagaccagagctgaagtcgagcggaagtccaaggcaccgccgcgaccccccatcctccgcacgacctggatctgacgcgcctccccctgccgccgtccgcctcacacctcctcgcggcggccgccgtgctcgggctcctaggcggcctcctactctacatgcttccccggaagcggggggtcgacgccggcgaggtccaggatttgcacaacaaggccccccgcgccgccccagcccaggacaaggacagggaggaggttgcggagatggccggcagggcgcccgagatcgatgaggacctccatagccgccagctcgccgtctatgggcgcgagaccatgaagcgcctcttcggctccaatgtcctcgtctctggactccagggactaggcgctgagatcgcaaaaaaccttgtccttgcgggtgtcaagtctgtaaccttacatgatgatggcaaagtcgagctatgggacttgtcaagcaatttcttcctctcagagaaggatattgggcaaaaccgtgctcatgcttgtgttccaaagctacaggagcttaacaatgctgtcatcatctctaccgtaactggtgatttgaccaaggaacaactttctaactttcaggctgtggtctttactgatatcagcatagaaaaagcagttgagtatgatgaatactgtcatagccaccagccgccaattgctttcattaagtccgaagtttgtggcctttttggcagtgttttctgtgactttggtcctgagttcactgttttggatgtcgatggcgaggaaccacatacaggaattgtggcatcaatcagcaacgacaatccagcacttgtttcttgtgtggatgatgaacgtctggagttccaggatggtgatctagttgttttctccgaagtgcatggaatgaccgaactcaatgatggaaaaccaagaaagattaagaatgcaaggccttattcttttactctagaagaagacaccacctcatatggcacttactttagaggtggtattgtcacacaggtgaagccaccaaaggttcttaaattcaaaaccttgaaggatgcaatcaaggagccaggagaatttctcatgagtgatttctccaagtttgaccggccacctcttctacatttggccttccaagctttggacaaatttaggtctgagttggcacgatttcctattgctgggtcagatgatgatgcacagaagctgatagaccttgctattagtattaacgaaactcttggtgatagtaagcttgaagaaattgacaagaagctcctgcagcatttcgccagtggttccagggctgttttgaatcctatggctgcaatgtttggcggtattgtaggccaggaggttgttaaagcatgctcagggaaattccatccactttaccagttcttctactttgattctgtcgaatctctgccagttgaaccgttggagcctagtgatttgaagccagagaacagtagacatgatgcacaaattagtgtctttggggctcagcttcaaaagaaactggagcagtcaaaaatcttcatggttggttctggggctcttggatgtgaatttttgaagaaccttgcgttaatgggtatttcttgcagtcaaaatgggaagctgactgtgacagatgatgatgttatagagaaaagcaatctcagtcgccagtttctcttccgtgactggaacattggacagcccaagtccacagttgctgcaactgccgctatggcaattaatcccgagcttcatgtggaggcccttcagaatagagcaagtcctgagactgaaaatgtgtttaatgatgccttttgggagagcttggatgctgttgttaatgcattggacaatgtcactgcaagaatgtacattgactctagatgtgtatatttccagaagccacttcttgaatcaggtactctgggtgccaagtgcaacacacagatggtcattcctcacttaacagaaaactatggggcatccagagatccaccagaaaagcaggcacctatgtgcactgtacattcatttcctcacaatattgatcactgcctgacatgggccagatctgagtttgagggtctacttgagaagactcccactgaagtaaatgcttttctgtcgaaccctggtggatatgcaaccacagcaagaactgctggtgatgcacaggctagagaccaacttgagcgagttattgaatgccttgagacagacaagtgtgagacattccaagattgtattacctgggcccggttgaagtttgaggattatttctccaaccgtgtaaagcagctgacattcacttttcctgaagacgcaatgactagctctggtgctcctttctggtctgctcctaagcggttcccgcgaccactggagttctcatcttctgactcaagtcaccttaacttcttgttggctgcttctatattaagggcagagacatttggaatacccatacctggttgggcgaaaaacccaaagaaactagctgaagctgtggacaaggtcattgttccggatttccatccaaaagagggtgttaagatagagacagatgagaaggctactagcctatcctctgcgtctgttgatgatgctgccgtcattgaagagcttattgcaaagctgcaagcaatttctaaaacattgtcaccaggattccgtatgaaccctatacagtttgagaaggatgatgataccaatttccatatggacttgattgctggttttgctaacatgcgggccaggaactacagcatccctgaagttgacaagttgaaggcgaagttcatagcgggaagaatcatcccggccatcgccacctcaactgcgatggccaccggccttgtctgcctggagctttacaaggtccttgctggtgggcacaaggttgaagactaccggaacacatttgcgaacctcgcaatccccctcttctccatggcggagcctgtgccgcccaagaccatgaagcaccaagacatgtcctggaccgtgtgggaccggtggaccgtaactggcaacatgacgctgagggagctcctggagtggctgaaggagaaggggttgaacgcgtacagcatatcctgcgggacctcgctgctgtacaactccatgttcccgagacacaaggagcggctggacaagaaggtggtggatgtggccagggaggtggccaaggtggaggtgccttcctaccgccgccatctggacgttgtggtggcctgtgaggatgacgatgacaatgacgtcgacatcccgcttgtgtctatttacttccggtaaagaggagggtgtcgctacctgtttacatggaacctgtctgtgcgatgtttatcagaaggatcgagtctataagttgcgcatgcaaccgagaactaggctgtgttcaatgtaaacacatactgatgagtctataagttggctgggaatcgtcgccgagatttgggttcaccgttatggaattcttggagcatataaaacatcgtgatagttattgcatgtcaatgtcactgctagatgttgttgtcctcatgcatgtatcggtgtgactcttattgtgcttgggtgcatttgcttcaatgcatgtgacgtgctctctttagatttcggaaactacagaaatgttagggcctc

SEQ ID NO: 15468 - DNA, 3940 bp, Zea Mays
gcagcattggatttgccccagtgtactacagactcgacaggtacggtgagcataaaagaggagagccgataagcacaatggcgcctgaggaaaggatgaagcagacagagggcagtcacaaggtggtaacagcagcagcagcaggtggcaagatggcggtgctccactctccggtcggagtgaggagcatcgtgacctccctggtggctttcttcatcctagccagctccgtggtgttcctcctcctcgacagagaagccgggctccaagaagaaccggcgataagagccggcggcggcggcggcgacgaggagtgcagctggtctcgggggcgctgggtgtacgacaacgtgtcccggccgctgtacgacgggctcaagtgcgccttcatcttccccgaggtggcctgtgacaagtatggcaggaaggatgtcatgtaccagcactggagatggcagcctcatggtcatggatgcgacctcccaagattcgatgccatgaagctgcttgaagagctgaggaacaagagactggtgtttgtgggtgactcggtgaacaggaaccaatgggtctctctcgtgtgcatggtggaggcctcgatacctgacgacaggctcaagatgcgcatcttcaatggctcgctcatctccttcaaggcactggagtacaacgcgacgatagatttctactggtcgccgctgctggtggagtctaacagcgacaaccccatcatccaccgggtggagtaccggatcataagggcagacaggatcgagaagcacgccagcgtgtggagggacgccgacgtcatcgtcttcaactcttacctgtggtggaggaagcagaaggatgacatgaggatgaaggtcatgtacggttcatttgaagatggtgacgcaaagctagacgagatggaaatggcggatggtttcgagatagctatcaagaaactgacggaatggcttgcaaagaacattgacaagaacaagactaggatatttttcgcaggatcatcaccaacacattcctgggctagcaactggggcggacaagacaagaacaagtgcctgaacgaaacggagccgatcagctacagacccggcggcgggtacaaggctgcaaccacggactacagcctgatggccatggccaggtcctacttccggcggacgctggagccgagaggcatacgcgtccagatactcaacatcacggagctgtccgactaccgcaaggacgggcatcccacggtgttcaggaggcagttcgttcccctgaccaaggagcagatcgcggacccggccagctacgcggactgcacgcactggtgcctcccaggcgtccccgacgtctggaacgagttcctgtatggctacctcacgcagcagagcaaatgacgatgcattattacaagaatggccttgttatatgtagtagtgtacagtgcagtacagattgccagctgctccgtttagattattagggatggacctgctgttacatgtagagagagacagacaggagatctgtcttgcccaacattaattctagtatctgtaaatcttgttcttcttgtccaacattaattctaggatctgctgctaaccattttttttggatttatgtaaactgagtgattatctgaaatagaatgatctgagtttgctgttccagtactgagcaagtaaaaaaaccaaaaaaacaaatcgcccaccgtggggctcgaacccacgaccacaaggttaagagccttgcgctctaccgactgagctagacgggcttgttttccctttttttttctttggctataaattggatccgcatcagtcagctcaacacttgttacggagcaactaaacatagagagagagagagagggtggatgacgaggacggcctactgctttctttgagacagcatgcatgcatggcctgagcttgctttgagccctcctcgctcgctcgctcaccttcttatctcctccatccatccaaaaatatctccatgcgctcagacggggacgagacgacgggagaaggaggaggagggcgcccgcccgccacgcgcctcctccaaatcccagccgtccacgtgtcccagtccgcgacccccacgcgcctatatccatccatcatcctattcctatcccgccacatagtccaccaccacctattattccgctcccgacgcccagaattcacgagaacgcacccgcccgcctcctccttccgtccccatccagatgatgcttagggtttccgcgtctccggccgccgcggtggccaaccatctctctggtggggccgcggcgaccacggctcctgccagggtgacggcgcagcgcagcggcgtctcgctgtccgccgccgccgccgccggcaaggggaaggaggtgctcagcggggtggtgttccagcccttcgaggagatcaagggggagctcgccctcgtgccccagtcccccgacaggtcgctcgcgcgccacaagttcgtcgacgactgcgaggcagccatcaacgagcagatcaatgtggagtacaacgcctcgtatgcgtaccactccctcttcgcctacttcgaccgcgacaacgtggccctcaaaggatttgccaagttcttcaaggaatccagcgacgaggagagggagcacgctgaaaagctcatggagtatcagaacaaacgcggaggcagggtgaggctccagtcgattgtggcgcctttgaccgagtttgaccaccccgagaaaggcgatgctctgtacggtaagttgcgttgccgccgcatctgacttccgggttaggaattaggataggacgtgtaatttattctgcatctgaacctagctttatcagctgcagctttcaagtatatgcatcgatggatgattagattcaaagactaacaaatttaggacgacggcttatacagaatagaatagaatagaaggctggctacgttaattggaagccaatgctctgttttctattttttttatttttgatgggtttcagctatggagctgactctggctctggaaaagctggttaatgagaagctgcacagcctgcatggtgtggcaacaaggtgcaatgatcctcagctgatagacttcatcgagagtgagttcctcgaggagcagttttgggttttcttttgaaaggtggaagccataaataaggtctccaagtatgtcgcgcagctgaggagagtgggcaacaaggggcacggggtgtggcactttgatcagatgctgcttcaggaaggggcctgaaggccaacaagggtggcgtggacggagctgagctctgggtggtgtattcttttctttttcttttctttccagttggttagtgttttagttgtagaacggtgttgcgttgcccacatgacatgatggatgttacgtggaggattgtctcttatatttgaacattatattgtcgttcgtttttggcatggctctgcaactgtcgtgagaagatctggactaagaatagatcctaacccaataagtagaaaaataacaagacgacgaggctgctaaagaatagattcgattaccaatggatgttgcataaattaacggagataggtgtgcttttcttgtgccggccggccacaactggcgtcctcgatccgccgagggtgggcattggaatatacgaggcacgtatcatatatcaagatttgaggaaggggacgatagatgatctttgcctcttcagtgtccgaggcattctatgaactgatgaacaatactatcggtcttcatcaagacacctgctcaatgcaagttgaacatctacttcctcgggctatcttctgcaaccttttctttatttcatcatctaaagtaatattctctgtccttttacagcacactttaaaagattttgtcatctatatcttttctatctccaatagagctctctaaattcgg

SEQ ID NO: 15469 - DNA, 942 bp, Zea Mays
ctccaaccttcccctacaagcttgcacatctccgcctcctcgctcctcttcccgctctccgaatccaccgctctccccactttccgcgaccccgacgatgagcccccccaaaagcgctgcgaggcccccggcatccctgacgagcccgaagaccggcgctaacaaacggcagcggaaggcggcgtcggcggtgccgctgggcgacatcaccaacctcctagtcctcgctgagtccccgaccccgagcaagcccaggaggacagcacgccgggccctccccgctacctctgacgtctccgcggtctcctccacctgctcctcctccgcctccgtcacgcccgcgcccaagccttcctccgccgctgtcttcgaggaggagcacagcgtggtcaaatcgccaaccatctccacagttcaccgcaggaccactggggctcaagagaggtgtaggaggaaccccgcctccgccaacaacaagggcaaggaaccggtcgctgccacggcgagctgccccccgcttgggaaatctgcaaggacccacagcaggaaaaaggatactcggcccatctccgcatcagttccctgtcatgaaggtagaaagaagcggcccattgcaagcacacccaacttactagaggaccttttggagaagcagagagcatactttgcagatatcgatgcctttgagctggtagaggaagaggtgtcggaatccgagctggagtaaaaaccaaagcagatatggcctttcttttttttttcttgtacagaagcaaattactggaaccaccggcgaggagagagggggtaggcaagtgtttgcaaactggttttgctactcgcagcagttgaaactgctgggtaagatgatgtctagtagaaacatgtgttgatgcaaatcagcttggaggatcttccatacgagttaaggaacggtttctt

SEQ ID NO: 15470 - DNA, 539 bp, Zea Mays
aagcttgcacatctccgcctcctcgctcctcttcccgctctccgaatccaccgctctccccactttccgcgaccccgacgatgagcccccccaaaagcgctgcgaggcccccggcatccctgacgagcccgaagaccggcgctaacaaacggcagcggaaggcggcgtcggcggtgccgctgggcgacatcaccaacctcctagtcctcgctgagtccccgaccccgagcaagcccaggaggacagcacgccgggccctccccgctacctctgacgtctccgcggtctcctccacctgctcctcctccgcctccgtcacgcccgcgcccaagccttcctccgccgctgtcttcgaggaggagcacagcgtggtcaaatcgccaaccatctccacagttcaccgcaggaccactggggctcaagagaggtgtaggaggaaccccgcctccgccaacaacaagggcaaggaaccggtcgctgccacggcgagctgccccccgcttgggaaatctgcaaggacccacagcagaagtttgcag

SEQ ID NO: 15471 - DNA, 4887 bp, Zea Mays
ctggcgtcgcgtcgcctgcttcctcgttcccgcatcgagacgccgcttcccgtcccttccccctcctctctctctcctcccggccaaccaaaccctaaccctaaacccctcccccaccaacctcggcccagtctccccacccccactgacccggctccccacctccgactcgccacgctggcccgattcgatcgatgtacgtgagcgagctcccgacctcatgatggttttggctgcggggtgaaaagaggcacagcaagcgtcgatggcattgggagatctcatggcgtccaggctcgtccactcctcgtcctccaggggactgtcgtcctcgccgacgccgccgttgcccaatcaacaccaccaccagaaccacaaccataccggggatggcctcctggctgccagcgggccggagcccaggaacgggctggaggccgacgaggtggataagtcggcgcccgtgccgtacctgccccagctggtcgtgctgtgcgagcagcgccacgagcctgaggggatcgatgaggctgcggccgcagccgcagggccctccaccagtggcctcgtctccaagtggcgccccaaggatcggatgaagacaggatgtgttgcacttgtattatgtttaaacataagtgtggatccacctgatgtaattaaaatttccccttgtgcaagaatggagtgctggatagatcctttttctatggcacctcctaaagcccttgagagtattggaaaaacgttgcattcacagtatgagcgctggcaacctaaggctcgatacaagcttcagctggacccaacagtggaggaagttaagaagctttgcaatacttgccgcaaatatgccagatcagagagagttcttttccattataatggccatggcgtaccaaagcctacatctaatggtgagatttgggtgtttaacaagagttacacacagtatattccacttccaattactgatcttgattcatggctgaagacaccttcaatttacgtttttgattgctcagcgtctggaattattgtgaaagcttttctagagcgcctagattggagttctagctcctctgcatcttcacggaaggactgcattcttcttgctgcctgtgaggcacatcaaactcttcctcagagtgcagaatttcctgccgatgtgtttacagcttgcctcacaacacccatcaaaatggctttgcactggttttgtaagcgatcattactccgtggttctctggatctttctcttattgaccaaattcctggaaggcaaaatgaccgtaaaactcttcttggggagctcaattggatttttactgctataacagatacaattgcatggaatgttcttcctcatgatctgttccaaaggcttttcaggcaagatcttcttgttgctagcctctttcgtaacttcttgcttgctgagagaatcatgcgatcagcaaattgttctccagtttcttatccgttgttacctccaacacatcaacaccatatgtgggatgcatgggacatggctgctgagatttgcctttccaagcttcctcagttaattgctgatccaaatgcagagtttcagccaagtccgttttttacggaacaactgacggctttcgaagtgtggcttgatcatggctccgaggacaagaaacctcctgaacagttacccatagttcttcaggtcctgcttagtcaatcacacagatttagagcacttgttctgctcggaagatttcttgacatggggccgtgggcagttgatttggccctgtctgtcggaatatttccttatgtactcaaactgcttcaaacaagtgcaatggagttgcgtcaaattcttgtgtttatatggacaaaaattctctctcttgataagtcgtgccaggttgatttggttaaagatggaggacacacatattttgttaggtttcttgacagtttggatgcttacccagaacagcgtgcaatggctgcttttgttttagcagtcattgtggatgggcataggacaggccaagaggcttgtatgaatgcagggcttatagatgtttgcttgagacacctgcaacctgagaatcctcatgattcacagacagaacctttacttctacagtggctttgtttatgccttgggaaactctgggaagatttccctgatgttcagctgcttactttacaaacaaatacgccagaaattgtactatgcttattgtcggagcctcaacctgaggtgaaagctgaaataaatgtagttcgaagccttctgcagatatcttcagatgccagtccccttgttcgatctgaggttgctatagcgcttactcgctttgcattgggtcataacaaacatctcaaatctgttgcggctgagtattggaaacctcaatccaattcattgctgaagtcactgccatcattggcaaatataaataacccaaacaatgtttacagtcccaacaatattctacaaggcagcattggtcctgtgctgagggttggcagtgatagcagtgctgctggtcgtgatggaagaatgtctacaagtagcccaattgcaacaagtagcatcatgcatggctctccccagtcagacgattcttcccaactctctgattctggcttattactgagagagaatgctagtaatggtggtcccggctacactaggtccaggcctgttgataatgtcatttattctcaatttatatcaactatgtgttcttttgctaaagatccttacccaagaattgcaactattggtcggagagcactgtcccttataggtgttgaacaagtagtcatgaaaaatactagatttaatagtggaggtgcacatcggggagagacatctgcttcaaactttggaatggcacgctcttcatcctggcttgatatgaattctggaaacaacttgataaaatttaggacccctcctgttagccctcctcagcatgattttcttccaggattacgccgagtgtgttctatggagtttggacaacatcctataagttcacctgatggcttagctgttccccttttaagctccgctgcagctaccagtaatgctgaactaagtatactccctcaatcaacaatttataactggagttgtggtcacttctctaggcctcttttaattggctctgatgataacgaagaggcaaatgctagaagggaagagagagaacgacttgcactagattatatcgctaagtgccagcgctcctcttgcaagatgacaaaccaaattgctagttgggatacgaggtttgagttgggaacaaaaacagctttattgttgccattttctccgatcgttgttgcagctgatgaaaatgagcaaataagagtgtggaactacgacgatgcgctgccagtgaactcttatcaaaaccataatttgtcagacagagggctatccaaacttttgctgattaatgagcttgatgagagcttgcttttagctgcctcaagtgatggaaatgtacgtgtatggaaaaattttactcaaaagggaggacaaaaacttgtaacggctttctcatccgttcagggacatcgaactgctggtcgcagtattgtgattgactggcagcagcaatctggttatctttatgcatctggtgacatgtcttccatcttgctatgggatcttgacaaggaacaacaactcagcactattcagtcatctggtgatagtgccatttcttcactgtctgcatctcaggtctgctctggacattttgctgctggttttgctgctggttctgtcaggatatatgacatacgctctcctgatagggttgtctatacggccaggccacacgcaccaagaacagaaaaggttgtaggcatagggtttcaacctgggtttgatccttacaagattgtaagcgcatctcaagctggagacattcagtttcttgatgttagaaggtcagcagaaccctacctgactattgaggcacacaggggttcacttacagcattggcggttcaccggcatgccccagttgttgctagtggctcagccaagcagatgattaaagtgtttagtcttgaaggagagcagttgacaataattcgctaccagccatcttttatgggccaaagaataggcactgtgaactgcctttcttttcacccatacaaatcactcctatctgctggtgctggtgataatgctcttgtctctatctacgccgaggaaaattacaagtaaggtgaggcctacatctcatgacaatgcagccacaaggcaaccggcaggcctggtgttttttggccaagtgatgctcccccgcagcatggtccagctacaagatccaagatggtgtgaagaggctcccggtgcgtattgcctgttgttggacgacgtgtgcaatttgtaagatagagccaagattcgttagccgcctccttgcagaaggtttgtggaacccctaccctgatcatgtcattgaacttggaggctccccccaaataattaatcatacctaggttaaccaaaatgtaaatagacaccgcgtttcgggttgtcggtggtcagcattcctccttttgaagatgcttgtgatgatatgagaaatcaggtttggtaggggctgctgcctgggcaagtggggtttgtgcatatgggcccaggtagtatggttgcacatgtctgctcacagatgctgttgaatggaaggaatgttgtctagtcgcttgcattgtaaccattggagattgtccatttgtatgtatggatcttgtctgtacatctgtaatccgtgcgatgatgtgttttatggaacagtccaaggcttcaggtcttgtggatgcctgctgtgcaattgtttcgggaaagcagcagcgtcactgtcaaag

SEQ ID NO: 15472 - DNA, 5231 bp, Zea Mays
ctataacaatataacacacatatgtacataagttatcgtatcattatatggttccgttgcaacgtacgggcactcacctagtatacatatatatttatagtgcattcaaccattacgagaagagaacgagctgtgtccattgtctccaaaagtagtaaaataatggaggaaagagggcaggcaatttccatttccaacctttatactataaattttattttgttttccctcaatctctctcctcggctgctcgcctggcgtcgcgtcgcctgcttcctcgttcccgcatcgagacgccgcttcccgtcccttccccctcctctctctctcctcccggccaaccaaaccctaaccctaaacccctcccccaccaacctcggcccagtctccccacccccactgacccggctccccacctccgactcgccacgctggcccgattcgatcgatgtacgtgagcgagctcccgacctcatgatggttttggctgcggggtgaaaagaggcacagcaagcgtcgatggcattgggagatctcatggcgtccaggctcgtccactcctcgtcctccaggggactgtcgtcctcgccgacgccgccgttgcccaatcaacaccaccaccagaaccacaaccataccggggatggcctcctggctgccagcgggccggagcccaggaacgggctggaggccgacgaggtggataagtcggcgcccgtgccgtacctgccccagctggtcgtgctgtgcgagcagcgccacgagcctgaggggatcgatgaggctgcggccgcagccgcagggccctccaccagtggcctcgtctccaagtggcgccccaaggatcggatgaagacaggatgtgttgcacttgtattatgtttaaacataagtgtggatccacctgatgtaattaaaatttccccttgtgcaagaatggagtgctggatagatcctttttctatggcacctcctaaagcccttgagagtattggaaaaacgttgcattcacagtatgagcgctggcaacctaaggctcgatacaagcttcagctggacccaacagtggaggaagttaagaagctttgcaatacttgccgcaaatatgccagatcagagagagttcttttccattataatggccatggcgtaccaaagcctacatctaatggtgagatttgggtgtttaacaagagttacacacagtatattccacttccaattactgatcttgattcatggctgaagacaccttcaatttacgtttttgattgctcagcgtctggaattattgtgaaagcttttctagagcgcctagattggagttctagctcctctgcatcttcacggaaggactgcattcttcttgctgcctgtgaggcacatcaaactcttcctcagagtgcagaatttcctgccgatgtgtttacagcttgcctcacaacacccatcaaaatggctttgcactggttttgtaagcgatcattactccgtggttctctggatctttctcttattgaccaaattcctggaaggcaaaatgaccgtaaaactcttcttggggagctcaattggatttttactgctataacagatacaattgcatggaatgttcttcctcatgatctgttccaaaggcttttcaggcaagatcttcttgttgctagcctctttcgtaacttcttgcttgctgagagaatcatgcgatcagcaaattgttctccagtttcttatccgttgttacctccaacacatcaacaccatatgtgggatgcatgggacatggctgctgagatttgcctttccaagcttcctcagttaattgctgatccaaatgcagagtttcagccaagtccgttttttacggaacaactgacggctttcgaagtgtggcttgatcatggctccgaggacaagaaacctcctgaacagttacccatagttcttcaggtcctgcttagtcaatcacacagatttagagcacttgttctgctcggaagatttcttgacatggggccgtgggcagttgatttggccctgtctgtcggaatatttccttatgtactcaaactgcttcaaacaagtgcaatggagttgcgtcaaattcttgtgtttatatggacaaaaattctctctcttgataagtcgtgccaggttgatttggttaaagatggaggacacacatattttgttaggtttcttgacagtttggatgcttacccagaacagcgtgcaatggctgcttttgttttagcagtcattgtggatgggcataggacaggccaagaggcttgtatgaatgcagggcttatagatgtttgcttgagacacctgcaacctgagaatcctcatgattcacagacagaacctttacttctacagtggctttgtttatgccttgggaaactctgggaagatttccctgatgttcagctgcttactttacaaacaaatacgccagaaattgtactatgcttattgtcggagcctcaacctgaggtcagagctgctgctgtttttgcacttgggactctcctggatactacatcatcaaatggcgctgatgatgattctgactatgatgaaaaggtgaaagctgaaataaatgtagttcgaagccttctgcagatatcttcagatgccagtccccttgttcgatctgaggttgctatagcgcttactcgctttgcattgggtcataacaaacatctcaaatctgttgcggctgagtattggaaacctcaatccaattcattgctgaagtcactgccatcattggcaaatataaataacccaaacaatgtttacagtcccaacaatattctacaaggcagcattggtcctgtgctgagggttggcagtgatagcagtgctgctggtcgtgatggaagaatgtctacaagtagcccaattgcaacaagtagcatcatgcatggctctccccagtcagacgattcttcccaactctctgattctggcttattactgagagagaatgctagtaatggtggtcccggctacactaggtccaggcctgttgataatgtcatttattctcaatttatatcaactatgtgttcttttgctaaagatccttacccaagaattgcaactattggtcggagagcactgtcccttataggtgttgaacaagtagtcatgaaaaatactagatttaatagtggaggtgcacatcggggagagacatctgcttcaaactttggaatggcacgctcttcatcctggcttgatatgaattctggaaacaacttgataaaatttaggacccctcctgttagccctcctcagcatgattttcttccaggattacgccgagtgtgttctatggagtttggacaacatcctataagttcacctgatggcttagctgttccccttttaagctccgctgcagctaccagtaatgctgaactaagtatactccctcaatcaacaatttataactggagttgtggtcacttctctaggcctcttttaattggctctgatgataacgaagaggcaaatgctagaagggaagagagagaacgacttgcactagattatatcgctaagtgccagcgctcctcttgcaagatgacaaaccaaattgctagttgggatacgaggtttgagttgggaacaaaaacagctttattgttgccattttctccgatcgttgttgcagctgatgaaaatgagcaaataagagtgtggaactacgacgatgcgctgccagtgaactcttatcaaaaccataatttgtcagacagagggctatccaaacttttgctgattaatgagcttgatgagagcttgcttttagctgcctcaagtgatggaaatgtacgtgtatggaaaaattttactcaaaagggaggacaaaaacttgtaacggctttctcatccgttcagggacatcgaactgctggtcgcagtattgtgattgactggcagcagcaatctggttatctttatgcatctggtgacatgtcttccatcttgctatgggatcttgacaaggaacaacaactcagcactattcagtcatctggtgatagtgccatttcttcactgtctgcatctcaggtctgctctggacattttgctgctggttttgctgctggttctgtcaggatatatgacatacgctctcctgatagggttgtctatacggccaggccacacgcaccaagaacagaaaaggttgtaggcatagggtttcaacctgggtttgatccttacaagattgtaagcgcatctcaagctggagacattcagtttcttgatgttagaaggtcagcagaaccctacctgactattgaggcacacaggggttcacttacagcattggcggttcaccggcatgccccagttgttgctagtggctcagccaagcagatgattaaagtgtttagtcttgaaggagagcagttgacaataattcgctaccagccatcttttatgggccaaagaataggcactgtgaactgcctttcttttcacccatacaaatcactcctatctgctggtgctggtgataatgctcttgtctctatctacgccgaggaaaattacaagtaaggtgaggcctacatctcatgacaatgcagccacaaggcaaccggcaggcctggtgttttttggccaagtgatgctcccccgcagcatggtccagctacaagatccaagatggtgtgaagaggctcccggtgcgtattgcctgttgttggacgacgtgtgcaatttgtaagatagagccaagattcgttagccgcctccttgcagaaggtttgtggaacccctaccctgatcatgtcattgaacttggaggctccccccaaataattaatcatacctaggttaaccaaaatgtaaatagacaccgcgtttcgggttgtcggtggtcagcattcctccttttgaagatgcttgtgatgatatgagaaatcaggtttggtaggggctgctgcctgggcaagtggggtttgtgcatatgggcccaggtagtatggttgcacatgtctgctcacagatgctgttgaatggaaggaatgttgtctagtcgcttgcattgtaaccattggagattgtccatttgtatgtatggatcttgtctgtacatctgtaatccgtgcgatgatgtgttttatggaacagtccaaggcttcaggtcttgtggatgcctgctgtgcaattgtttcgggaaagcagcagcgtcactgtcaaag

SEQ ID NO: 15473 - DNA, 1012 bp, Zea Mays
tgtggatttccgaagtataagtcgttgcaacaggcgtaactgaattggtaaattgcatataagtcgttgcaataggcataactgaattagtaaattgcgtaattgaattgatatcagctacaatttatttttggccactacaaattgaaactaagtgcttgataaatatgtgaggacctaagagcctgtttgttcaaactaacttattttaaactaaatggaataagttagattatataatctcaaacaaacaacacctaagttggatgtgtagtttgaaatcacttcagtactgtaatcactgtttctgtgctgtggtgagactaaaaaggtatctgtcattagtagctttctgtgtagaaagtattatgtgtatacttgcattactgccagtatgatgctgatttatcatttagttgactttggtgactacatttgttatctgttctgccagtgatgtctcgcttcggaataaagccgactgtttggactgctgcagctgtaatccatagagacaaaaacattgtagaagcagtagaaatcggtacggattaaaggcgaacagtgctgggtacgaaaatagtggtatagaatcagatattcgaacgactcctgattgttgtaaatagatctttccaagatgttgtgagaacagtttgttgttagtttaggccaagtcatgtctgcagtatgccagtatccctaatatgtatttccagcttcctatctggaatgtgggctgagcagtctcattgtcatggtccttatggaaatctctttggagtggcgaagtagattaccgaattttccacatggtttattatgttctgaagctgccctacaactaaaacaacctgcttttacttagcagacgtgtgatcttcttaaatctaaggttggattgctcgagttccttcaaaagctcaatggtattcagaagtcagtaggtcagaatggtgcagttgaacctgacacatcatgggatataataacgtcagtggatttgtgggaa

SEQ ID NO: 15474 - DNA, 1270 bp, Zea Mays
aaaaaaacagaagtactaacgccccgcccctgcctggggttttaaccctacccaaccgccgcccatggcgtccatctcggagcccgctgctagggagaagcccatcgtcgtccgggtcaagcgcaaaccttcgcaaaaccgcccggacgctttctggctagagattaatgagaggccggcaaagaaggcggcgattgatttctcccgcctttccatctccgaaccctcctcgtcctctgccagtgtcaaagcttgttgactcaaattccaaggagacaaagagcaagacaaaggagtggaatgacagaatcaagcaagacaaaaaaccagagcaactacgatcagctgccagacagaggcatgaggatatgggaagaaatgctcggtttgcacaaatatggaagagtcgaaaaggagaaaaggctgatgctggtgactcattgagagaaatatgccatctttatgatgctgtccaagtagatcccgatgatgagaagcatccagcagaaccacggattacatcttttgaagagggtgctgttctatgcaactttcttccacttatacgggaatacttgccatcaactgccgaggaaattgaggcggatataatttcattggcgcaatcagaagattctgaagtttatgatatctatactgtcaaggaggtggatgacacaatggaggccacgtcagcagcttcatatccaaggttacaagtggatgatggagaagatgaatgctacgaagattgtccatatgacacagatgattccaatgccgaagacaatcctctttttgattatcctgatgaatcttccgaggacgaggatgatggtaggaacgacgaggatccttttggagacaaagaaggttctgactcagattacgagaaggaagaagtagaggtggaagaggatgagtaacggtgaagggaagttgtgatgaaacgtgcggttgtagaatgtagatgcagggcagcaggggagctgactgatgaatgtttgtgttgctttatgctgtctaagaaacgggacttgtctcgacgctttgtgccagttagcatagcacatcgtgtgcagtatccggaggaagaattgggaaaaaacaatatttggaagcgtcagctagacacaggcgaatcgtaataattggtattttgccacttgaaaagttgcatccttctgtaattaccgtttgtgtagccttgtgtgttcttgctctcgtattatataggagtaatacatgtggaaataaactattttcgtat

SEQ ID NO: 15475 - DNA, 600 bp, Zea Mays
ggatgctcaagctcaagttgatttggcgatccgttgcgttgcgttacaagtggatgatggagaagatgaatgctacgaagattgtccatatgacacagatgattccaatgccgaagacaatcctctttttgattatcctgatgaatcttccgaggacgaggatgatggtaggaacgacgaggatccttttggagacaaagaaggttctgactcagattacgagaaggaagaagtagaggtggaagaggatgagtaacggtgaagggaagttgtgatgaaacgtgcggttgtagaatgtagatgcagggcagcaggggagctgactgatgaatgtttgtgttgctttatgctgtctaagaaacgggacttgtctcgacgctttgtgccagttagcatagcacatcgtgtgcagtatccggaggaagaattgggaaaaaacaatatttggaagcgtcagctagacacaggcgaatcgtaataattggtattttgccacttgaaaagttgcatccttctgtaattaccgtttgtgtagccttgtgtgttcttgctctcgtattatataggagtaatacatgtggaaataaactattttcgtat

SEQ ID NO: 15476 - DNA, 891 bp, Zea Mays
cgaagcccgccgttcgggatacctctgctccaaataactccccacccagcggtgcctccgtgccgtctcccaccgctgctcgggcttcccgccgcacagcccggcttgcctccgccactccgtttcccgccgcaccgccatccgaatccgccgcagcctgctccctgctatcaagccacgttgcctcgctcatcttccgccgccgcagagaggagaaaaaagaagagccagagacacccaggtaccgcgatcgtgctaaggagcggcgtgaagatcaaaacccagattatgaacctacagaacttggttcgtttcatgcagtggcacctcctgggaatgatttgaggctggcagatgctcacaagatctcaattgagaaaagcaaatatctcggaggtgatttggagcatacacatctggtcaagggcttggactatgctctacttcataaagtacggagtgaaattgaaaagaaacctgaggcagaggatgggaaggatacaaagtcaagggcagcaaaagaagatcaggcagtctccttccgcaccgcaactgcaaagtctgtgtaccaatggatcataaagcctcaaagcataattaaagagaatgaattgtttcttcctggccggatgtcatttatttacaacatggggcatcatagcctcataattgctaaatacagtactttctctgtcttcatgttctattaggggaaaccatgaatcacaaaccagaaatcatatcctttccatagattttctcagaataacccatgaagttgccagtattgtcgaattcttttcttttgtattccaaaaacttggccggggagggaaaggccgccctctcagtattatattaagaagagacctaaacatggtcccgaccgag

SEQ ID NO: 15477 - DNA, 617 bp, Zea Mays
cgaagcccgccgttcgggatacctctgctccaaataactccccacccagcggtgcctccgtgccgtctcccaccgctgctcgggcttcccgccgcacagcccggcttgcctccgccactccgtttcccgccgcaccgccatccgaatccgccgcagcctgctccctgctatcaagccacgttgcctcgctcatcttccgccgccgcagggatacagaggagagagagagagagggagagaaaagatgtcatcgaagaagaactactataaggagaagttgatgcggcggaaagaggagaaaaaagaagagccagagacacccaggtaccgcgatcgtgctaaggagcggcgtgaagatcaaaacccagattatgaacctacagaacttggttcgtttcatgcagtggcacctcctgggaatgatttgaggctggcagatgctcacaagatctcaattgagaaaagcaaatatctcggaggtgatttggagcatacacatctggtcaagggcttggactatgctctacttcataaagtacggagtgaaattgaaaagaaacctgaggcagaggatgggaaggatacaaagtcaagtactacataactttgccagcatt

SEQ ID NO: 15478 - DNA, 2300 bp, Zea Mays
catatctcctcgaatcgtttcatgtgcttactgcttatatatatatatgtgtgtgtgtctgtcgactcaagcacacacacacacatcctccaccaccattcatcagaaagcgaagcaccagcctctgatgccaagccaaagcacacacacctcctccagcctttcttcctctacaaccccaattcttccctgcagctctgctgctgccttgtttcgatcggtcatggcggcggtggccacagagactccgttccatgtcctggcggtggacgacagcctcccggacaggaagctcatcgagaggctcctcaagacctcttccttccaagtgaccactgtcgactccgggagcaaggcgctgcagttcctgggcctccatgaccaggacagcacggttcctcctgtccacacgcaccagctggatgtggctgccaatcaggatgtggctgtgaacctgatcatcacagactactgcatgcctggcatgacaggatatgacctgctcaagaagatcaaggagtcgtcgtctctcagagatatcccggtggtgatcatgtcctctgagaacattccttcaaggatcaataggtgagcagtcagctagcactctactatttgtcttgtggatctaaacaacagtttttaagggaaacaaatcttaagttaaaaattggggaaaaattacactagtgaggtgaggacttgagtagagttcaggcaagaaaacaactttatcatttataaggatttttttagcagccggcctgttcttgctcagaaaatcacatcatgttcacaaaaccattagacagccactataaagttccttttttctctctctcttccatgcatgcggacataaataaatgaataagttttgtaccaaaagattggatatggaaatctctccgaatccttaatgatctgctgtcacatgtgttgtataatagtagatgacagcaacccttgtattatatctcggcctggtcggtgtaaaataaatcaaaaacaaataaaagaagatatgaaatgatacgcagttcgatcttgcggatcttttcatatcgccgtacgtatccatggaacaggtctgttgatgcagacaggtcactagcaccactgacaaattgttgcgttgcgcgatacaccagtggcagggcgctaaagtcaaagaaagaatcaaacgatattattgctgttctttcgaacaaaaaaaaaagaaggaatcataagatatgacatatccaaaaataaaaatatataaaaaaacacaagttgcaagacttgtcttttaacagcatatatatgatgctctatatatgatcaacgggagagagagaaaactaacaatcctggttttgaaattctgaaccaggtgcctggaggaaggagctgacgagttcttcctaaaacctgtgcggctatcagacatgaacaagctcaagccccacatactgaaaagcagatgcaaccaggaacagcaccagcaaagtgacagtcacagtggcgaacgcaggaaccccacaatcagcagcagcgatagcataaacaaccgcaagagaaagggtgcaggcaccgaagaaatcttgccccagctggcaaacagatcaaggcacagttaactgagaactgactagtacagctaaaaccttttctttttcactttactttggcttactgatttgtaacgtagatgttagccctggatttgcaaaacggaacggaatctgtaaactgatactgcttgagtcgaatcgatcgaagtgattctgcaccagatctccctatttcatttatcagaatcgaaagccagctgacagagtcacagtaacagcccgttggacatagcagcaggtgccgaagccaagaacatctgaaactgaccgtcggataacctacgatgggagtagccttttactgcttctaagctttagcctggatacaagttgtcactacagtagtcagtagggcagtaacttggtgcatctccaagagttttcaaaacacactgtcaatctagaaatttttggtgatgtagcttctcccacaagtggcctcttgcaaattcttcagtgatgtggtttctaccacttgtgctcttggattctcagttccttgactctacagtatttttgtctctacgtgctacttaatggtgttccaggtagttggattaactactgcaagggccttccgcaggataaccccctttctccctacatattcatcatcgtcttcggccccgttttaccctctagatcatataatccagcttaaataaattaaaagacaaacaaaca

SEQ ID NO: 15479 - DNA, 1595 bp, Zea Mays
ggcccctgctctagaatactagcgcaactgatatggggtcaattcgtggcaagatttggagcaaatctgctccaggatcttgctttccatgcgctgggactttcttttagtcaccgcacctttttccccttcgctttgctttccacgattccacacatcatatctcctcgaatcgtttcatgtgcttactgcttatatatatatatgtgtgtgtgtctgtcgactcaagcacacacacacacatcctccaccaccattcatcagaaagcgaagcaccagcctctgatgccaagccaaagcacacacacctcctccagcctttcttcctctacaaccccaattcttccctgcagctctgctgctgccttgtttcgatcggtcatggcggcggtggccacagagactccgttccatgtcctggcggtggacgacagcctcccggacaggaagctcatcgagaggctcctcaagacctcttccttccaagtgaccactgtcgactccgggagcaaggcgctgcagttcctgggcctccatgaccaggacagcacggttcctcctgtccacacgcaccagctggatgtggctgccaatcaggatgtggctgtgaacctgatcatcacagactactgcatgcctggcatgacaggatatgacctgctcaagaagatcaaggagtcgtcgtctctcagagatatcccggtggtgatcatgtcctctgagaacattccttcaaggatcaataggtgcctggaggaaggagctgacgagttcttcctaaaacctgtgcggctatcagacatgaacaagctcaagccccacatactgaaaagcagatgcaaccaggaacagcaccagcaaagtgacagtcacagtggcgaacgcaggaaccccacaatcagcagcagcgatagcataaacaaccgcaagagaaagggtgcaggcaccgaagaaatcttgccccagctggcaaacagatcaaggcacaatgttagccctggatttgcaaaacggaacggaatctgtaaactgatactgcttgagtcgaatcgatcgaagtgattctgcaccagatctccctatttcatttatcagaatcgaaagccagctgacagagtcacagtaacagcccgttggacatagcagcaggtgccgaagccaagaacatctgaaactgaccgtcggataacctacgatgggagtagccttttactgcttctaagctttagcctggatacaagttgtcactacagtagtcagtagggcagtaacttggtgcatctccaagagttttcaaaacacactgtcaatctagaaatttttggtgatgtagcttctcccacaagtggcctcttgcaaattcttcagtgatgtggtttctaccacttgtgctcttggattctcagttccttgactctacagtatttttgtctctacgtgctacttaatggtgttccaggtagttggattaactactgcaagggccttccgcaggataaccccctttctccctacatattcatcatcgtcttcggccccgttttaccctctagatcatataatccagcttaaataaattaaaagacaaacaaaca

SEQ ID NO: 15480 - DNA, 810 bp, Zea Mays
tctaaagcaagacttagaagcgttattgtcagatgagatattccagcctaaggttatttggtcccttgctgatgtacaggcaacatgtggtacacttgctttatctacggcaacagtgaaattggtagcaccagatggagaggagaaaatagcatgttcagtcggaacaggtccagtcgatgcagcttacaaggctgttgacaaaataatccagattccaacggttctccgagaatacagtatgacatcagtcacagaaggcattgacgcaatcgcgacaactcgggttgttgtcactggagatgtgagcaacaacgccaaacatgccctgactggccagtccttcaaccgctccttcagcgggagcggggcatccatggacattgtggtgtccagtgtcagagcttacctgagcgccctgaacaagatctgcagtttcgctggcgccgtgaaagccagcagcgatgtagctgagaccgcaagcgtcccgagcacagaatgagcttccgtttagttcacagtgacatgttcaaaatttctggaaggatcttccattgagcttaggacaggcaggaagtcttggggcctatgtagtgtacaatttatgtgtgtcatatcccgtgctcgttgccagtttgtattgtaccatatataaaccatagaatatgttgccatttagaagtctggccaaggtcagctgtaatgattcacatgcttatagcctggaaacattagacattgaaaacccgagcggtgaataaaggatgcccaaggtagaaactgtgatgaatcatccatatcagtgttgtg

SEQ ID NO: 15481 - DNA, 2523 bp, Zea Mays
gttggcgcacgggcacgccgccggtgcacgctcgccgcctgctctcttgtctgctctgctcagctcaggcgacacggcgcgctccgtgccgcccacgaaacctcatcggcgtcatcctcatcaatccctgcctctgccgtccgagataaccatgctccacggtctctgactcacccctgcatcttgccgtgtagccttcttgtacagcttggactggactagactggaggtggagtggagcttttccttctccaaaatccaaatcaccacatccccccattaatttaaggggtttttatgtccaccgccgccgccagcgccaactaaacccgcgacgacggtcgaccatggcgtcctcgctgctctcctcccccgctaaacccaccatcaccaccaccaccaaaacgaccccggccccaagacccgcccgctccgcccatgtccatgtcctctccgccgcccgctgcctccgcctccgcctccgcgcgtcgtcgcagcatcctccgcctccgcccaccccgcggtcgcggcggccggattacgtcccgaaccgcatcgacgaccccaactacgtgcgcatcttcgacaccacgctgcgcgacggggagcagtcgccgggcgccaccatgacgagcgcccagaagctcgtcgtcgcgcgccagctggcccgcctcggcgtcgacatcatcgaggccgggttcccggcctcctcccccgacgacctcgacgccgtgcgctccatcgccatcgaggtcggcaacccggcgccaggacccgccggggaggaggacgccgtccacgtgccggtcatctgcggcctctcgcggtgcaaccggaaggacatcgacgccgcgtgggaggccgtgcgccacgcgcgccgcccccggatccacaccttcatcgccaccagcgacattcacatgcagcataagctcaggaagacgcccgaccaggtggtcgccattgccagggagatggtggcctacgcccgcagcctcggatgcactgacgtcgagttcagccccgaggacgccggcaggtcaaatagagagttcttgtatcatattctaggggaagtcataaaagctggagctacgactctcaatatcccggacactgtcggatacaatcttccttatgaatttggaaagttgattgctgatataaaggcaaacactcctggaattgaaaaggctatcatttccactcattgtcagaatgaccttggtcttgcgactgccaacacactagcggagcacggcagttagaggttactattaatggtattggtgaaagggctggaaatgcttctttggaggaggttgtcatggcaattaaatgccgcagagaactgttagatggtctctatactggaatcgattcccgacatatcactttgacgagcaaaatggtgcaagagcatagtggacttcacgtgcagccacataaagctattgttggtgccaatgcgttcgctcatgaaagtggaattcatcaggatgggatgcttaaatataaaggaacatacgaaattatatcgcctgatgatattggtctaacacgtgcaaatgaatttggtattgttcttgggaaactcagcggaaggcatgctgtgagatctaagctagtagagcttggatatgaaatcggtgacaaggaatttgaggacttctttaaacgctacaaagaggttgcagagaagaaaaagcgcgtaactgatgaagacttagaagcgttattgtcagatgagatattccagcctaaggttatttggtcccttgctgatgtacaggcaacatgtggtacacttgctttatctacggcaacagtgaaattggtagcaccagatggagaggagaaaatagcatgttcagtcggaacaggtccagtcgatgcagcttacaaggctgttgacaaaataatccagattccaacggttctccgagaatacagtatgacatcagtcacagaaggcattgacgcaatcgcgacaactcgggttgttgtcactggagatgtgagcaacaacgccaaacatgccctgactggccagtccttcaaccgctccttcagcgggagcggggcatccatggacattgtggtgtccagtgtcagagcttacctgagcgccctgaacaagatctgcagtttcgctggcgccgtgaaagccagcagcgatgtagctgagaccgcaagcgtcccgagcacagaatgagcttccgtttagttcacagtgacatgttcaaaatttctggaaggatcttccattgagcttaggacaggcaggaagtcttggggcctatgtagtgtacaatttatgtgtgtcatatcccgtgctcgttgccagtttgtattgtaccatatataaaccatagaatatgttgccatttagaagtctggccaaggtcagctgtaatgattcacatgcttatagcctggaaacattagacattgaaaacccgagcggtgaataaaggatgcccaaggtagaaactgtgatgaatcatccatatcagtgttgtg

SEQ ID NO: 15482 - DNA, 2388 bp, Zea Mays
gcacacatcaagggaactgtagacaaggactgtagcgtggcgctggcgctggccgctggcgatggcgacgccggccccacccacgaactgtgtgaaccaggcgtcgtcgtcgtgcaggacagaaagccacgcacagcgagcgagcgatctctccctcctccatccatcgctccgatctctttctcacacaaccacagtggagttaccacggcaccaccggcggcccgtagaggtagctagcctttgccctccttttccatcgtcttcatcccctccctctccctctctcccttttcctccctccaacagctgctttgcttgctttccggcccctagctccaaaacccgccttcttatctccgtcctctggccgtccgtccggccggccgggccgcccgctagctccaaaaaggcatgcaggagccaggtctttagtctttactacctctctggcatcgcatcgcatcgcatcgacggggcgacgacgtacggcacggcacatgagatcatgagctcggaggactcgctcaagtccctctcgctggactacctcaacctgctcatcaacgggcaggccttcagcgacgtggcgttcagcgtggagggccgcctggtgcacgcgcaccgctgcgtgctcgcggcgcgcagcctcttcttccgcaagctcttctgcggcctcgaccccaaccacccgccgccgccgcccggcgcccgcgcggccgcggccgcggcgccggagctcgtcatccccgtcagctccatccgctacgaggtgctcgtccttgtgctccagttcctctacagcgggcaggcctccgtggccgcgcccaagagcgggcccctccccgggtgcggcgcccgcgggtgctggcacacccgatgcggcgccgccgtcgacctcgccctcgacacccttgccgccgcccgctccttcggcgtcgagcagctcgcgctcctggtccagctggagagcatggtgaaggaggcgtcggtggacgacgtgatgaaggtgctgatggcgtcgcgcaagttcgagatgcaggagctgtgggccacctgctcccacctggtggcgcgctcgggcctctccgccgacctgctcgccaagcacctccccatcgacgtggtggccaagatcgaggagatccgcgccaagtcccccgtccccgccggcgcgccgcgctcgccgttcctcacccaccactacctccccatcaacgcggcgtcgtcggccgccgaccgcgaccacaagatccggcgcatgcggcgcgcgctcgacgccgccgacatcgagctcgtcaagctcatggtcatgggcgaggggctggacctcgacgacgcgctcgccgtgcactacgctgtccagcactgcggccgcgacgtcgtcaaggcgctgctggagctcggcgccgccgacgtcaactcccgcgccggccccacggggaagaccgcgctgcacctggccgccgagatggtctcccccgatatggtgtccgtgctgcttgaccaccacgccgaccccagcgccaggacgctcgacggcgtcaccccgctcgacgtgctccgaggcctcacatcagagttcctgttcaagggcgccgtgccggggctcacgcacatcgagcccaacaagctcaggctctgccttgagctcgtgcagtccgcggtgatggtgaccacgcgcgacgtcgacgccgccggcgacgacgccgggggaagcgacggcggcggcggcggcaacttccccaggagcgacgccgacgacagcttggtgagcctgacgatgaactccacgctcatgtaccagggccaggagatggcggctgccgcggtggccgccggtgaggcgaggaaagggaacggcggcggcggcggcggcggccgagggagcccgtccaacttgtacttccccaatggcggcttcccataagtattatattgtgcccttcccttctataatccatcgtcaagatgatctttcttcttcttcttctgttggattggatctttgtgagaccatggtgtagctagctactagtactatttattttgagtaggagacatgcatgcgcgagagcaagaatttcatggtatttgatgtggattgttcgatcgacgactgtgggagacaaagcaactgttgctttgttcaaatgcttcactgtgatgaatctttgtaatggggcttcaacaatagtagtccaacattaccaatttagagctagcttgcatgaacaaggtttttttttagctgctgctgtttttacatgtctttatgcaatgcagctttttggtactgtagtagcctttggacgcatggcaggaaagcatggtgcgagcgagagccattcaatcgacacggcaatgaatccaagtgtgggcttaata

SEQ ID NO: 15483 - DNA, 1807 bp, Zea Mays
gccgacaatatccacatcacgcttcgcgattgccttctccatctttgctccctggggcgggtcggggcccacccgcccgcctcggctgctcagctctgctctgctctgctcctcgcctcccttcccttcccttcgcctcccccagccagccaggaatcgccaccggcggaagccaagcatcgtcccagcaccggatcgattccgcccgcccgcccgcccgtccatggatccggcggccgagccggcggcgtggccgccgtggacgtcgctcctgctgcgggcgctgagccggcggcggacctgggtggcgctcttcctcgccgtctacgccgggctgctctcgtcctcctggtccctgctcgcctccgtccgcgcctggtactactccgcctcctcggcgtccgcggcgcccgcctggcccgccgcgctctacgcgtccgtcatgtacggcgccgtgttcggcctgctctccatggccgccgcgctcgccgtcgccgcgcccgccatgctcgtcacctggaccaccgtcctcgtgctgctcgccttcgcgggccgcccgcgcaggtcgctcgtcgccgagggccgccgcgccaccagggacatcgcgggcctcgcgctccgcgtactcctgcgcgagggcaacgccgtcgccgcgctctgcgccgccgcaagctttgccgcgctcctcctcggccaccgcgatcaccagtagtagctctaagtctgttgccgtcctcttcttctcgcgctagatctgctacaaccttactggtgtagttgtaaattatcacaccaagttgtttcagttactccacaaattggacactgatggcatctgtaatgaatgtagcttgtcacatcacgctcaggttcaaaagattatttggatgagaaaaattgacctcaaggctaactaaccttgcacaaagcatccatctgtcactgctagcacaacaaataattcgagtagggatttctttcagatgacgtgatcttctgttagggagaaggatattggccgctctggtggaagccatctcgacaaaatgggcatgcatttgtggagctccagtttggatccagctattactgatgaaatcaaaatgcttgagctcccctttgtcatgggtgcccttataaaacccctggcagagaaattgaatgaagattcttcatgcgctgattttctggggaaaagcatgttgatttggctttatgcagcaatctcttgtttgtcatccagcctccagcctgaggaaagtaccagtgcaaggtatttaagacttgctgcaagtggcactgacctgtttcccactgagcataactggaagaatttaaatagacgagtgagagatcagtggatagtgatgcacaaagatcattattgtttcccatcgaaccagcgattgggcctgcagcaacgggacgagagcggacatgagcgagtgggccggcacccggcagttgggcttcaattcaatgagccagatagtcgggggaggtagatgataaaaatacgtggagagaaattttacgataaatacttaataaggttcttaaaccataaaaaaacatctctaaccttctaaaatatcctagagctactctggatactacgaatcggaataagaaatttaaatttcttaaattatatctcaatggttccaaaaaataaatctagttgttagaaagttggcaatatatagaaaaccctaaaacgttgcaatcgatagctaaataagttataaaaaacttttcatgacaaaaatatgagatgcaactagcaaggacgcaacatatgttggtg

SEQ ID NO: 15484 - DNA, 1634 bp, Zea Mays
gccgacaatatccacatcacgcttcgcgattgccttctccatctttgctccctggggcgggtcggggcccacccgcccgcctcggctgctcagctctgctctgctctgctcctcgcctcccttcccttcccttcgcctcccccagccagccaggaatcgccaccggcggaagccaagcatcgtcccagcaccggatcgattccgcccgcccgcccgcccgtccatggatccggcggccgagccggcggcgtggccgccgtggacgtcgctcctgctgcgggcgctgagccggcggcggacctgggtggcgctcttcctcgccgtctacgccgggctgctctcgtcctcctggtccctgctcgcctccgtccgcgcctggtactactccgcctcctcggcgtccgcggcgcccgcctggcccgccgcgctctacgcgtccgtcatgtacggcgccgtgttcggcctgctctccatggccgccgcgctcgccgtcgccgcgcccgccatgctcgtcacctggaccaccgtcctcgtgctgctcgccttcgcgggccgcccgcgcaggtcgctcgtcgccgagggccgccgcgccaccagggacatcgcgggcctcgcgctccgcgtactcctgcgcgagggcaacgccgtcgccgcgctctgcgccgccgcaagctttgccgcgctcctcctcggccaccgcgatcaccagtagtagctctaagtctgttgccgtcctcttcttctcgcgctagatctgctacaaccttactggtgtagttgtaaattatcacaccaagttgtttcagttactccacaaattggacactgatggcatctgtaatgaatgtagcttgtcacatcacgctcaggttcaaaagattatttggatgagaaaaattgacctcaaggctaactaaccttgcacaaagcatccatctgtcactgctagcacaacaaataattcgagtagggatttctttcagatgacgtgatcttctgttagggagaaggatattggccgctctggtggaagccatctcgacaaaatgggcatgcatttgtggagctccagtttggatccagctattactgatgaaatcgtatttaagacttgctgcaagtggcactgacctgtttcccactgagcataactggaagaatttaaatagacgagtgagagatcagtggatagtgatgcacaaagatcattattgtttcccatcgaaccagcgattgggcctgcagcaacgggacgagagcggacatgagcgagtgggccggcacccggcagttgggcttcaattcaatgagccagatagtcgggggaggtagatgataaaaatacgtggagagaaattttacgataaatacttaataaggttcttaaaccataaaaaaacatctctaaccttctaaaatatcctagagctactctggatactacgaatcggaataagaaatttaaatttcttaaattatatctcaatggttccaaaaaataaatctagttgttagaaagttggcaatatatagaaaaccctaaaacgttgcaatcgatagctaaataagttataaaaaacttttcatgacaaaaatatgagatgcaactagcaaggacgcaacatatgttggtg

SEQ ID NO: 15485 - DNA, 5325 bp, Zea Mays
attgccgaccaggctccctcgcttctgttcgtctccctcctcgcgttcctctcttccgctcgccgccgccgccgcatccgtcaccttcacactgcgctccctccatccctccctgtctgcggcgactgggtggtctaccgctgccctcgctttcgcgggcgaagagcgcccaccaggtattcccacccccttctatttcctgtatgccgtgcgaaagcgaaaccgagttcgcagtttttttttttttttgaaattgagttctcaaagactaacttcaatctgtttggctatttgatgcccactaactttttgcaaaaaaatattgggtgtccctttactagatccgcccctgtcctcatggaatgttggtaccttgcaattacaccagcctgttcagttatacttcagatagcatcttctttgcttgccctcttttgcatcctcatgtcatgtggtcgatgatgctatcacattcttgaaagccttccatactgtccatctgcgcgtactgctatttctacattcgttccttaacagtcgcttactttgacgtcccatttcccacttggatgccaatggctgaacccagtttcagaacattgcgtatcattttttctagctgtttctgttgtttttcttcctatccatacatcatcaatttgctcccccaatattgttggttcctgtgctctttccaaagtttccttggatctttgagctttggaagatgccgaggtggacagagaattctgcttccaccaaatcagctgaattggtgaaacaacaagaccgtttggagtttgacgatcctgatgaggtagacgaagaggaagaagttgagtatgaggaagttgaggaggaggtcgagtatgaagagacagaggacgagtatggacagactgaagctgtacgccaagttgatgctaaacatgacagtaaaatggtggatgctgatacggatgagggtggaaaagggagtcatgatgaacttcttgctcttcctcctcatggatccgaagtttatgttgggggcatcgcctctgatgtctcttctgatgatctcaaaaaactctgcgagtctgttggggaagtagtcgaagtgcgaatgccaggaaagagtggtaggctgtatgcctttgtcaatttcagaactaaagagctggcttcaaaggccatccagaagttgaacaataaagatctaaagggaaagaagataagagtttcttcctcacaggctaaaaacaggctatttatcgggaacataccctataactggacagagaatgaatttaaaaaagcagcagaggaagttggccctggagttttaaaagttaatctcgtgaaggcaccacattcagatacgaacaagggttatggatttattgaatactacaaccaggcttgcgcagagtatgctaagaagatgatgtctaccccagaattcaaactagataaaaatgcccctaatgtcagttgggcagatactaagaatggtggtgaatctgcctctactgcacaggttaaatcactatatgtaaaaaacctgcccaaggctgttactcaagagcaactgaaaaaactatttgagcaccttggagaagttacaaaggttgttattcctcctgcaaaagctggtcatgaaaatcgatatggttttgttcacttcaaagaacgatccatggctatgaaggctctggaagacactgagagattcgaacttgacggtcagctgctggattgttcacttgcaaagcctcttgctgataagaaggacgatacatcagcacctaaaggaggtccattgctcccaagttataccccagttggatatggactgatgggagcctataacccactcggaaatggcctggcagtggcaggcgcttacaatccgtatggaaatggactggcaggtgcttatggtgtgcttggtgctcatgctgcacagccaatgttgtatgttccaggtgctcctccaggttcgacaatgatcccaatggttctaccagatggtcgtcttgtatacgtgaaaagatccgggtcgccctctacgtgcagcaggccgcgctccacttcatcgatggtggcaagcacaaagactaccggctaaccgacgacattatgaaggccgggttctgcatcagcccggacgagctggcgtcgatcacgagcaagcacgacgcgaaggctctgagcatgcacggcggggtggacgggatatgcgcgaaagtacgctcgtcgccagaccgcggcgtgtccgccgccagcgacgacgatctggacgcgaggcgagccgtctacggcgccaaccggtacgcggagaagcctgggcgaagcttctggatgttcgtctgggacgccctgcaggacgtgacgctcgtcatcctgatggcctgcgctctgctgtccgccgccgtcggcctggcgtccgagggctggcccaggggcgtgtacgacggcctggggataatgctcagcatcctgctggttgtcgtggtcaccgctgtcagtgactaccggcagtcgctccagttcaaggagctggacaacgagaagaagaaggtgtctgtgcatgtgaccagggacgggtgccggcagcaggtgtcaatatacgacctggtggtcggtgacgtcgtgcacctgtcgatcggagaccaggtgcccgctgacgggctctacgtccacggatactccctcctgatcgacgagtccagcctgtcgggcgagagcgagccggtgtacatctctcgagccaagccgttcatcctggcaggaaccaaggtccaggacgggtcaggcaagatgctcgtgaccgctgtcggcatgcacaccgagtggggcaggctgatgagcacgctgagcgagggaggcgaggacgagacgccgctgcaggtcaagctcaacggcgtcgcgaccgtcatcgggaagatcgggctgctgttcgccacgctcacgttcgtcgtcctcatggtgaggttcctcgtcgacaaaaccttcacggtgggtctctccagcaggtggacttctgcggacgcgttggctatagtggactacttcgcgacggcggtcacgatcatcgtcgtcgccgtccctgagggcctgcctctggctgttactctgagcctggcgttcgcgatgaagaagctgatgaacgataaggcgcttgtcaggcatctctcggcgtgcgagacgatggggtctgccggcactatatgcaccgacaagacggggactctgaccaccaaccatatggtggtcgacaggatatgggtgtccgaggtttcagaatcagtttccagcagtggcagcggtctggaagatctgagctccgccgccgtctctcggccggccacactgggcctgctcctgcagggcgtgtttgagaacaccagcgcggaggtggtcagagagaaggacggcgggcaggctgttctgggaaccccgacagagagggcgatcttggagtttggactgaagctagaagcacgacgtcgtgatgctggagacaggagctgcaccaaggtcaaggtcgagcctttcaactcggtcaagaagatgatggcggtgctggtatcgttacccgacggcaggtaccgctggtacgtcaaaggcgcgtcagagatcatcgtgcagatgtgcgacgccatggttgacggcgacgggaacggcgttccgttgtcggaagctcggaggaaggacgtcttaggcaccatcaactcgttcgcttcagacgcgttaaggacactgtgcctggcgtacaaggaaggggatggtttcggtgaggatgcagatagtccggcaggaggctttactctgatatgtatctttggcatcaaggatcctgtgcgcccaggagtcaaggacgctgtcaaggcctgtatgtctgccggtatcgtggtacggatggtgactggtgataacatcaacacggctaaagctatagccaaagagtgtgggatactgactgacggcggcgtagcgatagaagggccagagttcagaaacaaaagcccagaggagatgagggacctgatacctaagatccaggttatggctcgttctctgccgcttgacaagcatacccttgtgaaaaacctgcgaggtatgttcagggaggtggttgctgtgacaggcgatggtaccaatgacgctccagcattgcatgaagcagatattgggcttgcaatgggcatagcaggaacagaggtagccaaggagagtgccgatgtgatagtgctggacgacaacttcacaaccataataaacgtcgcgaggtggggccgcgcggtctacataaacatccagaagttcgtgcagtttcagctgaccgtcaacattgtggctctggtcatcaactttgtctcggcatgcattacagggagcgctcctctcacggcggtgcagctgctgtgggtcaacatgatcatggacacgctgggagctctggctctagccacggagcctcccaacgacgacatgatgaagaggccgcctgtcgggcgcggagagagcttcatcaccaaggtcatgtggcggaacatcgtcgggcagagcttgtaccagctggccgtgcttggagctctcatgtttggcggggaacgtctcctcaacatccatggcgcggactccaaacccgttgtcaatacgctcatattcaactccttcgtgttctgccaggtgttcaacgagataaacagcagggagatgcagaagatcaacgtcttccgcggcatgttcggcaactggatcttcgtcggaatcatagccgcgacggtagcgttccaggtggtgatcgtcgagttcctcggcacctttgcgagcaccgtcccactcggctggcagctgtggctggtgagcgtcggcctcggatccgtcagcttggtcgtcggcgccgtcctcaagtgcgttccagttgaaccggacgatggagttcgcgccagtccaaatggctacgcgccgctgcccggcggccctgacaacatataacagctgagcctgagcgccggagaaggtactgacgacgtgctgatttttttcgcgtgagggaacctcgtcggaaccaaccaaccaaccactgtctaggttcagttttaacagattatattatgtaaaaagagatggtggtgaccacaaggcacctctattttgatgggtcatacttaggggtctaaattttacattacaaactttaaaagatcagtcggactttattactattcatttttgaactaatcggattgtgatccattaccacccctagtcatactagaaacaaagcctctcactaatggaagtacattaattaactgtcttgctttgtttaca

SEQ ID NO: 15486 - DNA, 1945 bp, Zea Mays
cttcaatctgtttggctatttgatgcccactaactttttgcaaaaaaatattgggtgtccctttactagatccgcccctgtcctcatggaatgttggtaccttgcaattacaccagcctgttcagttatacttcagatagcatcttctttgcttgccctcttttgcatcctcatgtcatgtggtcgatgatgctatcacattcttgaaagccttccatactgtccatctgcgcgtactgctatttctacattcgttccttaacagtcgcttactttgacgtcccatttcccacttggatgccaatggctgaacccagtttcagaacattgcgtatcattttttctagctgtttctgttgtttttcttcctatccatacatcatcaatttgctcccccaatattgttggttcctgtgctctttccaaagtttccttggatctttgagctttggaagatgccgaggtggacagagaattctgcttccaccaaatcagctgaattggtgaaacaacaagaccgtttggagtttgacgatcctgatgaggtagacgaagaggaagaagttgagtatgaggaagttgaggaggaggtcgagtatgaagagacagaggacgagtatggacagactgaagctgtacgccaagttgatgctaaacatgacagtaaaatggtggatgctgatacggatgagggtggaaaagggagtcatgatgaacttcttgctcttcctcctcatggatccgaagtttatgttgggggcatcgcctctgatgtctcttctgatgatctcaaaaaactctgcgagtctgttggggaagtagtcgaagtgcgaatgccaggaaagagtggtaggctgtatgcctttgtcaatttcagaactaaagagctggcttcaaaggccatccagaagttgaacaataaagatctaaagggaaagaagataagagtttcttcctcacaggctaaaaacaggctatttatcgggaacataccctataactggacagagaatgaatttaaaaaagcagcagaggaagttggccctggagttttaaaagttaatctcgtgaaggcaccacattcagatacgaacaagggttatggatttattgaatactacaaccaggcttgcgcagagtatgctaagaagatgatgtctaccccagaattcaaactagataaaaatgcccctaatgtcagttgggcagatactaagaatggtggtgaatctgcctctactgcacagccaatgttgtatgttccaggtgctcctccaggttcgacaatgatcccaatggttctaccagatggtcgtcttgtatacgtaccacagcctgcaggacagcagcctgtgcccatgacttcgcctccgccgccacagcaaggtgatcgtcattatggtggcagtggtggatcgagctccggtggaaggcgacaacagaggagagatgacagtggtggtagtaacaccaacagccgcaggggtcggcgccgtccctattgatgcttgtcgctgttagcgcttagaagttagaacctagtaggcatattcagagtatctctgctgcagtacaaccatgatgcagacgccaactgatgctggaaaccgtactttctagtggttagttttttcgctgtgcgtctcgtgtctgtaacacaggctgctgttgtgataagagtaataacagttccaagtggcagatgtggtttgggatgcagtggtaaaatgtatctgttccccagcttcatgaataactatgctgttagtgtctgaggtttacattgtgtcagtttggtcactttaggtgtgatgagttttagtagtggtgtggccggtggatatgcagtgaaattgtatcgcttgaacagtgatcagatacctctatggaagggtgaaaacccacaaatgcttcggacaaaaagctgtctttgctctagtacaaa

SEQ ID NO: 15487 - DNA, 2028 bp, Zea Mays
cttcaatctgtttggctatttgatgcccactaactttttgcaaaaaaatattgggtgtccctttactagatccgcccctgtcctcatggaatgttggtaccttgcaattacaccagcctgttcagttatacttcagatagcatcttctttgcttgccctcttttgcatcctcatgtcatgtggtcgatgatgctatcacattcttgaaagccttccatactgtccatctgcgcgtactgctatttctacattcgttccttaacagtcgcttactttgacgtcccatttcccacttggatgccaatggctgaacccagtttcagaacattgcgtatcattttttctagctgtttctgttgtttttcttcctatccatacatcatcaatttgctcccccaatattgttggttcctgtgctctttccaaagtttccttggatctttgagctttggaagatgccgaggtggacagagaattctgcttccaccaaatcagctgaattggtgaaacaacaagaccgtttggagtttgacgatcctgatgaggtagacgaagaggaagaagttgagtatgaggaagttgaggaggaggtcgagtatgaagagacagaggacgagtatggacagactgaagctgtacgccaagttgatgctaaacatgacagtaaaatggtggatgctgatacggatgagggtggaaaagggagtcatgatgaacttcttgctcttcctcctcatggatccgaagtttatgttgggggcatcgcctctgatgtctcttctgatgatctcaaaaaactctgcgagtctgttggggaagtagtcgaagtgcgaatgccaggaaagagtggtaggctgtatgcctttgtcaatttcagaactaaagagctggcttcaaaggccatccagaagttgaacaataaagatctaaagggaaagaagataagagtttcttcctcacaggctaaaaacaggctatttatcgggaacataccctataactggacagagaatgaatttaaaaaagcagcagaggaagttggccctggagttttaaaagttaatctcgtgaaggcaccacattcagatacgaacaagggttatggatttattgaatactacaaccaggcttgcgcagagtatgctaagaagatgatgtctaccccagaattcaaactagataaaaatgcccctaatgtcagttgggcagatactaagaatggtggtgaatctgcctctactgcacaggttaaatcactatatgtaaaaaacctgcccaaggctgttactcaagagcaactgaaaaaactatttgagcaccttggagaagttacaaagccaatgttgtatgttccaggtgctcctccaggttcgacaatgatcccaatggttctaccagatggtcgtcttgtatacgtcctgcaggacagcagcctgtgcccatgacttcgcctccgccgccacagcaaggtgatcgtcattatggtggcagtggtggatcgagctccggtggaaggcgacaacagaggagagatgacagtggtggtagtaacaccaacagccgcaggggtcggcgccgtccctattgatgcttgtcgctgttagcgcttagaagttagaacctagtaggcatattcagagtatctctgctgcagtacaaccatgatgcagacgccaactgatgctggaaaccgtactttctagtggttagttttttcgctgtgcgtctcgtgtctgtaacacaggctgctgttgtgataagagtaataacagttccaagtggcagatgtggtttgggatgcagtggtaaaatgtatctgttccccagcttcatgaataactatgctgttagtgtctgaggtttacattgtgtcagtttggtcactttaggtgtgatgagttttagtagtggtgtggccggtggatatgcagtgaaattgtatcgcttgaacagtgatcagatacctctatggaagggtgaaaacccacaaatgcttcggacaaaaagctgtctttgctctagtacaaa

SEQ ID NO: 15488 - DNA, 2150 bp, Zea Mays
cttcaatctgtttggctatttgatgcccactaactttttgcaaaaaaatattgggtgtccctttactagatccgcccctgtcctcatggaatgttggtaccttgcaattacaccagcctgttcagttatacttcagatagcatcttctttgcttgccctcttttgcatcctcatgtcatgtggtcgatgatgctatcacattcttgaaagccttccatactgtccatctgcgcgtactgctatttctacattcgttccttaacagtcgcttactttgacgtcccatttcccacttggatgccaatggctgaacccagtttcagaacattgcgtatcattttttctagctgtttctgttgtttttcttcctatccatacatcatcaatttgctcccccaatattgttggttcctgtgctctttccaaagtttccttggatctttgagctttggaagatgccgaggtggacagagaattctgcttccaccaaatcagctgaattggtgaaacaacaagaccgtttggagtttgacgatcctgatgaggtagacgaagaggaagaagttgagtatgaggaagttgaggaggaggtcgagtatgaagagacagaggacgagtatggacagactgaagctgtacgccaagttgatgctaaacatgacagtaaaatggtggatgctgatacggatgagggtggaaaagggagtcatgatgaacttcttgctcttcctcctcatggatccgaagtttatgttgggggcatcgcctctgatgtctcttctgatgatctcaaaaaactctgcgagtctgttggggaagtagtcgaagtgcgaatgccaggaaagagtggtaggctgtatgcctttgtcaatttcagaactaaagagctggcttcaaaggccatccagaagttgaacaataaagatctaaagggaaagaagataagagtttcttcctcacaggctaaaaacaggctatttatcgggaacataccctataactggacagagaatgaatttaaaaaagcagcagaggaagttggccctggagttttaaaagttaatctcgtgaaggcaccacattcagatacgaacaagggttatggatttattgaatactacaaccaggcttgcgcagagtatgctaagaagatgatgtctaccccagaattcaaactagataaaaatgcccctaatgtcagttgggcagatactaagaatggtggtgaatctgcctctactgcacaggttaaatcactatatgtaaaaaacctgcccaaggctgttactcaagagcaactgaaaaaactatttgagcaccttggagaagttacaaaggttgttattcctcctgcaaaagctggtcatgaaaatcgatatggttttgttcacttcaaagaacgatccatggctatgaaggctctggaagacactgagagattcgaacttgacgccaatgttgtatgttccaggtgctcctccaggttcgacaatgatcccaatggttctaccagatggtcgtcttgtatacgtaccacagcctgcaggacagcagcctgtgcccatgacttcgcctccgccgccacagcaaggtgatcgtcattatggtggcagtggtggatcgagctccggtggaaggcgacaacagaggagagatgacagtggtggtagtaacaccaacagccgcaggggtcggcgccgtccctattgatgcttgtcgctgttagcgcttagaagttagaacctagtaggcatattcagagtatctctgctgcagtacaaccatgatgcagacgccaactgatgctggaaaccgtactttctagtggttagttttttcgctgtgcgtctcgtgtctgtaacacaggctgctgttgtgataagagtaataacagttccaagtggcagatgtggtttgggatgcagtggtaaaatgtatctgttccccagcttcatgaataactatgctgttagtgtctgaggtttacattgtgtcagtttggtcactttaggtgtgatgagttttagtagtggtgtggccggtggatatgcagtgaaattgtatcgcttgaacagtgatcagatacctctatggaagggtgaaaacccacaaatgcttcggacaaaaagctgtctttgctctagtacaaa

SEQ ID NO: 15489 - DNA, 2426 bp, Zea Mays
cttcaatctgtttggctatttgatgcccactaactttttgcaaaaaaatattgggtgtccctttactagatccgcccctgtcctcatggaatgttggtaccttgcaattacaccagcctgttcagttatacttcagatagcatcttctttgcttgccctcttttgcatcctcatgtcatgtggtcgatgatgctatcacattcttgaaagccttccatactgtccatctgcgcgtactgctatttctacattcgttccttaacagtcgcttactttgacgtcccatttcccacttggatgccaatggctgaacccagtttcagaacattgcgtatcattttttctagctgtttctgttgtttttcttcctatccatacatcatcaatttgctcccccaatattgttggttcctgtgctctttccaaagtttccttggatctttgagctttggaagatgccgaggtggacagagaattctgcttccaccaaatcagctgaattggtgaaacaacaagaccgtttggagtttgacgatcctgatgaggtagacgaagaggaagaagttgagtatgaggaagttgaggaggaggtcgagtatgaagagacagaggacgagtatggacagactgaagctgtacgccaagttgatgctaaacatgacagtaaaatggtggatgctgatacggatgagggtggaaaagggagtcatgatgaacttcttgctcttcctcctcatggatccgaagtttatgttgggggcatcgcctctgatgtctcttctgatgatctcaaaaaactctgcgagtctgttggggaagtagtcgaagtgcgaatgccaggaaagagtggtaggctgtatgcctttgtcaatttcagaactaaagagctggcttcaaaggccatccagaagttgaacaataaagatctaaagggaaagaagataagagtttcttcctcacaggctaaaaacaggctatttatcgggaacataccctataactggacagagaatgaatttaaaaaagcagcagaggaagttggccctggagttttaaaagttaatctcgtgaaggcaccacattcagatacgaacaagggttatggatttattgaatactacaaccaggcttgcgcagagtatgctaagaagatgatgtctaccccagaattcaaactagataaaaatgcccctaatgtcagttgggcagatactaagaatggtggtgaatctgcctctactgcacaggttaaatcactatatgtaaaaaacctgcccaaggctgttactcaagagcaactgaaaaaactatttgagcaccttggagaagttacaaaggttgttattcctcctgcaaaagctggtcatgaaaatcgatatggttttgttcacttcaaagaacgatccatggctatgaaggctctggaagacactgagagattcgaacttgacggtcagctgctggattgttcacttgcaaagcctcttgctgataagaaggacgatacatcagcacctaaaggaggtccattgctcccaagttataccccagttggatatggactgatgggagcctataacccactcggaaatggcctggcagtggcaggcgcttacaatccgtatggaaatggactggcaggtgcttatggtgtgcttggtgctcatgctgcacagctcgagccagctgtgcgcgcgtcccccctggccgcacgttcctctgctcggcccaatgttgtatgttccaggtgctcctccaggttcgacaatgatcccaatggttctaccagatggtcgtcttgtatacgtaccacagcctgcaggacagcagcctgtgcccatgacttcgcctccgccgccacagcaaggtgatcgtcattatggtggcagtggtggatcgagctccggtggaaggcgacaacagaggagagatgacagtggtggtagtaacaccaacagccgcaggggtcggcgccgtccctattgatgcttgtcgctgttagcgcttagaagttagaacctagtaggcatattcagagtatctctgctgcagtacaaccatgatgcagacgccaactgatgctggaaaccgtactttctagtggttagttttttcgctgtgcgtctcgtgtctgtaacacaggctgctgttgtgataagagtaataacagttccaagtggcagatgtggtttgggatgcagtggtaaaatgtatctgttccccagcttcatgaataactatgctgttagtgtctgaggtttacattgtgtcagtttggtcactttaggtgtgatgagttttagtagtggtgtggccggtggatatgcagtgaaattgtatcgcttgaacagtgatcagatacctctatggaagggtgaaaacccacaaatgcttcggacaaaaagctgtctttgctctagtacaaa

SEQ ID NO: 15490 - DNA, 2087 bp, Zea Mays
attgccgaccaggctccctcgcttctgttcgtctccctcctcgcgttcctctcttccgctcgccgccgccgccgcatccgtcaccttcacactgcgctccctccatccctccctgtctgcggcgactgggtggtctaccgctgccctcgctttcgcgggcgaagagcgcccaccagtttccttggatctttgagctttggaagatgccgaggtggacagagaattctgcttccaccaaatcagctgaattggtgaaacaacaagaccgtttggagtttgacgatcctgatgaggtagacgaagaggaagaagttgagtatgaggaagttgaggaggaggtcgagtatgaagagacagaggacgagtatggacagactgaagctgtacgccaagttgatgctaaacatgacagtaaaatggtggatgctgatacggatgagggtggaaaagggagtcatgatgaacttcttgctcttcctcctcatggatccgaagtttatgttgggggcatcgcctctgatgtctcttctgatgatctcaaaaaactctgcgagtctgttggggaagtagtcgaagtgcgaatgccaggaaagagtggtaggctgtatgcctttgtcaatttcagaactaaagagctggcttcaaaggccatccagaagttgaacaataaagatctaaagggaaagaagataagagtttcttcctcacaggctaaaaacaggctatttatcgggaacataccctataactggacagagaatgaatttaaaaaagcagcagaggaagttggccctggagttttaaaagttaatctcgtgaaggcaccacattcagatacgaacaagggttatggatttattgaatactacaaccaggcttgcgcagagtatgctaagaagatgatgtctaccccagaattcaaactagataaaaatgcccctaatgtcagttgggcagatactaagaatggtggtgaatctgcctctactgcacaggttaaatcactatatgtaaaaaacctgcccaaggctgttactcaagagcaactgaaaaaactatttgagcaccttggagaagttacaaaggttgttattcctcctgcaaaagctggtcatgaaaatcgatatggttttgttcacttcaaagaacgatccatggctatgaaggctctggaagacactgagagattcgaacttgacggtcagctgctggattgttcacttgcaaagcctcttgctgataagaaggacgatacatcagcacctaaaggaggtccattgctcccaagttataccccagttggatatggactgatgggagcctataacccactcggaaatggcctggcagtggcaggcgcttacaatccgtatggaaatggactggcagccaatgttgtatgttccaggtgctcctccaggttcgacaatgatcccaatggttctaccagatggtcgtcttgtatacgtaccacagcctgcaggacagcagcctgtgcccatgacttcgcctccgccgccacagcaaggtgatcgtcattatggtggcagtggtggatcgagctccggtggaaggcgacaacagaggagagatgacagtggtggtagtaacaccaacagccgcaggggtcggcgccgtccctattgatgcttgtcgctgttagcgcttagaagttagaacctagtaggcatattcagagtatctctgctgcagtacaaccatgatgcagacgccaactgatgctggaaaccgtactttctagtggttagttttttcgctgtgcgtctcgtgtctgtaacacaggctgctgttgtgataagagtaataacagttccaagtggcagatgtggtttgggatgcagtggtaaaatgtatctgttccccagcttcatgaataactatgctgttagtgtctgaggtttacattgtgtcagtttggtcactttaggtgtgatgagttttagtagtggtgtggccggtggatatgcagtgaaattgtatcgcttgaacagtgatcagatacctctatggaagggtgaaaacccacaaatgcttcggacaaaaagctgtctttgctctagtacaaa

SEQ ID NO: 15491 - DNA, 2174 bp, Zea Mays
attgccgaccaggctccctcgcttctgttcgtctccctcctcgcgttcctctcttccgctcgccgccgccgccgcatccgtcaccttcacactgcgctccctccatccctccctgtctgcggcgactgggtggtctaccgctgccctcgctttcgcgggcgaagagcgcccaccagtttccttggatctttgagctttggaagatgccgaggtggacagagaattctgcttccaccaaatcagctgaattggtgaaacaacaagaccgtttggagtttgacgatcctgatgaggtagacgaagaggaagaagttgagtatgaggaagttgaggaggaggtcgagtatgaagagacagaggacgagtatggacagactgaagctgtacgccaagttgatgctaaacatgacagtaaaatggtggatgctgatacggatgagggtggaaaagggagtcatgatgaacttcttgctcttcctcctcatggatccgaagtttatgttgggggcatcgcctctgatgtctcttctgatgatctcaaaaaactctgcgagtctgttggggaagtagtcgaagtgcgaatgccaggaaagagtggtaggctgtatgcctttgtcaatttcagaactaaagagctggcttcaaaggccatccagaagttgaacaataaagatctaaagggaaagaagataagagtttcttcctcacaggctaaaaacaggctatttatcgggaacataccctataactggacagagaatgaatttaaaaaagcagcagaggaagttggccctggagttttaaaagttaatctcgtgaaggcaccacattcagatacgaacaagggttatggatttattgaatactacaaccaggcttgcgcagagtatgctaagaagatgatgtctaccccagaattcaaactagataaaaatgcccctaatgtcagttgggcagatactaagaatggtggtgaatctgcctctactgcacaggttaaatcactatatgtaaaaaacctgcccaaggctgttactcaagagcaactgaaaaaactatttgagcaccttggagaagttacaaaggttgttattcctcctgcaaaagctggtcatgaaaatcgatatggttttgttcacttcaaagaacgatccatggctatgaaggctctggaagacactgagagattcgaacttgacggtcagctgctggattgttcacttgcaaagcctcttgctgataagaaggacgatacatcagcacctaaaggaggtccattgctcccaagttataccccagttggatatggactgatgggagcctataacccactcggaaatggcctggcagtggcaggcgcttacaatccgtatggaaatggactggcaggtgcttatggtgtgcttggtgctcatgctgcacagctcgagccagctgtgcgcgcgtcccccctggccgcacgttcctctgctcggcccaatgttgtatgttccaggtgctcctccaggttcgacaatgatcccaatggttctaccagatggtcgtcttgtatacgtaccacagcctgcaggacagcagcctgtgcccatgacttcgcctccgccgccacagcaaggtgatcgtcattatggtggcagtggtggatcgagctccggtggaaggcgacaacagaggagagatgacagtggtggtagtaacaccaacagccgcaggggtcggcgccgtccctattgatgcttgtcgctgttagcgcttagaagttagaacctagtaggcatattcagagtatctctgctgcagtacaaccatgatgcagacgccaactgatgctggaaaccgtactttctagtggttagttttttcgctgtgcgtctcgtgtctgtaacacaggctgctgttgtgataagagtaataacagttccaagtggcagatgtggtttgggatgcagtggtaaaatgtatctgttccccagcttcatgaataactatgctgttagtgtctgaggtttacattgtgtcagtttggtcactttaggtgtgatgagttttagtagtggtgtggccggtggatatgcagtgaaattgtatcgcttgaacagtgatcagatacctctatggaagggtgaaaacccacaaatgcttcggacaaaaagctgtctttgctctagtacaaa

SEQ ID NO: 15492 - DNA, 2481 bp, Zea Mays
attgccgaccaggctccctcgcttctgttcgtctccctcctcgcgttcctctcttccgctcgccgccgccgccgcatccgtcaccttcacactgcgctccctccatccctccctgtctgcggcgactgggtggtctaccgctgccctcgctttcgcgggcgaagagcgcccaccagatccgcccctgtcctcatggaatgttggtaccttgcaattacaccagcctgttcagttatacttcagatagcatcttctttgcttgccctcttttgcatcctcatgtcatgtggtcgatgatgctatcacattcttgaaagccttccatactgtccatctgcgcgtactgctatttctacattcgttccttaacagtcgcttactttgacgtcccatttcccacttggatgccaatggctgaacccagtttcagaacattgcgtatcattttttctagctgtttctgttgtttttcttcctatccatacatcatcaatttgctcccccaatattgttggttcctgtgctctttccaaagtttccttggatctttgagctttggaagatgccgaggtggacagagaattctgcttccaccaaatcagctgaattggtgaaacaacaagaccgtttggagtttgacgatcctgatgaggtagacgaagaggaagaagttgagtatgaggaagttgaggaggaggtcgagtatgaagagacagaggacgagtatggacagactgaagctgtacgccaagttgatgctaaacatgacagtaaaatggtggatgctgatacggatgagggtggaaaagggagtcatgatgaacttcttgctcttcctcctcatggatccgaagtttatgttgggggcatcgcctctgatgtctcttctgatgatctcaaaaaactctgcgagtctgttggggaagtagtcgaagtgcgaatgccaggaaagagtggtaggctgtatgcctttgtcaatttcagaactaaagagctggcttcaaaggccatccagaagttgaacaataaagatctaaagggaaagaagataagagtttcttcctcacaggctaaaaacaggctatttatcgggaacataccctataactggacagagaatgaatttaaaaaagcagcagaggaagttggccctggagttttaaaagttaatctcgtgaaggcaccacattcagatacgaacaagggttatggatttattgaatactacaaccaggcttgcgcagagtatgctaagaagatgatgtctaccccagaattcaaactagataaaaatgcccctaatgtcagttgggcagatactaagaatggtggtgaatctgcctctactgcacaggttaaatcactatatgtaaaaaacctgcccaaggctgttactcaagagcaactgaaaaaactatttgagcaccttggagaagttacaaaggttgttattcctcctgcaaaagctggtcatgaaaatcgatatggttttgttcacttcaaagaacgatccatggctatgaaggctctggaagacactgagagattcgaacttgacggtcagctgctggattgttcacttgcaaagcctcttgctgataagaaggacgatacatcagcacctaaaggaggtccattgctcccaagttataccccagttggatatggactgatgggagcctataacccactcggaaatggcctggcagtggcaggcgcttacaatccgtatggaaatggactggcaggtgcttatggtgtgcttggtgctcatgctgcacagccaatgttgtatgttccaggtgctcctccaggttcgacaatgatcccaatggttctaccagatggtcgtcttgtatacgtaccacagcctgcaggacagcagcctgtgcccatgacttcgcctccgccgccacagcaaggtgatcgtcattatggtggcagtggtggatcgagctccggtggaaggcgacaacagaggagagatgacagtggtggtagtaacaccaacagccgcaggggtcggcgccgtccctattgatgcttgtcgctgttagcgcttagaagttagaacctagtaggcatattcagagtatctctgctgcagtacaaccatgatgcagacgccaactgatgctggaaaccgtactttctagtggttagttttttcgctgtgcgtctcgtgtctgtaacacaggctgctgttgtgataagagtaataacagttccaagtggcagatgtggtttgggatgcagtggtaaaatgtatctgttccccagcttcatgaataactatgctgttagtgtctgaggtttacattgtgtcagtttggtcactttaggtgtgatgagttttagtagtggtgtggccggtggatatgcagtgaaattgtatcgcttgaacagtgatcagatacctctatggaagggtgaaaacccacaaatgcttcggacaaaaagctgtctttgctctagtacaaa

SEQ ID NO: 15493 - DNA, 2181 bp, Zea Mays
gaaacattgccgaccaggctccctcgcttctgttcgtctccctcctcgcgttcctctcttccgctcgccgccgccgccgcatccgtcaccttcacactgcgctccctccatccctccctgtctgcggcgactgggtggtctaccgctgccctcgctttcgcgggcgaagagcgcccaccagatgccgaggtggacagagaattctgcttccaccaaatcagctgaattggtgaaacaacaagaccgtttggagtttgacgatcctgatgaggtagacgaagaggaagaagttgagtatgaggaagttgaggaggaggtcgagtatgaagagacagaggacgagtatggacagactgaagctgtacgccaagttgatgctaaacatgacagtaaaatggtggatgctgatacggatgagggtggaaaagggagtcatgatgaacttcttgctcttcctcctcatggatccgaagtttatgttgggggcatcgcctctgatgtctcttctgatgatctcaaaaaactctgcgagtctgttggggaagtagtcgaagtgcgaatgccaggaaagagtggtaggctgtatgcctttgtcaatttcagaactaaagagctggcttcaaaggccatccagaagttgaacaataaagatctaaagggaaagaagataagagtttcttcctcacaggctaaaaacaggctatttatcgggaacataccctataactggacagagaatgaatttaaaaaagcagcagaggaagttggccctggagttttaaaagttaatctcgtgaaggcaccacattcagatacgaacaagggttatggatttattgaatactacaaccaggcttgcgcagagtatgctaagaagatgatgtctaccccagaattcaaactagataaaaatgcccctaatgtcagttgggcagatactaagaatggtggtgaatctgcctctactgcacaggttaaatcactatatgtaaaaaacctgcccaaggctgttactcaagagcaactgaaaaaactatttgagcaccttggagaagttacaaaggttgttattcctcctgcaaaagctggtcatgaaaatcgatatggttttgttcacttcaaagaacgatccatggctatgaaggctctggaagacactgagagattcgaacttgacggtgactttccttctctatcttccttctgtagctagtcaatcttgcttcatgtatgaagaaggccatgatttttttatttgtctatcaggtcagctgctggattgttcacttgcaaagcctcttgctgataagaaggacgatacatcagcacctaaaggaggtccattgctcccaagttataccccagttggatatggactgatgggagcctataacccactcggaaatggcctggcagtggcaggcgcttacaatccgtatggaaatggactggcaggtgcttatggtgtgcttggtgctcatgctgcacagccaatgttgtatgttccaggtgctcctccaggttcgacaatgatcccaatggttctaccagatggtcgtcttgtatacgtcctgcaggacagcagcctgtgcccatgacttcgcctccgccgccacagcaaggtgatcgtcattatggtggcagtggtggatcgagctccggtggaaggcgacaacagaggagagatgacagtggtggtagtaacaccaacagccgcaggggtcggcgccgtccctattgatgcttgtcgctgttagcgcttagaagttagaacctagtaggcatattcagagtatctctgctgcagtacaaccatgatgcagacgccaactgatgctggaaaccgtactttctagtggttagttttttcgctgtgcgtctcgtgtctgtaacacaggctgctgttgtgataagagtaataacagttccaagtggcagatgtggtttgggatgcagtggtaaaatgtatctgttccccagcttcatgaataactatgctgttagtgtctgaggtttacattgtgtcagtttggtcactttaggtgtgatgagttttagtagtggtgtggccggtggatatgcagtgaaattgtatcgcttgaacagtgatcagatacctctatggaagggtgaaaacccacaaatgcttcggacaaaaagctgtctttgctctagtacaaa

SEQ ID NO: 15494 - DNA, 1275 bp, Zea Mays
cgaaacattgccgaccaggctccctcgcttctgttcgtctccctcctcgcgttcctctcttccgctcgccgccgccgccgcatccgtcaccttcacactgcgctccctccatccctccctgtctgcggcgactgggtggtctaccgctgccctcgctttcgcgggcgaagagcgcccaccagatgccgaggtggacagagaattctgcttccaccaaatcagctgaattggtgaaacaacaagaccgtttggagtttgacgatcctgatgaggtagacgaagaggaagaagttgagtatgaggaagttgaggaggaggtcgagtatgaagagacagaggacgagtatggacagactgaagctgtacgccaagttgatgctaaacatgacagtaaaatggtggatgctgatacggatgagggtggaaaagggagtcatgatgaacttcttgctcttcctcctcatggatccgaagtttatgttgggggcatcgcctctgatgtctcttctgatgatctcaaaaaactctgcgagtctgttggggaagtagtcgaagtgcgaatgccaggaaagagtggtaggctgtatgcctttgtcaatttcagaactaaagagctggcttcaaaggccatccagaagttgaacaataaagatctaaagggaaagaagataagagtttcttcctcacaggctaaaaacaggctatttatcgggaacataccctataactggacagagaatgaatttaaaaaagcagcagaggaagttggccctggagttttaaaagttaatctcgtgaaggcaccacattcagatacgaacaagggttatggatttattgaatactacaaccaggcttgcgcagagtatgctaagaagatgatgtctaccccagaattcaaactagataaaaatgcccctaatgtcagttgggcagatactaagaatggtggtgaatctgcctctactgcacaggttaaatcactatatgtaaaaaacctgcccaaggctgttactcaagagcaactgaaaaaactatttgagcaccttggagaagttacaaaggttgttattcctcctgcaaaagctggtcatgaaaatcgatatggttttgttcacttcaaagaacgatccatggctatgaaggctctggaagacactgagagattcgaacttgacggtcagctgctggattgttcacttgcaaagcctcttgctgataagaaggacgatacatcagcacctaaaggagcattttcatctcctcatcttagat

SEQ ID NO: 15495 - DNA, 2095 bp, Zea Mays
cgaaacattgccgaccaggctccctcgcttctgttcgtctccctcctcgcgttcctctcttccgctcgccgccgccgccgcatccgtcaccttcacactgcgctccctccatccctccctgtctgcggcgactgggtggtctaccgctgccctcgctttcgcgggcgaagagcgcccaccaggtattcccacccccttctatttcctgtatgccgtgcgaaagcgaaaccgagttcgcagtttttttttttttttgaaattgagttctcaaagactaacttcaatctgtttggctatttgatgcccactaactttttgcaaaaaaatattgggtgtccctttactagatccgcccctgtcctcatggaatgttggtaccttgcaattacaccagcctgttcagttatacttcagatagcatcttctttgcttgccctcttttgcatcctcatgtcatgtggtcgatgatgctatcacattcttgaaagccttccatactgtccatctgcgcgtactgctatttctacattcgttccttaacagtcgcttactttgacgtcccatttcccacttggatgccaatggctgaacccagtttcagaacattgcgtatcattttttctagctgtttctgttgtttttcttcctatccatacatcatcaatttgctcccccaatattgttggttcctgtgctctttccaaagtttccttggatctttgagctttggaagatgccgaggtggacagagaattctgcttccaccaaatcagctgaattggtgaaacaacaagaccgtttggagtttgacgatcctgatgaggtagacgaagaggaagaagttgagtatgaggaagttgaggaggaggtcgagtatgaagagacagaggacgagtatggacagactgaagctgtacgccaagttgatgctaaacatgacagtaaaatggtggatgctgatacggatgagggtggaaaagggagtcatgatgaacttcttgctcttcctcctcatggatccgaagtttatgttgggggcatcgcctctgatgtctcttctgatgatctcaaaaaactctgcgagtctgttggggaagtagtcgaagtgcgaatgccaggaaagagtggtaggctgtatgcctttgtcaatttcagaactaaagagctggcttcaaaggccatccagaagttgaacaataaagatctaaagggaaagaagataagagtttcttcctcacaggctaaaaacaggctatttatcgggaacataccctataactggacagagaatgaatttaaaaaagcagcagaggaagttggccctggagttttaaaagttaatctcgtgaaggcaccacattcagatacgaacaagggttatggatttattgaatactacaaccaggcttgcgcagagtatgctaagaagatgatgtctaccccagaattcaaactagataaaaatgcccctaatgtcagttgggcagatactaagaatggtggtgaatctgcctctactgcacaggttaaatcactatatgtaaaaaacctgcccaaggctgttactcaagagcaactgaaaaaactatttgagcaccttggagaagttacaaaggttgttattcctcctgcaaaagctggtcatgaaaatcgatatggttttgttcacttcaaagaacgatccatggctatgaaggctctggaagacactgagagattcgaacttgacggtcagctgctggattgttcacttgcaaagcctcttgctgataagaaggacgatacatcagcacctaaaggaggtccattgctcccaagttataccccagttggatatggactgatgggagcctataacccactcggaaatggcctggcagtggcaggcgcttacaatccgtatggaaatggactggcaggtgcttatggtgtgcttggtgctcatgctgcacagctcgagccagctgtgcgcgcgtcccccctggccgcatgttcctctgctcggcgtacgtccctggccctgcgcctcctagtgtagacttgtccccacatgacatctccccctccgtcgagacccagctcgtccccgagctgg

SEQ ID NO: 15496 - DNA, 1619 bp, Zea Mays
agctgaagagcgggcgaggaaatcttgttggtctgcgtctaggcgagccgaaacattgccgaccaggctccctcgcttctgttcgtctccctcctcgcgttcctctcttccgctcgccgccgccgccgcatccgtcaccttcacactgcgctccctccatccctccctgtctgcggcgactgggtggtctaccgctgccctcgctttcgcgggcgaagagcgcccaccagtttccttggatctttgagctttggaagatgccgaggtggacagagaattctgcttccaccaaatcagctgaattggtgaaacaacaagaccgtttggagtttgacgatcctgatgaggtagacgaagaggaagaagttgagtatgaggaagttgaggaggaggtcgagtatgaagagacagaggacgagtatggacagactgaagctgtacgccaagttgatgctaaacatgacagtaaaatggtggatgctgatacggatgagggtggaaaagggagtcatgatgaacttcttgctcttcctcctcatggatccgaagtttatgttgggggcatcgcctctgatgtctcttctgatgatctcaaaaaactctgcgagtctgttggggaagtagtcgaagtgcgaatgccaggaaagagtggtaggctgtatgcctttgtcaatttcagaactaaagagctggcttcaaaggccatccagaagttgaacaataaagatctaaagggaaagaagataagagtttcttcctcacaggctaaaaacaggctatttatcgggaacataccctataactggacagagaatgaatttaaaaaagcagcagaggaagttggccctggagttttaaaagttaatctcgtgaaggcaccacattcagatacgaacaagggttatggatttattgaatactacaaccaggcttgcgcagagtatgctaagaagatgatgtctaccccagaattcaaactagataaaaatgcccctaatgtcagttgggcagatactaagaatggtggtgaatctgcctctactgcacaggttaaatcactatatgtaaaaaacctgcccaaggctgttactcaagagcaactgaaaaaactatttgagcaccttggagaagttacaaaggttgttattcctcctgcaaaagctggtcatgaaaatcgatatggttttgttcacttcaaagaacgatccatggctatgaaggctctggaagacactgagagattcgaacttgacggtcagctgctggattgttcacttgcaaagcctcttgctgataagaaggacgatacatcagcacctaaaggaggtccattgctcccaagttataccccagttggatatggactgatgggagcctataacccactcggaaatggcctggcagtggcaggcgcttacaatccgtatggaaatggactggcaggtgcttatggtgtgcttggtgctcatgctgcacagctcgagccagctgtgcgcgcgtcccccctggccgcatgttcctctgctcggcgtacgtccctggccctgcgcctcctagtgtagacttgtccccacatgacatctccccctccgtcgagacccagctcgtccccgagctgg

SEQ ID NO: 15497 - DNA, 1606 bp, Zea Mays
ccggcccatgcgcgagctgaagagcgggcgaggaaatcttgttggtctgcgtctaggcgagccgaaacattgccgaccaggctccctcgcttctgttcgtctccctcctcgcgttcctctcttccgctcgccgccgccgccgcatccgtcaccttcacactgcgctccctccatccctccctgtctgcggcgactgggtggtctaccgctgccctcgctttcgcgggcgaagagcgcccaccagatgccgaggtggacagagaattctgcttccaccaaatcagctgaattggtgaaacaacaagaccgtttggagtttgacgatcctgatgaggtagacgaagaggaagaagttgagtatgaggaagttgaggaggaggtcgagtatgaagagacagaggacgagtatggacagactgaagctgtacgccaagttgatgctaaacatgacagtaaaatggtggatgctgatacggatgagggtggaaaagggagtcatgatgaacttcttgctcttcctcctcatggatccgaagtttatgttgggggcatcgcctctgatgtctcttctgatgatctcaaaaaactctgcgagtctgttggggaagtagtcgaagtgcgaatgccaggaaagagtggtaggctgtatgcctttgtcaatttcagaactaaagagctggcttcaaaggccatccagaagttgaacaataaagatctaaagggaaagaagataagagtttcttcctcacaggctaaaaacaggctatttatcgggaacataccctataactggacagagaatgaatttaaaaaagcagcagaggaagttggccctggagttttaaaagttaatctcgtgaaggcaccacattcagatacgaacaagggttatggatttattgaatactacaaccaggcttgcgcagagtatgctaagaagatgatgtctaccccagaattcaaactagataaaaatgcccctaatgtcagttgggcagatactaagaatggtggtgaatctgcctctactgcacaggttaaatcactatatgtaaaaaacctgcccaaggctgttactcaagagcaactgaaaaaactatttgagcaccttggagaagttacaaaggttgttattcctcctgcaaaagctggtcatgaaaatcgatatggttttgttcacttcaaagaacgatccatggctatgaaggctctggaagacactgagagattcgaacttgacggtcagctgctggattgttcacttgcaaagcctcttgctgataagaaggacgatacatcagcacctaaaggaggtccattgctcccaagttataccccagttggatatggactgatgggagcctataacccactcggaaatggcctggcagtggcaggcgcttacaatccgtatggaaatggactggcaggtgcttatggtgtgcttggtgctcatgctgcacagctcgagccagctgtgcgcgcgtcccccctggccgcatgttcctctgctcggcgtacgtccctggccctgcgcctcctagtgtagacttgtccccacatgacatctccccctccgtcgagacccagctcgtccccgagctgg

SEQ ID NO: 15498 - DNA, 2936 bp, Zea Mays
aaaggttatgccttatcatatttgttatccagtgctggaagaatacggttcttacttggtactccaggaatggttgctcttgacctagatgcgacactgaaaggcctttttcagcaagtcctccattgtctggagaacattccaaaacctcagggggaaagtgttcctgacattaccgctgacttggctgatttgcgtaagcactggctgtcaatcttgatgatagtcacatcttcacgatcctcgataaacattaagcacttggagaaggctactgtgtctactgggaaggagggtttggtgtcagaaggcaatgctgcatataattggtcaagatgtgttgatgaacttgagagccaactctccaaacatggaagccttaaaaaactctacttttatcatcagcatcttaccacggtcttcagaaatacaatgtttggcccagaaggtcgtccacagcattgttgtgcttggcttggagccgcttgcagttttccagaatgtgcttctgcaattattcctgaagaggttaacaaaattggcagagattctatctcttatgtggagtcccttatcgagtctatcatgggtgggttggaaggtttgataaatattctagattcagaaggtggatttggctcattagagatgcagctttccccagagcaagcagctcttcgcttaaataacacaagagcaaagggtgtttcaagcttgttaactccaggatatgagagctatcctgataacagttcatcaattaagatgctggaagctgctatgcaaaggctgacaagtttgtgttctgttctaaatgacatggagcctattggtgttctcaaccatgtttttgttctacgcgagattcttgttaatttcacagtacatgagagactgcatcataggaaatttcaggagaagatttcatagtatgattagaactgagaactgcattcagcgaccatcaatcatagaatctcttctaagaagacatctgggcatcatccatctagcagagcagcatattagtatggaccttactgaaggcatacgtgaagtgctgctagctgagagttatactggtccatttcccaatcttcaaatgtttgagactccagtggggacacaaggaggggggtctgccgttgagatgatatgcaactggtatattgagaatgtagtaaaggacgcttctcgcattggagttgcttttgatgcaatccaaaattgcttcaggagctcacagcctattggtggtggatgtttggctgaatcatttacagataaaagagaaatgaaatcacttgttcgtctttttggtggctatggaatagataaaatggataagatgctaagggagcatacgtctgcgcttttaaactgtatcgattcagcattgaggtcaaatcgtgatgccttagagggcctagctggaactgtaaattccggcgataggattgaaagggatgtgaacctgaaacaaattattgacctcgaaacactggctgacctctgtattcaagcagggcaggcaataactttccgtcggctgttggttgaggccgtcggagcagtccttgaagagaaagtgcctctgatatattctctgctcaaaggattagccttgcagttgccagacgaggtacctgataaaaatgagataattagattgagaaaggttgcgagcagtgttggtgttggcgacaaacatgatgctgagtgggtacactctattctggcagacgctggtgcagctaatgataattcttggatcctacttccatacctttgtgctgcattcatggtgtccaacatttggaacggtgctgtttatgatgtcaatataggtggactcagtaacaatttgcactgcctagcaaggtatggactgactctatgtttgatgtcaaaaatcgttagttgtgggtatgtaagtgctgtgattgtatttgtgcaggtgtgtaagtgctgtgattgggggaagcgaatacactcgggtcgaaagggagcagcgaataaattctctttcaaatgtgcatacagatgagctgcaagaggccgagttaccgagccgtgtctcagcagaagcaaatatcaaatcttgtatgcagatctacgtcaaactgtctgcagggatcgtcctggattcatggaacgacacaagcaggcagcacatcgtcccgaagctgacattcctggaccagctctgcgagctgtccccgtacgtgccaaggagcaccttagaagctcacatcccatacaccatcctgcgctcgatataccaccagctgtacggaggctctctgctggcctcggaaccggcggagcagtccccaaggcagtcgcctctcatctctctggcacacgcgtccccgtccgcaaggcagatgcagaaccgaccagagacaacacccaggtcccacaccttcgacccaggctactacagctcgtcggggtcccagcacgacgatggctacgacgcggataggaggaccggacggctgctgcggagcttgaggcgctctggaccgctcgacttcggtgcgagcagaaaggcgaagaagttcgtcgagggctccagctccgggagcagccatggagctggctcgctgcagaggttcgcagtgtccagatctggccctctatcgtacagatagggccgcatgtaatgtaaactctagagagcagtagatcttcctatgcgtgctggtttacgtagctagcagtagcaacagcagcagctagttgtgctgtaagtaaaacccattaattgcttaatttgtgttgactgtcgttaggcaagtgatttgaattagctgttgctcgtttggtttgtgtatcaacaatacaattgttcgttgatttttcttgatagcaaagtaaagtaaaccaaccttctcttgaaagaaagaaatagagagaaagattagacggag

SEQ ID NO: 15499 - DNA, 1870 bp, Zea Mays
gagatgagttatactggtccatttcccaatcttcaaatgtttgagactccagtggggacacaaggaggggggtctgccgttgagatgatatgcaactggtatattgagaatgtagtaaaggacgcttctcgcattggagttgcttttgatgcaatccaaaattgcttcaggagctcacagcctattggtggtggatgtttggctgaatcatttacagataaaagagaaatgaaatcacttgttcgtctttttggtggctatggaatagataaaatggataagatgctaagggagcatacgtctgcgcttttaaactgtatcgattcagcattgaggtcaaatcgtgatgccttagagggcctagctggaactgtaaattccggcgataggattgaaagggatgtgaacctgaaacaaattattgacctcgaaacactggctgacctctgtattcaagcagggcaggcaataactttccgtcggctgttggttgaggccgtcggagcagtccttgaagagaaagtgcctctgatatattctctgctcaaaggattagccttgcagttgccagacgaggtacctgataaaaatgagataattagattgagaaaggttgcgagcagtgttggtgttggcgacaaacatgatgctgagtgggtacactctattctggcagacgctggtgcagctaatgataattcttggatcctacttccatacctttgtgctgcattcatggtgtccaacatttggaacggtgctgtttatgatgtcaatataggtggactcagtaacaatttgcactgcctagcaaggtatggactgactctatgtttgatgtcaaaaatcgttagttgtgggtatgtaagtgctgtgattgtatttgtgcaggtgtgtaagtgctgtgattgggggaagcgaatacactcgggtcgaaagggagcagcgaataaattctctttcaaatgtgcatacagatgagctgcaagaggccgagttaccgagccgtgtctcagcagaagcaaatatcaaatcttgtatgcagatctacgtcaaactgtctgcagggatcgtcctggattcatggaacgacacaagcaggcagcacatcgtcccgaagctgacattcctggaccagctctgcgagctgtccccgtacgtgccaaggagcaccttagaagctcacatcccatacaccatcctgcgctcgatataccaccagctgtacggaggctctctgctggcctcggaaccggcggagcagtccccaaggcagtcgcctctcatctctctggcacacgcgtccccgtccgcaaggcagatgcagaaccgaccagagacaacacccaggtcccacaccttcgacccaggctactacagctcgtcggggtcccagcacgacgatggctacgacgcggataggaggaccggacggctgctgcggagcttgaggcgctctggaccgctcgacttcggtgcgagcagaaaggcgaagaagttcgtcgagggctccagctccgggagcagccatggagctggctcgctgcagaggttcgcagtgtccagatctggccctctatcgtacagatagggccgcatgtaatgtaaactctagagagcagtagatcttcctatgcgtgctggtttacgtagctagcagtagcaacagcagcagctagttgtgctgtaagtaaaacccattaattgcttaatttgtgttgactgtcgttaggcaagtgatttgaattagctgttgctcgtttggtttgtgtatcaacaatacaattgttcgttgatttttcttgatagcaaagtaaagtaaaccaaccttctcttgaaagaaagaaatagagagaaagattagacggag

SEQ ID NO: 15500 - DNA, 4637 bp, Zea Mays
cgcaaccaccgcatccgtcctcgtctggtccggttgcctactcccctcccactgccccgctgctgctgcctccccgcgcaatggcgccgagatccccgcgctgagcgagcctcccgggggtcgacctccgaaccggcgctgccgtcccgcagtgcacttgaagaccaggcagctgttctctactcaaggaagagatggcccatgtttcgttcaaaagcaaagatgtggacagcggcatgtcccggtggtctgaatacctaagtgttgaagagccaattccttccgcaatggcaacctggaggaacatgagcgctgatgcgccgcaaggctcttctgctggtagccacaaacatcttcagatggagccggtggttcagctgtccaaggttgcggaaggcttgctggccaaaatgtaccggctgaacagcatcctggactatccagatccaaacacgcacacattctcggatgcattttggaaagctggtgtctttccaaatttccccaaaatttgcatcacgatgtcaaaaaaatttccggaacatcctaacaagctgcagctagaaagggtagataagtttggtcttgatgctttaaacgagaatgctgaaggttacatgcacaatcttgagcagtggatcctgttgcttcttgatttgctggcatttcgtgaacaagctttgcgacttattttggatttgagcagcacggtcataacattgctgccacaccaaaactctttaattcttcatgcttttatggatctgttttgttcatttgtccgagtgaatcttttctctgacaagatgccaagaaagatgatcctccaggtttataacatcttgcacataatgctaaagggtggtcgtgattgtgagttttatcaccgactggttcagtttgtggactcttatgatccacctatcaaggggttgcatgaagatcttaattttgtgagcccaagaattggagaggtgtcctggaagctgttggcccaattatatttctttcaactgatacaaaaaagttaaggaacgaaggtttcctcagtccatttcatccacgttatccagacatcctaacaaattctgcccatccaatgagggcccaagacttggctaatgtcacatcataccgtgagtgggttcttctaggatatcttgtttgtcctgatgaactacttagggtgaccagtatagatgttgccatggttgttctgaaagagaacttaatacttcctctgttcagagatgagtacatcttacttcatgaaaattatcaactttatgttcttccaaaagttctagaatcgaagagaatggctaaatctggccgaactaagcaaaaggaagctgatctggagtacaatgttgcaaagcaggttgagagaatgttaacggaagtgcatgagcaagcactggtgtcatgtgatgctatgcatcgtgagaggagaattcttcttaagcaggaaattggaaggatggttttatttttcactgatcaacctagcctcctagcacctaatattcagatggttttttctgctcttgctttgtctcaatgcgaggtgatttggtacttccaacatgtggggattgcatcatcaaaatctactcggttgaaaactgttgacattgatgcgacagacccaactattggtttcttactagatggaataggcaaactttgttgcctggttcgtaaatacatagcagcaataaaaggttatgccttatcatatttgttatccagtgctggaagaatacggttcttacttggtactccaggaatggttgctcttgacctagatgcgacactgaaaggcctttttcagcaagtcctccattgtctggagaacattccaaaacctcagggggaaagtgttcctgacattaccgctgacttggctgatttgcgtaagcactggctgtcaatcttgatgatagtcacatcttcacgatcctcgataaacattaagcacttggagaaggctactgtgtctactgggaaggagggtttggtgtcagaaggcaatgctgcatataattggtcaagatgtgttgatgaacttgagagccaactctccaaacatggaagccttaaaaaactctacttttatcatcagcatcttaccacggtcttcagaaatacaatgtttggcccagaaggtcgtccacagcattgttgtgcttggcttggagccgcttgcagttttccagaatgtgcttctgcaattattcctgaagaggttaacaaaattggcagagattctatctcttatgtggagtcccttatcgagtctatcatgggtgggttggaaggtttgataaatattctagattcagaaggtggatttggctcattagagatgcagctttccccagagcaagcagctcttcgcttaaataacacaagagcaaagggtgtttcaagcttgttaactccaggatatgagagctatcctgataacagttcatcaattaagatgctggaagctgctatgcaaaggctgacaagtttgtgttctgttctaaatgacatggagcctattggtgttctcaaccatgtttttgttctacgcgagtacatgagagactgcatcataggaaatttcaggagaagatttcatagtatgattagaactgagaactgcattcagcgaccatcaatcatagaatctcttctaagaagacatctgggcatcatccatctagcagagcagcatattagtatggaccttactgaaggcatacgtgaagtgctgctagctgagagttatactggtccatttcccaatcttcaaatgtttgagactccagtggggacacaaggaggggggtctgccgttgagatgatatgcaactggtatattgagaatgtagtaaaggacgcttctcgcattggagttgcttttgatgcaatccaaaattgcttcaggagctcacagcctattggtggtggatgtttggctgaatcatttacagataaaagagaaatgaaatcacttgttcgtctttttggtggctatggaatagataaaatggataagatgctaagggagcatacgtctgcgcttttaaactgtatcgattcagcattgaggtcaaatcgtgatgccttagagggcctagctggaactgtaaattccggcgataggattgaaagggatgtgaacctgaaacaaattattgacctcgaaacactggctgacctctgtattcaagcagggcaggcaataactttccgtcggctgttggttgaggccgtcggagcagtccttgaagagaaagtgcctctgatatattctctgctcaaaggattagccttgcagttgccagacgaggtacctgataaaaatgagataattagattgagaaaggttgcgagcagtgttggtgttggcgacaaacatgatgctgagtgggtacactctattctggcagacgctggtgcagctaatgataattcttggatcctacttccatacctttgtgctgcattcatggtgtccaacatttggaacggtgctgtttatgatgtcaatataggtggactcagtaacaatttgcactgcctagcaaggtatggactgactctatgtttgatgtcaaaaatcgttagttgtgggtatgtaagtgctgtgattgtatttgtgcaggtgtgtaagtgctgtgattgggggaagcgaatacactcgggtcgaaagggagcagcgaataaattctctttcaaatgtgcatacagatgagctgcaagaggccgagttaccgagccgtgtctcagcagaagcaaatatcaaatcttgtatgcagatctacgtcaaactgtctgcagggatcgtcctggattcatggaacgacacaagcaggcagcacatcgtcccgaagctgacattcctggaccagctctgcgagctgtccccgtacgtgccaaggagcaccttagaagctcacatcccatacaccatcctgcgctcgatataccaccagctgtacggaggctctctgctggcctcggaaccggcggagcagtccccaaggcagtcgcctctcatctctctggcacacgcgtccccgtccgcaaggcagatgcagaaccgaccagagacaacacccaggtcccacaccttcgacccaggctactacagctcgtcggggtcccagcacgacgatggctacgacgcggataggaggaccggacggctgctgcggagcttgaggcgctctggaccgctcgacttcggtgcgagcagaaaggcgaagaagttcgtcgagggctccagctccgggagcagccatggagctggctcgctgcagaggttcgcagtgtccagatctggccctctatcgtacagatagggccgcatgtaatgtaaactctagagagcagtagatcttcctatgcgtgctggtttacgtagctagcagtagcaacagcagcagctagttgtgctgtaagtaaaacccattaattgcttaatttgtgttgactgtcgttaggcaagtgatttgaattagctgttgctcgtttggtttgtgtatcaacaatacaattgttcgttgatttttcttgatagcaaagtaaagtaaaccaaccttctcttgaaagaaagaaatagagagaaagattagacggag

SEQ ID NO: 15501 - DNA, 4540 bp, Zea Mays
cgcaaccaccgcatccgtcctcgtctggtccggttgcctactcccctcccactgccccgctgctgctgcctccccgcgcaatggcgccgagatccccgcgctgagcgagcctcccgggggtcgacctccgaaccggcgctgccgtcccgcagtgcacttgaagaccaggcagctgttctctactcaaggaagagatggcccatgtttcgttcaaaagcaaagatgtggacagcggcatgtcccggtggtctgaatacctaagtgttgaagagccaattccttccgcaatggcaacctggaggaacatgagcgctgatgcgccgcaaggctcttctgctggtagccacaaacatcttcagatggagccggtggttcagctgtccaaggttgcggaaggcttgctggccaaaatgtaccggctgaacagcatcctggactatccagatccaaacacgcacacattctcggatgcattttggaaagctggtgtctttccaaatttccccaaaatttgcatcacgatgtcaaaaaaatttccggaacatcctaacaagctgcagctagaaagggtagataagtttggtcttgatgctttaaacgagaatgctgaaggttacatgcacaatcttgagcagtggatcctgttgcttcttgatttgctggcatttcgtgaacaagctttgcgacttattttggatttgagcagcacggtcataacattgctgccacaccaaaactctttaattcttcatgcttttatggatctgttttgttcatttgtccgagtgaatcttttctctgacaagatgccaagaaagatgatcctccaggtttataacatcttgcacataatgctaaagggtggtcgtgattgtgagttttatcaccgactggttcagtttgtggactcttatgatccacctatcaaggggttgcatgaagatcttaattttgtgagcccaagaattggagaggtcctggaagctgttggcccaattatatttctttcaactgatacaaaaaagttaaggaacgaaggtttcctcagtccatttcatccacgttatccagacatcctaacaaattctgcccatccaatgagggcccaagacttggctaatgtcacatcataccgtgagtgggttcttctaggatatcttgtttgtcctgatgaactacttagggtgaccagtatagatgttgccatggttgttctgaaagagaacttaatacttcctctgttcagagatgagtacatcttacttcatgaaaattatcaactttatgttcttccaaaagttctagaatcgaagagaatggctaaatctggccgaactaagcaaaaggaagctgatctggagtacaatgttgcaaagcaggttgagagaatgttaacggaagtgcatgagcaagcactggtgtcatgtgatgctatgcatcgtgagaggagaattcttcttaagcaggaaattggaaggatggttttatttttcactgatcaacctagcctcctagcacctaatattcagatggttttttctgctcttgctttgtctcaatgcgaggtgatttggtacttccaacatgtggggattgcatcatcaaaatctactcggttgaaaactgttgacattgatgcgacagacccaactattggtttcttactagatggaataggcaaactttgttgcctgcaataaaaggttatgccttatcatatttgttatccagtgctggaagaatacggttcttacttggtactccaggaatggttgctcttgacctagatgcgacactgaaaggcctttttcagcaagtcctccattgtctggagaacattccaaaacctcagggggaaagtgttcctgacattaccgctgacttggctgatttgcgtaagcactggctgtcaatcttgatgatagtcacatcttcacgatcctcgataaacattaagcacttggagaaggctactgtgtctactgggaaggagggtttggtgtcagaaggcaatgctgcatataattggtcaagatgtgttgatgaacttgagagccaactctccaaacatggaagccttaaaaaactctacttttatcatcagcatcttaccacggtcttcagaaatacaatgtttggcccagaaggtcgtccacagcattgttgtgcttggcttggagccgcttgcagttttccagaatgtgcttctgcaattattcctgaagaggttaacaaaattggcagagattctatctcttatgtggagtcccttatcgagtctatcatgggtgggttggaaggtttgataaatattctagattcagaaggtggatttggctcattagagatgcagctttccccagagcaagcagctcttcgcttaaataacacaagagcaaagggtgtttcaagcttgttaactccaggatatgagagctatcctgataacagttcatcaattaagatgctggaagctgctatgcaaaggctgacaagtttgtgttctgttctaaatgacatggagcctattggtgttctcaaccatgtttttgttctacgcgagtacatgagagactgcatcataggaaatttcaggagaagatttcatagtatgattagaactgagaactgcattcagcgaccatcaatcatagaatctcttctaagaagacatctgggcatcatccatctagcagagcagcatattagtatggaccttactgaaggcatacgtgaagtgctgctagctgagagttatactggtccatttcccaatcttcaaatgtttgagactccagtggggacacaaggaggggggtctgccgttgagatgatatgcaactggtatattgagaatgtagtaaaggacgcttctcgcattggagttgcttttgatgcaatccaaaattgcttcaggagctcacagcctattggtggtggatgtttggctgaatcatttacagataaaagagaaatgaaatcacttgttcgtctttttggtggctatggaatagataaaatggataagatgctaagggagcatacgtctgcgcttttaaactgtatcgattcagcattgaggtcaaatcgtgatgccttagagggcctagctggaactgtaaattccggcgataggattgaaagggatgtgaacctgaaacaaattattgacctcgaaacactggctgacctctgtattcaagcagggcaggcaataactttccgtcggctgttggttgaggccgtcggagcagtccttgaagagaaagtgcctctgatatattctctgctcaaaggattagccttgcagttgccagacgaggtacctgataaaaatgagataattagattgagaaaggttgcgagcagtgttggtgttggcgacaaacatgatgctgagtgggtacactctattctggcagacgctggtgcagctaatgataattcttggatcctacttccatacctttgtgctgcattcatggtgtccaacatttggaacggtgctgtttatgatgtcaatataggtggactcagtaacaatttgcactgcctagcaaggtgtgtaagtgctgtgattgggggaagcgaatacactcgggtcgaaagggagcagcgaataaattctctttcaaatgtgcatacagatgagctgcaagaggccgagttaccgagccgtgtctcagcagaagcaaatatcaaatcttgtatgcagatctacgtcaaactgtctgcagggatcgtcctggattcatggaacgacacaagcaggcagcacatcgtcccgaagctgacattcctggaccagctctgcgagctgtccccgtacgtgccaaggagcaccttagaagctcacatcccatacaccatcctgcgctcgatataccaccagctgtacggaggctctctgctggcctcggaaccggcggagcagtccccaaggcagtcgcctctcatctctctggcacacgcgtccccgtccgcaaggcagatgcagaaccgaccagagacaacacccaggtcccacaccttcgacccaggctactacagctcgtcggggtcccagcacgacgatggctacgacgcggataggaggaccggacggctgctgcggagcttgaggcgctctggaccgctcgacttcggtgcgagcagaaaggcgaagaagttcgtcgagggctccagctccgggagcagccatggagctggctcgctgcagaggttcgcagtgtccagatctggccctctatcgtacagatagggccgcatgtaatgtaaactctagagagcagtagatcttcctatgcgtgctggtttacgtagctagcagtagcaacagcagcagctagttgtgctgtaagtaaaacccattaattgcttaatttgtgttgactgtcgttaggcaagtgatttgaattagctgttgctcgtttggtttgtgtatcaacaatacaattgttcgttgatttttcttgatagcaaagtaaagtaaaccaaccttctcttgaaagaaagaaatagagagaaagattagacggag

SEQ ID NO: 15502 - DNA, 4633 bp, Zea Mays
cgcaaccaccgcatccgtcctcgtctggtccggttgcctactcccctcccactgccccgctgctgctgcctccccgcgcaatggcgccgagatccccgcgctgagcgagcctcccgggggtcgacctccgaaccggcgctgccgtcccgcagtgcacttgaagaccaggcagctgttctctactcaaggaagagatggcccatgtttcgttcaaaagcaaagatgtggacagcggcatgtcccggtggtctgaatacctaagtgttgaagagccaattccttccgcaatggcaacctggaggaacatgagcgctgatgcgccgcaaggctcttctgctggtagccacaaacatcttcagatggagccggtggttcagctgtccaaggttgcggaaggcttgctggccaaaatgtaccggctgaacagcatcctggactatccagatccaaacacgcacacattctcggatgcattttggaaagctggtgtctttccaaatttccccaaaatttgcatcacgatgtcaaaaaaatttccggaacatcctaacaagctgcagctagaaagggtagataagtttggtcttgatgctttaaacgagaatgctgaaggttacatgcacaatcttgagcagtggatcctgttgcttcttgatttgctggcatttcgtgaacaagctttgcgacttattttggatttgagcagcacggtcataacattgctgccacaccaaaactctttaattcttcatgcttttatggatctgttttgttcatttgtccgagtgaatcttttctctgacaagatgccaagaaagatgatcctccaggtttataacatcttgcacataatgctaaagggtggtcgtgattgtgagttttatcaccgactggttcagtttgtggactcttatgatccacctatcaaggggttgcatgaagatcttaattttgtgagcccaagaattggagaggtcctggaagctgttggcccaattatatttctttcaactgatacaaaaaagttaaggaacgaaggtttcctcagtccatttcatccacgttatccagacatcctaacaaattctgcccatccaatgggcccaagacttggctaatgtcacatcataccgtgagtgggttcttctaggatatcttgtttgtcctgatgaactacttagggtgaccagtatagatgttgccatggttgttctgaaagagaacttaatacttcctctgttcagagatgagtacatcttacttcatgaaaattatcaactttatgttcttccaaaagttctagaatcgaagagaatggctaaatctggccgaactaagcaaaaggaagctgatctggagtacaatgttgcaaagcaggttgagagaatgttaacggaagtgcatgagcaagcactggtgtcatgtgatgctatgcatcgtgagaggagaattcttcttaagcaggaaattggaaggatggttttatttttcactgatcaacctagcctcctagcacctaatattcagatggttttttctgctcttgctttgtctcaatgcgaggtgatttggtacttccaacatgtggggattgcatcatcaaaatctactcggttgaaaactgttgacattgatgcgacagacccaactattggtttcttactagatggaataggcaaactttgttgcctggttcgtaaatacatagcagcaataaaaggttatgccttatcatatttgttatccagtgctggaagaatacggttcttacttggtactccaggaatggttgctcttgacctagatgcgacactgaaaggcctttttcagcaagtcctccattgtctggagaacattccaaaacctcagggggaaagtgttcctgacattaccgctgacttggctgatttgcgtaagcactggctgtcaatcttgatgatagtcacatcttcacgatcctcgataaacattaagcacttggagaaggctactgtgtctactgggaaggagggtttggtgtcagaaggcaatgctgcatataattggtcaagatgtgttgatgaacttgagagccaactctccaaacatggaagccttaaaaaactctacttttatcatcagcatcttaccacggtcttcagaaatacaatgtttggcccagaaggtcgtccacagcattgttgtgcttggcttggagccgcttgcagttttccagaatgtgcttctgcaattattcctgaagaggttaacaaaattggcagagattctatctcttatgtggagtcccttatcgagtctatcatgggtgggttggaaggtttgataaatattctagattcagaaggtggatttggctcattagagatgcagctttccccagagcaagcagctcttcgcttaaataacacaagagcaaagggtgtttcaagcttgttaactccaggatatgagagctatcctgataacagttcatcaattaagatgctggaagctgctatgcaaaggctgacaagtttgtgttctgttctaaatgacatggagcctattggtgttctcaaccatgtttttgttctacgcgagtacatgagagactgcatcataggaaatttcaggagaagatttcatagtatgattagaactgagaactgcattcagcgaccatcaatcatagaatctcttctaagaagacatctgggcatcatccatctagcagagcagcatattagtatggaccttactgaaggcatacgtgaagtgctgctagctgagagttatactggtccatttcccaatcttcaaatgtttgagactccagtggggacacaaggaggggggtctgccgttgagatgatatgcaactggtatattgagaatgtagtaaaggacgcttctcgcattggagttgcttttgatgcaatccaaaattgcttcaggagctcacagcctattggtggtggatgtttggctgaatcatttacagataaaagagaaatgaaatcacttgttcgtctttttggtggctatggaatagataaaatggataagatgctaagggagcatacgtctgcgcttttaaactgtatcgattcagcattgaggtcaaatcgtgatgccttagagggcctagctggaactgtaaattccggcgataggattgaaagggatgtgaacctgaaacaaattattgacctcgaaacactggctgacctctgtattcaagcagggcaggcaataactttccgtcggctgttggttgaggccgtcggagcagtccttgaagagaaagtgcctctgatatattctctgctcaaaggattagccttgcagttgccagacgaggtacctgataaaaatgagataattagattgagaaaggttgcgagcagtgttggtgttggcgacaaacatgatgctgagtgggtacactctattctggcagacgctggtgcagctaatgataattcttggatcctacttccatacctttgtgctgcattcatggtgtccaacatttggaacggtgctgtttatgatgtcaatataggtggactcagtaacaatttgcactgcctagcaaggtatggactgactctatgtttgatgtcaaaaatcgttagttgtgggtatgtaagtgctgtgattgtatttgtgcaggtgtgtaagtgctgtgattgggggaagcgaatacactcgggtcgaaagggagcagcgaataaattctctttcaaatgtgcatacagatgagctgcaagaggccgagttaccgagccgtgtctcagcagaagcaaatatcaaatcttgtatgcagatctacgtcaaactgtctgcagggatcgtcctggattcatggaacgacacaagcaggcagcacatcgtcccgaagctgacattcctggaccagctctgcgagctgtccccgtacgtgccaaggagcaccttagaagctcacatcccatacaccatcctgcgctcgatataccaccagctgtacggaggctctctgctggcctcggaaccggcggagcagtccccaaggcagtcgcctctcatctctctggcacacgcgtccccgtccgcaaggcagatgcagaaccgaccagagacaacacccaggtcccacaccttcgacccaggctactacagctcgtcggggtcccagcacgacgatggctacgacgcggataggaggaccggacggctgctgcggagcttgaggcgctctggaccgctcgacttcggtgcgagcagaaaggcgaagaagttcgtcgagggctccagctccgggagcagccatggagctggctcgctgcagaggttcgcagtgtccagatctggccctctatcgtacagatagggccgcatgtaatgtaaactctagagagcagtagatcttcctatgcgtgctggtttacgtagctagcagtagcaacagcagcagctagttgtgctgtaagtaaaacccattaattgcttaatttgtgttgactgtcgttaggcaagtgatttgaattagctgttgctcgtttggtttgtgtatcaacaatacaattgttcgttgatttttcttgatagcaaagtaaagtaaaccaaccttctcttgaaagaaagaaatagagagaaagattagacggag

SEQ ID NO: 15503 - DNA, 4522 bp, Zea Mays
cgcaaccaccgcatccgtcctcgtctggtccggttgcctactcccctcccactgccccgctgctgctgcctccccgcgcaatggcgccgagatccccgcgctgagcgagcctcccgggggtcgacctccgaaccggcgctgccgtcccgcagtgcacttgaagaccaggcagctgttctctactcaaggaagagatggcccatgtttcgttcaaaagcaaagatgtggacagcggcatgtcccggtggtctgaatacctaagtgttgaagagccaattccttccgcaatggcaacctggaggaacatgagcgctgatgcgccgcaaggctcttctgctggtagccacaaacatcttcagatggagccggtggttcagctgtccaaggttgcggaaggcttgctggccaaaatgtaccggctgaacagcatcctggactatccagatccaaacacgcacacattctcggatgcattttggaaagctggtgtctttccaaatttccccaaaatttgcatcacgatgtcaaaaaaatttccggaacatcctaacaagctgcagctagaaagggtagataagtttggtcttgatgctttaaacgagaatgctgaaggttacatgcacaatcttgagcagtggatcctgttgcttcttgatttgctggcatttcgtgaacaagctttgcgacttattttggatttgagcagcacggtcataacattgctgccacaccaaaactctttaattcttcatgcttttatggatctgttttgttcatttgtccgagtgaatcttttctctgacaagatgccaagaaagatgatcctccaggtttataacatcttgcacataatgctaaagggtggtcgtgattgtgagttttatcaccgactggttcagtttgtggactcttatgatccacctatcaaggggttgcatgaagatcttaattttgtgagcccaagaattggagaggtcctggaagctgttggcccaattatatttctttcaactgatacaaaaaagttaaggaacgaaggtttcctcagtccatttcatccacgttatccagacatcctaacaaattctgcccatccaatgagggcccaagacttggctaatgtcacatcataccgtgagtgggttcttctaggatatcttgtttgtcctgatgaactacttagggtgaccagtatagatgttgccatggttgttctgaaagagaacttaatacttcctctgttcagagatgagtacatcttacttcatgaaaattatcaactttatgttcttccaaaagttctagaatcgaagagaatggctaaatctggccgaactaagcaaaaggaagctgatctggagtacaatgttgcaaagcaggttgagagaatgttaacggaagtgcatgagcaagcactggtgtcatgtgatgctatgcatcgtgagaggagaattcttcttaagcaggaaattggaaggatggttttatttttcactgatcaacctagcctcctagcacctaatattcagatggttttttctgctcttgctttgtctcaatgcgaggtgatttggtacttccaacatgtggggattgcatcatcaaaatctactcggttgaaaactgttgacattgatgcgacagacccaactattggtttcttactagatggaataggcaaactttgttgcctggttcgtaaatacatagcagtgctggaagaatacggttcttacttggtactccaggaatggttgctcttgacctagatgcgacactgaaaggcctttttcagcaagtcctccattgtctggagaacattccaaaacctcagggggaaagtgttcctgacattaccgctgacttggctgatttgcgtaagcactggctgtcaatcttgatgatagtcacatcttcacgatcctcgataaacattaagcacttggagaaggctactgtgtctactgggaaggagggtttggtgtcagaaggcaatgctgcatataattggtcaagatgtgttgatgaacttgagagccaactctccaaacatggaagccttaaaaaactctacttttatcatcagcatcttaccacggtcttcagaaatacaatgtttggcccagaaggtcgtccacagcattgttgtgcttggcttggagccgcttgcagttttccagaatgtgcttctgcaattattcctgaagaggttaacaaaattggcagagattctatctcttatgtggagtcccttatcgagtctatcatgggtgggttggaaggtttgataaatattctagattcagaaggtggatttggctcattagagatgcagctttccccagagcaagcagctcttcgcttaaataacacaagagcaaagggtgtttcaagcttgttaactccaggatatgagagctatcctgataacagttcatcaattaagatgctggaagctgctatgcaaaggctgacaagtttgtgttctgttctaaatgacatggagcctattggtgttctcaaccatgtttttgttctacgcgagtacatgagagactgcatcataggaaatttcaggagaagatttcatagtatgattagaactgagaactgcattcagcgaccatcaatcatagaatctcttctaagaagacatctgggcatcatccatctagcagagcagcatattagtatggaccttactgaaggcatacgtgaagtgctgctagctgagagttatactggtccatttcccaatcttcaaatgtttgagactccagtggggacacaaggaggggggtctgccgttgagatgatatgcaactggtatattgagaatgtagtaaaggacgcttctcgcattggagttgcttttgatgcaatccaaaattgcttcaggagctcacagcctattggtggtggatgtttggctgaatcatttacagataaaagagaaatgaaatcacttgttcgtctttttggtggctatggaatagataaaatggataagatgctaagggagcatacgtctgcgcttttaaactgtatcgattcagcattgaggtcaaatcgtgatgccttagagggcctagctggaactgtaaattccggcgataggattgaaagggatgtgaacctgaaacaaattattgacctcgaaacactggctgacctctgtattcaagcagggcaggcaataactttccgtcggctgttggttgaggccgtcggagcagtccttgaagagaaagtgcctctgatatattctctgctcaaaggattagccttgcagttgccagacgaggtacctgataaaaatgagataattagattgagaaaggttgcgagcagtgttggtgttggcgacaaacatgatgctgagtgggtacactctattctggcagacgctggtgcagctaatgataattcttggatcctacttccatacctttgtgctgcattcatggtgtccaacatttggaacggtgctgtttatgatgtcaatataggtggactcagtaacaatttgcactgcctagcaaggtgtgtaagtgctgtgattgggggaagcgaatacactcgggtcgaaagggagcagcgaataaattctctttcaaatgtgcatacagatgagctgcaagaggccgagttaccgagccgtgtctcagcagaagcaaatatcaaatcttgtatgcagatctacgtcaaactgtctgcagggatcgtcctggattcatggaacgacacaagcaggcagcacatcgtcccgaagctgacattcctggaccagctctgcgagctgtccccgtacgtgccaaggagcaccttagaagctcacatcccatacaccatcctgcgctcgatataccaccagctgtacggaggctctctgctggcctcggaaccggcggagcagtccccaaggcagtcgcctctcatctctctggcacacgcgtccccgtccgcaaggcagatgcagaaccgaccagagacaacacccaggtcccacaccttcgacccaggctactacagctcgtcggggtcccagcacgacgatggctacgacgcggataggaggaccggacggctgctgcggagcttgaggcgctctggaccgctcgacttcggtgcgagcagaaaggcgaagaagttcgtcgagggctccagctccgggagcagccatggagctggctcgctgcagaggttcgcagtgtccagatctggccctctatcgtacagatagggccgcatgtaatgtaaactctagagagcagtagatcttcctatgcgtgctggtttacgtagctagcagtagcaacagcagcagctagttgtgctgtaagtaaaacccattaattgcttaatttgtgttgactgtcgttaggcaagtgatttgaattagctgttgctcgtttggtttgtgtatcaacaatacaattgttcgttgatttttcttgatagcaaagtaaagtaaaccaaccttctcttgaaagaaagaaatagagagaaagattagacggag

SEQ ID NO: 15504 - DNA, 4618 bp, Zea Mays
cgcaaccaccgcatccgtcctcgtctggtccggttgcctactcccctcccactgccccgctgctgctgcctccccgcgcaatggcgccgagatccccgcgctgagcgagcctcccgggggtcgacctccgaaccggcgctgccgtcccgcagtgcacttgaagaccaggcagctgttctctactcaaggaagagatggcccatgtttcgttcaaaagcaaagatgtggacagcggcatgtcccggtggtctgaatacctaagtgttgaagagccaattccttccgcaatggcaacctggaggaacatgagcgctgatgcgccgcaaggctcttctgctggtagccacaaacatcttcagatggagccggtggttcagctgtccaaggttgcggaaggcttgctggccaaaatgtaccggctgaacagcatcctggactatccagatccaaacacgcacacattctcggatgcattttggaaagctggtgtctttccaaatttccccaaaatttgcatcacgatgtcaaaaaaatttccggaacatcctaacaagctgcagctagaaagggtagataagtttggtcttgatgctttaaacgagaatgctgaaggttacatgcacaatcttgagcagtggatcctgttgcttcttgatttgctggcatttcgtgaacaagctttgcgacttattttggatttgagcagcacggtcataacattgctgccacaccaaaactctttaattcttcatgcttttatggatctgttttgttcatttgtccgagtgaatcttttctctgacaagatgccaagaaagatgatcctccaggtttataacatcttgcacataatgctaaagggtggtcgtgattgtgagttttatcaccgactggttcagtttgtggactcttatgatccacctatcaaggggttgcatgaagatcttaattttgtgagcccaagaattggagaggtcctggaagctgttggcccaattatatttctttcaactgatacaaaaaagttaaggaacgaaggtttcctcagtccatttcatccacgttatccagacatcctaacaaattctgcccatccaatgagggcccaagacttggctaatgtcacatcataccgtgagtgggttcttctaggatatcttgtttgtcctgatgaactacttagggtgaccagtatagatgttgccatggttgttctgaaagagaacttaatacttcctctgttcagagatgagtacatcttacttcatgaaaattatcaactttatgttcttccaaaagttctagaatcgaagagaatggctaaatctggccgaactaagcaaaaggaagctgatctggagtacaatgttgcaaagcagggaagtgcatgagcaagcactggtgtcatgtgatgctatgcatcgtgagaggagaattcttcttaagcaggaaattggaaggatggttttatttttcactgatcaacctagcctcctagcacctaatattcagatggttttttctgctcttgctttgtctcaatgcgaggtgatttggtacttccaacatgtggggattgcatcatcaaaatctactcggttgaaaactgttgacattgatgcgacagacccaactattggtttcttactagatggaataggcaaactttgttgcctggttcgtaaatacatagcagcaataaaaggttatgccttatcatatttgttatccagtgctggaagaatacggttcttacttggtactccaggaatggttgctcttgacctagatgcgacactgaaaggcctttttcagcaagtcctccattgtctggagaacattccaaaacctcagggggaaagtgttcctgacattaccgctgacttggctgatttgcgtaagcactggctgtcaatcttgatgatagtcacatcttcacgatcctcgataaacattaagcacttggagaaggctactgtgtctactgggaaggagggtttggtgtcagaaggcaatgctgcatataattggtcaagatgtgttgatgaacttgagagccaactctccaaacatggaagccttaaaaaactctacttttatcatcagcatcttaccacggtcttcagaaatacaatgtttggcccagaaggtcgtccacagcattgttgtgcttggcttggagccgcttgcagttttccagaatgtgcttctgcaattattcctgaagaggttaacaaaattggcagagattctatctcttatgtggagtcccttatcgagtctatcatgggtgggttggaaggtttgataaatattctagattcagaaggtggatttggctcattagagatgcagctttccccagagcaagcagctcttcgcttaaataacacaagagcaaagggtgtttcaagcttgttaactccaggatatgagagctatcctgataacagttcatcaattaagatgctggaagctgctatgcaaaggctgacaagtttgtgttctgttctaaatgacatggagcctattggtgttctcaaccatgtttttgttctacgcgagtacatgagagactgcatcataggaaatttcaggagaagatttcatagtatgattagaactgagaactgcattcagcgaccatcaatcatagaatctcttctaagaagacatctgggcatcatccatctagcagagcagcatattagtatggaccttactgaaggcatacgtgaagtgctgctagctgagagttatactggtccatttcccaatcttcaaatgtttgagactccagtggggacacaaggaggggggtctgccgttgagatgatatgcaactggtatattgagaatgtagtaaaggacgcttctcgcattggagttgcttttgatgcaatccaaaattgcttcaggagctcacagcctattggtggtggatgtttggctgaatcatttacagataaaagagaaatgaaatcacttgttcgtctttttggtggctatggaatagataaaatggataagatgctaagggagcatacgtctgcgcttttaaactgtatcgattcagcattgaggtcaaatcgtgatgccttagagggcctagctggaactgtaaattccggcgataggattgaaagggatgtgaacctgaaacaaattattgacctcgaaacactggctgacctctgtattcaagcagggcaggcaataactttccgtcggctgttggttgaggccgtcggagcagtccttgaagagaaagtgcctctgatatattctctgctcaaaggattagccttgcagttgccagacgaggtacctgataaaaatgagataattagattgagaaaggttgcgagcagtgttggtgttggcgacaaacatgatgctgagtgggtacactctattctggcagacgctggtgcagctaatgataattcttggatcctacttccatacctttgtgctgcattcatggtgtccaacatttggaacggtgctgtttatgatgtcaatataggtggactcagtaacaatttgcactgcctagcaaggtatggactgactctatgtttgatgtcaaaaatcgttagttgtgggtatgtaagtgctgtgattgtatttgtgcaggtgtgtaagtgctgtgattgggggaagcgaatacactcgggtcgaaagggagcagcgaataaattctctttcaaatgtgcatacagatgagctgcaagaggccgagttaccgagccgtgtctcagcagaagcaaatatcaaatcttgtatgcagatctacgtcaaactgtctgcagggatcgtcctggattcatggaacgacacaagcaggcagcacatcgtcccgaagctgacattcctggaccagctctgcgagctgtccccgtacgtgccaaggagcaccttagaagctcacatcccatacaccatcctgcgctcgatataccaccagctgtacggaggctctctgctggcctcggaaccggcggagcagtccccaaggcagtcgcctctcatctctctggcacacgcgtccccgtccgcaaggcagatgcagaaccgaccagagacaacacccaggtcccacaccttcgacccaggctactacagctcgtcggggtcccagcacgacgatggctacgacgcggataggaggaccggacggctgctgcggagcttgaggcgctctggaccgctcgacttcggtgcgagcagaaaggcgaagaagttcgtcgagggctccagctccgggagcagccatggagctggctcgctgcagaggttcgcagtgtccagatctggccctctatcgtacagatagggccgcatgtaatgtaaactctagagagcagtagatcttcctatgcgtgctggtttacgtagctagcagtagcaacagcagcagctagttgtgctgtaagtaaaacccattaattgcttaatttgtgttgactgtcgttaggcaagtgatttgaattagctgttgctcgtttggtttgtgtatcaacaatacaattgttcgttgatttttcttgatagcaaagtaaagtaaaccaaccttctcttgaaagaaagaaatagagagaaagattagacggag

SEQ ID NO: 15505 - DNA, 4625 bp, Zea Mays
cgcaaccaccgcatccgtcctcgtctggtccggttgcctactcccctcccactgccccgctgctgctgcctccccgcgcaatggcgccgagatccccgcgctgagcgagcctcccgggggtcgacctccgaaccggcgctgccgtcccgcagtgcacttgaagaccaggcagctgttctctactcaaggaagagatggcccatgtttcgttcaaaagcaaagatgtggacagcggcatgtcccggtggtctgaatacctaagtgttgaagagccaattccttccgcaatggcaacctggaggaacatgagcgctgatgcgccgcaaggctcttctgctggtagccacaaacatcttcagatggagccggtggttcagctgtccaaggttgcggaaggcttgctggccaaaatgtaccggctgaacagcatcctggactatccagatccaaacacgcacacattctcggatgcattttggaaagctggtgtctttccaaatttccccaaaatttgcatcacgatgtcaaaaaaatttccggaacatcctaacaagctgcagctagaaagggtagataagtttggtcttgatgctttaaacgagaatgctgaaggttacatgcacaatcttgagcagtggatcctgttgcttcttgatttgctggcatttcgtgaacaagctttgcgacttattttggatttgagcagcacggtcataacattgctgccacaccaaaactctttaattcttcatgcttttatggatctgttttgttcatttgtccgagtgaatcttttctctgacaagatgccaagaaagatgatcctccaggtttataacatcttgcacataatgctaaagggtggtcgtgattgtgagttttatcaccgactggttcagtttgtggactcttatgatccacctatcaaggggttgcatgaagatcttaattttgtgagcccaagaattggagaggtcctggaagctgttggcccaattatatttctttcaactgatacaaaaaagttaaggaacgaaggtttcctcagtccatttcatccacgttatccagacatcctaacaaattctgcccatccaatgagggcccaagacttggctaatgtcacatcataccgtgagtgggttcttctaggatatcttgtttgtcctgatgaactacttagggtgaccagtatagatgttgccatggttgttctgaaagagaacttaatacttcctctgttcagagatgagtacatcttacttcatgaaaattatcaactttatgttcttccaaaagttctagaatcgaagagaatggctaaatctggccgaactaagcaaaaggaagctgatctggagtacaatgttgcaaagcaggttgagagaatgttaacggaagtgcatgagcaagcactggtgtcatgtgatgctatgcatcgtgagaggagaattcttcttaagcaggaaattggaaggatggttttatttttcactgatcaacctagcctcctagcacctaatattcagatggttttttctgctcttgctttgtctcaatgcgaggtgatttggtacttccaacatgtggggattgcatcatcaaaatctactcggttgaaaactgttgacattgatgcgacagacccaactattggtttcttactagatggaataggcaaactttgttgcctggttcgtaaatacatagcagcaataaaaggttatgccttatcatatttgttatccagtgctggaagaatacggttcttacttggtactccaggaatggttgctcttgacctagatgcgacactgaaaggcctttttcagcaagtcctccattgtctggagaacattccaaaacctcagggggaaagtgttcctgacattaccgctgacttggctgatttgcgtaagcactggctgtcaatcttgatgatagtcacatcttcacgatcctcgataaacattaagcacttggagaaggctactgtgtctactgggaaggagggtttggtgtcagaaggcaatgctgcatataattggtcaagatgtgttgatgaacttgagagccaactctccaaacatggaagccttaaaaaactctacttttatcatcagcatcttaccacggtcttcagaaatacaatgtttggcccagaaggtcgtccacagcattgttgtgcttggcttggagccgcttgcagttttccagaatgtgcttctgcaattattcctgaagaggttaacaaaattggcagagattctatctcttatgtggagtcccttatcgagtctatcatgggtgggttggaaggtttgataaatattctagattcagaaggtggatttggctcattagagatgcagagcaagcagctcttcgcttaaataacacaagagcaaagggtgtttcaagcttgttaactccaggatatgagagctatcctgataacagttcatcaattaagatgctggaagctgctatgcaaaggctgacaagtttgtgttctgttctaaatgacatggagcctattggtgttctcaaccatgtttttgttctacgcgagtacatgagagactgcatcataggaaatttcaggagaagatttcatagtatgattagaactgagaactgcattcagcgaccatcaatcatagaatctcttctaagaagacatctgggcatcatccatctagcagagcagcatattagtatggaccttactgaaggcatacgtgaagtgctgctagctgagagttatactggtccatttcccaatcttcaaatgtttgagactccagtggggacacaaggaggggggtctgccgttgagatgatatgcaactggtatattgagaatgtagtaaaggacgcttctcgcattggagttgcttttgatgcaatccaaaattgcttcaggagctcacagcctattggtggtggatgtttggctgaatcatttacagataaaagagaaatgaaatcacttgttcgtctttttggtggctatggaatagataaaatggataagatgctaagggagcatacgtctgcgcttttaaactgtatcgattcagcattgaggtcaaatcgtgatgccttagagggcctagctggaactgtaaattccggcgataggattgaaagggatgtgaacctgaaacaaattattgacctcgaaacactggctgacctctgtattcaagcagggcaggcaataactttccgtcggctgttggttgaggccgtcggagcagtccttgaagagaaagtgcctctgatatattctctgctcaaaggattagccttgcagttgccagacgaggtacctgataaaaatgagataattagattgagaaaggttgcgagcagtgttggtgttggcgacaaacatgatgctgagtgggtacactctattctggcagacgctggtgcagctaatgataattcttggatcctacttccatacctttgtgctgcattcatggtgtccaacatttggaacggtgctgtttatgatgtcaatataggtggactcagtaacaatttgcactgcctagcaaggtatggactgactctatgtttgatgtcaaaaatcgttagttgtgggtatgtaagtgctgtgattgtatttgtgcaggtgtgtaagtgctgtgattgggggaagcgaatacactcgggtcgaaagggagcagcgaataaattctctttcaaatgtgcatacagatgagctgcaagaggccgagttaccgagccgtgtctcagcagaagcaaatatcaaatcttgtatgcagatctacgtcaaactgtctgcagggatcgtcctggattcatggaacgacacaagcaggcagcacatcgtcccgaagctgacattcctggaccagctctgcgagctgtccccgtacgtgccaaggagcaccttagaagctcacatcccatacaccatcctgcgctcgatataccaccagctgtacggaggctctctgctggcctcggaaccggcggagcagtccccaaggcagtcgcctctcatctctctggcacacgcgtccccgtccgcaaggcagatgcagaaccgaccagagacaacacccaggtcccacaccttcgacccaggctactacagctcgtcggggtcccagcacgacgatggctacgacgcggataggaggaccggacggctgctgcggagcttgaggcgctctggaccgctcgacttcggtgcgagcagaaaggcgaagaagttcgtcgagggctccagctccgggagcagccatggagctggctcgctgcagaggttcgcagtgtccagatctggccctctatcgtacagatagggccgcatgtaatgtaaactctagagagcagtagatcttcctatgcgtgctggtttacgtagctagcagtagcaacagcagcagctagttgtgctgtaagtaaaacccattaattgcttaatttgtgttgactgtcgttaggcaagtgatttgaattagctgttgctcgtttggtttgtgtatcaacaatacaattgttcgttgatttttcttgatagcaaagtaaagtaaaccaaccttctcttgaaagaaagaaatagagagaaagattagacggag

SEQ ID NO: 15506 - DNA, 4543 bp, Zea Mays
cgacgaatccggcactcgcaaccaccgcatccgtcctcgtctggtccggttgcctactcccctcccactgccccgctgctgctgcctccccgcgcaatggcgccgagatccccgcgctgagcgagcctcccgggggtcgacctccgaaccggcgctgccgtcccgcagtgcacttgaagaccaggcagctgttctctactcaaggaagagatggcccatgtttcgttcaaaagcaaagatgtggacagcggcatgtcccggtggtctgaatacctaagtgttgaagagccaattccttccgcaatggcaacctggaggaacatgagcgctgatgcgccgcaaggctcttctgctggtagccacaaacatcttcagatggagccggtggttcagctgtccaaggttgcggaaggcttgctggccaaaatgtaccggctgaacagcatcctggactatccagatccaaacacgcacacattctcggatgcattttggaaagctggtgtctttccaaatttccccaaaatttgcatcacgatgtcaaaaaaatttccggaacatcctaacaagctgcagctagaaagggtagataagtttggtcttgatgctttaaacgagaatgctgaaggttacatgcacaatcttgagcagtggatcctgttgcttcttgatttgctggcatttcgtgaacaagctttgcgacttattttggatttgagcagcacggtcataacattgctgccacaccaaaactctttaattcttcatgcttttatggatctgttttgttcatttgtccgagtgaatcttttctctgacaagatgccaagaaagatgatcctccaggtttataacatcttgcacataatgctaaagggtggtcgtgattgtgagttttatcaccgactggttcagtttgtggactcttatgatccacctatcaaggggttgcatgaagatcttaattttgtgagcccaagaattggagaggtcctggaagctgttggcccaattatatttctttcaactgatacaaaaaagttaaggaacgaaggtttcctcagtccatttcatccacgttatccagacatcctaacaaattctgcccatccaatggttgttctgaaagagaacttaatacttcctctgttcagagatgagtacatcttacttcatgaaaattatcaactttatgttcttccaaaagttctagaatcgaagagaatggctaaatctggccgaactaagcaaaaggaagctgatctggagtacaatgttgcaaagcaggttgagagaatgttaacggaagtgcatgagcaagcactggtgtcatgtgatgctatgcatcgtgagaggagaattcttcttaagcaggaaattggaaggatggttttatttttcactgatcaacctagcctcctagcacctaatattcagatggttttttctgctcttgctttgtctcaatgcgaggtgatttggtacttccaacatgtggggattgcatcatcaaaatctactcggttgaaaactgttgacattgatgcgacagacccaactattggtttcttactagatggaataggcaaactttgttgcctggttcgtaaatacatagcagcaataaaaggttatgccttatcatatttgttatccagtgctggaagaatacggttcttacttggtactccaggaatggttgctcttgacctagatgcgacactgaaaggcctttttcagcaagtcctccattgtctggagaacattccaaaacctcagggggaaagtgttcctgacattaccgctgacttggctgatttgcgtaagcactggctgtcaatcttgatgatagtcacatcttcacgatcctcgataaacattaagcacttggagaaggctactgtgtctactgggaaggagggtttggtgtcagaaggcaatgctgcatataattggtcaagatgtgttgatgaacttgagagccaactctccaaacatggaagccttaaaaaactctacttttatcatcagcatcttaccacggtcttcagaaatacaatgtttggcccagaaggtcgtccacagcattgttgtgcttggcttggagccgcttgcagttttccagaatgtgcttctgcaattattcctgaagaggttaacaaaattggcagagattctatctcttatgtggagtcccttatcgagtctatcatgggtgggttggaaggtttgataaatattctagattcagaaggtggatttggctcattagagatgcagctttccccagagcaagcagctcttcgcttaaataacacaagagcaaagggtgtttcaagcttgttaactccaggatatgagagctatcctgataacagttcatcaattaagatgctggaagctgctatgcaaaggctgacaagtttgtgttctgttctaaatgacatggagcctattggtgttctcaaccatgtttttgttctacgcgagtacatgagagactgcatcataggaaatttcaggagaagatttcatagtatgattagaactgagaactgcattcagcgaccatcaatcatagaatctcttctaagaagacatctgggcatcatccatctagcagagcagcatattagtatggaccttactgaaggcatacgtgaagtgctgctagctgagagttatactggtccatttcccaatcttcaaatgtttgagactccagtggggacacaaggaggggggtctgccgttgagatgatatgcaactggtatattgagaatgtagtaaaggacgcttctcgcattggagttgcttttgatgcaatccaaaattgcttcaggagctcacagcctattggtggtggatgtttggctgaatcatttacagataaaagagaaatgaaatcacttgttcgtctttttggtggctatggaatagataaaatggataagatgctaagggagcatacgtctgcgcttttaaactgtatcgattcagcattgaggtcaaatcgtgatgccttagagggcctagctggaactgtaaattccggcgataggattgaaagggatgtgaacctgaaacaaattattgacctcgaaacactggctgacctctgtattcaagcagggcaggcaataactttccgtcggctgttggttgaggccgtcggagcagtccttgaagagaaagtgcctctgatatattctctgctcaaaggattagccttgcagttgccagacgaggtacctgataaaaatgagataattagattgagaaaggttgcgagcagtgttggtgttggcgacaaacatgatgctgagtgggtacactctattctggcagacgctggtgcagctaatgataattcttggatcctacttccatacctttgtgctgcattcatggtgtccaacatttggaacggtgctgtttatgatgtcaatataggtggactcagtaacaatttgcactgcctagcaaggtatggactgactctatgtttgatgtcaaaaatcgttagttgtgggtatgtaagtgctgtgattgtatttgtgcaggtgtgtaagtgctgtgattgggggaagcgaatacactcgggtcgaaagggagcagcgaataaattctctttcaaatgtgcatacagatgagctgcaagaggccgagttaccgagccgtgtctcagcagaagcaaatatcaaatcttgtatgcagatctacgtcaaactgtctgcagggatcgtcctggattcatggaacgacacaagcaggcagcacatcgtcccgaagctgacattcctggaccagctctgcgagctgtccccgtacgtgccaaggagcaccttagaagctcacatcccatacaccatcctgcgctcgatataccaccagctgtacggaggctctctgctggcctcggaaccggcggagcagtccccaaggcagtcgcctctcatctctctggcacacgcgtccccgtccgcaaggcagatgcagaaccgaccagagacaacacccaggtcccacaccttcgacccaggctactacagctcgtcggggtcccagcacgacgatggctacgacgcggataggaggaccggacggctgctgcggagcttgaggcgctctggaccgctcgacttcggtgcgagcagaaaggcgaagaagttcgtcgagggctccagctccgggagcagccatggagctggctcgctgcagaggttcgcagtgtccagatctggccctctatcgtacagatagggccgcatgtaatgtaaactctagagagcagtagatcttcctatgcgtgctggtttacgtagctagcagtagcaacagcagcagctagttgtgctgtaagtaaaacccattaattgcttaatttgtgttgactgtcgttaggcaagtgatttgaattagctgttgctcgtttggtttgtgtatcaacaatacaattgttcgttgatttttcttgatagcaaagtaaagtaaaccaaccttctcttgaaagaaagaaatagagagaaagattagacggag

SEQ ID NO: 15507 - DNA, 4649 bp, Zea Mays
gcagaagtgggccccgccgcgcagcgtcacgagagagggggtggggcgcttgccagtaaattgcgtaggcgtaacgacgaatccggcactcgcaaccaccgcatccgtcctcgtctggtccggttgcctactcccctcccactgccccgctgctgctgcctccccgcgcaatggcgccgagatccccgcgctgagcgagcctcccgggggtcgacctccgaaccggcgctgccgtcccgcagtgcacttgaagaccaggcagctgttctctactcaaggaagagatggcccatgtttcgttcaaaagcaaagatgtggacagcggcatgtcccggtggtctgaatacctaagtgttgaagagccaattccttccgcaatggcaacctggaggaacatgagcgctgatgcgccgcaaggctcttctgctggtagccacaaacatcttcagatggagccggtggttcagctgtccaaggttgcggaaggcttgctggccaaaatgtaccggctgaacagcatcctggactatccagatccaaacacgcacacattctcggatgcattttggaaagctggtgtctttccaaatttccccaaaatttgcatcacgatgtcaaaaaaatttccggaacatcctaacaagctgcagctagaaagggtagataagtttggtcttgatgctttaaacgagaatgctgaaggttacatgcacaatcttgagcagtggatcctgttgcttcttgatttgctggcatttcgtgaacaagctttgcgacttattttggatttgagcagcacggtcataacattgctgccacaccaaaactctttaattcttcatgcttttatggatctgttttgttcatttgtccgagtgaatcttttctctgacaagatgccaagaaagatgatcctccaggtttataacatcttgcacataatgctaaagggtggtcgtgattgtgagttttatcaccgactggttcagtttgtggactcttatgatccacctatcaaggggttgcatgaagatcttaattttgtgagcccaagaattggagaggtcctggaagctgttggcccaattatatttctttcaactgatacaaaaaagttaaggaacgaaggtttcctcagtccatttcatccacgttatccagacatcctaacaaattctgcccatccaatgagggcccaagacttggctaatgtcacatcataccgtgagtgggttcttctaggatatcttgtttgtcctgatgaactacttagggtgaccagtatagatgttgccatggttgttctgaaagagaacttaatacttcctctgttcagagatgagtacatcttacttcatgaaaattatcaactttatgttcttccaaaagttctagaatcgaagagaatggctaaatctggccgaactaagcaaaaggaagctgatctggagtacaatgttgcaaagcaggttgagagaatgttaacggaagtgcatgagcaagcactggtgtcatgtgatgctatgcatcgtgagaggagaattcttcttaagcaggaaattggaaggatggttttatttttcactgatcaacctagcctcctagcacctaatattcagatggttttttctgctcttgctttgtctcaatgcgaggtgatttggtacttccaacatgtggggattgcatcatcaaaatctactcggttgaaaactgttgacattgatgcgacagacccaactattggtttcttactagatggaataggcaaactttgttgcctggttcgtaaatacatagcagcaataaaaggttatgccttatcatatttgttatccagtgctggaagaatacggttcttacttggtactccaggaatggttgctcttgacctagatgcgacactgaaaggcctttttcagcaagtcctccattgtctggagaacattccaaaacctcagggggaaagtgttcctgacattaccgctgacttggctgatttgcgtaagcactggctgtcaatcttgatgatagtcacatcttcacgatcctcgataaacattaagcacttggagaaggctactgtgtctactgggaaggagggtttggtgtcagaaggcaatgctgcatataattggtcaagatgtgttgatgaacttgagagccaactctccaaacatggaagccttaaaaaactctacttttatcatcagcatcttaccacggtcttcagaaatacaatgtttggcccagaaggtcgtccacagcattgttgtgcttggcttggagccgcttgcagttttccagaatgtgcttctgcaattattcctgaagaggttaacaaaattggcagagattctatctcttatgtggagtcccttatcgagtctatcatgggtgggttggaaggtttgataaatattctagattcagaaggtggatttggctcattagagatgcagctttccccagagcaagcagctcttcgcttaaataacacaagagcaaagggtgtttcaagcttgttaactccaggatatgagagctatcctgataacagttcatcaattaagatgctggaagctgctatgcaaaggctgacaagtttgtgttctgttctaaatgacatggagcctattggtgttctcaaccatgtttttgttctacgcgagtacatgagagactgcatcataggaaatttcaggagaagatttcatagtatgattagaactgagaactgcattcagcgaccatcaatcatagaatctcttctaagaagacatctgggcatcatccatctagcagagcagcatattagtatggaccttactgaaggcatacgtgaagtgctgctagctgagagttatactggtccatttcccaatcttcaaatgtttgagactccagtggggacacaaggaggggggtctgccgttgagatgatatgcaactggtatattgagaatgtagtaaaggacgcttctcgcattggagttgcttttgatgcaatccaaaattgcttcaggagctcacagcctattggtggtggatgtttggctgaatcatttacagataaaagagaaatgaaatcacttgttcgtctttttggtggctatggaatagataaaatggataagatgctaagggagcatacgtctgcgcttttaaactgtatcgattcagcattgaggtcaaatcgtgatgccttagagggcctagctggaactgtaaattccggcgataggattgaaagggatgtgaacctgaaacaaattattgacctcgaaacactggctgacctctgtattcaagcagggcaggcaataactttccgtcggctgttggttgaggccgtcggagcagtccttgaagagaaagtgcctctgatatattctctgctcaaaggattagccttgcagttgccagacgaggtacctgataaaaatgagataattagattgagaaaggttgcgagcagtgttggtgttggcgacaaacatgatgctgagtgggtacactctattctggcagacgctggtgcagctaatgataattcttggatcctacttccatacctttgtgctgcattcatggtgtccaacatttggaacggtgctgtttatgatgtcaatataggtggactcagtaacaatttgcactgcctagcaaggtgtgtaagtgctgtgattgggggaagcgaatacactcgggtcgaaagggagcagcgaataaattctctttcaaatgtgcatacagatgagctgcaagaggccgagttaccgagccgtgtctcagcagaagcaaatatcaaatcttgtatgcagatctacgtcaaactgtctgcagggatcgtcctggattcatggaacgacacaagcaggcagcacatcgtcccgaagctgacattcctggaccagctctgcgagctgtccccgtacgtgccaaggagcaccttagaagctcacatcccatacaccatcctgcgctcgatataccaccagctgtacggaggctctctgctggcctcggaaccggcggagcagtccccaaggcagtcgcctctcatctctctggcacacgcgtccccgtccgcaaggcagatgcagaaccgaccagagacaacacccaggtcccacaccttcgacccaggctactacagctcgtcggggtcccagcacgacgatggctacgacgcggataggaggaccggacggctgctgcggagcttgaggcgctctggaccgctcgacttcggtgcgagcagaaaggcgaagaagttcgtcgagggctccagctccgggagcagccatggagctggctcgctgcagaggttcgcagtgtccagatctggccctctatcgtacagatagggccgcatgtaatgtaaactctagagagcagtagatcttcctatgcgtgctggtttacgtagctagcagtagcaacagcagcagctagttgtgctgtaagtaaaacccattaattgcttaatttgtgttgactgtcgttaggcaagtgatttgaattagctgttgctcgtttggtttgtgtatcaacaatacaattgttcgttgatttttcttgatagcaaagtaaagtaaaccaaccttctcttgaaagaaagaaatagagagaaagattagacggag

SEQ ID NO: 15508 - DNA, 1643 bp, Zea Mays
cgcaaccaccgcatccgtcctcgtctggtccggttgcctactcccctcccactgccccgctgctgctgcctccccgcgcaatggcgccgagatccccgcgctgagcgagcctcccgggggtcgacctccgaaccggcgctgccgtcccgcagtgcacttgaagaccaggcagctgttctctactcaaggaagagatggcccatgtttcgttcaaaagcaaagatgtggacagcggcatgtcccggtggtctgaatacctaagtgttgaagagccaattccttccgcaatggcaacctggaggaacatgagcgctgatgcgccgcaaggctcttctgctggtagccacaaacatcttcagatggagccggtggttcagctgtccaaggttgcggaaggcttgctggccaaaatgtaccggctgaacagcatcctggactatccagatccaaacacgcacacattctcggatgcattttggaaagctggtgtctttccaaatttccccaaaatttgcatcacgatgtcaaaaaaatttccggaacatcctaacaagctgcagctagaaagggtagataagtttggtcttgatgctttaaacgagaatgctgaaggttacatgcacaatcttgagcagtggatcctgttgcttcttgatttgctggcatttcgtgaacaagctttgcgacttattttggatttgagcagcacggtcataacattgctgccacaccaaaactctttaattcttcatgcttttatggatctgttttgttcatttgtccgagtgaatcttttctctgacaagatgccaagaaagatgatcctccaggtttataacatcttgcacataatgctaaagggtggtcgtgattgtgagttttatcaccgactggttcagtttgtggactcttatgatccacctatcaaggggttgcatgaagatcttaattttgtgagcccaagaattggagaggtcctggaagctgttggcccaattatatttctttcaactgatacaaaaaagttaaggaacgaaggtttcctcagtccatttcatccacgttatccagacatcctaacaaattctgcccatccaatgagggcccaagacttggctaatgtcacatcataccgtgagtgggttcttctaggatatcttgtttgtcctgatgaactacttagggtgaccagtatagatgttgccatggttgttctgaaagagaacttaatacttcctctgttcagagatgagtacatcttacttcatgaaaattatcaactttatgttcttccaaaagttctagaatcgaagagaatggctaaatctggccgaactaagcaaaaggaagctgatctggagtacaatgttgcaaagcaggttgagagaatgttaacggaagtgcatgagcaagcactggtgtcatgtgatgctatgcatcgtgagaggagaattcttcttaagcaggaaattggaaggatggttttatttttcactgatcaacctagcctcctagcacctaatattcaggacaaaaaacggatcagtccacatggagctccgggataatcactggatcaacgcgatgtgaggctaaatcaccattgcaatccagatacaggagttcatctcactttggatcag

SEQ ID NO: 15509 - DNA, 1568 bp, Zea Mays
cgcaaccaccgcatccgtcctcgtctggtccggttgcctactcccctcccactgccccgctgctgctgcctccccgcgcaatggcgccgagatccccgcgctgagcgagcctcccgggggtcgacctccgaaccggcgctgccgtcccgcagtgcacttgaagaccaggcagctgttctctactcaaggaagagatggcccatgtttcgttcaaaagcaaagatgtggacagcggcatgtcccggtggtctgaatacctaagtgttgaagagccaattccttccgcaatggcaacctggaggaacatgagcgctgatgcgccgcaaggctcttctgctggtagccacaaacatcttcagatggagccggtggttcagctgtccaaggttgcggaaggcttgctggccaaaatgtaccggctgaacagcatcctggactatccagatccaaacacgcacacattctcggatgcattttggaaagctggtgtctttccaaatttccccaaaatttgcatcacgatgtcaaaaaaatttccggaacatcctaacaagctgcagctagaaagggtagataagtttggtcttgatgctttaaacgagaatgctgaaggttacatgcacaatcttgagcagtggatcctgttgcttcttgatttgctggcatttcgtgaacaagctttgcgacttattttggatttgagcagcacggtcataacattgctgccacaccaaaactctttaattcttcatgcttttatggatctgttttgttcatttgtccgagtgaatcttttctctgacaagatgccaagaaagatgatcctccaggtttataacatcttgcacataatgctaaagggtggtcgtgattgtgagttttatcaccgactggttcagtttgtggactcttatgatccacctatcaaggggttgcatgaagatcttaattttgtgagcccaagaattggagaggtcctggaagctgttggcccaattatatttctttcaactgatacaaaaaagttaaggaacgaaggtttcctcagtccatttcatccacgttatccagacatcctaacaaattctgcccatccaatgagggcccaagacttggctaatgtcacatcataccgtgagtgggttcttctaggatatcttgtttgtcctgatgaactacttagggtgaccagtatagatgttgccatggttgttctgaaagagaacttaatacttcctctgttcagagatgagtacatcttacttcatgaaaattatcaactttatgttcttccaaaagttctagaatcgaagagaatggctaaatctggccgaactaagcaaaaggaagctgatctggagtacaatgttgcaaagcaggttgagagaatgttaacggaagtgcatgagcaagcactggtgtcatgtgatgctatgcatcgtgagaggagaattcttcttaagcaggaaattggaaggatggttttatttttcactgatcaacctagcctcctagcacctaatattcagcgacctagcgcggagcttttggagattggaagctctggc

SEQ ID NO: 15510 - DNA, 1569 bp, Zea Mays
cgcaaccaccgcatccgtcctcgtctggtccggttgcctactcccctcccactgccccgctgctgctgcctccccgcgcaatggcgccgagatccccgcgctgagcgagcctcccgggggtcgacctccgaaccggcgctgccgtcccgcagtgcacttgaagaccaggcagctgttctctactcaaggaagagatggcccatgtttcgttcaaaagcaaagatgtggacagcggcatgtcccggtggtctgaatacctaagtgttgaagagccaattccttccgcaatggcaacctggaggaacatgagcgctgatgcgccgcaaggctcttctgctggtagccacaaacatcttcagatggagccggtggttcagctgtccaaggttgcggaaggcttgctggccaaaatgtaccggctgaacagcatcctggactatccagatccaaacacgcacacattctcggatgcattttggaaagctggtgtctttccaaatttccccaaaatttgcatcacgatgtcaaaaaaatttccggaacatcctaacaagctgcagctagaaagggtagataagtttggtcttgatgctttaaacgagaatgctgaaggttacatgcacaatcttgagcagtggatcctgttgcttcttgatttgctggcatttcgtgaacaagctttgcgacttattttggatttgagcagcacggtcataacattgctgccacaccaaaactctttaattcttcatgcttttatggatctgttttgttcatttgtccgagtgaatcttttctctgacaagatgccaagaaagatgatcctccaggtttataacatcttgcacataatgctaaagggtggtcgtgattgtgagttttatcaccgactggttcagtttgtggactcttatgatccacctatcaaggggttgcatgaagatcttaattttgtgagcccaagaattggagaggtcctggaagctgttggcccaattatatttctttcaactgatacaaaaaagttaaggaacgaaggtttcctcagtccatttcatccacgttatccagacatcctaacaaattctgcccatccaatgagggcccaagacttggctaatgtcacatcataccgtgagtgggttcttctaggatatcttgtttgtcctgatgaactacttagggtgaccagtatagatgttgccatgggttgttctgaaagagaacttaatacttcctctgttcagagatgagtacatcttacttcatgaaaattatcaactttatgttcttccaaaagttctagaatcgaagagaatggctaaatctggccgaactaagcaaaaggaagctgatctggagtacaatgttgcaaagcaggttgagagaatgttaacggaagtgcatgagcaagcactggtgtcatgtgatgctatgcatcgtgagaggagaattcttcttaagcaggaaattggaaggatggttttatttttcactgatcaacctagcctcctagcacctaatattcagcgacctagcgcggagcttttggagattggaagctctggc

SEQ ID NO: 15511 - DNA, 651 bp, Zea Mays
attaaccgacggcgtcatctccagctccactccacttgactccgtccccgggcctgggcgaaccctagcgccgccccgccaaggttgcttcagacgatgcagccgaacgaggtcgccgacaaggccattgtcataatgcagcacgccgcgaagcaggtcctgggtacgtgcaaggagaagctccacctggggaagccactcagcgtgtttgaagtgaaggaactaaaagaagcgcttgaagccattgccgaagcactggaccaggactcgctgctttgccaagttgctttggatgcgggtgctcccagcttagtagaagatcactgggacgacgaaggcggagaagccgtggtggcgggtctcccatggcctgaatccccacgtccggaggacttcatgtcccttgaaaagcacatagaaacctactggagcgtcgagtacgactcggacaatatgctgcctagcttatctgattagattaggtggtagatatgatggattaattcttcttcgcaagcaatttttttttcttgcattccttcctcctcctcccaccttccttccctctatttgtaaagctagcacccccggccaatcaatctcttttgaaggatgaaatgttactagatgcatatcctgagaatcatgcaa

SEQ ID NO: 15512 - DNA, 907 bp, Zea Mays
aaagcgtctagacaaggacaatggggggtcgtagtcgtcgtccttctcctgatgtgcaagtcgccgctgtctcggcccagacagcgaccccaagcatctcaagggtgtggagatggagatggaaatatcgtggagagaaatctgcgattatgaaactgccattgttgggctttgacagaatcgccggccattggttggcccattttgtcatctcctcattaatccattcccctgtccattaaccgacggcgtcatctccagctccactccacttgactccgtccccgggcctgggcgaaccctagcgccgccccgccaaggttgcttcagagttctccgtcgtgcagagacgatgcagccgaacgaggtcgccgacaaggccattgtcataatgcagcacgccgcgaagcaggtcctgggtacgtgcaaggagaagctccacctggggaagccactcagcgtgtttgaagtgaaggaactaaaagaagcgcttgaagccattgccgaagcactggaccaggactcgctgctttgccaagttgctttggatgcgggtgctcccagcttagtagaagatcactgggacgacgaaggcggagaagccgtggtggcgggtctcccatggcctgaatccccacgtccggaggacttcatgtcccttgaaaagcacatagaaacctactggagcgtcgagtacgactcggacaatatgctgcctagcttatctgattagattaggtggtagatatgatggattaattcttcttcgcaagcaatttttttttcttgcattccttcctcctcctcccaccttccttccctctatttgtaaagctagcacccccggccaatcaatctcttttgaaggatgaaatgttactagatgcatatcctgagaatcatgcaa

SEQ ID NO: 15513 - DNA, 583 bp, Zea Mays
ttacgagatttatatcgcccaatcgacgatgcagccgaacgaggtcgccgacaaggccattgtcataatgcagcacgccgcgaagcaggtcctgggtacgtgcaaggagaagctccacctggggaagccactcagcgtgtttgaagtgaaggaactaaaagaagcgcttgaagccattgccgaagcactggaccaggactcgctgctttgccaagttgctttggatgcgggtgctcccagcttagtagaagatcactgggacgacgaaggcggagaagccgtggtggcgggtctcccatggcctgaatccccacgtccggaggacttcatgtcccttgaaaagcacatagaaacctactggagcgtcgagtacgactcggacaatatgctgcctagcttatctgattagattaggtggtagatatgatggattaattcttcttcgcaagcaatttttttttcttgcattccttcctcctcctcccaccttccttccctctatttgtaaagctagcacccccggccaatcaatctcttttgaaggatgaaatgttactagatgcatatcctgagaatcatgcaa

SEQ ID NO: 15514 - DNA, 3595 bp, Zea Mays
aaagcacctcgcacctcgcctctcgatccaccattctccgtccgccgtcacccacgcttgctggctccgccgacgcatctcgcaagctgccagcgcccccctcgcccctctccactgtggtccgcagccgcttggagcttgcagcttgcctgttcgtcgtctcggtcccagccggcagccggtcaaccctccaaccccctctctaggcggctaggcagcaagtctcccaggctggcaggctcccagccggcagcggcaggagcccgcacaatctgctcggcccctggcccctaccatgcttggccgcctgggcaccttggtgctaaacctgctgaggcagagagtagaaaggacatgacatcgctctactaactggccaccgttgcagctccagcaagtcgccattgctctagagatccacatgtggttctcggtgcattttcgtatcttttagaattgaactgtgaaaaacacaatggcatcgatcttatctggagcaaggagccttcactcactcgctctgctatcgcggatgttgggcgagacgactcagctcggtccttttaaccgcagcgtgcagcggaggtggagaaagcctgtagattcggcaagaacacgtcttgagggaagaacgagggatcataggctggacaaactaatggttcagctgaggaacttgaggctggccttggctttgcatgaggtgatatctcagcagaggaacggatacgcgtctctccagctcctctcaaggtggaggcatgaggtcgggctgaacattgaggtcggtgctttcctcaagaaatacccccacgtgtttcagacctacgtgcaccctgtcaagaggaaccactgctgcaaggtcacgcagaagatgtccgacttgatcgcagaggaagacgctgtggtcagggagaatgaggtcggcgtagttcagcggctgaagaaacttctcatgctctctgtggatggaactctgaacatgcacgcgttatggctcataagaagggagcttgggcttcctgatgattacaggtcctctatactgccgaaccatcgacatgatttaattctcaaatccccagatactctatcacttttctctagggatgaaacattggctgtagctaaggtcgacgagtggaggaaaagggagtacacagaaaaatggctagctgaatcagagacaaaatatgctttcccgatcaacttcccaactggatttaaggttcaaaaaggtttcagggagaaactcaagaactggcagaggcttccctacaccaaaccttatgagaagaatgattcgcatccgatatgcaacgtggagcggcttgagaaacgcattgttggtgttcttcatgagcttttgagcctgacggtcgaaaggatgatgccacttgagagactgtcacacttcagaagattgtacaccatggaggtaaacctgcgagaattttttctcaagtatccaggcattttctacatctcgacgaaaggaagcacacagacagtcatcctaagggatagttacagtaaaggatatctgattgagcctaaccctgtgtacattgtgcggaggaagatgctggacctggtattatctggatctcgtaacgttggtgaatgccaacaggatagtgcaacttggtcagctgaggagcatgatctgggaagcagccatgggtgccaggataacatatgctaggtggattctgcaattccatactggaacatggagttagaagtgacgcatggaaagaaccaattaactcaaccatgatcttgctgtaatatctacatataaaaatacctactgatatcgtctgcccggggtgaagcgatgcctagctgcggcattgccctgcctagcctcgcctcgtctccggcacgcgaacacccagctcggactctgtaaagaggaagtttaccacaatctctggtggactttctttgctcactgcccctgctcctccatcgctctcgtgcgccactgttctccatggatctcttcaatttgatgctaggtggcaacattgcacctagcaatgctatttttactatgctgatcaaggcatatgctaactgtggaatgctagatagggctatgattatcttcaatgagatgagagcaaggagtgaaacctgatgtggtaacctatttgacagtgattggtgccctttacagaattggtaagatggatggtgctgtggaaaaatttaatcatatgattgatcaaggagtaacacccaaaaaatctacttactgttgcctgattcaagttttttgtattcatggtggtttactgaaagccaaggaattggtttggaaaccatgaataaaggtatgtgtcctgacattgttttcttcagttcgataataaacaacctttgcaaactaggaagggtaatggacgcacaaaatatatttgacttaactgtaaatgttggtctgcatcctactgttgcgatgcatagtatgctgatggtgggtactgtcttgttggcaagatggagaaggcatcaagggtatttgatgctatggtgtctgctggcgttgaaccaaacaatgtagtgtatggtgtacttgttaatggctatcgtaaaattggaaggatcgatgatgagtcttttcaaagaaatgttgcataaaggaataaagccttcaactatttcgtacaacatcatacttgatgggttatttcaggcagggagaacagttcctgcgaaggtgaaattccacgaaatgactgaaagtggtatcacaatggacaaatggacatacaacataggtcttagtgaacattttaaaaacagatgctctgttgaagcaatcttgctttttgaagaattacgtgcaatgaatgtaaagatcaatatcaaaactctcaataccatgatagctggaatgtttcaaaccaggagagttgaagaagctaaggatctgtttgcttctatctcgagaagtgggctggtgccttctgttgtgacttacagtataatgatgacaaatcttataaaaggattggtggaggaggcagatgatatgttttcatccatggagaatgctggccgtgagcctgattctcgattgtgtggttagggaattactagagaaaaatgaaatggtcagggctacaacgtacctgtccaaaattgatgagaggaatttctcacttgagcattcaaccacaacattgttgatcgatctcttctcaagcaaaggggcttgtagggaacacataagatttctccctacaaagtatcgttttcttgcagggggctcgttaatgttcgattgcaagcagcagtcggtgatccagcagctcctctggcgcaaggggcgcctgatagtgatgtgttcgagggggacgcctctgctgtatgccccagtggatcctgcagagtcattcaagttctagagtttgtagattgtctccagccagtgattaacataatcccattacaggtcaaatttattattgggaatcatatacatctaaccagctttcaactcttctttcctccttataagatctatgatatcttcaagtttcttccgtcgaagattcagagaatagctggagcttcaaccaac

SEQ ID NO: 15515 - DNA, 1455 bp, Zea Mays
gcctctcgatccaccattctccgtccgccgtcacccacgcttgctggctccgccgacgcatctcgcaagctgccagcgcccccctcgcccctctccactgtggtccgcagccgcttggagcttgcagcttgcctgttcgtcgtctcggtcccagccggcagccggtcaaccctccaaccccctctctaggcggctaggcagcaagtctcccaggctggcaggctcccagccggcagcggcaggagcccgcacaatctgctcggcccctggcccctaccatgcttggccgcctgggcaccttggtgctaaacctgctgaggcagagagtagaaaggacatgacatcgctctactaactggccaccgcaagcagcagtcggtgatccagcagctcctctggcgcaaggggcgcctgatagtgatgtgttcgagggggacgcctctgctgtatgccccagtggatcctgcagagtcattcaagttctagagtttgtagattgtctccagccagtgattaacataatcccattacaggtttgtttgtctaagcttgttttgtcatatttttttttggtacagttcactgttcactgaacaaattctgctgtttttttggttcaattgctcgcgtaccatacataaatatcgattagttgaggtatgcagtttatttcctgattcagcctaggagtactttaacggcttattggaactggtctaattcagcactggagcaacaagggagcctaagctgcaaaaatgtggattgttccaacctgtgcatgtgttctggtgttagtttcttcagagcggacattgaacttaacagtgcaattttttagaactttgcagcagttttaagcacaagcacgcttcatcgacaataaattaaattcaaatcaacctgctggtttgtgatacgtaaaccatattatccattttcagcaaataaggttggtttgcacttaatttgttgatgatgaagcgtgcttgtgcttgaacctgctgcaaaattctgaaaatttgtactgtaagttcaatgtccgttcagaagaaactaacaccaggacacatgcacaggttgctacaatacacattttcttgcggcttaggctcccttgctactctagggctgaatcagactagttccaataaactgttaagtactcctaggctgaatcaggaaagaaactgcagatctcaactaatcgacatttatgcatggtattcggtgattagtagtattgtgatatgcacaggtcaaatttattattgggaatcatatacatctaaccagctttcaactcttctttcctccttataagatctatgatatcttcaagtttcttccgtcgaagattcagatataaaaagaacagccgatccaatgctgacggtggctcacacatgagtgggctgaaaattttacctattcagaaaagtgttccaactgttc

SEQ ID NO: 15516 - DNA, 3513 bp, Zea Mays
ctcgcacctcgcctctcgatccaccattctccgtccgccgtcacccacgcttgctggctccgccgacgcatctcgcaagctgccagcgcccccctcgcccctctccactgtggtccgcagccgcttggagcttgcagcttgcctgttcgtcgtctcggtcccagccggcagccggtcaaccctccaaccccctctctaggcggctaggcagcaagtctcccaggctggcaggctcccagccggcagcggcaggagcccgcacaatctgctcggcccctggcccctaccatgcttggccgcctgggcaccttggtgctaaacctgctgaggcagagagtagaaaggacatgacatcgctctactaactggccaccgttgcagctccagcaagtcgccattgctctagagatccacatgtggttctcggtgcattttcgtatcttttagaattgaactgtgaaaaacacaatggcatcgatcttatctggagcaaggagccttcactcactcgctctgctatcgcggatgttgggcgagacgactcagctcggtccttttaaccgcagcgtgcagcggaggtggagaaagcctgtagattcggcaagaacacgtcttgagggaagaacgagggatcataggctggacaaactaatggttcagctgaggaacttgaggctggccttggctttgcatgaggtgatatctcagcagaggaacggatacgcgtctctccagctcctctcaaggtggaggcatgaggtcgggctgaacattgaggtcggtgctttcctcaagaaatacccccacgtgtttcagacctacgtgcaccctgtcaagaggaaccactgctgcaaggtcacgcagaagatgtccgacttgatcgcagaggaagacgctgtggtcagggagaatgaggtcggcgtagttcagcggctgaagaaacttctcatgctctctgtggatggaactctgaacatgcacgcgttatggctcataagaagggagcttgggcttcctgatgattacaggtcctctatactgccgaaccatcgacatgatttaattctcaaatccccagatactctatcacttttctctagggatgaaacattggctgtagctaaggtcgacgagtggaggaaaagggagtacacagaaaaatggctagctgaatcagagacaaaatatgctttcccgatcaacttcccaactggatttaaggttcaaaaaggtttcagggagaaactcaagaactggcagaggcttccctacaccaaaccttatgagaagaatgattcgcatccgatatgcaacgtggagcggcttgagaaacgcattgttggtgttcttcatgagcttttgagcctgacggtcgaaaggatgatgccacttgagagactgtcacacttcagaagattgtacaccatggaggtaaacctgcgagaattttttctcaagtatccaggcattttctacatctcgacgaaaggaagcacacagacagtcatcctaagggatagttacagtaaaggatatctgattgagcctaaccctgtgtacattgtgcggaggaagatgctggacctggtattatctggatctcgtaacgttggtgaatgccaacaggatagtgcaacttggtcagctgaggagcatgatctgggaagcagccatgggtgccaggataacatatgctaggtggattctgcaattccatactggaacatggagttagaagtgacgcatggaaagaaccaattaactcaaccatgatcttgctgtaatatctacatataaaaatacctactgatatcgtctgcccggggtgaagcgatgcctagctgcggcattgccctgcctagcctcgcctcgtctccggcacgcgaacacccagctcggactctgtaaagaggaagtttaccacaatctctggtggactttctttgctcactgcccctgctcctccatcgctctcgtgcgccactgttctccatggatctcttcaatttgatgctaggtggcaacattgcacctagcaatgctatttttactatgctgatcaaggcatatgctaactgtggaatgctagatagggctatgattatcttcaatgagatgagagcaaggagtgaaacctgatgtggtaacctatttgacagtgattggtgccctttacagaattggtaagatggatggtgctgtggaaaaatttaatcatatgattgatcaaggagtaacacccaaaaaatctacttactgttgcctgattcaagttttttgtattcatggtggtttactgaaagccaaggaattggtttggaaaccatgaataaagatggagaaggcatcaagggtatttgatgctatggtgtctgctggcgttgaaccaaacaatgtagtgtatggtgtacttgttaatggctatcgtaaaattggaaggatcgatgatgagtcttttcaaagaaatgttgcataaaggaataaagccttcaactatttcgtacaacatcatacttgatgggttatttcaggcagggagaacagttcctgcgaaggtgaaattccacgaaatgactgaaagtggtatcacaatggacaaatggacatacaacataggtcttagtgaacattttaaaaacagatgctctgttgaagcaatcttgctttttgaagaattacgtgcaatgaatgtaaagatcaatatcaaaactctcaataccatgatagctggaatgtttcaaaccaggagagttgaagaagctaaggatctgtttgcttctatctcgagaagtgggctggtgccttctgttgtgacttacagtataatgatgacaaatcttataaaaggattggtggaggaggcagatgatatgttttcatccatggagaatgctggccgtgagcctgattctcgattgtgtggttagggaattactagagaaaaatgaaatggtcagggctacaacgtacctgtccaaaattgatgagaggaatttctcacttgagcattcaaccacaacattgttgatcgatctcttctcaagcaaaggggcttgtagggaacacataagatttctccctacaaagtatcgttttcttgcagggggctcgttaatgttcgattgcaagcagcagtcggtgatccagcagctcctctggcgcaaggggcgcctgatagtgatgtgttcgagggggacgcctctgctgtatgccccagtggatcctgcagagtcattcaagttctagagtttgtagattgtctccagccagtgattaacataatcccattacaggtcaaatttattattgggaatcatatacatctaaccagctttcaactcttctttcctccttataaggtacttgccttcaactaatatatatctatgatatcttcaagtttcttccgtcgaagattcagatataaaaagaacagccgatccaatgctgacggtggctcacacatgagtgggctgaaaattttacctattcagaaaagtgttccaactgttc

SEQ ID NO: 15517 - DNA, 3431 bp, Zea Mays
aaagcacctcgcacctcgcctctcgatccaccattctccgtccgccgtcacccacgcttgctggctccgccgacgcatctcgcaagctgccagcgcccccctcgcccctctccactgtggtccgcagccgcttggagcttgcagcttgcctgttcgtcgtctcggtcccagccggcagccggtcaaccctccaaccccctctctaggcggctaggcagcaagtctcccaggctggcaggctcccagccggcagcggcaggagcccgcacaatctgctcggcccctggcccctaccatgcttggccgcctgggcaccttggtgctaaacctgctgaggcagagagtagaaaggacatgacatcgctctactaactggccaccgttgcagctccagcaagtcgccattgctctagagatccacatgtggttctcggtgcattttcgtatcttttagaattgaactgtgaaaaacacaatggcatcgatcttatctggagcaaggagccttcactcactcgctctgctatcgcggatgttgggcgagacgactcagctcggtccttttaaccgcagcgtgcagcggaggtggagaaagcctgtagattcggcaagaacacgtcttgagggaagaacgagggatcataggctggacaaactaatggttcagctgaggaacttgaggctggccttggctttgcatgaggtgatatctcagcagaggaacggatacgcgtctctccagctcctctcaaggtggaggcatgaggtcgggctgaacattgaggtcggtgctttcctcaagaaatacccccacgtgtttcagacctacgtgcaccctgtcaagaggaaccactgctgcaaggtcacgcagaagatgtccgacttgatcgcagaggaagacgctgtggtcagggagaatgaggtcggcgtagttcagcggctgaagaaacttctcatgctctctgtggatggaactctgaacatgcacgcgttatggctcataagaagggagcttgggcttcctgatgattacaggtcctctatactgccgaaccatcgacatgatttaattctcaaatccccagatactctatcacttttctctagggatgaaacattggctgtagctaaggtcgacgagtggaggaaaagggagtacacagaaaaatggctagctgaatcagagacaaaatatgctttcccgatcaacttcccaactggatttaaggttcaaaaaggtttcagggagaaactcaagaactggcagaggcttccctacaccaaaccttatgagaagaatgattcgcatccgatatgcaacgtggagcggcttgagaaacgcattgttggtgttcttcatgagcttttgagcctgacggtcgaaaggatgatgccacttgagagactgtcacacttcagaagattgtacaccatggaggtaaacctgcgagaattttttctcaagtatccaggcattttctacatctcgacgaaaggaagcacacagacagtcatcctaagggatagttacagtaaaggatatctgattgagcctaaccctgtgtacattgtgcggaggaagatgctggacctggtattatctggatctcgtaacgttggtgaatgccaacaggatagtgcaacttggtcagctgaggagcatgatctgggaagcagccatgggtgccaggataacatatgctaggtggattctgcaattccatactggaacatggagttagaagtgacgcatggaaagaaccaattaactcaaccatgatcttgctgtaatatctacatataaaaatacctactgatatcgtctgcccggggtgaagcgatgcctagctgcggcattgccctgcctagcctcgcctcgtctccggcacgcgaacacccagctcggactctgtaaagaggaagtttaccacaatctctggtggactttctttgctcactgcccctgctcctccatcgctctcgtgcgccactgttctccatggatctcttcaatttgatgctaggtggcaacattgcacctagcaatgctatttttactatgctgatcaaggcatatgctaactgtggaatgctagatagggctatgattatcttcaatgagatgagagcaaggagtgaaacctgatgtggtaacctatttgacagtgattggtgccctttacagaattggtaagatggatggtgctgtggaaaaatttaatcatatgattgatcaaggagtaacacccaaaaaatctacttactgttgcctgattcaagttttttgtattcatggtggtttactgaaagccaaggaattggtttggaaaccatgaataaagatggagaaggcatcaagggtatttgatgctatggtgtctgctggcgttgaaccaaacaatgtagtgtatggtgtacttgttaatggctatcgtaaaattggaaggatcgatgatgagtcttttcaaagaaatgttgcataaaggaataaagccttcaactatttcgtacaacatcatacttgatgggttatttcaggcagggagaacagttcctgcgaaggtgaaattccacgaaatgactgaaagtggtatcacaatggacaaatggacatacaacataggtcttagtgaacattttaaaaacagatgctctgttgaagcaatcttgctttttgaagaattacgtgcaatgaatgtaaagatcaatatcaaaactctcaataccatgatagctggaatgtttcaaaccaggagagttgaagaagctaaggatctgtttgcttctatctcgagaagtgggctggtgccttctgttgtgacttacagtataatgatgacaaatcttataaaaggattggtggaggaggcagatgatatgttttcatccatggagaatgctggccgtgagcctgattctcgattgtgtggttagggaattactagagaaaaatgaaatggtcagggctacaacgtacctgtccaaaattgatgagaggaatttctcacttgagcattcaaccacaacattgttgatcgatctcttctcaagcaaaggggcttgtagggaacacataagatttctccctacaaagtatcgttttcttgcagggggctcgttaatgttcgattgcaagcagcagtcggtgatccagcagctcctctggcgcaaggggcgcctgatagtgatgtgttcgagggggacgcctctgctgtatgccccagtggatcctgcagagtcattcaagttctagagtttgtagattgtctccagccagtgattaacataatcccattacagatctatgatatcttcaagtttcttccgtcgaagattcagatataaaaagaacagccgatccaatgctgacggtggctcacacatgagtgggctgaaaattttacctattcagaaaagtgttccaactgttc

SEQ ID NO: 15518 - DNA, 3663 bp, Zea Mays
aaagcacctcgcacctcgcctctcgatccaccattctccgtccgccgtcacccacgcttgctggctccgccgacgcatctcgcaagctgccagcgcccccctcgcccctctccactgtggtccgcagccgcttggagcttgcagcttgcctgttcgtcgtctcggtcccagccggcagccggtcaaccctccaaccccctctctaggcggctaggcagcaagtctcccaggctggcaggctcccagccggcagcggcaggagcccgcacaatctgctcggcccctggcccctaccatgcttggccgcctgggcaccttggtgctaaacctgctgaggcagagagtagaaaggacatgacatcgctctactaactggccaccgttgcagctccagcaagtcgccattgctctagagatccacatgtggttctcggtgcattttcgtatcttttagaattgaactgtgaaaaacacaatggcatcgatcttatctggagcaaggagccttcactcactcgctctgctatcgcggatgttgggcgagacgactcagctcggtccttttaaccgcagcgtgcagcggaggtggagaaagcctgtagattcggcaagaacacgtcttgagggaagaacgagggatcataggctggacaaactaatggttcagctgaggaacttgaggctggccttggctttgcatgaggtgatatctcagcagaggaacggatacgcgtctctccagctcctctcaaggtggaggcatgaggtcgggctgaacattgaggtcggtgctttcctcaagaaatacccccacgtgtttcagacctacgtgcaccctgtcaagaggaaccactgctgcaaggtcacgcagaagatgtccgacttgatcgcagaggaagacgctgtggtcagggagaatgaggtcggcgtagttcagcggctgaagaaacttctcatgctctctgtggatggaactctgaacatgcacgcgttatggctcataagaagggagcttgggcttcctgatgattacaggtcctctatactgccgaaccatcgacatgatttaattctcaaatccccagatactctatcacttttctctagggatgaaacattggctgtagctaaggtcgacgagtggaggaaaagggagtacacagaaaaatggctagctgaatcagagacaaaatatgctttcccgatcaacttcccaactggatttaaggttcaaaaaggtttcagggagaaactcaagaactggcagaggcttccctacaccaaaccttatgagaagaatgattcgcatccgatatgcaacgtggagcggcttgagaaacgcattgttggtgttcttcatgagcttttgagcctgacggtcgaaaggatgatgccacttgagagactgtcacacttcagaagattgtacaccatggaggtaaacctgcgagaattttttctcaagtatccaggcattttctacatctcgacgaaaggaagcacacagacagtcatcctaagggatagttacagtaaaggatatctgattgagcctaaccctgtgtacattgtgcggaggaagatgctggacctggtattatctggatctcgtaacgttggtgaatgccaacaggatagtgcaacttggtcagctgaggagcatgatctgggaagcagccatgggtgccaggataacatatgctaggtggattctgcaattccatactggaacatggagttagaagtgacgcatggaaagaaccaattaactcaaccatgatcttgctgtaatatctacatataaaaatacctactgatatcgtctgcccggggtgaagcgatgcctagctgcggcattgccctgcctagcctcgcctcgtctccggcacgcgaacacccagctcggactctgtaaagaggaagtttaccacaatctctggtggactttctttgctcactgcccctgctcctccatcgctctcgtgcgccactgttctccatggatctcttcaatttgatgctaggtggcaacattgcacctagcaatgctatttttactatgctgatcaaggcatatgctaactgtggaatgctagatagggctatgattatcttcaatgagatgagagcaaggagtgaaacctgatgtggtaacctatttgacagtgattggtgccctttacagaattggtaagatggatggtgctgtggaaaaatttaatcatatgattgatcaaggagtaacacccaaaaaatctacttactgttgcctgattcaagttttttgtattcatggtggtttactgaaagccaaggaattggtttggaaaccatgaataaaggtatgtgtcctgacattgttttcttcagttcgataataaacaacctttgcaaactaggaagggtaatggacgcacaaaatatatttgacttaactgtaaatgttggtctgcatcctactgttgcgatgcatagtatgctgatggtgggtactgtcttgttggcaagatggagaaggcatcaagggtatttgatgctatggtgtctgctggcgttgaaccaaacaatgtagtgtatggtgtacttgttaatggctatcgtaaaattggaaggatcgatgatgagtcttttcaaagaaatgttgcataaaggaataaagccttcaactatttcgtacaacatcatacttgatgggttatttcaggcagggagaacagttcctgcgaaggtgaaattccacgaaatgactgaaagtggtatcacaatggacaaatggacatacaacataggtcttagtgaacattttaaaaacagatgctctgttgaagcaatcttgctttttgaagaattacgtgcaatgaatgtaaagatcaatatcaaaactctcaataccatgatagctggaatgtttcaaaccaggagagttgaagaagctaaggatctgtttgcttctatctcgagaagtgggctggtgccttctgttgtgacttacagtataatgatgacaaatcttataaaaggattggtggaggaggcagatgatatgttttcatccatggagaatgctggccgtgagcctgattctcgattgtgtggttagggaattactagagaaaaatgaaatggtcagggctacaacgtacctgtccaaaattgatgagaggaatttctcacttgagcattcaaccacaacattgttgatcgatctcttctcaagcaaaggggcttgtagggaacacataagatttctccctacaaagtatcgttttcttgcagggggctcgttaatgttcgattgcaagcagcagtcggtgatccagcagctcctctggcgcaaggggcgcctgatagtgatgtgttcgagggggacgcctctgctgtatgccccagtggatcctgcagagtcattcaagttctagagtttgtagattgtctccagccagtgattaacataatcccattacaggtcaaatttattattgggaatcatatacatctaaccagctttcaactcttctttcctccttataagatctatgatatcttcaagtttcttccgtcgaagattcagatataaaaagaacagccgatccaatgctgacggtggctcacacatgagtgggctgaaaattttacctattcagaaaagtgttccaactgttc

SEQ ID NO: 15519 - DNA, 4216 bp, Zea Mays
gggagagaacggaggcgcgagcgcgacgggcagaccaggggcggatgtgtttttcgcctctgcagcccatacaaaaccagcccataaacaaccaggccttgaaggcccagcccaaagcacctcgcacctcgcctctcgatccaccattctccgtccgccgtcacccacgcttgctggctccgccgacgcatctcgcaagctgccagcgcccccctcgcccctctccactgtggtccgcagccgcttggagcttgcagcttgcctgttcgtcgtctcggtcccagccggcagccggtcaaccctccaaccccctctctaggcggctaggcagcaagtctcccaggctggcaggctcccagccggcagcggcaggagcccgcacaatctgctcggcccctggcccctaccatgcttggccgcctgggcaccttggtgctaaacctgctgaggcagagagtagaaaggacatgacatcgctctactaactggccaccgttgcagctccagcaagtcgccattgctctagagatccacatgtggttctcggtgcattttcgtatcttttagaattgaactgtgaaaaacacaatggcatcgatcttatctggagcaaggagccttcactcactcgctctgctatcgcggatgttgggcgagacgactcagctcggtccttttaaccgcagcgtgcagcggaggtggagaaagcctgtagattcggcaagaacacgtcttgagggaagaacgagggatcataggctggacaaactaatggttcagctgaggaacttgaggctggccttggctttgcatgaggtgatatctcagcagaggaacggatacgcgtctctccagctcctctcaaggtggaggcatgaggtcgggctgaacattgaggtcggtgctttcctcaagaaatacccccacgtgtttcagacctacgtgcaccctgtcaagaggaaccactgctgcaaggtcacgcagaagatgtccgacttgatcgcagaggaagacgctgtggtcagggagaatgaggtcggcgtagttcagcggctgaagaaacttctcatgctctctgtggatggaactctgaacatgcacgcgttatggctcataagaagggagcttgggcttcctgatgattacaggtcctctatactgccgaaccatcgacatgatttaattctcaaatccccagatactctatcacttttctctagggatgaaacattggctgtagctaaggtcgacgagtggaggaaaagggagtacacagaaaaatggctagctgaatcagagacaaaatatgctttcccgatcaacttcccaactggatttaaggttcaaaaaggtttcagggagaaactcaagaactggcagaggcttccctacaccaaaccttatgagaagaatgattcgcatccgatatgcaacgtggagcggcttgagaaacgcattgttggtgttcttcatgagcttttgagcctgacggtcgaaaggatgatgccacttgagagactgtcacacttcagaagattgtacaccatggaggtaaacctgcgagaattttttctcaagtatccaggcattttctacatctcgacgaaaggaagcacacagacagtcatcctaagggatagttacagtaaaggatatctgattgagcctaaccctgtgtacattgtgcggaggaagatgctggacctggtattatctggatctcgtaacgttggtgaatgccaacaggatagtgcaacttggtcagctgaggagcatgatctgggaagcagccatgggtgccaggataacatatgctaggtggattctgcaattccatactggaacatggagttagaagtgacgcatggaaagaaccaattaactcaaccatgatcttgctgtaatatctacatataaaaatacctactgatatcgtctgcccggggtgaagcgatgcctagctgcggcattgccctgcctagcctcgcctcgtctccggcacgcgaacacccagctcggactctgtaaagaggaagtttaccacaatctctggtggactttctttgctcactgcccctgctcctccatcgctctcgtgcgccactgttctccatggatctcttcaatttgatgctaggtggcaacattgcacctagcaatgctatttttactatgctgatcaaggcatatgctaactgtggaatgctagatagggctatgattatcttcaatgagatgagagcaaggagtgaaacctgatgtggtaacctatttgacagtgattggtgccctttacagaattggtaagatggatggtgctgtggaaaaatttaatcatatgattgatcaaggagtaacacccaaaaaatctacttactgttgcctgattcaagttttttgtattcatggtggtttactgaaagccaaggaattggtttggaaaccatgaataaagatggagaaggcatcaagggtatttgatgctatggtgtctgctggcgttgaaccaaacaatgtagtgtatggtgtacttgttaatggctatcgtaaaattggaaggatcgatgatgagtcttttcaaagaaatgttgcataaaggaataaagccttcaactatttcgtacaacatcatacttgatgggttatttcaggcagggagaacagttcctgcgaaggtgaaattccacgaaatgactgaaagtggtatcacaatggacaaatggacatacaacataggtcttagtgaacattttaaaaacagatgctctgttgaagcaatcttgctttttgaagaattacgtgcaatgaatgtaaagatcaatatcaaaactctcaataccatgatagctggaatgtttcaaaccaggagagttgaagaagctaaggatctgtttgcttctatctcgagaagtgggctggtgccttctgttgtgacttacagtataatgatgacaaatcttataaaaggattggtggaggaggcagatgatatgttttcatccatggagaatgctggccgtgagcctgattctcgattgtgtggttagggaattactagagaaaaatgaaatggtcagggctacaacgtacctgtccaaaattgatgagaggaatttctcacttgagcattcaaccacaacattgttgatcgatctcttctcaagcaaaggggcttgtagggaacacataagatttctccctacaaagtatcgttttcttgcagggggctcgttaatgttcgattgcaagcagcagtcggtgatccagcagctcctctggcgcaaggggcgcctgatagtgatgtgttcgagggggacgcctctgctgtatgccccagtggatcctgcagagtcattcaagttctagagtttgtagattgtctccagccagtgattaacataatcccattacagttgaggtatgcagtttatttcctgattcagcctaggagtactttaacggcttattggaactggtctaattcagcactggagcaacaagggagcctaagctgcaaaaatgtggattgttccaacctgtgcatgtgttctggtgttagtttcttcagagcggacattgaacttaacagtgcaattttttagaactttgcagcagttttaagcacaagcacgcttcatcgacaataaattaaattcaaatcaacctgctggtttgtgatacgtaaaccatattatccattttcagcaaataaggttggtttgcacttaatttgttgatgatgaagcgtgcttgtgcttgaacctgctgcaaaattctgaaaatttgtactgtaagttcaatgtccgttcagaagaaactaacaccaggacacatgcacaggttgctacaatacacattttcttgcggcttaggctcccttgctactctagggctgaatcagactagttccaataaactgttaagtactcctaggctgaatcaggaaagaaactgcagatctcaactaatcgacatttatgcatggtattcggtgattagtagtattgtgatatgcacaggtcaaatttattattgggaatcatatacatctaaccagctttcaactcttctttcctccttataagatctatgatatcttcaagtttcttccgtcgaagattcagatataaaaagaacagccgatccaatgctgacggtggctcacacatgagtgggctgaaaattttacctattcagaaaagtgttccaactgttc

SEQ ID NO: 15520 - DNA, 3250 bp, Zea Mays
gcctctcgatccaccattctccgtccgccgtcacccacgcttgctggctccgccgacgcatctcgcaagctgccagcgcccccctcgcccctctccactgtggtccgcagccgcttggagcttgcagcttgcctgttcgtcgtctcggtcccagccggcagccggtcaaccctccaaccccctctctaggcggctaggcagcaagtctcccaggctggcaggctcccagccggcagcggcaggagcccgcacaatctgctcggcccctggcccctaccatgcttggccgcctgggcaccttggtgctaaacctgctgaggcagagagtagaaaggacatgacatcgctctactaactggccaccgttgcagctccagcaagtcgccattgctctagagatccacatgtggttctcggtgcattttcgtatcttttagaattgaactgtgaaaaacacaatggcatcgatcttatctggagcaaggagccttcactcactcgctctgctatcgcggatgttgggcgagacgactcagctcggtccttttaaccgcagcgtgcagcggaggtggagaaagcctgtagattcggcaagaacacgtcttgagggaagaacgagggatcataggctggacaaactaatggttcagctgaggaacttgaggctggccttggctttgcatgaggtgatatctcagcagaggaacggatacgcgtctctccagctcctctcaaggtggaggcatgaggtcgggctgaacattgaggtcggtgctttcctcaagaaatacccccacgtgtttcagacctacgtgcaccctgtcaagaggaaccactgctgcaaggtcacgcagaagatgtccgacttgatcgcagaggaagacgctgtggtcagggagaatgaggtcggcgtagttcagcggctgaagaaacttctcatgctctctgtggatggaactctgaacatgcacgcgttatggctcataagaagggagcttgggcttcctgatgattacaggtcctctatactgccgaaccatcgacatgatttaattctcaaatccccagatactctatcacttttctctagggatgaaacattggctgtagctaaggtcgacgagtggaggaaaagggagtacacagaaaaatggctagctgaatcagagacaaaatatgctttcccgatcaacttcccaactggatttaaggttcaaaaaggtttcagggagaaactcaagaactggcagaggcttccctacaccaaaccttatgagaagaatgattcgcatccgatatgcaacgtggagcggcttgagaaacgcattgttggtgttcttcatgagcttttgagcctgacggtcgaaaggatgatgccacttgagagactgtcacacttcagaagattgtacaccatggaggtaaacctgcgagaattttttctcaagtatccaggcattttctacatctcgacgaaaggaagcacacagacagtcatcctaagggatagttacagtaaaggatatctgattgagcctaaccctgtgtacattgtgcggaggaagatgctggacctggtattatctggatctcgtaacgttggtgaatgccaacaggatagtgcaacttggtcagctgaggagcatgatctgggaagcagccatgggtgccaggataacatatgctaggtggattctgcaattccatactggaacatggagttagaagtgacgcatggaaagaaccaattaactcaaccatgatcttgctgtaatatctacatataaaaatacctactgatatcgtctgcccggggtgaagcgatgcctagctgcggcattgccctgcctagcctcgcctcgtctccggcacgcgaacacccagctcggactctgtaaagaggaagtttaccacaatctctggtggactttctttgctcactgcccctgctcctccatcgctctcgtgcgccactgttctccatggatctcttcaatttgatgctaggtggcaacattgcacctagcaatgctatttttactatgctgatcaaggcatatgctaactgtggaatgctagatagggctatgattatcttcaatgagatgagagcaaggagtgaaacctgatgtggtaacctatttgacagtgattggtgccctttacagaattggtaagatggatggtgctgtggaaaaatttaatcatatgattgatcaaggagtaacacccaaaaaatctacttactgttgcctgattcaagttttttgtattcatggtggtttactgaaagccaaggaattggtttggaaaccatgaataaaggcagggagaacagttcctgcgaaggtgaaattccacgaaatgactgaaagtggtatcacaatggacaaatggacatacaacataggtcttagtgaacattttaaaaacagatgctctgttgaagcaatcttgctttttgaagaattacgtgcaatgaatgtaaagatcaatatcaaaactctcaataccatgatagctggaatgtttcaaaccaggagagttgaagaagctaaggatctgtttgcttctatctcgagaagtgggctggtgccttctgttgtgacttacagtataatgatgacaaatcttataaaaggattggtggaggaggcagatgatatgttttcatccatggagaatgctggccgtgagcctgattctcgattgtgtggttagggaattactagagaaaaatgaaatggtcagggctacaacgtacctgtccaaaattgatgagaggaatttctcacttgagcattcaaccacaacattgttgatcgatctcttctcaagcaaaggggcttgtagggaacacataagatttctccctacaaagtatcgttttcttgcagggggctcgttaatgttcgattgcaagcagcagtcggtgatccagcagctcctctggcgcaaggggcgcctgatagtgatgtgttcgagggggacgcctctgctgtatgccccagtggatcctgcagagtcattcaagttctagagtttgtagattgtctccagccagtgattaacataatcccattacaggtcaaatttattattgggaatcatatacatctaaccagctttcaactcttctttcctccttataaggtacttgccttcaactaatatatatctatgatatcttcaagtttcttccgtcgaagattcaggtcagtgtgttctcagctaccccctgaggtccttg

SEQ ID NO: 15521 - DNA, 3549 bp, Zea Mays
ctcgcctctcgatccaccattctccgtccgccgtcacccacgcttgctggctccgccgacgcatctcgcaagctgccagcgcccccctcgcccctctccactgtggtccgcagccgcttggagcttgcagcttgcctgttcgtcgtctcggtcccagccggcagccggtcaaccctccaaccccctctctaggcggctaggcagcaagtctcccaggctggcaggctcccagccggcagcggcaggagcccgcacaatctgctcggcccctggcccctaccatgcttggccgcctgggcaccttggtgctaaacctgctgaggcagagagtagaaaggacatgacatcgctctactaactggccaccgttgcagctccagcaagtcgccattgctctagagatccacatgtggttctcggtgcattttcgtatcttttagaattgaactgtgaaaaacacaatggcatcgatcttatctggagcaaggagccttcactcactcgctctgctatcgcggatgttgggcgagacgactcagctcggtccttttaaccgcagcgtgcagcggaggtggagaaagcctgtagattcggcaagaacacgtcttgagggaagaacgagggatcataggctggacaaactaatggttcagctgaggaacttgaggctggccttggctttgcatgaggtgatatctcagcagaggaacggatacgcgtctctccagctcctctcaaggtggaggcatgaggtcgggctgaacattgaggtcggtgctttcctcaagaaatacccccacgtgtttcagacctacgtgcaccctgtcaagaggaaccactgctgcaaggtcacgcagaagatgtccgacttgatcgcagaggaagacgctgtggtcagggagaatgaggtcggcgtagttcagcggctgaagaaacttctcatgctctctgtggatggaactctgaacatgcacgcgttatggctcataagaagggagcttgggcttcctgatgattacaggtcctctatactgccgaaccatcgacatgatttaattctcaaatccccagatactctatcacttttctctagggatgaaacattggctgtagctaaggtcgacgagtggaggaaaagggagtacacagaaaaatggctagctgaatcagagacaaaatatgctttcccgatcaacttcccaactggatttaaggttcaaaaaggtttcagggagaaactcaagaactggcagaggcttccctacaccaaaccttatgagaagaatgattcgcatccgatatgcaacgtggagcggcttgagaaacgcattgttggtgttcttcatgagcttttgagcctgacggtcgaaaggatgatgccacttgagagactgtcacacttcagaagattgtacaccatggaggtaaacctgcgagaattttttctcaagtatccaggcattttctacatctcgacgaaaggaagcacacagacagtcatcctaagggatagttacagtaaaggatatctgattgagcctaaccctgtgtacattgtgcggaggaagatgctggacctggtattatctggatctcgtaacgttggtgaatgccaacaggatagtgcaacttggtcagctgaggagcatgatctgggaagcagccatgggtgccaggataacatatgctaggtggattctgcaattccatactggaacatggagttagaagtgacgcatggaaagaaccaattaactcaaccatgatcttgctgtaatatctacatataaaaatacctactgatatcgtctgcccggggtgaagcgatgcctagctgcggcattgccctgcctagcctcgcctcgtctccggcacgcgaacacccagctcggactctgtaaagaggaagtttaccacaatctctggtggactttctttgctcactgcccctgctcctccatcgctctcgtgcgccactgttctccatggatctcttcaatttgatgctaggtggcaacattgcacctagcaatgctatttttactatgctgatcaaggcatatgctaactgtggaatgctagatagggctatgattatcttcaatgagatgagagcaaggagtgaaacctgatgtggtaacctatttgacagtgattggtgccctttacagaattggtaagatggatggtgctgtggaaaaatttaatcatatgattgatcaaggagtaacacccaaaaaatctacttactgttgcctgattcaagttttttgtattcatggtggtttactgaaagccaaggaattggtttggaaaccatgaataaaggtatgtgtcctgacattgttttcttcagttcgataataaacaacctttgcaaactaggaagggtaatggacgcacaaaatatatttgacttaactgtaaatgttggtctgcatcctactgttgcgatgcatagtatgctgatggtgggtactgtcttgttggcaagatggagaaggcatcaagggtatttgatgctatggtgtctgctggcgttgaaccaaacaatgtagtgtatggtgtacttgttaatggctatcgtaaaattggaaggatcgatgatgagtcttttcaaagaaatgttgcataaaggaataaagccttcaactatttcgtacaacatcatacttgatgggttatttcaggcagggagaacagttcctgcgaaggtgaaattccacgaaatgactgaaagtggtatcacaatggacaaatggacatacaacataggtcttagtgaacattttaaaaacagatgctctgttgaagcaatcttgctttttgaagaattacgtgcaatgaatgtaaagatcaatatcaaaactctcaataccatgatagctggaatgtttcaaaccaggagagttgaagaagctaaggatctgtttgcttctatctcgagaagtgggctggtgccttctgttgtgacttacagtataatgatgacaaatcttataaaaggattggtggaggaggcagatgatatgttttcatccatggagaatgctggccgtgagcctgattctcgattgtgtggttagggaattactagagaaaaatgaaatggtcagggctacaacgtacctgtccaaaattgatgagaggaatttctcacttgagcattcaaccacaacattgttgatcgatctcttctcaagcaaaggggcttgtagggaacacataagatttctccctacaaagtatcgttttcttgcagggggctcgttaatgttcgattgcaagcagcagtcggtgatccagcagctcctctggcgcaaggggcgcctgatagtgatgtgttcgagggggacgcctctgctgtatgccccagtggatcctgcagagtcattcaagttctagagtttgtagattgtctccagccagtgattaacataatcccattacaggtacttgccttcaactaatatatatctatgatatcttcaagtttcttccgtcgaagattcaggtcagtgtgttctcagctaccccctgaggtccttg

SEQ ID NO: 15522 - DNA, 3609 bp, Zea Mays
ctcgcctctcgatccaccattctccgtccgccgtcacccacgcttgctggctccgccgacgcatctcgcaagctgccagcgcccccctcgcccctctccactgtggtccgcagccgcttggagcttgcagcttgcctgttcgtcgtctcggtcccagccggcagccggtcaaccctccaaccccctctctaggcggctaggcagcaagtctcccaggctggcaggctcccagccggcagcggcaggagcccgcacaatctgctcggcccctggcccctaccatgcttggccgcctgggcaccttggtgctaaacctgctgaggcagagagtagaaaggacatgacatcgctctactaactggccaccgttgcagctccagcaagtcgccattgctctagagatccacatgtggttctcggtgcattttcgtatcttttagaattgaactgtgaaaaacacaatggcatcgatcttatctggagcaaggagccttcactcactcgctctgctatcgcggatgttgggcgagacgactcagctcggtccttttaaccgcagcgtgcagcggaggtggagaaagcctgtagattcggcaagaacacgtcttgagggaagaacgagggatcataggctggacaaactaatggttcagctgaggaacttgaggctggccttggctttgcatgaggtgatatctcagcagaggaacggatacgcgtctctccagctcctctcaaggtggaggcatgaggtcgggctgaacattgaggtcggtgctttcctcaagaaatacccccacgtgtttcagacctacgtgcaccctgtcaagaggaaccactgctgcaaggtcacgcagaagatgtccgacttgatcgcagaggaagacgctgtggtcagggagaatgaggtcggcgtagttcagcggctgaagaaacttctcatgctctctgtggatggaactctgaacatgcacgcgttatggctcataagaagggagcttgggcttcctgatgattacaggtcctctatactgccgaaccatcgacatgatttaattctcaaatccccagatactctatcacttttctctagggatgaaacattggctgtagctaaggtcgacgagtggaggaaaagggagtacacagaaaaatggctagctgaatcagagacaaaatatgctttcccgatcaacttcccaactggatttaaggttcaaaaaggtttcagggagaaactcaagaactggcagaggcttccctacaccaaaccttatgagaagaatgattcgcatccgatatgcaacgtggagcggcttgagaaacgcattgttggtgttcttcatgagcttttgagcctgacggtcgaaaggatgatgccacttgagagactgtcacacttcagaagattgtacaccatggaggtaaacctgcgagaattttttctcaagtatccaggcattttctacatctcgacgaaaggaagcacacagacagtcatcctaagggatagttacagtaaaggatatctgattgagcctaaccctgtgtacattgtgcggaggaagatgctggacctggtattatctggatctcgtaacgttggtgaatgccaacaggatagtgcaacttggtcagctgaggagcatgatctgggaagcagccatgggtgccaggataacatatgctaggtggattctgcaattccatactggaacatggagttagaagtgacgcatggaaagaaccaattaactcaaccatgatcttgctgtaatatctacatataaaaatacctactgatatcgtctgcccggggtgaagcgatgcctagctgcggcattgccctgcctagcctcgcctcgtctccggcacgcgaacacccagctcggactctgtaaagaggaagtttaccacaatctctggtggactttctttgctcactgcccctgctcctccatcgctctcgtgcgccactgttctccatggatctcttcaatttgatgctaggtggcaacattgcacctagcaatgctatttttactatgctgatcaaggcatatgctaactgtggaatgctagatagggctatgattatcttcaatgagatgagagcaaggagtgaaacctgatgtggtaacctatttgacagtgattggtgccctttacagaattggtaagatggatggtgctgtggaaaaatttaatcatatgattgatcaaggagtaacacccaaaaaatctacttactgttgcctgattcaagttttttgtattcatggtggtttactgaaagccaaggaattggtttggaaaccatgaataaaggtatgtgtcctgacattgttttcttcagttcgataataaacaacctttgcaaactaggaagggtaatggacgcacaaaatatatttgacttaactgtaaatgttggtctgcatcctactgttgcgatgcatagtatgctgatggtgggtactgtcttgttggcaagatggagaaggcatcaagggtatttgatgctatggtgtctgctggcgttgaaccaaacaatgtagtgtatggtgtacttgttaatggctatcgtaaaattggaaggatcgatgatgagtcttttcaaagaaatgttgcataaaggaataaagccttcaactatttcgtacaacatcatacttgatgggttatttcaggcagggagaacagttcctgcgaaggtgaaattccacgaaatgactgaaagtggtatcacaatggacaaatggacatacaacataggtcttagtgaacattttaaaaacagatgctctgttgaagcaatcttgctttttgaagaattacgtgcaatgaatgtaaagatcaatatcaaaactctcaataccatgatagctggaatgtttcaaaccaggagagttgaagaagctaaggatctgtttgcttctatctcgagaagtgggctggtgccttctgttgtgacttacagtataatgatgacaaatcttataaaaggattggtggaggaggcagatgatatgttttcatccatggagaatgctggccgtgagcctgattctcgattgtgtggttagggaattactagagaaaaatgaaatggtcagggctacaacgtacctgtccaaaattgatgagaggaatttctcacttgagcattcaaccacaacattgttgatcgatctcttctcaagcaaaggggcttgtagggaacacataagatttctccctacaaagtatcgttttcttgcagggggctcgttaatgttcgattgcaagcagcagtcggtgatccagcagctcctctggcgcaaggggcgcctgatagtgatgtgttcgagggggacgcctctgctgtatgccccagtggatcctgcagagtcattcaagttctagagtttgtagattgtctccagccagtgattaacataatcccattacagtattgtgatatgcacaggtcaaatttattattgggaatcatatacatctaaccagctttcaactcttctttcctccttataagatctatgatatcttcaagtttcttccgtcgaagattcaggtcagtgtgttctcagctaccccctgaggtccttg

SEQ ID NO: 15523 - DNA, 3632 bp, Zea Mays
ctcgcctctcgatccaccattctccgtccgccgtcacccacgcttgctggctccgccgacgcatctcgcaagctgccagcgcccccctcgcccctctccactgtggtccgcagccgcttggagcttgcagcttgcctgttcgtcgtctcggtcccagccggcagccggtcaaccctccaaccccctctctaggcggctaggcagcaagtctcccaggctggcaggctcccagccggcagcggcaggagcccgcacaatctgctcggcccctggcccctaccatgcttggccgcctgggcaccttggtgctaaacctgctgaggcagagagtagaaaggacatgacatcgctctactaactggccaccgttgcagctccagcaagtcgccattgctctagagatccacatgtggttctcggtgcattttcgtatcttttagaattgaactgtgaaaaacacaatggcatcgatcttatctggagcaaggagccttcactcactcgctctgctatcgcggatgttgggcgagacgactcagctcggtccttttaaccgcagcgtgcagcggaggtggagaaagcctgtagattcggcaagaacacgtcttgagggaagaacgagggatcataggctggacaaactaatggttcagctgaggaacttgaggctggccttggctttgcatgaggtgatatctcagcagaggaacggatacgcgtctctccagctcctctcaaggtggaggcatgaggtcgggctgaacattgaggtcggtgctttcctcaagaaatacccccacgtgtttcagacctacgtgcaccctgtcaagaggaaccactgctgcaaggtcacgcagaagatgtccgacttgatcgcagaggaagacgctgtggtcagggagaatgaggtcggcgtagttcagcggctgaagaaacttctcatgctctctgtggatggaactctgaacatgcacgcgttatggctcataagaagggagcttgggcttcctgatgattacaggtcctctatactgccgaaccatcgacatgatttaattctcaaatccccagatactctatcacttttctctagggatgaaacattggctgtagctaaggtcgacgagtggaggaaaagggagtacacagaaaaatggctagctgaatcagagacaaaatatgctttcccgatcaacttcccaactggatttaaggttcaaaaaggtttcagggagaaactcaagaactggcagaggcttccctacaccaaaccttatgagaagaatgattcgcatccgatatgcaacgtggagcggcttgagaaacgcattgttggtgttcttcatgagcttttgagcctgacggtcgaaaggatgatgccacttgagagactgtcacacttcagaagattgtacaccatggaggtaaacctgcgagaattttttctcaagtatccaggcattttctacatctcgacgaaaggaagcacacagacagtcatcctaagggatagttacagtaaaggatatctgattgagcctaaccctgtgtacattgtgcggaggaagatgctggacctggtattatctggatctcgtaacgttggtgaatgccaacaggatagtgcaacttggtcagctgaggagcatgatctgggaagcagccatgggtgccaggataacatatgctaggtggattctgcaattccatactggaacatggagttagaagtgacgcatggaaagaaccaattaactcaaccatgatcttgctgtaatatctacatataaaaatacctactgatatcgtctgcccggggtgaagcgatgcctagctgcggcattgccctgcctagcctcgcctcgtctccggcacgcgaacacccagctcggactctgtaaagaggaagtttaccacaatctctggtggactttctttgctcactgcccctgctcctccatcgctctcgtgcgccactgttctccatggatctcttcaatttgatgctaggtggcaacattgcacctagcaatgctatttttactatgctgatcaaggcatatgctaactgtggaatgctagatagggctatgattatcttcaatgagatgagagcaaggagtgaaacctgatgtggtaacctatttgacagtgattggtgccctttacagaattggtaagatggatggtgctgtggaaaaatttaatcatatgattgatcaaggagtaacacccaaaaaatctacttactgttgcctgattcaagttttttgtattcatggtggtttactgaaagccaaggaattggtttggaaaccatgaataaaggtatgtgtcctgacattgttttcttcagttcgataataaacaacctttgcaaactaggaagggtaatggacgcacaaaatatatttgacttaactgtaaatgttggtctgcatcctactgttgcgatgcatagtatgctgatggtgggtactgtcttgttggcaagatggagaaggcatcaagggtatttgatgctatggtgtctgctggcgttgaaccaaacaatgtagtgtatggtgtacttgttaatggctatcgtaaaattggaaggatcgatgatgagtcttttcaaagaaatgttgcataaaggaataaagccttcaactatttcgtacaacatcatacttgatgggttatttcaggcagggagaacagttcctgcgaaggtgaaattccacgaaatgactgaaagtggtatcacaatggacaaatggacatacaacataggtcttagtgaacattttaaaaacagatgctctgttgaagcaatcttgctttttgaagaattacgtgcaatgaatgtaaagatcaatatcaaaactctcaataccatgatagctggaatgtttcaaaccaggagagttgaagaagctaaggatctgtttgcttctatctcgagaagtgggctggtgccttctgttgtgacttacagtataatgatgacaaatcttataaaaggattggtggaggaggcagatgatatgttttcatccatggagaatgctggccgtgagcctgattctcgattgtgtggttagggaattactagagaaaaatgaaatggtcagggctacaacgtacctgtccaaaattgatgagaggaatttctcacttgagcattcaaccacaacattgttgatcgatctcttctcaagcaaaggggcttgtagggaacacataagatttctccctacaaagtatcgttttcttgcagggggctcgttaatgttcgattgcaagcagcagtcggtgatccagcagctcctctggcgcaaggggcgcctgatagtgatgtgttcgagggggacgcctctgctgtatgccccagtggatcctgcagagtcattcaagttctagagtttgtagattgtctccagccagtgattaacataatcccattacagtattgtgatatgcacaggtcaaatttattattgggaatcatatacatctaaccagctttcaactcttctttcctccttataaggtacttgccttcaactaatatatatctatgatatcttcaagtttcttccgtcgaagattcaggtcagtgtgttctcagctaccccctgaggtccttg

SEQ ID NO: 15524 - DNA, 4348 bp, Zea Mays
gggagagaacggaggcgcgagcgcgacgggcagaccaggggcggatgtgtttttcgcctctgcagcccatacaaaaccagcccataaacaaccaggccttgaaggcccagcccaaagcacctcgcacctcgcctctcgatccaccattctccgtccgccgtcacccacgcttgctggctccgccgacgcatctcgcaagctgccagcgcccccctcgcccctctccactgtggtccgcagccgcttggagcttgcagcttgcctgttcgtcgtctcggtcccagccggcagccggtcaaccctccaaccccctctctaggcggctaggcagcaagtctcccaggctggcaggctcccagccggcagcggcaggagcccgcacaatctgctcggcccctggcccctaccatgcttggccgcctgggcaccttggtgctaaacctgctgaggcagagagtagaaaggacatgacatcgctctactaactggccaccgttgcagctccagcaagtcgccattgctctagagatccacatgtggttctcggtgcattttcgtatcttttagaattgaactgtgaaaaacacaatggcatcgatcttatctggagcaaggagccttcactcactcgctctgctatcgcggatgttgggcgagacgactcagctcggtccttttaaccgcagcgtgcagcggaggtggagaaagcctgtagattcggcaagaacacgtcttgagggaagaacgagggatcataggctggacaaactaatggttcagctgaggaacttgaggctggccttggctttgcatgaggtgatatctcagcagaggaacggatacgcgtctctccagctcctctcaaggtggaggcatgaggtcgggctgaacattgaggtcggtgctttcctcaagaaatacccccacgtgtttcagacctacgtgcaccctgtcaagaggaaccactgctgcaaggtcacgcagaagatgtccgacttgatcgcagaggaagacgctgtggtcagggagaatgaggtcggcgtagttcagcggctgaagaaacttctcatgctctctgtggatggaactctgaacatgcacgcgttatggctcataagaagggagcttgggcttcctgatgattacaggtcctctatactgccgaaccatcgacatgatttaattctcaaatccccagatactctatcacttttctctagggatgaaacattggctgtagctaaggtcgacgagtggaggaaaagggagtacacagaaaaatggctagctgaatcagagacaaaatatgctttcccgatcaacttcccaactggatttaaggttcaaaaaggtttcagggagaaactcaagaactggcagaggcttccctacaccaaaccttatgagaagaatgattcgcatccgatatgcaacgtggagcggcttgagaaacgcattgttggtgttcttcatgagcttttgagcctgacggtcgaaaggatgatgccacttgagagactgtcacacttcagaagattgtacaccatggaggtaaacctgcgagaattttttctcaagtatccaggcattttctacatctcgacgaaaggaagcacacagacagtcatcctaagggatagttacagtaaaggatatctgattgagcctaaccctgtgtacattgtgcggaggaagatgctggacctggtattatctggatctcgtaacgttggtgaatgccaacaggatagtgcaacttggtcagctgaggagcatgatctgggaagcagccatgggtgccaggataacatatgctaggtggattctgcaattccatactggaacatggagttagaagtgacgcatggaaagaaccaattaactcaaccatgatcttgctgtaatatctacatataaaaatacctactgatatcgtctgcccggggtgaagcgatgcctagctgcggcattgccctgcctagcctcgcctcgtctccggcacgcgaacacccagctcggactctgtaaagaggaagtttaccacaatctctggtggactttctttgctcactgcccctgctcctccatcgctctcgtgcgccactgttctccatggatctcttcaatttgatgctaggtggcaacattgcacctagcaatgctatttttactatgctgatcaaggcatatgctaactgtggaatgctagatagggctatgattatcttcaatgagatgagagcaaggagtgaaacctgatgtggtaacctatttgacagtgattggtgccctttacagaattggtaagatggatggtgctgtggaaaaatttaatcatatgattgatcaaggagtaacacccaaaaaatctacttactgttgcctgattcaagttttttgtattcatggtggtttactgaaagccaaggaattggtttggaaaccatgaataaaggtatgtgtcctgacattgttttcttcagttcgataataaacaacctttgcaaactaggaagggtaatggacgcacaaaatatatttgacttaactgtaaatgttggtctgcatcctactgttgcgatgcatagtatgctgatggtgggtactgtcttgttggcaagatggagaaggcatcaagggtatttgatgctatggtgtctgctggcgttgaaccaaacaatgtagtgtatggtgtacttgttaatggctatcgtaaaattggaaggatcgatgatgagtcttttcaaagaaatgttgcataaaggaataaagccttcaactatttcgtacaacatcatacttgatgggttatttcaggcagggagaacagttcctgcgaaggtgaaattccacgaaatgactgaaagtggtatcacaatggacaaatggacatacaacataggtcttagtgaacattttaaaaacagatgctctgttgaagcaatcttgctttttgaagaattacgtgcaatgaatgtaaagatcaatatcaaaactctcaataccatgatagctggaatgtttcaaaccaggagagttgaagaagctaaggatctgtttgcttctatctcgagaagtgggctggtgccttctgttgtgacttacagtataatgatgacaaatcttataaaaggattggtggaggaggcagatgatatgttttcatccatggagaatgctggccgtgagcctgattctcgattgtgtggttagggaattactagagaaaaatgaaatggtcagggctacaacgtacctgtccaaaattgatgagaggaatttctcacttgagcattcaaccacaacattgttgatcgatctcttctcaagcaaaggggcttgtagggaacacataagatttctccctacaaagtatcgttttcttgcagggggctcgttaatgttcgattgcaagcagcagtcggtgatccagcagctcctctggcgcaaggggcgcctgatagtgatgtgttcgagggggacgcctctgctgtatgccccagtggatcctgcagagtcattcaagttctagagtttgtagattgtctccagccagtgattaacataatcccattacagttgaggtatgcagtttatttcctgattcagcctaggagtactttaacggcttattggaactggtctaattcagcactggagcaacaagggagcctaagctgcaaaaatgtggattgttccaacctgtgcatgtgttctggtgttagtttcttcagagcggacattgaacttaacagtgcaattttttagaactttgcagcagttttaagcacaagcacgcttcatcgacaataaattaaattcaaatcaacctgctggtttgtgatacgtaaaccatattatccattttcagcaaataaggttggtttgcacttaatttgttgatgatgaagcgtgcttgtgcttgaacctgctgcaaaattctgaaaatttgtactgtaagttcaatgtccgttcagaagaaactaacaccaggacacatgcacaggttgctacaatacacattttcttgcggcttaggctcccttgctactctagggctgaatcagactagttccaataaactgttaagtactcctaggctgaatcaggaaagaaactgcagatctcaactaatcgacatttatgcatggtattcggtgattagtagtattgtgatatgcacaggtcaaatttattattgggaatcatatacatctaaccagctttcaactcttctttcctccttataaggtacttgccttcaactaatatatatctatgatatcttcaagtttcttccgtcgaagattcaggtcagtgtgttctcagctaccccctgaggtccttg

SEQ ID NO: 15525 - DNA, 4723 bp, Zea Mays
ctcaattagttttgtctaagttataattattagaatagaattcacttttaactaaacaaacgggacctaagtgtgatgtgtccctctaaataatactgtagtataacaatttgtgttgtctctaacctatttcgaggagaaagcccggactttttttttcgttatctgaaaaaaaatctttggctagccttcgggactcgccatctcccagccgcacgctcttctcgcccacgcacacacgattccttctcgcgctctcgagattcttcccacacgcacacggaagattcccgcctcctcccctctgtcgccgctgctgccaacgctagcaccgatgccacctcttggttcccaggttgtgtcttgcctctttccatccaccgtcatcgccgctacctatggcttccccgtcgggtcgtctcttgcctcattctgttccccgccgctgctctcgccacccactatcggaggcattgtgtccagaaacatggttaagagggtatgctgtctgagcgccagggagatccgaacggtgatgccctctactcgcttcccattgtcctagagtcaggcaaatggaggaacatgagtcagtggggctgccatagttggagaatgcggcgtaagcaggccgacgacggcgagttcctcaacatgtactccggtgaaattttggtggtggttccgtgacctgacatctttccaatatcgaagatgagaaataccgaggctgttatagatctcttctttttttaggagttttctattttacaaaatagctaaactatggaatttggctaataactttagattagctctcggagttgctcttcatgcgccacatccgtagtcgcacgcacctaccatgtgcacccaacgagcatgtactattattattttcctaatctttcttggccccttacacagctgcttcgtcatttccagccatatgcgtgatgacagctcctccgtcattaccatttgttttatggtagcgagatgcgcgtgaagacatttggattcgtccaccaccacatcactagtctcactctcacctgtaatatatctgcacccaacgagcaggtaccaagcaattagcaagagaaacacaaggtcgaggtggtgaggtatggagctcgccttgggggccatgaccagcttggcccttaagctaggcgacctgctcatggaggagtatgtcgtgcagaagggcctcaagcccgacatcgagtctctctccagggagcttgtgatgatgaacgccgctctcatcgacgcgtcccgggttccacctgaccagctcaccgaggtggaaaagctttgggcacgcaaggtccgggacctgtcgtatgacatggaggacgccgtcgacgatttcatcctgcgtgtggctggtggtgacgactctgccgccgactcaaaattcttcaagaagacccttgccatggtcaaggacgtgatgtcgatgaagaagttcaaggatcggcgccagatctccgacaaggtcaaagacatcaagaaactctccaacgagttagctgaacttcgtgccaagtacacggtaaggggtgtgggcgctgatctcgccgcgagcaccggcatcgaccctcgtgtcatcaatctgtacaagaaagagacagatctcgttggcatcaagaagtcaaggaacaaagtcattaggatgctgtctatggagaccaaagatgatgatgcacttgagtcccatcaggctctaaagatagtgtctatagtcggggttggaggactagttgacatggccagatgggatctagaacaatttaaaaacgaactggatgaattcttgaaggacaagaggtacttgatcgttgttgatgacatatgggatgttgactcatgggaagcaatcagatatgccttgaaggacaataattgtggaagtagaataatcatgactactcgtaattttgggattgtcacgaaattagaagaggtttatagattaaaacctctttctaatgcaaactccaagaaattgttctacaaaagaatagagagtcaggaaggagaaagccttgatggtgaactctctagtaaaatcatacataaatgtggcggcataccattggctatcattgcaatagctagtttgttggttgaaagatcacgtgaggagtggtcagaagtgtacgacaagattggtcttgggaatgaagacaatacaacaaagataatgtcatacagctactatgatctgcctccttatctcaagccatgtctgctgcaactaagcatatatccagaagactgtatcattgatacaaactctaccatatggaagtggataggtgaaggtctagttcatcttgagaaagaagagggtagcctatttaaggttggagaaagatacttcaaggagcttgtgaatagaagcatgatccagccgacagaggacaaaaatgatcggtttgtagaagggttccgtattcacgacattgtgtttgatctcatctgtaagttgtccaaggatgaagacttcattaccattagcgggcaacattcatctcgggatagtttaagaagagagaagaaaacatgtgtgcctcgctcagactgcaagctacgtcggctggccgtccgaaatcaacgtgtgcagcgcttccctgaagaaaccatcgacatgccagaggtgttgagatcacttagcattatagattgtaatattgaggttatggccccaattgatagcttcagggtttgccgtgtgctgcatctggggaagagctacgtacccatcagcctaaagcatctggggaagctgttgcatctcaagttcctagagatagtatacacgcctattgatgagctccctaaggaaattgggcatctgaggtctcttcagacactgatattagaccgtactggactagacgagctgccaccggttgtttgctcgcttacacggttgatgtgcctgatagcccaggggttcgaaaggttgccagctgacaggatggggaacctaacgtccctggaggagctacgactacgtagggtagttggccggagtgccacccaagccctagtggcagagcttggcaagctgacgaggttgagggtggtcgacatcaccttttcagagcagctagaggagagcttgcaagaagcattggtgcaatctctgtccaatctgcggggactccaggaactaacgcttttgtttaaaatgacacggtggggaagcgatatgtggggagactgggagccaccaaggcagctccggcgcctgattattgaaggcatcatcgtcttctcacgacagcctcgatggatcaaccgctcctgtctgccacgcctctgctacttatctctgatggtgcacactcttgaagcacaggacctagataatctagcgaggttgccagagctccagtacctcacgctagatggtctcagctggcctccaaggtatactgttggcccagacgacttcaggaatctgaggttctgcaaagtgggcacaacgttcgagtttcgtaagggcgccatgccaaggctcgaagtgctgcaatttagagtttttgcagggtactattgttgggcatacaatggtgtgccgttcgagcagttcccaacgaaggatcttgacttggacctggataacgtccttttacttcagcaagtaatagtcaaagtcaactgcgtaggtgctactgtcacacaagtggaggaggtggaggccgtggtcatgcgtgccgtggaaaatcatgccaaccgtccaaccataaaaatgaatcgagcatatgaaatagctatcctatccgacgaagggcgggaggctctgcttcggcgacacattgaaaaggattgctgcgtgcgcacgatgaaggataaatctgatgctttcttcatcagccagctgcggaggtatcgacatcttcagaaagccattattttcatcgactgttcgggtgccagcatgtgtgaggtgcagaaagtggaagcagcttttagacatgcagccgaggttcatcctaaccatccaagtattgaacttatcagaacaaacaccgacggaatggcctcctcctcatctgaccatcccaacacagagcccaggaattgatggctcggtttgtcagatccttccaacccaggagcaggtaaatgtgagttgcttaagtaccaaagagagaggtcctgttcagcaagatgattagaagcattggcaattggcatggcttgttaattagattcgtggttcttagtctaaaatcacattgaagagggagacggacccaagtgatgcagttcatgtgttatctgtatcagtctctgtttttataagctgtcatatattttctcgaaactatcttgtgttgattttgtgtgaagtgtacttttaatggcacgggccattgtgtatttgcttgaaagataaggatggtattatctttgtatttgaactctaaatgcttaaatgaagtgatcattctggatggagatatgtatggtgtgaacccaattctcgacgccaacgtgtgtgggattttggtgcaagctcctgtagctcgtctctgttatatctatggtgttcacaatccgcccgactagttactcgcggtgccggtcagcggagggttgcctgacgcaggagaagagatgcagtctttgacagcacaatcccagacacaggagacccacgtaaacatactgcatgcatacggagattgacagcagatga

SEQ ID NO: 15526 - DNA, 4308 bp, Zea Mays
tcgggactcgccatctcccagccgcacgctcttctcgcccacgcacacacgattccttctcgcgctctcgagattcttcccacacgcacacggaagattcccgcctcctcccctctgtcgccgctgctgccaacgctagcaccgatgccacctcttggttcccaggttgtgtcttgcctctttccatccaccgtcatcgccgctacctatggcttccccgtcgggtcgtctcttgcctcattctgttccccgccgctgctctcgccacccactatcggaggcattgtgtccagaaacatggttaagagggtatgctgtctgagcgccagggagatccgaacggtgatgccctctactcgcttcccattgtcctagagtcaggcaaatggaggaacatgagtcagtggggctgccatagttggagaatgcggcgtaagcaggccgacgacggcgagttcctcaacatgtactccggtgaaattttggtggtggttccgtgacctgacatctttccaatatcgaagatgagaaataccgagccatatgcgtgatgacagctcctccgtcattaccatttgttttatggtagcgagatgcgcgtgaagacatttggattcgtccaccaccacatcactagtctcactctcacctgtaatatatctgcacccaacgagcaggtaccaagcaattagcaagagaaacacaaggtcgaggtggtgaggtatggagctcgccttgggggccatgaccagcttggcccttaagctaggcgacctgctcatggaggagtatgtcgtgcagaagggcctcaagcccgacatcgagtctctctccagggagcttgtgatgatgaacgccgctctcatcgacgcgtcccgggttccacctgaccagctcaccgaggtggaaaagctttgggcacgcaaggtccgggacctgtcgtatgacatggaggacgccgtcgacgatttcatcctgcgtgtggctggtggtgacgactctgccgccgactcaaaattcttcaagaagacccttgccatggtcaaggacgtgatgtcgatgaagaagttcaaggatcggcgccagatctccgacaaggtcaaagacatcaagaaactctccaacgagttagctgaacttcgtgccaagtacacggtaaggggtgtgggcgctgatctcgccgcgagcaccggcatcgaccctcgtgtcatcaatctgtacaagaaagagacagatctcgttggcatcaagaagtcaaggaacaaagtcattaggatgctgtctatggagaccaaagatgatgatgcacttgagtcccatcaggctctaaagatagtgtctatagtcggggttggaggactaggtaagactactctagccaaaacagtgcatgacatgcttaagaagcaattcgactgttctgcttttatttctattggtagaactcctaatctgaataggacattcgagaagatgctattgaaacttgatcgtgagtataaacaagttgacatggccagatgggatctagaacaatttaaaaacgaactggatgaattcttgaaggacaagaggtacttgatcgttgttgatgacatatgggatgttgactcatgggaagcaatcagatatgccttgaaggacaataattgtggaagtagaataatcatgactactcgtaattttgggattgtcacgaaattagaagaggtttatagattaaaacctctttctaatgcaaactccaagaaattgttctacaaaagaatagagagtcaggaaggagaaagccttgatggtgaactctctagtaaaatcatacataaatgtggcggcataccattggctatcattgcaatagctagtttgttggttgaaagatcacgtgaggagtggtcagaagtgtacgacaagattggtcttgggaatgaagacaatacaacaaagataatgtcatacagctactatgatctgcctccttatctcaagccatgtctgctgcaactaagcatatatccagaagactgtatcattgatacaaactctaccatatggaagtggataggtgaaggtctagttcatcttgagaaagaagagggtagcctatttaaggttggagaaagatacttcaaggagcttgtgaatagaagcatgatccagccgacagaggacaaaaatgatcggtttgtagaagggttccgtattcacgacattgtgtttgatctcatctgtaagttgtccaaggatgaagacttcattaccattagcgggcaacattcatctcgggatagtttaagaagagagaagaaaacatgtgtgcctcgctcagactgcaagctacgtcggctggccgtccgaaatcaacgtgtgcagcgcttccctgaagaaaccatcgacatgccagaggtgttgagatcacttagcattatagattgtaatattgaggttatggccccaattgatagcttcagggtttgccgtgtgctgcatctggggaagagctacgtacccatcagcctaaagcatctggggaagctgttgcatctcaagttcctagagatagtatacacgcctattgatgagctccctaaggaaattgggcatctgaggtctcttcagacactgatattagaccgtactggactagacgagctgccaccggttgtttgctcgcttacacggttgatgtgcctgatagcccaggggttcgaaaggttgccagctgacaggatggggaacctaacgtccctggaggagctacgactacgtagggtagttggccggagtgccacccaagccctagtggcagagcttggcaagctgacgaggttgagggtggtcgacatcaccttttcagagcagctagaggagagcttgcaagaagcattggtgcaatctctgtccaatctgcggggactccaggaactaacgcttttgtttaaaatgacacggtggggaagcgatatgtggggagactgggagccaccaaggcagctccggcgcctgattattgaaggcatcatcgtcttctcacgacagcctcgatggatcaaccgctcctgtctgccacgcctctgctacttatctctgatggtgcacactcttgaagcacaggacctagataatctagcgaggttgccagagctccagtacctcacgctagatggtctcagctggcctccaaggtatactgttggcccagacgacttcaggaatctgaggttctgcaaagtgggcacaacgttcgagtttcgtaagggcgccatgccaaggctcgaagtgctgcaatttagagtttttgcagggtactattgttgggcatacaatggtgtgccgttcgagcagttcccaacgaaggatcttgacttggacctggataacgtccttttacttcagcaagtaatagtcaaagtcaactgcgtaggtgctactgtcacacaagtggaggaggtggaggccgtggtcatgcgtgccgtggaaaatcatgccaaccgtccaaccataaaaatgaatcgagcatatgaaatagctatcctatccgacgaagggcgggaggctctgcttcggcgacacattgaaaaggattgctgcgtgcgcacgatgaaggataaatctgatgctttcttcatcagccagctgcggaggtatcgacatcttcagaaagccattattttcatcgactgttcgggtgccagcatgtgtgaggtgcagaaagtggaagcagcttttagacatgcagccgaggttcatcctaaccatccaagtattgaacttatcagaacaaacaccgacggaatggcctcctcctcatctgaccatcccaacacagagcccaggaattgatggctcggtttgtcagatccttccaacccaggagcaggtaaatgtgagttgcttaagtaccaaagagagaggtcctgttcagcaagatgattagaagcattggcaattggcatggcttgttaattagattcgtggttcttagtctaaaatcacattgaagagggagacggacccaagtgatgcagttcatgtgttatctgtatcagtctctgtttttataagctgtcatatattttctcgaaactatcttgtgttgattttgtgtgaagtgtacttttaatggcacgggccattgtgtatttgcttgaaagataaggatggtattatctttgtatttgaactctaaatgcttaaatgaagtgatcattctggatggagatatgtatggtgtgaacccaattctcgacgccaacgtgtgtgggattttggtgcaagctcctgtagctcgtctctgttatatctatg

SEQ ID NO: 15527 - DNA, 1221 bp, Zea Mays
tcgggactcgccatctcccagccgcacgctcttctcgcccacgcacacacgattccttctcgcgctctcgagattcttcccacacgcacacggaagattcccgcctcctcccctctgtcgccgctgctgccaacgctagcaccgatgccacctcttggttcccaggttgtgtcttgcctctttccatccaccgtcatcgccgctacctatggcttccccgtcgggtcgtctcttgcctcattctgttccccgccgctgctctcgccacccactatcggaggcattgtgtccagaaacatggttaagagggtatgctgtctgagcgccagggagatccgaacggtgatgccctctactcgcttcccattgtcctagagtcaggcaaatggaggaacatgagtcagtggggctgccatagttggagaatgcggcgtaagcaggccgacgacggcgagttcctcaacatgtactccgcttcggcgacacattgaaaaggattgctgcgtgcgcacgatgaaggataaatctgatgctttcttcatcagccagctgcggaggtatcgacatcttcagaaagccattattttcatcgactgttcgggtgccagcatgtgtgaggtgcagaaagtggaagcagcttttagacatgcagccgaggttcatcctaaccatccaagtattgaacttatcagaacaaacaccgacggaatggcctcctcctcatctgaccatcccaacacagagcccaggaattgatggctcggtttgtcagatccttccaacccaggagcaggtaaatgtgagttgcttaagtaccaaagagagaggtcctgttcagcaagatgattagaagcattggcaattggcatggcttgttaattagattcgtggttcttagtctaaaatcacattgaagagggagacggacccaagtgatgcagttcatgtgttatctgtatcagtctctgtttttataagctgtcatatattttctcgaaactatcttgtgttgattttgtgtgaagtgtacttttaatggcacgggccattgtgtatttgcttgaaagataaggatggtattatctttgtatttgaactctaaatgcttaaatgaagtgatcattctggatggagatatgtatggtgtgaacccaattctcgacgccaacgtgtgtgggattttggtgcaagctcctgtagctcgtctctgttatatctatg

SEQ ID NO: 15528 - DNA, 1358 bp, Zea Mays
tcgggactcgccatctcccagccgcacgctcttctcgcccacgcacacacgattccttctcgcgctctcgagattcttcccacacgcacacggaagattcccgcctcctcccctctgtcgccgctgctgccaacgctagcaccgatgccacctcttggttcccaggttgtgtcttgcctctttccatccaccgtcatcgccgctacctatggcttccccgtcgggtcgtctcttgcctcattctgttccccgccgctgctctcgccacccactatcggaggcattgtgtccagaaacatggttaagagggtatgctgtctgagcgccagggagatccgaacggtgatgccctctactcgcttcccattgtcctagagtcaggcaaatggaggaacatgagtcagtggggctgccatagttggagaatgcggcgtaagcaggccgacgacggcgagttcctcaacatgtactccggtgctactgtcacacaagtggaggaggtggaggccgtggtcatgcgtgccgtggaaaatcatgccaaccgtccaaccataaaaatgaatcgagcatatgaaatagctatcctatccgacgaagggcgggaggctctgcttcggcgacacattgaaaaggattgctgcgtgcgcacgatgaaggataaatctgatgctttcttcatcagccagctgcggaggtatcgacatcttcagaaagccattattttcatcgactgttcgggtgccagcatgtgtgaggtgcagaaagtggaagcagcttttagacatgcagccgaggttcatcctaaccatccaagtattgaacttatcagaacaaacaccgacggaatggcctcctcctcatctgaccatcccaacacagagcccaggaattgatggctcggtttgtcagatccttccaacccaggagcaggtaaatgtgagttgcttaagtaccaaagagagaggtcctgttcagcaagatgattagaagcattggcaattggcatggcttgttaattagattcgtggttcttagtctaaaatcacattgaagagggagacggacccaagtgatgcagttcatgtgttatctgtatcagtctctgtttttataagctgtcatatattttctcgaaactatcttgtgttgattttgtgtgaagtgtacttttaatggcacgggccattgtgtatttgcttgaaagataaggatggtattatctttgtatttgaactctaaatgcttaaatgaagtgatcattctggatggagatatgtatggtgtgaacccaattctcgacgccaacgtgtgtgggattttggtgcaagctcctgtagctcgtctctgttatatctatg

SEQ ID NO: 15529 - DNA, 4256 bp, Zea Mays
ctttggctagccttcgggactcgccatctcccagccgcacgctcttctcgcccacgcacacacgattccttctcgcgctctcgagattcttcccacacgcacacggaagattcccgcctcctcccctctgtcgccgctgctgccaacgctagcaccgatgccacctcttggttcccaggttgtgtcttgcctctttccatccaccgtcatcgccgctacctatggcttccccgtcgggtcgtctcttgcctcattctgttccccgccgctgctctcgccacccactatcggaggcattgtgtccagaaacatggttaagagggtatgctgtctgagcgccagggagatccgaacggtgatgccctctactcgcttcccattgtcctagagtcaggcaaatggaggaacatgagtcagtggggctgccatagttggagaatgcggcgtaagcaggccgacgacggcgagttcctcaacatgtactccgccatatgcgtgatgacagctcctccgtcattaccatttgttttatggtagcgagatgcgcgtgaagacatttggattcgtccaccaccacatcactagtctcactctcacctgtaatatatctgcacccaacgagcaggtaccaagcaattagcaagagaaacacaaggtcgaggtggtgaggtatggagctcgccttgggggccatgaccagcttggcccttaagctaggcgacctgctcatggaggagtatgtcgtgcagaagggcctcaagcccgacatcgagtctctctccagggagcttgtgatgatgaacgccgctctcatcgacgcgtcccgggttccacctgaccagctcaccgaggtggaaaagctttgggcacgcaaggtccgggacctgtcgtatgacatggaggacgccgtcgacgatttcatcctgcgtgtggctggtggtgacgactctgccgccgactcaaaattcttcaagaagacccttgccatggtcaaggacgtgatgtcgatgaagaagttcaaggatcggcgccagatctccgacaaggtcaaagacatcaagaaactctccaacgagttagctgaacttcgtgccaagtacacggtaaggggtgtgggcgctgatctcgccgcgagcaccggcatcgaccctcgtgtcatcaatctgtacaagaaagagacagatctcgttggcatcaagaagtcaaggaacaaagtcattaggatgctgtctatggagaccaaagatgatgatgcacttgagtcccatcaggctctaaagatagtgtctatagtcggggttggaggactaggtaagactactctagccaaaacagtgcatgacatgcttaagaagcaattcgactgttctgcttttatttctattggtagaactcctaatctgaataggacattcgagaagatgctattgaaacttgatcgtgagtataaacaagttgacatggccagatgggatctagaacaatttaaaaacgaactggatgaattcttgaaggacaagaggtacttgatcgttgttgatgacatatgggatgttgactcatgggaagcaatcagatatgccttgaaggacaataattgtggaagtagaataatcatgactactcgtaattttgggattgtcacgaaattagaagaggtttatagattaaaacctctttctaatgcaaactccaagaaattgttctacaaaagaatagagagtcaggaaggagaaagccttgatggtgaactctctagtaaaatcatacataaatgtggcggcataccattggctatcattgcaatagctagtttgttggttgaaagatcacgtgaggagtggtcagaagtgtacgacaagattggtcttgggaatgaagacaatacaacaaagataatgtcatacagctactatgatctgcctccttatctcaagccatgtctgctgcaactaagcatatatccagaagactgtatcattgatacaaactctaccatatggaagtggataggtgaaggtctagttcatcttgagaaagaagagggtagcctatttaaggttggagaaagatacttcaaggagcttgtgaatagaagcatgatccagccgacagaggacaaaaatgatcggtttgtagaagggttccgtattcacgacattgtgtttgatctcatctgtaagttgtccaaggatgaagacttcattaccattagcgggcaacattcatctcgggatagtttaagaagagagaagaaaacatgtgtgcctcgctcagactgcaagctacgtcggctggccgtccgaaatcaacgtgtgcagcgcttccctgaagaaaccatcgacatgccagaggtgttgagatcacttagcattatagattgtaatattgaggttatggccccaattgatagcttcagggtttgccgtgtgctgcatctggggaagagctacgtacccatcagcctaaagcatctggggaagctgttgcatctcaagttcctagagatagtatacacgcctattgatgagctccctaaggaaattgggcatctgaggtctcttcagacactgatattagaccgtactggactagacgagctgccaccggttgtttgctcgcttacacggttgatgtgcctgatagcccaggggttcgaaaggttgccagctgacaggatggggaacctaacgtccctggaggagctacgactacgtagggtagttggccggagtgccacccaagccctagtggcagagcttggcaagctgacgaggttgagggtggtcgacatcaccttttcagagcagctagaggagagcttgcaagaagcattggtgcaatctctgtccaatctgcggggactccaggaactaacgcttttgtttaaaatgacacggtggggaagcgatatgtggggagactgggagccaccaaggcagctccggcgcctgattattgaaggcatcatcgtcttctcacgacagcctcgatggatcaaccgctcctgtctgccacgcctctgctacttatctctgatggtgcacactcttgaagcacaggacctagataatctagcgaggttgccagagctccagtacctcacgctagatggtctcagctggcctccaaggtatactgttggcccagacgacttcaggaatctgaggttctgcaaagtgggcacaacgttcgagtttcgtaagggcgccatgccaaggctcgaagtgctgcaatttagagtttttgcagggtactattgttgggcatacaatggtgtgccgttcgagcagttcccaacgaaggatcttgacttggacctggataacgtccttttacttcagcaagtaatagtcaaagtcaactgcgtaggtgctactgtcacacaagtggaggaggtggaggccgtggtcatgcgtgccgtggaaaatcatgccaaccgtccaaccataaaaatgaatcgagcatatgaaatagctatcctatccgacgaagggcgggaggctctgcttcggcgacacattgaaaaggattgctgcgtgcgcacgatgaaggataaatctgatgctttcttcatcagccagctgcggaggtatcgacatcttcagaaagccattattttcatcgactgttcgggtgccagcatgtgtgaggtgcagaaagtggaagcagcttttagacatgcagccgaggttcatcctaaccatccaagtattgaacttatcagaacaaacaccgacggaatggcctcctcctcatctgaccatcccaacacagagcccaggaattgatggctcggtttgtcagatccttccaacccaggagcaggtaaatgtgagttgcttaagtaccaaagagagaggtcctgttcagcaagatgattagaagcattggcaattggcatggcttgttaattagattcgtggttcttagtctaaaatcacattgaagagggagacggacccaagtgatgcagttcatgtgttatctgtatcagtctctgtttttataagctgtcatatattttctcgaaactatcttgtgttgattttgtgtgaagtgtacttttaatggcacgggccattgtgtatttgcttgaaagataaggatggtattatctttgtatttgaactctaaatgcttaaatgaagtgatcattctggatggagatatgtatggtgtgaacccaattctcgacgccaacgtgtgtgggattttggtgcaagctcctgtagctcgtctctgttatatctatg

SEQ ID NO: 15530 - DNA, 4127 bp, Zea Mays
aaaaaaaatctttggctagccttcgggactcgccatctcccagccgcacgctcttctcgcccacgcacacacgattccttctcgcgctctcgagattcttcccacacgcacacggaagattcccgcctcctcccctctgtcgccgctgctgccaacgctagcaccgatgccacctcttggttcccaggttgtgtcttgcctctttccatccaccgtcatcgccgctacctatggcttccccgtcgggtcgtctcttgcctcattctgttccccgccgctgctctcgccacccactatcggaggcattgtgtccagaaacatggttaagagggtatgctgtctgagcgccagggagatccgaacggtgatgccctctactcgcttcccattgtcctagagtcaggcaaatggaggaacatgagtcagtggggctgccatagttggagaatgcggcgtaagcaggccgacgacggcgagttcctcaacatgtactccggtaccaagcaattagcaagagaaacacaaggtcgaggtggtgaggtatggagctcgccttgggggccatgaccagcttggcccttaagctaggcgacctgctcatggaggagtatgtcgtgcagaagggcctcaagcccgacatcgagtctctctccagggagcttgtgatgatgaacgccgctctcatcgacgcgtcccgggttccacctgaccagctcaccgaggtggaaaagctttgggcacgcaaggtccgggacctgtcgtatgacatggaggacgccgtcgacgatttcatcctgcgtgtggctggtggtgacgactctgccgccgactcaaaattcttcaagaagacccttgccatggtcaaggacgtgatgtcgatgaagaagttcaaggatcggcgccagatctccgacaaggtcaaagacatcaagaaactctccaacgagttagctgaacttcgtgccaagtacacggtaaggggtgtgggcgctgatctcgccgcgagcaccggcatcgaccctcgtgtcatcaatctgtacaagaaagagacagatctcgttggcatcaagaagtcaaggaacaaagtcattaggatgctgtctatggagaccaaagatgatgatgcacttgagtcccatcaggctctaaagatagtgtctatagtcggggttggaggactaggtaagactactctagccaaaacagtgcatgacatgcttaagaagcaattcgactgttctgcttttatttctattggtagaactcctaatctgaataggacattcgagaagatgctattgaaacttgatcgtgagtataaacaagttgacatggccagatgggatctagaacaatttaaaaacgaactggatgaattcttgaaggacaagaggtacttgatcgttgttgatgacatatgggatgttgactcatgggaagcaatcagatatgccttgaaggacaataattgtggaagtagaataatcatgactactcgtaattttgggattgtcacgaaattagaagaggtttatagattaaaacctctttctaatgcaaactccaagaaattgttctacaaaagaatagagagtcaggaaggagaaagccttgatggtgaactctctagtaaaatcatacataaatgtggcggcataccattggctatcattgcaatagctagtttgttggttgaaagatcacgtgaggagtggtcagaagtgtacgacaagattggtcttgggaatgaagacaatacaacaaagataatgtcatacagctactatgatctgcctccttatctcaagccatgtctgctgcaactaagcatatatccagaagactgtatcattgatacaaactctaccatatggaagtggataggtgaaggtctagttcatcttgagaaagaagagggtagcctatttaaggttggagaaagatacttcaaggagcttgtgaatagaagcatgatccagccgacagaggacaaaaatgatcggtttgtagaagggttccgtattcacgacattgtgtttgatctcatctgtaagttgtccaaggatgaagacttcattaccattagcgggcaacattcatctcgggatagtttaagaagagagaagaaaacatgtgtgcctcgctcagactgcaagctacgtcggctggccgtccgaaatcaacgtgtgcagcgcttccctgaagaaaccatcgacatgccagaggtgttgagatcacttagcattatagattgtaatattgaggttatggccccaattgatagcttcagggtttgccgtgtgctgcatctggggaagagctacgtacccatcagcctaaagcatctggggaagctgttgcatctcaagttcctagagatagtatacacgcctattgatgagctccctaaggaaattgggcatctgaggtctcttcagacactgatattagaccgtactggactagacgagctgccaccggttgtttgctcgcttacacggttgatgtgcctgatagcccaggggttcgaaaggttgccagctgacaggatggggaacctaacgtccctggaggagctacgactacgtagggtagttggccggagtgccacccaagccctagtggcagagcttggcaagctgacgaggttgagggtggtcgacatcaccttttcagagcagctagaggagagcttgcaagaagcattggtgcaatctctgtccaatctgcggggactccaggaactaacgcttttgtttaaaatgacacggtggggaagcgatatgtggggagactgggagccaccaaggcagctccggcgcctgattattgaaggcatcatcgtcttctcacgacagcctcgatggatcaaccgctcctgtctgccacgcctctgctacttatctctgatggtgcacactcttgaagcacaggacctagataatctagcgaggttgccagagctccagtacctcacgctagatggtctcagctggcctccaaggtatactgttggcccagacgacttcaggaatctgaggttctgcaaagtgggcacaacgttcgagtttcgtaagggcgccatgccaaggctcgaagtgctgcaatttagagtttttgcagggtactattgttgggcatacaatggtgtgccgttcgagcagttcccaacgaaggatcttgacttggacctggataacgtccttttacttcagcaagtaatagtcaaagtcaactgcgtaggtgctactgtcacacaagtggaggaggtggaggccgtggtcatgcgtgccgtggaaaatcatgccaaccgtccaaccataaaaatgaatcgagcatatgaaatagctatcctatccgacgaagggcgggaggctctgcttcggcgacacattgaaaaggattgctgcgtgcgcacgatgaaggataaatctgatgctttcttcatcagccagctgcggaggtatcgacatcttcagaaagccattattttcatcgactgttcgggtgccagcatgtgtgaggtgcagaaagtggaagcagcttttagacatgcagccgaggttcatcctaaccatccaagtattgaacttatcagaacaaacaccgacggaatggcctcctcctcatctgaccatcccaacacagagcccaggaattgatggctcggtttgtcagatccttccaacccaggagcaggtaaatgtgagttgcttaagtaccaaagagagaggtcctgttcagcaagatgattagaagcattggcaattggcatggcttgttaattagattcgtggttcttagtctaaaatcacattgaagagggagacggacccaagtgatgcagttcatgtgttatctgtatcagtctctgtttttataagctgtcatatattttctcgaaactatcttgtgttgattttgtgtgaagtgtacttttaatggcacgggccattgtgtatttgcttgaaagataaggatggtattatctttgtatttgaactctaaatgcttaaatgaagtgatcattctggatggagatatgtatggtgtgaacccaattctcgacgccaacgtgtgtgggattttggtgcaagctcctgtagctcgtctctgttatatctatg

SEQ ID NO: 15531 - DNA, 3210 bp, Zea Mays
cttcgtcatttccagccatatgcgtgatgacagctcctccgtcctttccagccatattcgtccaccaccacatcactagtctcactctcacctataatatatctgcacccaacgagcaggtaccaagcaattagcaagagaaacacaaggtcgaggtggtgaggcatggagctcgccttgggggccatggccagcttggcccctaagctaggcgacctgctcatggaggagtatgtcgtgcagaagggcctcaagcccgacatcgagtctctctccagggagcttgtgatgatgaacgccgctctcgtcgacgcgtcccgggttccacctgaccagctcaccgagaagacccttgccacggtcaaggacgtgatgtcgatgaagaagttcaaggatcggcgccagatctccgacaaggtcaaagacatcaagaaactctccaacgagttagctgaacttcgtgccaagtacacggtaaggggtgtgggtgctgatcttgccgcgagcaccggcatcgacccccgtgtcatcaatctgtacaagaaagagacagatctcgttggcatcgaggagtcaagggacaaagtcattaggatgctgtctatggggaccaaagatgatgatgcacatgagtcccatcaggatctaaagatagtgtctatagtcggggttggaggactaggtaagactactctagccaaaacagtgcatgacatgcttaagaagcaattcgactgttcggcttttatttctattggtagaactcctaatctgaataggacattcgagaagatgctattggaactcgatcgtgagcataaacaagttgacatggccagatgggatctagaacaatttaaaaacgaactggatgaattcttgaaggacaagaggtacttgatcgttgttgatgacatatgggatgttgactcatgggaagcgatcagatatgtcttgaaggacaataattgtggaagtagaataatcatgactactcgcaattccggggttgtcactaaagtagaggaggtttatagattaaaacctctttctactgaaaactccgagaaattgttctacaaaagaatagagagtcaggaaggagaaagccttgatggtgaactctctagtaaaatcatacataaatgtggcggcataccattggctatcattgcaatagctagtttgttggttgaaagatcacgtgaggagtggccagaagtgtatgacaagattggtcttgggaatgaagacaatacaacaaagataatgttatacagctactatgatctgcctccttatctcaagccatgtctgctgcaactaagcatatttccagaagattgtttcattgatacaaaagctgtgatatggatgtggataggtgaaggtctagtccatcttgagaaagaggagggtagcctatttgaggttggagaaagatacttcaaggagctggtgaatagaagcatgatccagccgatagaggaaaaatatcattggtttgtagaaaggttctgtattcacgacattatgtttgatctcatctgtaagttgtccaaggatgaagacttcattacccttagcgggcaacattcatctcagtcactgcaatctctgttcaatctgcggtcagactgcaagctacgtcggctggccgtccgaaatcaacgtgtgcagcgcttccctgaagaaaccatggacatgccagaggtgttgagatcacttagcattatagattgtaatattgaggttatggccccaattgatagcttcagggtttgccgtgtgctgcatatagaaaacaactacgtacccatcagcctaaagcatctagggaagctgttgcatctcaagttcctagagatatttgacacgactattgatgagctccctagagaaattgggcatctgaggtctcttcagacactggtattagtcagtactggactagacgagctgccagtggctgtttgctcgcttacacggctcatgtgtctgatagcctatgggttcgaaaggttgccagctgacaggatagggaacctaacgtccctggaggagctacaactacatagggtggttggccggagtgccacccaagacctagtggcagagcttggcaagctgacgaggttgagggtggtcagaatcaccttctcagagcagctagaggagagctcgcaagaagcattagtgcaatctctgtccaatctgcggttactccaggaactagtgcttttttctgaaatgccagagcggggaagcgatatgtggggagactgggagctaccaaggcagctccggcgcctgattattgaaggcatcgtcttctcacgacagcctcgatggatcaaccgctcctgtctgccacgcctctactccttatatctgatggtgcacgctgttgaagcacaggacctagataatctagcgaggttgccagagctccagtacctcatgctatttggtttcagctggcctccaaggtatactgttggcccagacgacttcaggaatctaaggttctgcgaagtgggcacaacgttcgagtttcgtaagggcgccatgccaaggcttgaagtgctgcgatttggagtttgtgtgccgttcgagcagttcccaacgaaggatgtgatcgaagatcttgacttcgacctggataacgtcattttacttcagcaagtcagggtcaaagtcaactgtgcaggtgctactgtcacacaagtggaggaggtggaggccgtggtcatgcgtgccgtggaaaatcatgccaaccgtccaaccataaaaatggatcgagtatatgaacaaaatatcctatccgacgaagagcgggaggctctgccagctgcggaggtatcgacatcttcagaaagccattattttcatcgactgttcgggtgccagcatgtgtgaggttcagaaagtggaagcagcttatagacatgcagccgaggttcatccgaaccatccaagtatcgaacttatcagaacaaacaccgacggaatggcctcctcctcatctgaccatcccaacacagagcccaggaattgatggctcggtttgtccaatccttccaacccaacagtaggtcagcagagggttgcctggcgcagcatatgggtatctggcttgtttttctaccggtctggtgcacggcggccagcgctgtgtatttgcaggaaggcagtgaccactgaccagtg

SEQ ID NO: 15532 - DNA, 3455 bp, Zea Mays
caacgagcaggtaccaagcaattagcaagagaaacacaaggtcgaggtggtgaggcatggagctcgccttgggggccatggccagcttggcccctaagctaggcgacctgctcatggaggagtatgtcgtgcagaagggcctcaagcccgacatcgagtctctctccagggagcttgtgatgatgaacgccgctctcgtcgacgcgtcccgggttccacctgaccagctcaccgagaagacccttgccacggtcaaggacgtgatgtcgatgaagaagttcaaggatcggcgccagatctccgacaaggtcaaagacatcaagaaactctccaacgagttagctgaacttcgtgccaagtacacggtaaggggtgtgggtgctgatcttgccgcgagcaccggcatcgacccccgtgtcatcaatctgtacaagaaagagacagatctcgttggcatcgaggagtcaagggacaaagtcattaggatgctgtctatggggaccaaagatgatgatgcacatgagtcccatcaggatctaaagatagtgtctatagtcggggttggaggactaggtaagactactctagccaaaacagtgcatgacatgcttaagaagcaattcgactgttcggcttttatttctattggtagaactcctaatctgaataggacattcgagaagatgctattggaactcgatcgtgagcataaacaagttgacatggccagatgggatctagaacaatttaaaaacgaactggatgaattcttgaaggacaagaggtacttgatcgttgttgatgacatatgggatgttgactcatgggaagcgatcagatatgtcttgaaggacaataattgtggaagtagaataatcatgactactcgcaattccggggttgtcactaaagtagaggaggtttatagattaaaacctctttctactgaaaactccgagaaattgttctacaaaagaatagagagtcaggaaggagaaagccttgatggtgaactctctagtaaaatcatacataaatgtggcggcataccattggctatcattgcaatagctagtttgttggttgaaagatcacgtgaggagtggccagaagtgtatgacaagattggtcttgggaatgaagacaatacaacaaagataatgttatacagctactatgatctgcctccttatctcaagccatgtctgctgcaactaagcatatttccagaagattgtttcattgatacaaaagctgtgatatggatgtggataggtgaaggtctagtccatcttgagaaagaggagggtagcctatttgaggttggagaaagatacttcaaggagctggtgaatagaagcatgatccagccgatagaggaaaaatatcattggtttgtagaaaggttctgtattcacgacattatgtttgatctcatctgtaagttgtccaaggatgaagacttcattacccttagcgggcaacattcatctcagtcactgcaatctctgttcaatctgcggtcagactgcaagctacgtcggctggccgtccgaaatcaacgtgtgcagcgcttccctgaagaaaccatggacatgccagaggtgttgagatcacttagcattatagattgtaatattgaggttatggccccaattgatagcttcagggtttgccgtgtgctgcatatagaaaacaactacgtacccatcagcctaaagcatctagggaagctgttgcatctcaagttcctagagatatttgacacgactattgatgagctccctagagaaattgggcatctgaggtctcttcagacactggtattagtcagtactggactagacgagctgccagtggctgtttgctcgcttacacggctcatgtgtctgatagcctatgggttcgaaaggttgccagctgacaggatagggaacctaacgtccctggaggagctacaactacatagggtggttggccggagtgccacccaagacctagtggcagagcttggcaagctgacgaggttgagggtggtcagaatcaccttctcagagcagctagaggagagctcgcaagaagcattagtgcaatctctgtccaatctgcggttactccaggaactagtgcttttttctgaaatgccagagcggggaagcgatatgtggggagactgggagctaccaaggcagctccggcgcctgattattgaaggcatcgtcttctcacgacagcctcgatggatcaaccgctcctgtctgccacgcctctactccttatatctgatggtgcacgctgttgaagcacaggacctagataatctagcgaggttgccagagctccagtacctcatgctatttggtttcagctggcctccaaggtatactgttggcccagacgacttcaggaatctaaggttctgcgaagtgggcacaacgttcgagtttcgtaagggcgccatgccaaggcttgaagtgctgcgatttggagtttgtgtgccgttcgagcagttcccaacgaaggatgtgatcgaagatcttgacttcgacctggataacgtcattttacttcagcaagtcagggtcaaagtcaactgtgcaggtgctactgtcacacaagtggaggaggtggaggccgtggtcatgcgtgccgtggaaaatcatgccaaccgtccaaccataaaaatggatcgagtatatgaacaaaatatcctatccgacgaagagcgggaggctctgctgcggaggtatcgacatcttcagaaagccattattttcatcgactgttcgggtgccagcatgtgtgaggttcagaaagtggaagcagcttatagacatgcagccgaggttcatccgaaccatccaagtatcgaacttatcagaacaaacaccgacggaatggcctcctcctcatctgaccatcccaacacagagcccaggaattgatggctcggtttgtccaatccttccaacccaacagtaggtaaatgtgagttgcttaagtaccaaagagagaggtcctgttcagcaagatgattagaagcattggcatggcttgttaattagattcgcggttcttagtctaaaatcacattgaagagggagacggacccaagtgatgcagttcatgtgttatctgtatcaatccctatttttataagctgtcatatattttctcgaaactatcttctgttgattttgtgtgaagtgtacttttaatggcacgggccacgtatttccttggaaacgaccatgtggagttattttttcccccattttctttcctgagatgggctgtgtatttgcttgaaagataaggatgatattatctttgtatttgaactctagatgcttaaatgaagtgatcatcctggatggagataagtatggtgtgaacccaattctcgacgccaacgtgtatgggattttggtgcaagctcctgtagctcgtctttg

SEQ ID NO: 15533 - DNA, 3446 bp, Zea Mays
ctttccagccatattcgtccaccaccacatcactagtctcactctcacctataatatatctgcacccaacgagcaggtaccaagcaattagcaagagaaacacaaggtcgaggtggtgaggcatggagctcgccttgggggccatggccagcttggcccctaagctaggcgacctgctcatggaggagtatgtcgtgcagaagggcctcaagcccgacatcgagtctctctccagggagcttgtgatgatgaacgccgctctcgtcgacgcgtcccgggttccacctgaccagctcaccgagaagacccttgccacggtcaaggacgtgatgtcgatgaagaagttcaaggatcggcgccagatctccgacaaggtcaaagacatcaagaaactctccaacgagttagctgaacttcgtgccaagtacacggtaaggggtgtgggtgctgatcttgccgcgagcaccggcatcgacccccgtgtcatcaatctgtacaagaaagagacagatctcgttggcatcgaggagtcaagggacaaagtcattaggatgctgtctatggggaccaaagatgatgatgcacatgagtcccatcaggatctaaagatagtgtctatagtcggggttggaggactagaactcctaatctgaataggacattcgagaagatgctattggaactcgatcgtgagcataaacaagttgacatggccagatgggatctagaacaatttaaaaacgaactggatgaattcttgaaggacaagaggtacttgatcgttgttgatgacatatgggatgttgactcatgggaagcgatcagatatgtcttgaaggacaataattgtggaagtagaataatcatgactactcgcaattccggggttgtcactaaagtagaggaggtttatagattaaaacctctttctactgaaaactccgagaaattgttctacaaaagaatagagagtcaggaaggagaaagccttgatggtgaactctctagtaaaatcatacataaatgtggcggcataccattggctatcattgcaatagctagtttgttggttgaaagatcacgtgaggagtggccagaagtgtatgacaagattggtcttgggaatgaagacaatacaacaaagataatgttatacagctactatgatctgcctccttatctcaagccatgtctgctgcaactaagcatatttccagaagattgtttcattgatacaaaagctgtgatatggatgtggataggtgaaggtctagtccatcttgagaaagaggagggtagcctatttgaggttggagaaagatacttcaaggagctggtgaatagaagcatgatccagccgatagaggaaaaatatcattggtttgtagaaaggttctgtattcacgacattatgtttgatctcatctgtaagttgtccaaggatgaagacttcattacccttagcgggcaacattcatctcagtcactgcaatctctgttcaatctgcggtcagactgcaagctacgtcggctggccgtccgaaatcaacgtgtgcagcgcttccctgaagaaaccatggacatgccagaggtgttgagatcacttagcattatagattgtaatattgaggttatggccccaattgatagcttcagggtttgccgtgtgctgcatatagaaaacaactacgtacccatcagcctaaagcatctagggaagctgttgcatctcaagttcctagagatatttgacacgactattgatgagctccctagagaaattgggcatctgaggtctcttcagacactggtattagtcagtactggactagacgagctgccagtggctgtttgctcgcttacacggctcatgtgtctgatagcctatgggttcgaaaggttgccagctgacaggatagggaacctaacgtccctggaggagctacaactacatagggtggttggccggagtgccacccaagacctagtggcagagcttggcaagctgacgaggttgagggtggtcagaatcaccttctcagagcagctagaggagagctcgcaagaagcattagtgcaatctctgtccaatctgcggttactccaggaactagtgcttttttctgaaatgccagagcggggaagcgatatgtggggagactgggagctaccaaggcagctccggcgcctgattattgaaggcatcgtcttctcacgacagcctcgatggatcaaccgctcctgtctgccacgcctctactccttatatctgatggtgcacgctgttgaagcacaggacctagataatctagcgaggttgccagagctccagtacctcatgctatttggtttcagctggcctccaaggtatactgttggcccagacgacttcaggaatctaaggttctgcgaagtgggcacaacgttcgagtttcgtaagggcgccatgccaaggcttgaagtgctgcgatttggagtttgtgtgccgttcgagcagttcccaacgaaggatgtgatcgaagatcttgacttcgacctggataacgtcattttacttcagcaagtcagggtcaaagtcaactgtgcaggtgctactgtcacacaagtggaggaggtggaggccgtggtcatgcgtgccgtggaaaatcatgccaaccgtccaaccataaaaatggatcgagtatatgaacaaaatatcctatccgacgaagagcgggaggctctgccagctgcggaggtatcgacatcttcagaaagccattattttcatcgactgttcgggtgccagcatgtgtgaggttcagaaagtggaagcagcttatagacatgcagccgaggttcatccgaaccatccaagtatcgaacttatcagaacaaacaccgacggaatggcctcctcctcatctgaccatcccaacacagagcccaggaattgatggctcggtttgtccaatccttccaacccaacagtaggtaaatgtgagttgcttaagtaccaaagagagaggtcctgttcagcaagatgattagaagcattggcatggcttgttaattagattcgcggttcttagtctaaaatcacattgaagagggagacggacccaagtgatgcagttcatgtgttatctgtatcaatccctatttttataagctgtcatatattttctcgaaactatcttctgttgattttgtgtgaagtgtacttttaatggcacgggccacgtatttccttggaaacgaccatgtggagttattttttcccccattttctttcctgagatgggctgtgtatttgcttgaaagataaggatgatattatctttgtatttgaactctagatgcttaaatgaagtgatcatcctggatggagataagtatggtgtgaacccaattctcgacgccaacgtgtatgggattttggtgcaagctcctgtagctcgtctttg

SEQ ID NO: 15534 - DNA, 3558 bp, Zea Mays
cccttacacagctgcttcgtcatttccagccatatgcgtgatgacagctcctccgtcctttccagccatattcgtccaccaccacatcactagtctcactctcacctataatatatctgcacccaacgagcaggtaccaagcaattagcaagagaaacacaaggtcgaggtggtgaggcatggagctcgccttgggggccatggccagcttggcccctaagctaggcgacctgctcatggaggagtatgtcgtgcagaagggcctcaagcccgacatcgagtctctctccagggagcttgtgatgatgaacgccgctctcgtcgacgcgtcccgggttccacctgaccagctcaccgagaagacccttgccacggtcaaggacgtgatgtcgatgaagaagttcaaggatcggcgccagatctccgacaaggtcaaagacatcaagaaactctccaacgagttagctgaacttcgtgccaagtacacggtaaggggtgtgggtgctgatcttgccgcgagcaccggcatcgacccccgtgtcatcaatctgtacaagaaagagacagatctcgttggcatcgaggagtcaagggacaaagtcattaggatgctgtctatggggaccaaagatgatgatgcacatgagtcccatcaggatctaaagatagtgtctatagtcggggttggaggactaggtaagactactctagccaaaacagtgcatgacatgcttaagaagcaattcgactgttcggcttttatttctattggtagaactcctaatctgaataggacattcgagaagatgctattggaactcgatcgtgagcataaacaagttgacatggccagatgggatctagaacaatttaaaaacgaactggatgaattcttgaaggacaagaggtacttgatcgttgttgatgacatatgggatgttgactcatgggaagcgatcagatatgtcttgaaggacaataattgtggaagtagaataatcatgactactcgcaattccggggttgtcactaaagtagaggaggtttatagattaaaacctctttctactgaaaactccgagaaattgttctacaaaagaatagagagtcaggaaggagaaagccttgatggtgaactctctagtaaaatcatacataaatgtggcggcataccattggctatcattgcaatagctagtttgttggttgaaagatcacgtgaggagtggccagaagtgtatgacaagattggtcttgggaatgaagacaatacaacaaagataatgttatacagctactatgatctgcctccttatctcaagccatgtctgctgcaactaagcatatttccagaagattgtttcattgatacaaaagctgtgatatggatgtggataggtgaaggtctagtccatcttgagaaagaggagggtagcctatttgaggttggagaaagatacttcaaggagctggtgaatagaagcatgatccagccgatagaggaaaaatatcattggtttgtagaaaggttctgtattcacgacattatgtttgatctcatctgtaagttgtccaaggatgaagacttcattacccttagcgggcaacattcatctcagtcactgcaatctctgttcaatctgcggtcagactgcaagctacgtcggctggccgtccgaaatcaacgtgtgcagcgcttccctgaagaaaccatggacatgccagaggtgttgagatcacttagcattatagattgtaatattgaggttatggccccaattgatagcttcagggtttgccgtgtgctgcatatagaaaacaactacgtacccatcagcctaaagcatctagggaagctgttgcatctcaagttcctagagatatttgacacgactattgatgagctccctagagaaattgggcatctgaggtctcttcagacactggtattagtcagtactggactagacgagctgccagtggctgtttgctcgcttacacggctcatgtgtctgatagcctatgggttcgaaaggttgccagctgacaggatagggaacctaacgtccctggaggagctacaactacatagggtggttggccggagtgccacccaagacctagtggcagagcttggcaagctgacgaggttgagggtggtcagaatcaccttctcagagcagctagaggagagctcgcaagaagcattagtgcaatctctgtccaatctgcggttactccaggaactagtgcttttttctgaaatgccagagcggggaagcgatatgtggggagactgggagctaccaaggcagctccggcgcctgattattgaaggcatcgtcttctcacgacagcctcgatggatcaaccgctcctgtctgccacgcctctactccttatatctgatggtgcacgctgttgaagcacaggacctagataatctagcgaggttgccagagctccagtacctcatgctatttggtttcagctggcctccaaggtatactgttggcccagacgacttcaggaatctaaggttctgcgaagtgggcacaacgttcgagtttcgtaagggcgccatgccaaggcttgaagtgctgcgatttggagtttgtgtgccgttcgagcagttcccaacgaaggatgtgatcgaagatcttgacttcgacctggataacgtcattttacttcagcaagtcagggtcaaagtcaactgtgcaggtgctactgtcacacaagtggaggaggtggaggccgtggtcatgcgtgccgtggaaaatcatgccaaccgtccaaccataaaaatggatcgagtatatgaacaaaatatcctatccgacgaagagcgggaggctctggtgaggctgttctctttgaatatgtttgtgtacttcaattctcagcttcagcgacacattgaaaaggattgctgcgtgcgcacgatgaaggataaatctgatgctttcttcatcagccagctgcggagaacaaacaccgacggaatggcctcctcctcatctgaccatcccaacacagaggaattgatggctcggtttgtccaatccttccaacccaacagtaggtaaatgtgagttgcttaagtaccaaagagagaggtcctgttcagcaagatgattagaagcattggcatggcttgttaattagattcgcggttcttagtctaaaatcacattgaagagggagacggacccaagtgatgcagttcatgtgttatctgtatcaatccctatttttataagctgtcatatattttctcgaaactatcttctgttgattttgtgtgaagtgtacttttaatggcacgggccacgtatttccttggaaacgaccatgtggagttattttttcccccattttctttcctgagatgggctgtgtatttgcttgaaagataaggatgatattatctttgtatttgaactctagatgcttaaatgaagtgatcatcctggatggagataagtatggtgtgaacccaattctcgacgccaacgtgtatgggattttggtgcaagctcctgtagctcgtctttg

SEQ ID NO: 15535 - DNA, 499 bp, Zea Mays
agaaatttgccgttccaactttgtcgcggttctctctcactggcggcggcggcgaggcctctgcgtcttccagatccctcgtacgggagggaatctccgcagccgagcggagcggcggaggggagggaggtgtgccctatatccgtacggtgtacgtgcatgtgctggcgcagcaaagcgacagctctctcgaagatgacgatgtttatgctcccttttggacgttgatattggagggcaagaaatacaattgagttgtataccaaatcagtcatgtattaaaatgagatgtagttttaattctattgtttgtatattgttgggttgtactttagaatcgtgcgttctaattccacgcaatataagagagctttgtatgtattagatgtaatactcaaaagtgtaataaaagaggatagagataatctcaaaagtttgtggtctctactattcatcacatgtgatcaacactagtgaaaagtggataattagaacaaag

SEQ ID NO: 15536 - DNA, 1614 bp, Zea Mays
cattcccttccttccccgggcggcggggtaggattccttgccgtctcccgctcttcaccacgcgcttcccgcgaaacgccaaccaattcctccgtcgatcaaaaactgcccctctcacaaggagaaatctttcccgcgggcggcggaggaattcgcggattaggttggtgggttcgaccgatccgcgtccccgggttcccaagttcccagccactcaccaacaactgttcaatgatacacttctcaagatcaacaaggaccttgcctacttgcagttcgagttgcgggcatgcattaaccaatatgatggaatggtttactacggggtggttaataacattgctgacgaagagtctaagcttggaacaaagtactccgtgccccagatcgcattctacaagggactgctagaagcaatagttcaggaagctggaaatgatgggagcataaccagtatcgacgccctcaatgtccggcttgataaccaggtcgcagtattagacggttcacaggacagccagtctcgccttcctagctccataaagaacttctcaatgagccagaaggagaaaactctcgatgagctgatacgggaccgctggttgtcgtacaccgccacaggcaagatcggtctgggcaccaggtcatttcttgacctccggagctggttccgtggtaacgatatcccgtcttgtgttgtctgcaacgaagcttgtataaaggcatcgagttgtccgaacgagggatgcgatgttagaattcacgagtactgcttgaagaagaaattctcacagagaaaggcctcgagagcgtgtcctagttgcggtactggatggccgtgtcaagatggcgagggcgaggccgatgaagtgaacgaacctggggaggaggatctagcctcgccggctaaccatccctcgaggaagaagcgcagtagagtcaaagctgagctggtggaggaaaacgacatcgcaggcccgtcgacggaggtgcctaggactaggaggaccctgagaagcgctaaagccgaagcagtcgaggccgatcaagaggcgtcttctaccgcagcttcacagccaggcaggggttctaaaagaaggaagaagtgagtgatgactgatgatgcatgcttataaaggagggagattgcaaatgttcctcctttgccatgtgtagatactacagtagacgtgctggtatccagtgggtagtttttcaagtgccagggcaaaagagccttctagttctgctctttgctacagtagggactcgtagactggtggagctctcatgacgtctaagttatttatcttgtgaagccattcccatattattacttgtttgttatggtagtagagaacatcttggagcactgaaaaacttgagggcatgggatgctgtcgcttgcatttgttgattctggattgaggcatgacatgcatgctgtagcttgcaattggcagctccttcaagttaaagttatctagcttgttcgctgcggcttgctgcggctgcaatccggctgcggctgcggcttctacagtatttttctctctatggattgcagctgcagcagtccaaacagctgcaacagtgtcggcttgtagccagccg

SEQ ID NO: 15537 - DNA, 1914 bp, Zea Mays
ttcggccgagcagacccgtggcctcactcccccgcgcgttagggttccgctctcatccttcgtgcctgctcaccgccgccacttccagctaggccgtcgtcgccgcgccccaccagcttcttaactacactacctgtcatccagtagccctgttcgtcgtcgacactccagttcgaataagtatggagaaggccagcaggggcgagaggtcggcgacggctgcggccaccgcctggctctcggtgaatatgtaggcgaggctcccgcggaagaagaggaagagcacgaacagcacgagcccgatggcgaaggaggtgacgaccacgttgtagatcgcgaacttggccctcctcgcgctcccagctcccagctcgttcgccactcgcactctgaaaaagataggtgccaggaagcctatggagatcatcatctcccaaccattgatgttaaggctgcacatttagtaaagcagctagcaagtgatgaaagtgtagagtgatctgtggacattatcattagggttcctttaatattaccatatcgaaagggcgtcaagtgcgatctccgcattcttcatgtatcctgtgaggagcaccagtatggtgttgtaccacaattccaagctgaaagaaaaaaagactacgatgcggatggataccatccacacccacagaccacagtggcttgctttgcttaccagagcatgacaccagaagagagcgagagcctgacgatggcgccgaggtcggcgaaggcggcggacgagaatccggtccaggtgagagggcatccgccgaagaagacgaaggcgagctggccgaacacggggatccacatggcgacgaccatggagcccatgacgccggcgaggccgaggcggaggtggacggcggcgagccaggacagggcgaggtggaggccgaggttgagcatggcgaggtacgtgatgatcatgttcttgatctgcgcctgcaggtagatgcccagcatgtggtactgcttcgccccgtacgactgcccgcacagcgtctccagcgcgctcgccatgcccagctgcatgcagatgcatatcgcgcccggccggacgccgacgacgcggacttgttggaacagagccgtcgtcgaccagtcgacgcctgggtgcctggccattttcttcgccgaagaagggaaaaagaagccgccgccaagaccaagagggaagaagaggaagcagcagccaagagagcaattggaacatgactgttgggatcggcacgagatgtcgtcgaggcggcggcaagctttattgattccaatgttttttttttctatctagcttgtccggcacgagttggtggctgactttattcgggctctgaaccgagagcacggatcgatcttttgaatcgaatgctgctggcgggggcgggccgcctggagctcgacgaacgaagggcaagacgacatcgactacaaaatggtccccgatcgtgttgtgcagcgtgttgctcgtgatcactatacttgcatgcatctttgaatttgaatcatgcatgcgtgcatgtccgtatatagatccacaacatgggctgtactttttttgaaaaaaattgtttcgtctttctcttttttgcgaacgataattgtcggcacgtttttttttcgttcggaggccggtgttagagagtacacatgtgaactgtctgtccacttctctctccgttagcttaatcttgtgttctaacgagagagagagtacgtgtgtgtgcgtgtatggagggagttatgcgaacaagaatcaagaacgaatggattgatagaaagacacgtacgtaccaggatgccgttgctgaacctcatgaggacggtggagacgagcgcgtaggcggcgagctcggtggcgccgatgtggccgatgaaggcctggctgat

SEQ ID NO: 15538 - DNA, 1728 bp, Zea Mays
ttcggccgagcagacccgtggcctcactcccccgcgcgttagggttccgctctcatccttcgtgcctgctcaccgccgccacttccagctaggccgtcgtcgccgcgccccaccaggttctcgcgttttccccctctccaagcttccatccttccctcttaccttactggcgggtgttgtttctgtacccggtggttcatctcgccgcggccgattagctgttattcacggaatcgtcttctgcttcttaactacactacctgtcatccagtagccctgttcgtcgtcgacactccagttcgaataagccaggaagcctatggagatcatcatctcccaaccattgatgttaaggctgcacatttagtaaagcagctagcaagtgatgaaagtgtagagtgatctgtggacattatcattagggttcctttaatattaccatatcgaaagggcgtcaagtgcgatctccgcattcttcatgtatcctgtgaggagcaccagtatggtgttgtaccacaattccaagctgaaagaaaaaaagactacgatgcggatggataccatccacacccacagaccacagtggcttgctttgcttaccagagcatgacaccagaagagagcgagagcctgacgatggcgccgaggtcggcgaaggcggcggacgagaatccggtccaggtacatctgcagcgggaaggcccagacgaaggagaagagcacggggatgtaccagagcgccacggtccccgccaccgccgagatgtccgggtcctgccccagcgccaccagcagcggctccgtgaacaggtacacggggagctgcaccacggcgcacgccgacaggatgatccacgaccgctgcagctgcatgcagatgcatatcgcgcccggccggacgccgacgacgcggacttgttggaacagagccgtcgtcgaccagtcgacgcctgggtgcctggccattttcttcgccgaagaagggaaaaagaagccgccgccaagaccaagagggaagaagaggaagcagcagccaagagagcaattggaacatgactgttgggatcggcacgagatgtcgtcgaggcggcggcaagctttattgattccaatgttttttttttctatctagcttgtccggcacgagttggtggctgactttattcgggctctgaaccgagagcacggatcgatcttttgaatcgaatgctgctggcgggggcgggccgcctggagctcgacgaacgaagggcaagacgacatcgactacaaaatggtccccgatcgtgttgtgcagcgtgttgctcgtgatcactatacttgcatgcatctttgaatttgaatcatgcatgcgtgcatgtccgtatatagatccacaacatgggctgtactttttttgaaaaaaattgtttcgtctttctcttttttgcgaacgataattgtcggcacgtttttttttcgttcggaggccggtgttagagagtacacatgtgaactgtctgtccacttctctctccgttagcttaatcttgtgttctaacgagagagagagtacgtgtgtgtgcgtgtatggagggagttatgcgaacaagaatcaagaacgaatggattgatagaaagacacgtacgtaccaggatgccgttgctgaacctcatgaggacggtggagacgagcgcgtaggcggcgagctcggtggcgccgatgtggccgatgaaggcctggctgat

SEQ ID NO: 15539 - DNA, 2392 bp, Zea Mays
ttcggccgagcagacccgtggcctcactcccccgcgcgttagggttccgctctcatccttcgtgcctgctcaccgccgccacttccagctaggccgtcgtcgccgcgccccaccaggttctcgcgttttccccctctccaagcttccatccttccctcttaccttactggcgggtgttgtttctgtacccggtggttcatctcgccgcggccgattagctgttattcacggaatcgtcttctgcttcttaactacactacctgtcatccagtagccctgttcgtcgtcgacactccagttcgaataaggctctgagagcacctcaccttcacatgaagccccaccacgtagcctaggactgcgccaagaggaatgccgatcaggtagtacgacgtgacgttgacgtacgcgactacgccttgccaaccggcaccaacagcgacacctgacagcacgggctggacgctgttgagcagtatggagaaggccagcaggggcgagaggtcggcgacggctgcggccaccgcctggctctcggtgaatatgtaggcgaggctcccgcggaagaagaggaagagcacgaacagcacgagcccgatggcgaaggaggtgacgaccacgttgtagatcgcgaacttggccctcctcgcgctcccagctcccagctcgttcgccactcgcactctgaaaaagatagccaggaagcctatggagatcatcatctcccaaccattgatgttaaggctgcacatttagtaaagcagctagcaagtgatgaaagtgtagagtgatctgtggacattatcattagggttcctttaatattaccatatcgaaagggcgtcaagtgcgatctccgcattcttcatgtatcctgtgaggagcaccagtatggtgttgtaccacaattccaagctgaaagaaaaaaagactacgatgcggatggataccatccacacccacagaccacagtggcttgctttgcttaccagagcatgacaccagaagagagcgagagcctgacgatggcgccgaggtcggcgaaggcggcggacgagaatccggtccaggtgagagggcatccgccgaagaagacgaaggcgagctggccgaacacggggatccacatggcgacgaccatggagcccatgacgccggcgaggccgaggcggaggtggacggcggcgagccaggacagggcgaggtggaggccgaggttgagcatggcgaggtacgtgatgatcatgttcttgatctgcgcctgcaggtacatctgcagcgggaaggcccagacgaaggagaagagcacggggatgtaccagagcgccacggtccccgccaccgccgagatgtccgggtcctgccccagcgccaccagcagcggctccgtgaacaggtacacggggagctgcaccacggcgcacgccgacaggatgatccacgaccgctgcaggtagatgcccagcatgtggtactgcttcgccccgtacgactgcccgcacagcgtctccagcgcgctcgccatgcccagctgcatgcagatgcatatcgcgcccggccggacgccgacgacgcggacttgttggaacagagccgtcgtcgaccagtcgacgcctgggtgcctggccattttcttcgccgaagaagggaaaaagaagccgccgccaagaccaagagggaagaagaggaagcagcagccaagagagcaattggaacatgactgttgggatcggcacgagatgtcgtcgaggcggcggcaagctttattgattccaatgttttttttttctatctagcttgtccggcacgagttggtggctgactttattcgggctctgaaccgagagcacggatcgatcttttgaatcgaatgctgctggcgggggcgggccgcctggagctcgacgaacgaagggcaagacgacatcgactacaaaatggtccccgatcgtgttgtgcagcgtgttgctcgtgatcactatacttgcatgcatctttgaatttgaatcatgcatgcgtgcatgtccgtatatagatccacaacatgggctgtactttttttgaaaaaaattgtttcgtctttctcttttttgcgaacgataattgtcggcacgtttttttttcgttcggaggccggtgttagagagtacacatgtgaactgtctgtccacttctctctccgttagcttaatcttgtgttctaacgagagagagagtacgtgtgtgtgcgtgtatggagggagttatgcgaacaagaatcaagaacgaatggattgatagaaagacacgtacgtaccaggatgccgttgctgaacctcatgaggacggtggagacgagcgcgtaggcggcgagctcggtggcgccgatgtggccgatgaaggcctggctgat

SEQ ID NO: 15540 - DNA, 2268 bp, Zea Mays
ttcggccgagcagacccgtggcctcactcccccgcgcgttagggttccgctctcatccttcgtgcctgctcaccgccgccacttccagctaggccgtcgtcgccgcgccccaccagcttcttaactacactacctgtcatccagtagccctgttcgtcgtcgacactccagttcgaataaggctctgagagcacctcaccttcacatgaagccccaccacgtagcctaggactgcgccaagaggaatgccgatcaggtagtacgacgtgacgttgacgtacgcgactacgccttgccaaccggcaccaacagcgacacctgacagcacgggctggacgctgttgagcagtatggagaaggccagcaggggcgagaggtcggcgacggctgcggccaccgcctggctctcggtgaatatgtaggcgaggctcccgcggaagaagaggaagagcacgaacagcacgagcccgatggcgaaggaggtgacgaccacgttgtagatcgcgaacttggccctcctcgcgctcccagctcccagctcgttcgccactcgcactctgaaaaagataggtgccaggaagcctatggagatcatcatctcccaaccattgatgttaaggctgcacatttagtaaagcagctagcaagtgatgaaagtgtagagtgatctgtggacattatcattagggttcctttaatattaccatatcgaaagggcgtcaagtgcgatctccgcattcttcatgtatcctgtgaggagcaccagtatggtgttgtaccacaattccaagctgaaagaaaaaaagactacgatgcggatggataccatccacacccacagaccacagtggcttgctttgcttaccagagcatgacaccagaagagagcgagagcctgacgatggcgccgaggtcggcgaaggcggcggacgagaatccggtccaggtgagagggcatccgccgaagaagacgaaggcgagctggccgaacacggggatccacatggcgacgaccatggagcccatgacgccggcgaggccgaggcggaggtggacggcggcgagccaggacagggcgaggtggaggccgaggttgagcatggcgaggtacgtgatgatcatgttcttgatctgcgcctgcaggtacatctgcagcgggaaggcccagacgaaggagaagagcacggggatgtaccagagcgccacggtccccgccaccgccgagatgtccgggtcctgccccagcgccaccagcagcggctccgtgaacaggtacacggggagctgcaccacggcgcacgccgacaggatgatccacgaccgctgcaggtagatgcccagcatgtggtactgcttcgccccgtacgactgcccgcacagcgtctccagcgcgctcgccatgcccagctgcatgcagatgcatatcgcgcccggccggacgccgacgacgcggacttgttggaacagagccgtcgtcgaccagtcgacgcctgggtgcctggccattttcttcgccgaagaagggaaaaagaagccgccgccaagaccaagagggaagaagaggaagcagcagccaagagagcaattggaacatgactgttgggatcggcacgagatgtcgtcgaggcggcggcaagctttattgattccaatgttttttttttctatctagcttgtccggcacgagttggtggctgactttattcgggctctgaaccgagagcacggatcgatcttttgaatcgaatgctgctggcgggggcgggccgcctggagctcgacgaacgaagggcaagacgacatcgactacaaaatggtccccgatcgtgttgtgcagcgtgttgctcgtgatcactatacttgcatgcatctttgaatttgaatcatgcatgcgtgcatgtccgtatatagatccacaacatgggctgtactttttttgaaaaaaattgtttcgtctttctcttttttgcgaacgataattgtcggcacgtttttttttcgttcggaggccggtgttagagagtacacatgtgaactgtctgtccacttctctctccgttagcttaatcttgtgttctaacgagagagagagtacgtgtgtgtgcgtgtatggagggagttatgcgaacaagaatcaagaacgaatggattgatagaaagacacgtacgtaccaggatgccgttgctgaacctcatgaggacggtggagacgagcgcgtaggcggcgagctcggtggcgccgatgtggccgatgaaggcctggctgat

SEQ ID NO: 15541 - DNA, 1684 bp, Zea Mays
ttcggccgagcagacccgtggcctcactcccccgcgcgttagggttccgctctcatccttcgtgcctgctcaccgccgccacttccagctaggccgtcgtcgccgcgccccaccagcttcttaactacactacctgtcatccagtagccctgttcgtcgtcgacactccagttcgaataagggttcctttaatattaccatatcgaaagggcgtcaagtgcgatctccgcattcttcatgtatcctgtgaggagcaccagtatggtgttgtaccacaattccaagctgaaagaaaaaaagactacgatgcggatggataccatccacacccacagaccacagtggcttgctttgcttaccagagcatgacaccagaagagagcgagagcctgacgatggcgccgaggtcggcgaaggcggcggacgagaatccggtccaggtgagagggcatccgccgaagaagacgaaggcgagctggccgaacacggggatccacatggcgacgaccatggagcccatgacgccggcgaggccgaggcggaggtggacggcggcgagccaggacagggcgaggtggaggccgaggttgagcatggcgaggtacgtgatgatcatgttcttgatctgcgcctgcaggtacatctgcagcgggaaggcccagacgaaggagaagagcacggggatgtaccagagcgccacggtccccgccaccgccgagatgtccgggtcctgccccagcgccaccagcagcggctccgtgaacaggtacacggggagctgcaccacggcgcacgccgacaggatgatccacgaccgctgcagctgcatgcagatgcatatcgcgcccggccggacgccgacgacgcggacttgttggaacagagccgtcgtcgaccagtcgacgcctgggtgcctggccattttcttcgccgaagaagggaaaaagaagccgccgccaagaccaagagggaagaagaggaagcagcagccaagagagcaattggaacatgactgttgggatcggcacgagatgtcgtcgaggcggcggcaagctttattgattccaatgttttttttttctatctagcttgtccggcacgagttggtggctgactttattcgggctctgaaccgagagcacggatcgatcttttgaatcgaatgctgctggcgggggcgggccgcctggagctcgacgaacgaagggcaagacgacatcgactacaaaatggtccccgatcgtgttgtgcagcgtgttgctcgtgatcactatacttgcatgcatctttgaatttgaatcatgcatgcgtgcatgtccgtatatagatccacaacatgggctgtactttttttgaaaaaaattgtttcgtctttctcttttttgcgaacgataattgtcggcacgtttttttttcgttcggaggccggtgttagagagtacacatgtgaactgtctgtccacttctctctccgttagcttaatcttgtgttctaacgagagagagagtacgtgtgtgtgcgtgtatggagggagttatgcgaacaagaatcaagaacgaatggattgatagaaagacacgtacgtaccaggatgccgttgctgaacctcatgaggacggtggagacgagcgcgtaggcggcgagctcggtggcgccgatgtggccgatgaaggcctggctgat

SEQ ID NO: 15542 - DNA, 1664 bp, Zea Mays
ttcggccgagcagacccgtggcctcactcccccgcgcgttagggttccgctctcatccttcgtgcctgctcaccgccgccacttccagctaggccgtcgtcgccgcgccccaccagctgttattcacggaatcgtcttctggtactattcgttcccccttctgacttgcttcttaactacactacctgtcatccagtagccctgttcgtcgtcgacactccagttcgaataagccaggaagcctatggagatcatcatctcccaaccattgatgttaaggctgcacatttagtaaagcagctagcaagtgatgaaagtgtagagtgatctgtggacattatcattagggttcctttaatattaccatatcgaaagggcgtcaagtgcgatctccgcattcttcatgtatcctgtgaggagcaccagtatggtgttgtaccacaattccaagctgaaagaaaaaaagactacgatgcggatggataccatccacacccacagaccacagtggcttgctttgcttaccagagcatgacaccagaagagagcgagagcctgacgatggcgccgaggtcggcgaaggcggcggacgagaatccggtccaggtgagagggcatccgccgaagaagacgaaggcgagctggccgaacacggggatccacatggcgacgaccatggagcccatgacgccggcgaggccgaggcggaggtggacggcggcgagccaggacagggcgaggtggaggccgaggttgagcatggcgaggtacgtgatgatcatgttcttgatctgcgcctgcagctgcatgcagatgcatatcgcgcccggccggacgccgacgacgcggacttgttggaacagagccgtcgtcgaccagtcgacgcctgggtgcctggccattttcttcgccgaagaagggaaaaagaagccgccgccaagaccaagagggaagaagaggaagcagcagccaagagagcaattggaacatgactgttgggatcggcacgagatgtcgtcgaggcggcggcaagctttattgattccaatgttttttttttctatctagcttgtccggcacgagttggtggctgactttattcgggctctgaaccgagagcacggatcgatcttttgaatcgaatgctgctggcgggggcgggccgcctggagctcgacgaacgaagggcaagacgacatcgactacaaaatggtccccgatcgtgttgtgcagcgtgttgctcgtgatcactatacttgcatgcatctttgaatttgaatcatgcatgcgtgcatgtccgtatatagatccacaacatgggctgtactttttttgaaaaaaattgtttcgtctttctcttttttgcgaacgataattgtcggcacgtttttttttcgttcggaggccggtgttagagagtacacatgtgaactgtctgtccacttctctctccgttagcttaatcttgtgttctaacgagagagagagtacgtgtgtgtgcgtgtatggagggagttatgcgaacaagaatcaagaacgaatggattgatagaaagacacgtacgtaccaggatgccgttgctgaacctcatgaggacggtggagacgagcgcgtaggcggcgagctcggtggcgccgatgtggccgatgaaggcctggctgat

SEQ ID NO: 15543 - DNA, 1306 bp, Zea Mays
ttcggccgagcagacccgtggcctcactcccccgcgcgttagggttccgctctcatccttcgtgcctgctcaccgccgccacttccagctaggccgtcgtcgccgcgccccaccagcttcttaactacactacctgtcatccagtagccctgttcgtcgtcgacactccagttcgaataaggtacatctgcagcgggaaggcccagacgaaggagaagagcacggggatgtaccagagcgccacggtccccgccaccgccgagatgtccgggtcctgccccagcgccaccagcagcggctccgtgaacaggtacacggggagctgcaccacggcgcacgccgacaggatgatccacgaccgctgcaggtagatgcccagcatgtggtactgcttcgccccgtacgactgcccgcacagcgtctccagcgcgctcgccatgcccagctgcatgcagatgcatatcgcgcccggccggacgccgacgacgcggacttgttggaacagagccgtcgtcgaccagtcgacgcctgggtgcctggccattttcttcgccgaagaagggaaaaagaagccgccgccaagaccaagagggaagaagaggaagcagcagccaagagagcaattggaacatgactgttgggatcggcacgagatgtcgtcgaggcggcggcaagctttattgattccaatgttttttttttctatctagcttgtccggcacgagttggtggctgactttattcgggctctgaaccgagagcacggatcgatcttttgaatcgaatgctgctggcgggggcgggccgcctggagctcgacgaacgaagggcaagacgacatcgactacaaaatggtccccgatcgtgttgtgcagcgtgttgctcgtgatcactatacttgcatgcatctttgaatttgaatcatgcatgcgtgcatgtccgtatatagatccacaacatgggctgtactttttttgaaaaaaattgtttcgtctttctcttttttgcgaacgataattgtcggcacgtttttttttcgttcggaggccggtgttagagagtacacatgtgaactgtctgtccacttctctctccgttagcttaatcttgtgttctaacgagagagagagtacgtgtgtgtgcgtgtatggagggagttatgcgaacaagaatcaagaacgaatggattgatagaaagacacgtacgtaccaggatgccgttgctgaacctcatgaggacggtggagacgagcgcgtaggcggcgagctcggtggcgccgatgtggccgatgaaggcctggctgat

SEQ ID NO: 15544 - DNA, 1331 bp, Zea Mays
ttcggccgagcagacccgtggcctcactcccccgcgcgttagggttccgctctcatccttcgtgcctgctcaccgccgccacttccagctaggccgtcgtcgccgcgccccaccagctgttattcacggaatcgtcttctgcttcttaactacactacctgtcatccagtagccctgttcgtcgtcgacactccagttcgaataaggtacatctgcagcgggaaggcccagacgaaggagaagagcacggggatgtaccagagcgccacggtccccgccaccgccgagatgtccgggtcctgccccagcgccaccagcagcggctccgtgaacaggtacacggggagctgcaccacggcgcacgccgacaggatgatccacgaccgctgcaggtagatgcccagcatgtggtactgcttcgccccgtacgactgcccgcacagcgtctccagcgcgctcgccatgcccagctgcatgcagatgcatatcgcgcccggccggacgccgacgacgcggacttgttggaacagagccgtcgtcgaccagtcgacgcctgggtgcctggccattttcttcgccgaagaagggaaaaagaagccgccgccaagaccaagagggaagaagaggaagcagcagccaagagagcaattggaacatgactgttgggatcggcacgagatgtcgtcgaggcggcggcaagctttattgattccaatgttttttttttctatctagcttgtccggcacgagttggtggctgactttattcgggctctgaaccgagagcacggatcgatcttttgaatcgaatgctgctggcgggggcgggccgcctggagctcgacgaacgaagggcaagacgacatcgactacaaaatggtccccgatcgtgttgtgcagcgtgttgctcgtgatcactatacttgcatgcatctttgaatttgaatcatgcatgcgtgcatgtccgtatatagatccacaacatgggctgtactttttttgaaaaaaattgtttcgtctttctcttttttgcgaacgataattgtcggcacgtttttttttcgttcggaggccggtgttagagagtacacatgtgaactgtctgtccacttctctctccgttagcttaatcttgtgttctaacgagagagagagtacgtgtgtgtgcgtgtatggagggagttatgcgaacaagaatcaagaacgaatggattgatagaaagacacgtacgtaccaggatgccgttgctgaacctcatgaggacggtggagacgagcgcgtaggcggcgagctcggtggcgccgatgtggccgatgaaggcctggctgat

SEQ ID NO: 15545 - DNA, 1460 bp, Zea Mays
ttcggccgagcagacccgtggcctcactcccccgcgcgttagggttccgctctcatccttcgtgcctgctcaccgccgccacttccagctaggccgtcgtcgccgcgccccaccaggttctcgcgttttccccctctccaagcttccatccttccctcttaccttactggcgggtgttgtttctgtacccggtggttcatctcgccgcggccgattagctgttattcacggaatcgtcttctggtactattcgttcccccttctgacttgcttcttaactacactacctgtcatccagtagccctgttcgtcgtcgacactccagttcgaataaggtacatctgcagcgggaaggcccagacgaaggagaagagcacggggatgtaccagagcgccacggtccccgccaccgccgagatgtccgggtcctgccccagcgccaccagcagcggctccgtgaacaggtacacggggagctgcaccacggcgcacgccgacaggatgatccacgaccgctgcaggtagatgcccagcatgtggtactgcttcgccccgtacgactgcccgcacagcgtctccagcgcgctcgccatgcccagctgcatgcagatgcatatcgcgcccggccggacgccgacgacgcggacttgttggaacagagccgtcgtcgaccagtcgacgcctgggtgcctggccattttcttcgccgaagaagggaaaaagaagccgccgccaagaccaagagggaagaagaggaagcagcagccaagagagcaattggaacatgactgttgggatcggcacgagatgtcgtcgaggcggcggcaagctttattgattccaatgttttttttttctatctagcttgtccggcacgagttggtggctgactttattcgggctctgaaccgagagcacggatcgatcttttgaatcgaatgctgctggcgggggcgggccgcctggagctcgacgaacgaagggcaagacgacatcgactacaaaatggtccccgatcgtgttgtgcagcgtgttgctcgtgatcactatacttgcatgcatctttgaatttgaatcatgcatgcgtgcatgtccgtatatagatccacaacatgggctgtactttttttgaaaaaaattgtttcgtctttctcttttttgcgaacgataattgtcggcacgtttttttttcgttcggaggccggtgttagagagtacacatgtgaactgtctgtccacttctctctccgttagcttaatcttgtgttctaacgagagagagagtacgtgtgtgtgcgtgtatggagggagttatgcgaacaagaatcaagaacgaatggattgatagaaagacacgtacgtaccaggatgccgttgctgaacctcatgaggacggtggagacgagcgcgtaggcggcgagctcggtggcgccgatgtggccgatgaaggcctggctgat

SEQ ID NO: 15546 - DNA, 696 bp, Zea Mays
aggggaatgcgtttggtaatgctttcagttctttcatgattcgattaacggagaagctatgatcagatggcacgaggtttatacaacgtggatcattctttcagttcccaggacgggagagtcaggcatgatcctctccaaataaaggtgctggagatcaggtgctagacgatatgcattttcctaaataccagtccacctgccatttcactaacctagtggtagcaggcctgacaggctttctgctttctttgtttgagctggccaatgatcatgcctaaagaaagctgagaaaaatgagtttcttctgttttaacatccccattagccaatgatagatctataggttcagatgcaaatctgattctaacagagggggtaaggtgtatttgtttactgtttatgttttatctgatagaatggatggttgtacctgtatctgcataaacatgcatgtggacatttcttgtattcaattctatatcacaagtctcttgcaatgctattaaattcataacaaacgcttttatatctagtatatatgtgtgtgcgtgtgtgcataagcctgctcttggttgtatgaactacaaagatgtcttaagagcagttgttttctatgataagtaatgctgaagcaagtttcaagtggccactttctttttgtaaacctgcactatgttaatcatgactgttaac

SEQ ID NO: 15547 - DNA, 2407 bp, Zea Mays
ccaactccaattttcccccaatctctccgagctccgacaatccccggacccggccgattgatgcggcgatggtgcgcgagctccgcgtcgactccttctacgcccggctccgcgccgctgcgggctcctcgtcctcgtccccgctcctgatcctcccgtccgccgccgacgccgactcgctgtgcgcggtcagggtgctcgcgcacgtcctctccgccgactccatccgcttctccatctaccccgtctcctccgccgtctccgccagggcgctcctcgcctccttcgccgccccggccccgccctgcctcgtcctcgtcaactggggcgcgcaccgggacctgcgcgcgctgctgcccgccgcctccaccgccttcgtcgtcgactcccaccgccccgtccacctccacaacctctgcgcgcgcaacgaccgcgtcgtcgtcctattcaccgccgacgacgagcgcaccgcggatctctcctacgacttcgacctctccgcgctcgccgacgcctccgacctcgccgccgacgccggcgacgacgaccacctccgcggcggccccggctccgacgcctccgactcggaggattccgatgacgacgaggatgacgccggcggtggcaggaggaagaggcgccgcctctccgacgacgacggcgacgaccccgcccccaacaccgaccccgtgaggctcttctgcaggctgcgccgcgagtactaccgcctcggcacattccacggcaagccgtcggggtgcctcatgtacgacctcgcgcacgcgatgcgcaagaacaccaacgagctcctctggctcgcctgcgtcgccctcaccgaccagttcgtccacgaccgcatcaccaacgagcgctaccaggccgccgtcatggagctcgagcagcacatcaacggctccggcaacctcgacccgtccggcgccggctccgtcgtcacgctcaaggacggcaccaagatccgggcgccggaggcctcgcgcatcgcctacgaggacgagcccaggctcatgctgctgcgggagtggagcctgttcgactccatgctctgctcctcctacgtcgccaccaagctcaagacctggagcgacaacgggctcaagaagctcaagctgctgctggccaggatgggcttcccgctcgcagactgccagaagaacttccagtacatgagcatggaggtcaagcgcaagatgcgggatgagttcgaccgcttcctgcccgagtacggcctcaccgagttctactaccggagcttcttgagagtgcacggctacaggtccaaagtttctgcggcagatgttgtgtacggtgtcacggcgttgcttgaatcactggattcccagtctaaggacacaaaggagtcttcagcggctgagcagttttgggttgcttactctgcactatcactgagcaacgctgaccagttgcgaaaagggatgctgtctgcaattgagatacagagggcaatattgagacaaggaagctcagcgattactaagacagggtttatacggagtgccaagaagttccggtgggtgaagcttgatgaccctgtcgacactaacaagctttgccacccgcaagcacttaccaagttctgcttctttctgctggatgctctcaaggaaaggggtgcaaggatgaagccactgatctgtgcttgcttagcaaaggagccagagaaggtgctagttgtcggggtatgtgggaagccaaggcttggggctgtccaggggaatgcgtttggtaatgctttcagatggcacgaggtttatacaacgtggatcattctttcagttcccaggacgggagagtcaggcatgatcctctccaaataaaggtgctggagatcaggtgctagacgatatgcattttcctaaataccagtccacctgccatttcactaacctagtggtagcaggcctgacaggctttctgctttctttgtttgagctggccaatgatcatgcctaaagaaagctgagaaaaatgagtttcttctgttttaacatccccattagccaatgatagatctataggttcagatgcaaatctgattctaacagagggggtaaggtgtatttgtttactgtttatgttttatctgatagaatggatggttgtacctgtatctgcataaacatgcatgtggacatttcttgtattcaattctatatcacaagtctcttgcaatgctattaaattcataacaaacgcttttatatctagtatatatgtgtgtgcgtgtgtgcataagcctgctcttggttgtatgaactacaaagatgtcttaagagcagttgttttctatgataagtaatgctgaagcaagtttcaagtggccactttctttttgtaaacctgcactatgttaatcatgactgttaac

SEQ ID NO: 15548 - DNA, 5189 bp, Zea Mays
gattaggtatgtctcttgtcttatccgccacacacgacacgacacgcgccggccacagaaacagcgcttcactcccctccgcgccgcggcgaccatggagctcgccaccgtcgccgctgcagtcgcctccgccgctgcgcgcccgcacgggcctttctcctctccccgcgcagtctctgcctccgtctcgtggaccagtctctcgctcgcctacacctcccgctgtctctcctccacgtcctcgcgacggcggctgcgctggctccccgtcacctcggccgccgtggagctccgcgaggccactgccgggggcggagactcgctccgtgtcaccaagacgccgcagcctggatccagtgttaagttcagcgtggaggtgcctacttccatcattcacgagtgctaccaatccacgctacaggagtacgccaaacgtgttaaggttcctggatttcggcctgggaagaccattccagaaaacgttcttataaactatgtaggaccgcaacatgtacaggatgccacgattgaagctatcttaaaacatacgcttcctcaagcactgtcctcgaggagagggcattagaagattctgttcgcattctgactcaatttgatgatatgagaaattctttctcactcgacaatgtgtttagatatgatgttgctgtggatgttgcccctgaagtccgatggttatctgaagacaaatataggaacctcaaagttgtcgttgaaatagatgaagctgttgatgcggaaaaggcggcagagaaagagcttcagcgtcgtcataaagctctaggcttacttagaattgtggctgacagaggcctccagattggtgatctggtggtgctggatatatttgcggaaagcattaacaatgatggctctagaggtgaaaaaatttcatcggctgagagtacaggtttccacttggacactgaggaaaatagtaaccttgttcctggatttcttggttcgttgattgggattcgtgctggtgagactagatcatttcctatccagttccccgagtcatttgagcgagaaagtctacgaggtgtccgtgcacagtttactgttgtgtgtaaagagctgttctacagagagttgccagtaatggatgactcacttgctgtaaagcttcttccaggatgcactacaatagacgaggttcgagagcgtattttgaaaagatgtaaagaagtggagaagacggccatagaacaagcaacagacaacgcgatccttgaccagctcgggaagttggtcgaggtcgacgtccctcgtgccttgtttcaagagcaagggcagcagctttatggagccaagcttctgcagcttcaggcggaaaggaagctggataaagaccagctagcttcgttatcaaccaagaggtcagtgcaggcgtacctagaagatgagaaggagaacattacaagaatcattaaacagatgctggccgttggcgatattttcaaatccgagaacttacagtactcgactgatcagctcgtcaaggaagttgagaactccatagcggagttcaaacagtacaaccaagactatgatgaggacaacatcaggcagcaggtccaggatgtcctagaggcggcgaaggtgcttgaatggctcaaggagaactgctcggtcgagtatatcaggcgatgagtcccacgatgctgggtcaaggaaagctcctctgaacgtgagaaagatggtggctggtgtggcggtcggcagttttgcgagtggccttggtccttgccaatgccaaccagcctagagcagtgcagtgattaagaggtgtggctaacaaacatttgtctattgactcggttcatgatataaattcggatttggagctttagtaactagcatgttttcggtagagacaatcacatcgcattagagggcgtgtttgtttgtgtttataatctccccagattatataatccaacatatttatattttgaactttataaattcatactgtggccgattggtcgatcttgcgcaaggataatcatggaattaagaacgctatacgaagtgcataaatataaaataccaatcggtgtatactataagctaaatttgaggcaccagtattgcacttaaataggataaacataaactaaaataaaataaaataaaataaagcctgagaagcctacgaatcgccaaccatgttattatcagagttctgtaaagtcgtagctaaacggagccacgacagcggtccggcaggcgctggcgctcagcggtaggacttctggaacctggcgcgggcgccgcggccgccgaacttcttgggctcgcagcggcgggggtcggcgacgaggagggtgcgctcgtagcgcatgaagatgtccttgatctcctttttcgccgcctcgtcgacgtacttctggtagtatgccacgagacccttggcgacggcctggcggatggcgtagatctgcgacgtcttcccgccgccgcgcacgcggatccgcatgtcgatgtccttgaacctggaccgccccgccagcagcacgggctccatggccttgagccgcagcatctcgggacggagcagctcgatcgggacgccgttcaccttgatcatccctcggcctggcttcgtgtaggccacggccacggccgtcttcttgcgcccgaaacactgcactgtgcccggggtcgggcgcttcagcacgggacccatggttgcgggtatagcagcaatggaggcggcggcggcggctagggctgcgaaggtgaaggtggcggcgcgctagggctgcggtggcttggaaacgttgctgcggtggaggcttttatagtacggatggatggaagcggtttccgggatcgccggcgccgacgaatgacttgttgggccgggccttagaaggaaggaaacccggtggctggtgaggcccaggtattcgttgtgataaaatggccactggtcaagggcggagaagctagggtttcggccctcacgaacactacttgatcttatccgagcgcgccgtccggcagcaccgcgggcggcggccggagtcgcctccccgtgcccgcgttgcccccgccggcctgcaagggttggtgggttggtggcgcggttcgtcgggaagaggcggcgcttgcgcccgcggtcgctgccggcgacgagcgatgacgactgcccgcggtcggagcgcgcgcgatgatggccgcgcgggttccccaaacacactacacgagatacttcgcgatgttcttttcctttgacatgttcttttcctttgacatgttcttttttcgaaaaatttgaagtattctttattaaaaaaaaaggctttttatgtgtgtttaatcccgcttgtcttctgtttgtgcttagtcgttctattagtgtggtttgattttgtatcacgctcgtcattgacaaagtgattccgttccggaatgatactaacaaagaatgtgccttctactctgttaccacgggtggtcttgggtccttacccttcagatgttcttgttaacggttcttctctcttcgtccagcacattgaactttatagtacacttagtatcattacattggtccttttaggatggagggtgaactattagagttattattaagatggtggatgttagctacgctttcatggtggatgtttactatgttttgtcatgtaaacaactgcatgtctttaaatttgtctatcagtataaatagtcactgcacatgcttaataaggttagattacaacatctggtgcagtcctctccatatctgatatttttctgttgcatcgatagccctcatggttattaaaaaatgtacttgtttgccatgtatgttgctcaatatatgatttgtgactcaccttgcttgacaagttggtatgattaagcgttttttggatcatgagggtgagatgataaacaacctttggtccacataattggattagtgaggtggaagcttcggatatagcggtgggctttacggttgccctaatagtgaacaggtccagcacatttactaccatatttttcccttcgtaatctaatcactaaggaggatcgaaattttttcatgcatagctttggttccctctcaactgattattcacttcaactgttttttaaattcgttaagatggaatgaaattgcttatttaaccacctatgctgccaatttgtccattagggtttcagtttatcctgacatttcatatatttgggacttttaagttgcccctatggctttttgctgtgcctgtgggatgaacatgtcccaacatttactccatttattcactttgtcagctaatagccatacatgttttatgtttagctgatcattaagaatgggaaatttacactttccatactgtgttatacatgttatgtttgcctgcttgaacaccccttgttttgaggtatcgtttgggagcaaaataggtgttctggtggcaacagcagtgccggtgagatgagcttttgtcccagtttaccaccaagtgtgtcacttggttgttagtgtcctatgggttctttgtagccttctgttttcctactttgtatcttgaatgtgatttcatggtcgctggttttttatcaagaggagctgggttcaatcgccacttagatcagtgttttttgtgattctctaatgcaacaacagcaaccttgtgcttggctaaagctacaataaggataatattctgaacttatttgccctggtgatgttgtaggtttacagaagagagaaattctggcagatccaattgctgttgccgtcattctgatacaacctgacttgatgactctcaatgaagctgaatgctgaaaggtgttgctgccttgcagaatgaagctttgagttcaatacatggaattcatatttggtggtggtgttttggaacttgtttatctgctaggtgttgctgccttgcagaatgaagccgtccacattgtccttgtttatctgcaagatgcatgcctgctctatttcttgctcttcagtcttgactgatgcctactgcctgagtgcagattcagtgtgatagttagattctgctgatgtgttaacatgttcattgtaaacaaatttcttgttaaacatgtgtgatctcttcaagaccatgtgtctttgacctaatatattgcgaaacattcttcagttgtgtggtgtt

SEQ ID NO: 15549 - DNA, 5113 bp, Zea Mays
gattaggtatgtctcttgtcttatccgccacacacgacacgacacgcgccggccacagaaacagcgcttcactcccctccgcgccgcggcgaccatggagctcgccaccgtcgccgctgcagtcgcctccgccgctgcgcgcccgcacgggcctttctcctctccccgcgcagtctctgcctccgtctcgtggaccagtctctcgctcgcctacacctcccgctgtctctcctccacgtcctcgcgacggcggctgcgctggctccccgtcacctcggccgccgtggagctccgcgaggccactgccgggggcggagactcgctccgtgtcaccaagacgccgcagcctggatccagtgttaagttcagcgtggaggtgcctacttccatcattcacgagtgctaccaatccacgctacaggagtacgccaaacgtgttaaggttcctggatttcggcctgggaagaccattccagaaaacgttcttataaactatgtaggaccgcaacatgtacaggatgccacgattgaagctatcttaaaacatacgcttcctcaagcactgtcctcggtagaggagagggcattagaagattctgttcgcattctgactcaatttgatgatatgagaaattctttctcactcgacaatgtgtttagatatgatgttgctgtggatgttgcccctgaagtccgatggttatctgaagacaaatataggaacctcaaagttgtcgttgaaatagatgaagctgttgatgcggaaaaggcggcagagaaagagcttcagcgtcgtcataaagctctaggcttacttagaattgtggctgacagaggcctccagattggtgatctggtggtgctggatatatttgcggaaagcattaacaatgatggctctagaggtgaaaaaatttcatcggctgagagtacaggtttccacttggacactgaggaaaatagtaaccttgttcctggatttcttggttcgttgattgggattcgtgctggttgtgtgtaaagagctgttctacagagagttgccagtaatggatgactcacttgctgtaaagcttcttccaggatgcactacaatagacgaggttcgagagcgtattttgaaaagatgtaaagaagtggagaagacggccatagaacaagcaacagacaacgcgatccttgaccagctcgggaagttggtcgaggtcgacgtccctcgtgccttgtttcaagagcaagggcagcagctttatggagccaagcttctgcagcttcaggcggaaaggaagctggataaagaccagctagcttcgttatcaaccaagaggtcagtgcaggcgtacctagaagatgagaaggagaacattacaagaatcattaaacagatgctggccgttggcgatattttcaaatccgagaacttacagtactcgactgatcagctcgtcaaggaagttgagaactccatagcggagttcaaacagtacaaccaagactatgatgaggacaacatcaggcagcaggtccaggatgtcctagaggcggcgaaggtgcttgaatggctcaaggagaactgctcggtcgagtatatcaggcgatgagtcccacgatgctgggtcaaggaaagctcctctgaacgtgagaaagatggtggctggtgtggcggtcggcagttttgcgagtggccttggtccttgccaatgccaaccagcctagagcagtgcagtgattaagaggtgtggctaacaaacatttgtctattgactcggttcatgatataaattcggatttggagctttagtaactagcatgttttcggtagagacaatcacatcgcattagagggcgtgtttgtttgtgtttataatctccccagattatataatccaacatatttatattttgaactttataaattcatactgtggccgattggtcgatcttgcgcaaggataatcatggaattaagaacgctatacgaagtgcataaatataaaataccaatcggtgtatactataagctaaatttgaggcaccagtattgcacttaaataggataaacataaactaaaataaaataaaataaaataaagcctgagaagcctacgaatcgccaaccatgttattatcagagttctgtaaagtcgtagctaaacggagccacgacagcggtccggcaggcgctggcgctcagcggtaggacttctggaacctggcgcgggcgccgcggccgccgaacttcttgggctcgcagcggcgggggtcggcgacgaggagggtgcgctcgtagcgcatgaagatgtccttgatctcctttttcgccgcctcgtcgacgtacttctggtagtatgccacgagacccttggcgacggcctggcggatggcgtagatctgcgacgtcttcccgccgccgcgcacgcggatccgcatgtcgatgtccttgaacctggaccgccccgccagcagcacgggctccatggccttgagccgcagcatctcgggacggagcagctcgatcgggacgccgttcaccttgatcatccctcggcctggcttcgtgtaggccacggccacggccgtcttcttgcgcccgaaacactgcactgtgcccggggtcgggcgcttcagcacgggacccatggttgcgggtatagcagcaatggaggcggcggcggcggctagggctgcgaaggtgaaggtggcggcgcgctagggctgcggtggcttggaaacgttgctgcggtggaggcttttatagtacggatggatggaagcggtttccgggatcgccggcgccgacgaatgacttgttgggccgggccttagaaggaaggaaacccggtggctggtgaggcccaggtattcgttgtgataaaatggccactggtcaagggcggagaagctagggtttcggccctcacgaacactacttgatcttatccgagcgcgccgtccggcagcaccgcgggcggcggccggagtcgcctccccgtgcccgcgttgcccccgccggcctgcaagggttggtgggttggtggcgcggttcgtcgggaagaggcggcgcttgcgcccgcggtcgctgccggcgacgagcgatgacgactgcccgcggtcggagcgcgcgcgatgatggccgcgcgggttccccaaacacactacacgagatacttcgcgatgttcttttcctttgacatgttcttttcctttgacatgttcttttttcgaaaaatttgaagtattctttattaaaaaaaaaggctttttatgtgtgtttaatcccgcttgtcttctgtttgtgcttagtcgttctattagtgtggtttgattttgtatcacgctcgtcattgacaaagtgattccgttccggaatgatactaacaaagaatgtgccttctactctgttaccacgggtggtcttgggtccttacccttcagatgttcttgttaacggttcttctctcttcgtccagcacattgaactttatagtacacttagtatcattacattggtccttttaggatggagggtgaactattagagttattattaagatggtggatgttagctacgctttcatggtggatgtttactatgttttgtcatgtaaacaactgcatgtctttaaatttgtctatcagtataaatagtcactgcacatgcttaataaggttagattacaacatctggtgcagtcctctccatatctgatatttttctgttgcatcgatagccctcatggttattaaaaaatgtacttgtttgccatgtatgttgctcaatatatgatttgtgactcaccttgcttgacaagttggtatgattaagcgttttttggatcatgagggtgagatgataaacaacctttggtccacataattggattagtgaggtggaagcttcggatatagcggtgggctttacggttgccctaatagtgaacaggtccagcacatttactaccatatttttcccttcgtaatctaatcactaaggaggatcgaaattttttcatgcatagctttggttccctctcaactgattattcacttcaactgttttttaaattcgttaagatggaatgaaattgcttatttaaccacctatgctgccaatttgtccattagggtttcagtttatcctgacatttcatatatttgggacttttaagttgcccctatggctttttgctgtgcctgtgggatgaacatgtcccaacatttactccatttattcactttgtcagctaatagccatacatgttttatgtttagctgatcattaagaatgggaaatttacactttccatactgtgttatacatgttatgtttgcctgcttgaacaccccttgttttgaggtatcgtttgggagcaaaataggtgttctggtggcaacagcagtgccggtgagatgagcttttgtcccagtttaccaccaagtgtgtcacttggttgttagtgtcctatgggttctttgtagccttctgttttcctactttgtatcttgaatgtgatttcatggtcgctggttttttatcaagaggagctgggttcaatcgccacttagatcagtgttttttgtgattctctaatgcaacaacagcaaccttgtgcttggctaaagctacaataaggataatattctgaacttatttgccctggtgatgttgtaggtttacagaagagagaaattctggcagatccaattgctgttgccgtcattctgatacaacctgacttgatgactctcaatgaagctgaatgctgaaaggtgttgctgccttgcagaatgaagctttgagttcaatacatggaattcatatttggtggtggtgttttggaacttgtttatctgctaggtgttgctgccttgcagaatgaagccgtccacattgtccttgtttatctgcaagatgcatgcctgctctatttcttgctcttcagtcttgactgatgcctactgcctgagtgcagattcagtgtgatagttagattctgctgatgtgttaacatgttcattgtaaacaaatttcttgttaaacatgtgtgatctcttcaagaccatgtgtctttgacctaatatattgcgaaacattcttcagttgtgtggtgtt

SEQ ID NO: 15550 - DNA, 5104 bp, Zea Mays
gattaggtatgtctcttgtcttatccgccacacacgacacgacacgcgccggccacagaaacagcgcttcactcccctccgcgccgcggcgaccatggagctcgccaccgtcgccgctgcagtcgcctccgccgctgcgcgcccgcacgggcctttctcctctccccgcgcagtctctgcctccgtctcgtggaccagtctctcgctcgcctacacctcccgctgtctctcctccacgtcctcgcgacggcggctgcgctggctccccgtcacctcggccgccgtggagctccgcgaggccactgccgggggcggagactcgctccgtgtcaccaagacgccgcagcctggatccagtgttaagttcagcgtggaggtgcctacttccatcattcacgagtgctaccaatccacgctacaggagtacgccaaacgtgttaaggttcctggatttcggcctgggaagaccattccagaaaacgttcttataaactatgtaggaccgcaacatgtacaggatgccacgattgaagctatcttaaaacatacgcttcctcaagcactgtcctcgatatgatgttgctgtggatgttgcccctgaagtccgatggttatctgaagacaaatataggaacctcaaagttgtcgttgaaatagatgaagctgttgatgcggaaaaggcggcagagaaagagcttcagcgtcgtcataaagctctaggcttacttagaattgtggctgacagaggcctccagattggtgatctggtggtgctggatatatttgcggaaagcattaacaatgatggctctagaggtgaaaaaatttcatcggctgagagtacaggtttccacttggacactgaggaaaatagtaaccttgttcctggatttcttggttcgttgattgggattcgtgctggtgagactagatcatttcctatccagttccccgagtcatttgagcgagaaagtctacgaggtgtccgtgcacagtttactgttgtgtgtaaagagctgttctacagagagttgccagtaatggatgactcacttgctgtaaagcttcttccaggatgcactacaatagacgaggttcgagagcgtattttgaaaagatgtaaagaagtggagaagacggccatagaacaagcaacagacaacgcgatccttgaccagctcgggaagttggtcgaggtcgacgtccctcgtgccttgtttcaagagcaagggcagcagctttatggagccaagcttctgcagcttcaggcggaaaggaagctggataaagaccagctagcttcgttatcaaccaagaggtcagtgcaggcgtacctagaagatgagaaggagaacattacaagaatcattaaacagatgctggccgttggcgatattttcaaatccgagaacttacagtactcgactgatcagctcgtcaaggaagttgagaactccatagcggagttcaaacagtacaaccaagactatgatgaggacaacatcaggcagcaggtccaggatgtcctagaggcggcgaaggtgcttgaatggctcaaggagaactgctcggtcgagtatatcaggcgatgagtcccacgatgctgggtcaaggaaagctcctctgaacgtgagaaagatggtggctggtgtggcggtcggcagttttgcgagtggccttggtccttgccaatgccaaccagcctagagcagtgcagtgattaagaggtgtggctaacaaacatttgtctattgactcggttcatgatataaattcggatttggagctttagtaactagcatgttttcggtagagacaatcacatcgcattagagggcgtgtttgtttgtgtttataatctccccagattatataatccaacatatttatattttgaactttataaattcatactgtggccgattggtcgatcttgcgcaaggataatcatggaattaagaacgctatacgaagtgcataaatataaaataccaatcggtgtatactataagctaaatttgaggcaccagtattgcacttaaataggataaacataaactaaaataaaataaaataaaataaagcctgagaagcctacgaatcgccaaccatgttattatcagagttctgtaaagtcgtagctaaacggagccacgacagcggtccggcaggcgctggcgctcagcggtaggacttctggaacctggcgcgggcgccgcggccgccgaacttcttgggctcgcagcggcgggggtcggcgacgaggagggtgcgctcgtagcgcatgaagatgtccttgatctcctttttcgccgcctcgtcgacgtacttctggtagtatgccacgagacccttggcgacggcctggcggatggcgtagatctgcgacgtcttcccgccgccgcgcacgcggatccgcatgtcgatgtccttgaacctggaccgccccgccagcagcacgggctccatggccttgagccgcagcatctcgggacggagcagctcgatcgggacgccgttcaccttgatcatccctcggcctggcttcgtgtaggccacggccacggccgtcttcttgcgcccgaaacactgcactgtgcccggggtcgggcgcttcagcacgggacccatggttgcgggtatagcagcaatggaggcggcggcggcggctagggctgcgaaggtgaaggtggcggcgcgctagggctgcggtggcttggaaacgttgctgcggtggaggcttttatagtacggatggatggaagcggtttccgggatcgccggcgccgacgaatgacttgttgggccgggccttagaaggaaggaaacccggtggctggtgaggcccaggtattcgttgtgataaaatggccactggtcaagggcggagaagctagggtttcggccctcacgaacactacttgatcttatccgagcgcgccgtccggcagcaccgcgggcggcggccggagtcgcctccccgtgcccgcgttgcccccgccggcctgcaagggttggtgggttggtggcgcggttcgtcgggaagaggcggcgcttgcgcccgcggtcgctgccggcgacgagcgatgacgactgcccgcggtcggagcgcgcgcgatgatggccgcgcgggttccccaaacacactacacgagatacttcgcgatgttcttttcctttgacatgttcttttcctttgacatgttcttttttcgaaaaatttgaagtattctttattaaaaaaaaaggctttttatgtgtgtttaatcccgcttgtcttctgtttgtgcttagtcgttctattagtgtggtttgattttgtatcacgctcgtcattgacaaagtgattccgttccggaatgatactaacaaagaatgtgccttctactctgttaccacgggtggtcttgggtccttacccttcagatgttcttgttaacggttcttctctcttcgtccagcacattgaactttatagtacacttagtatcattacattggtccttttaggatggagggtgaactattagagttattattaagatggtggatgttagctacgctttcatggtggatgtttactatgttttgtcatgtaaacaactgcatgtctttaaatttgtctatcagtataaatagtcactgcacatgcttaataaggttagattacaacatctggtgcagtcctctccatatctgatatttttctgttgcatcgatagccctcatggttattaaaaaatgtacttgtttgccatgtatgttgctcaatatatgatttgtgactcaccttgcttgacaagttggtatgattaagcgttttttggatcatgagggtgagatgataaacaacctttggtccacataattggattagtgaggtggaagcttcggatatagcggtgggctttacggttgccctaatagtgaacaggtccagcacatttactaccatatttttcccttcgtaatctaatcactaaggaggatcgaaattttttcatgcatagctttggttccctctcaactgattattcacttcaactgttttttaaattcgttaagatggaatgaaattgcttatttaaccacctatgctgccaatttgtccattagggtttcagtttatcctgacatttcatatatttgggacttttaagttgcccctatggctttttgctgtgcctgtgggatgaacatgtcccaacatttactccatttattcactttgtcagctaatagccatacatgttttatgtttagctgatcattaagaatgggaaatttacactttccatactgtgttatacatgttatgtttgcctgcttgaacaccccttgttttgaggtatcgtttgggagcaaaataggtgttctggtggcaacagcagtgccggtgagatgagcttttgtcccagtttaccaccaagtgtgtcacttggttgttagtgtcctatgggttctttgtagccttctgttttcctactttgtatcttgaatgtgatttcatggtcgctggttttttatcaagaggagctgggttcaatcgccacttagatcagtgttttttgtgattctctaatgcaacaacagcaaccttgtgcttggctaaagctacaataaggataatattctgaacttatttgccctggtgatgttgtaggtttacagaagagagaaattctggcagatccaattgctgttgccgtcattctgatacaacctgacttgatgactctcaatgaagctgaatgctgaaaggtgttgctgccttgcagaatgaagctttgagttcaatacatggaattcatatttggtggtggtgttttggaacttgtttatctgctaggtgttgctgccttgcagaatgaagccgtccacattgtccttgtttatctgcaagatgcatgcctgctctatttcttgctcttcagtcttgactgatgcctactgcctgagtgcagattcagtgtgatagttagattctgctgatgtgttaacatgttcattgtaaacaaatttcttgttaaacatgtgtgatctcttcaagaccatgtgtctttgacctaatatattgcgaaacattcttcagttgtgtggtgtt

SEQ ID NO: 15551 - DNA, 4464 bp, Zea Mays
gattaggtatgtctcttgtcttatccgccacacacgacacgacacgcgccggccacagaaacagcgcttcactcccctccgcgccgcggcgaccatggagctcgccaccgtcgccgctgcagtcgcctccgccgctgcgcgcccgcacgggcctttctcctctccccgcgcagtctctgcctccgtctcgtggaccagtctctcgctcgcctacacctcccgctgtctctcctccacgtcctcgcgacggcggctgcgctggctccccgtcacctcggccgccgtggagctccgcgaggccactgccgggggcggagactcgctccgtgtcaccaagacgccgcagcctggatccagtgttaagttcagcgtggaggtgcctacttccatcattcacgagtgctaccaatccacgctacaggagtacgccaaacgtgttaaggttcctggatttcggcctgggaagaccattccagaaaacgttcttataaactatgtaggaccgcaacatgtacaggatgccacgattgaagctatcttaaaacatacgcttcctcaagcactgtcctcggtagaggagagggcattagaagattctgttcgcattctgactcaatttgatgatatgagaaattctttctcactcgacaatgtgtttagatatgatgttgctgtggatgttgcccctgaagtccgatggttatctgaagacaaatataggaacctcaaagttgtcgttgaaatagatgaagctgttgatgcggaaaaggcggcagagaaagagcttcagcgtcgtcataaagctctaggcttacttagaattgtggctgacagaggcctccagattggtgatctggtggtgctggatatatttgcggaaagcattaacaatgatggctctagaggtgaaaaaatttcatcggctgagagtacaggtttccacttggacactgaggaaaatagtaaccttgttcctggatttcttggttcgttgattgggattcgtgctggtgagactagatcatttcctatccagttccccgagtcatttgagcgagaaagtctacgaggtgtccgtgcacagtttactgttgtgtgtaaagagctgttctacagagagttgccagtaatggatgactcacttgctgtaaagcttcttccaggatgcactacaatagacgaggttcgagagcgtattttgaaaagatgtaaagaagtggagaagacggccatagaacaagcaacagacaacgcgatccttgaccagctcgggaagttggtcgaggtcgacgtccctcgtgccttgtttcaagagcaagggcagcagctttatggagccaagcttctgcagcttcaggcggaaaggaagctggataaagaccagctagcttcgttatcaaccaagaggtcagtgcaggcgtacctagaagatgagaaggagaacattacaagaatcattaaacagatgctggccgttggcgatattttcaaatccgagaacttacagtactcgactgatcagctcgtcaaggaagttgagaactccatagcggagttcaaacagtacaaccaagactatgatgaggacaacatcaggcagcaggtccaggatgtcctagaggcggcgaaggtgcttgaatggctcaaggagaactgctcggtcgagtatatcaggcgatgagtcccacgatgctgggtcaaggaaagctcctctgaacgtgagaaagatggtggctggtgtggcggtcggcagttttgcgagtggccttggtccttgccaatgccaaccagcctagagcagtgcagtgattaagaggtgtggctaacaaacatttgtctattgactcggttcatgatataaattcggatttggagctttagtaactagcatgttttcggtagagacaatcacatcgcattagagggcgtgtttgtttgtgtttataatctccccagattatataatccaacatatttatattttgaactttataaattcatactgtggccgattggtcgatcttgcgcaaggataatcatggaattaagaacgctatacgaagtgcataaatataaaataccaatcggtgtatactataagctaaatttgaggcaccagtattgcacttaaataggataaacataaactaaaataaaataaaataaaataaagcctgagaagcctacgaatcgccaaccatgttattatcagagttctgtaaagtcgtagctaaacggagccacgacagcggtccggcaggcgctggcgctcagcggtaggacttctggaacctggcgcgggcgccgcggccgccgaacttcttgggctcgcagcggcgggggtcggcgacgaggagggtgcgctcgtagcgcatgaagatgtccttgatctcctttttcgccgcctcgtcgacgtacttctggtagtatgccacgagacccttggcgacggcctggcggatggcgtagatctgcgacgtcttcccgccgccgcgcacgcggatccgcatgtcgatgtccttgaacctggaccgccccgccagcagcacgggctccatggccttgagccgcagcatctcgggacggagcagctcgatcgggacgccgttcaccttgatcatccctcggcctggcttcgtgtaggccacggccacggccgtcttcttgcgcccgaaacactgcactgtgcccggggtcgggcgcttcagcacgggacccatggttgcgggtatagcagcaatggaggcggcggcggcggctagggctgcgaaggtgaaggtggcggcgcgctagggctgcggtggcttggaaacgttgctgcggtggaggcttttatagtacggatggatggaagcggtttccgggatcgccggcgccgacgaatgacttgttgggccgggccttagaaggaaggaaacccggtggctggtgaggcccaggtattcgttgtgataaaatggccactggtcaagggcggagaagctagggtttcggccctcacgaacactacttgatcttatccgagcgcgccgtccggcagcaccgcgggcggcggccggagtcgcctccccgtgcccgcgttgcccccgccggcctgcaagggttggtgggttggtggcgcggttcgtcgggaagaggcggcgcttgcgcccgcggtcgctgccggcgacgagcgatgacgactgcccgcggtcggagcgcgcgcgatgatggccgcgcgggttccccaaacacactacacgagatacttcgcgatgttcttttcctttgacatgttcttttcctttgacatgttcttttttcgaaaaatttgaagtattctttattaaaaaaaaaggctttttatgtgtgtttaatcccgcttgtcttctgtttgtgcttagtcgttctattagtgtggtttgattttgtatcacgctcgtcattgacaaagtgattccgttccggaatgatactaacaaagaatgtgccttctactctgttaccacgggtggtcttgggtccttacccttcagatgttcttgttaacggttcttctctcttcgtccagcacattgaactttatagtacacttagtatcattacattggtccttttaggatggagggtgaactattagagttattattaagatggtggatgttagctacgctttcatggtggatgtttactatgttttgtcatgtaaacaactgcatgtctttaaatttgtctatcagtataaatagtcactgcacatgcttaataaggttagattacaacatctggtgcagtcctctccatatctgatatttttctgttgcatcgatagccctcatggttattaaaaaatgtacttgtttgccatgtatgttgctcaatatatgatttgtgactcaccttgcttgacaagttggtatgattaagcgttttttggatcatgagggtgagatgataaacaacctttggtccacataattggattagtgaggtggaagcttcggatatagcggtgggctttacggttgccctaatagtgaacaggtttacagaagagagaaattctggcagatccaattgctgttgccgtcattctgatacaacctgacttgatgactctcaatgaagctgaatgctgaaaggtgttgctgccttgcagaatgaagctttgagttcaatacatggaattcatatttggtggtggtgttttggaacttgtttatctgctaggtgttgctgccttgcagaatgaagccgtccacattgtccttgtttatctgcaagatgcatgcctgctctatttcttgctcttcagtcttgactgatgcctactgcctgagtgcagattcagtgtgatagttagattctgctgatgtgttaacatgttcattgtaaacaaatttcttgttaaacatgtgtgatctcttcaagaccatgtgtctttgacctaatatattgcgaaacattcttcagttgtgtggtgtt

SEQ ID NO: 15552 - DNA, 4460 bp, Zea Mays
gattaggtatgtctcttgtcttatccgccacacacgacacgacacgcgccggccacagaaacagcgcttcactcccctccgcgccgcggcgaccatggagctcgccaccgtcgccgctgcagtcgcctccgccgctgcgcgcccgcacgggcctttctcctctccccgcgcagtctctgcctccgtctcgtggaccagtctctcgctcgcctacacctcccgctgtctctcctccacgtcctcgcgacggcggctgcgctggctccccgtcacctcggccgccgtggagctccgcgaggccactgccgggggcggagactcgctccgtgtcaccaagacgccgcagcctggatccagtgttaagttcagcgtggaggtgcctacttccatcattcacgagtgctaccaatccacgctacaggagtacgccaaacgtgttaaggttcctggatttcggcctgggaagaccattccagaaaacgttcttataaactatgtaggaccgcaacatgtacaggatgccacgattgaagctatcttaaaacatacgcttcctcaagcactgtcctcgaggagagggcattagaagattctgttcgcattctgactcaatttgatgatatgagaaattctttctcactcgacaatgtgtttagatatgatgttgctgtggatgttgcccctgaagtccgatggttatctgaagacaaatataggaacctcaaagttgtcgttgaaatagatgaagctgttgatgcggaaaaggcggcagagaaagagcttcagcgtcgtcataaagctctaggcttacttagaattgtggctgacagaggcctccagattggtgatctggtggtgctggatatatttgcggaaagcattaacaatgatggctctagaggtgaaaaaatttcatcggctgagagtacaggtttccacttggacactgaggaaaatagtaaccttgttcctggatttcttggttcgttgattgggattcgtgctggtgagactagatcatttcctatccagttccccgagtcatttgagcgagaaagtctacgaggtgtccgtgcacagtttactgttgtgtgtaaagagctgttctacagagagttgccagtaatggatgactcacttgctgtaaagcttcttccaggatgcactacaatagacgaggttcgagagcgtattttgaaaagatgtaaagaagtggagaagacggccatagaacaagcaacagacaacgcgatccttgaccagctcgggaagttggtcgaggtcgacgtccctcgtgccttgtttcaagagcaagggcagcagctttatggagccaagcttctgcagcttcaggcggaaaggaagctggataaagaccagctagcttcgttatcaaccaagaggtcagtgcaggcgtacctagaagatgagaaggagaacattacaagaatcattaaacagatgctggccgttggcgatattttcaaatccgagaacttacagtactcgactgatcagctcgtcaaggaagttgagaactccatagcggagttcaaacagtacaaccaagactatgatgaggacaacatcaggcagcaggtccaggatgtcctagaggcggcgaaggtgcttgaatggctcaaggagaactgctcggtcgagtatatcaggcgatgagtcccacgatgctgggtcaaggaaagctcctctgaacgtgagaaagatggtggctggtgtggcggtcggcagttttgcgagtggccttggtccttgccaatgccaaccagcctagagcagtgcagtgattaagaggtgtggctaacaaacatttgtctattgactcggttcatgatataaattcggatttggagctttagtaactagcatgttttcggtagagacaatcacatcgcattagagggcgtgtttgtttgtgtttataatctccccagattatataatccaacatatttatattttgaactttataaattcatactgtggccgattggtcgatcttgcgcaaggataatcatggaattaagaacgctatacgaagtgcataaatataaaataccaatcggtgtatactataagctaaatttgaggcaccagtattgcacttaaataggataaacataaactaaaataaaataaaataaaataaagcctgagaagcctacgaatcgccaaccatgttattatcagagttctgtaaagtcgtagctaaacggagccacgacagcggtccggcaggcgctggcgctcagcggtaggacttctggaacctggcgcgggcgccgcggccgccgaacttcttgggctcgcagcggcgggggtcggcgacgaggagggtgcgctcgtagcgcatgaagatgtccttgatctcctttttcgccgcctcgtcgacgtacttctggtagtatgccacgagacccttggcgacggcctggcggatggcgtagatctgcgacgtcttcccgccgccgcgcacgcggatccgcatgtcgatgtccttgaacctggaccgccccgccagcagcacgggctccatggccttgagccgcagcatctcgggacggagcagctcgatcgggacgccgttcaccttgatcatccctcggcctggcttcgtgtaggccacggccacggccgtcttcttgcgcccgaaacactgcactgtgcccggggtcgggcgcttcagcacgggacccatggttgcgggtatagcagcaatggaggcggcggcggcggctagggctgcgaaggtgaaggtggcggcgcgctagggctgcggtggcttggaaacgttgctgcggtggaggcttttatagtacggatggatggaagcggtttccgggatcgccggcgccgacgaatgacttgttgggccgggccttagaaggaaggaaacccggtggctggtgaggcccaggtattcgttgtgataaaatggccactggtcaagggcggagaagctagggtttcggccctcacgaacactacttgatcttatccgagcgcgccgtccggcagcaccgcgggcggcggccggagtcgcctccccgtgcccgcgttgcccccgccggcctgcaagggttggtgggttggtggcgcggttcgtcgggaagaggcggcgcttgcgcccgcggtcgctgccggcgacgagcgatgacgactgcccgcggtcggagcgcgcgcgatgatggccgcgcgggttccccaaacacactacacgagatacttcgcgatgttcttttcctttgacatgttcttttcctttgacatgttcttttttcgaaaaatttgaagtattctttattaaaaaaaaaggctttttatgtgtgtttaatcccgcttgtcttctgtttgtgcttagtcgttctattagtgtggtttgattttgtatcacgctcgtcattgacaaagtgattccgttccggaatgatactaacaaagaatgtgccttctactctgttaccacgggtggtcttgggtccttacccttcagatgttcttgttaacggttcttctctcttcgtccagcacattgaactttatagtacacttagtatcattacattggtccttttaggatggagggtgaactattagagttattattaagatggtggatgttagctacgctttcatggtggatgtttactatgttttgtcatgtaaacaactgcatgtctttaaatttgtctatcagtataaatagtcactgcacatgcttaataaggttagattacaacatctggtgcagtcctctccatatctgatatttttctgttgcatcgatagccctcatggttattaaaaaatgtacttgtttgccatgtatgttgctcaatatatgatttgtgactcaccttgcttgacaagttggtatgattaagcgttttttggatcatgagggtgagatgataaacaacctttggtccacataattggattagtgaggtggaagcttcggatatagcggtgggctttacggttgccctaatagtgaacaggtttacagaagagagaaattctggcagatccaattgctgttgccgtcattctgatacaacctgacttgatgactctcaatgaagctgaatgctgaaaggtgttgctgccttgcagaatgaagctttgagttcaatacatggaattcatatttggtggtggtgttttggaacttgtttatctgctaggtgttgctgccttgcagaatgaagccgtccacattgtccttgtttatctgcaagatgcatgcctgctctatttcttgctcttcagtcttgactgatgcctactgcctgagtgcagattcagtgtgatagttagattctgctgatgtgttaacatgttcattgtaaacaaatttcttgttaaacatgtgtgatctcttcaagaccatgtgtctttgacctaatatattgcgaaacattcttcagttgtgtggtgtt

SEQ ID NO: 15553 - DNA, 2257 bp, Zea Mays
gattaggtatgtctcttgtcttatccgccacacacgacacgacacgcgccggccacagaaacagcgcttcactcccctccgcgccgcggcgaccatggagctcgccaccgtcgccgctgcagtcgcctccgccgctgcgcgcccgcacgggcctttctcctctccccgcgcagtctctgcctccgtctcgtggaccagtctctcgctcgcctacacctcccgctgtctctcctccacgtcctcgcgacggcggctgcgctggctccccgtcacctcggccgccgtggagctccgcgaggccactgccgggggcggagactcgctccgtgtcaccaagacgccgcagcctggatccagtgttaagttcagcgtggaggtgcctacttccatcattcacgagtgctaccaatccacgctacaggagtacgccaaacgtgttaaggttcctggatttcggcctgggaagaccattccagaaaacgttcttataaactatgtaggaccgcaacatgtacaggatgccacgattgaagctatcttaaaacatacgcttcctcaagcactgtcctcggtagaggagagggcattagaagattctgttcgcattctgactcaatttgatgatatgagaaattctttctcactcgacaatgtgtttagatatgatgttgctgtggatgttgcccctgaagtccgatggttatctgaagacaaatataggaacctcaaagttgtcgttgaaatagatgaagctgttgatgcggaaaaggcggcagagaaagagcttcagcgtcgtcataaagctctaggcttacttagaattgtggctgacagaggcctccagattggtgatctggtggtgctggatatatttgcggaaagcattaacaatgatggctctagaggtgaaaaaatttcatcggctgagagtacaggtttccacttggacactgaggaaaatagtaaccttgttcctggatttcttggttcgttgattgggattcgtgctggtgagactagatcatttcctatccagttccccgagtcatttgagcgagaaagtctacgaggtgtccgtgcacagtttactgttgtgtgtaaagagctgttctacagagagttgccagtaatggatgactcacttgctgtaaagcttcttccaggatgcactacaatagacgaggttcgagagcgtattttgaaaagatgtaaagaagtggagaagacggccatagaacaagcaacagacaacgcgatccttgaccagctcgggaagttggtcgaggtcgacgtccctcgtgccttgtttcaagagcaagggcagcagctttatggagccaagcttctgcagcttcaggcggaaaggaagctggataaagaccagctagcttcgttatcaaccaagaggtcagtgcaggcgtacctagaagatgagaaggagaacattacaagaatcattaaacagatgctggccgttggcgatattttcaaatccgagaacttacagtactcgactgatcagctcgtcaaggaagttgagaactccatagcggagttcaaacagtacaaccaagactatgatgaggacaacatcaggcagcaggtccaggatgtcctagaggcggcgaaggtgcttgaatggctcaaggagaactgctcggtcgagtatatcaggcgatgagtcccacgatgctgggtcaaggaaagctcctctgaacgtgagaaagatggtggctggtgtggcggtcggcagttttgcgagtggccttggtccttgccaatgccaaccagcctagagcagtgcagtgattaagaggtttacagaagagagaaattctggcagatccaattgctgttgccgtcattctgatacaacctgacttgatgactctcaatgaagctgaatgctgaaaggtgttgctgccttgcagaatgaagctttgagttcaatacatggaattcatatttggtggtggtgttttggaacttgtttatctgctaggtgttgctgccttgcagaatgaagccgtccacattgtccttgtttatctgcaagatgcatgcctgctctatttcttgctcttcagtcttgactgatgcctactgcctgagtgcagattcagtgtgatagttagattctgctgatgtgttaacatgttcattgtaaacaaatttcttgttaaacatgtgtgatctcttcaagaccatgtgtctttgacctaatatattgcgaaacattcttcagttgtgtggtgtt

SEQ ID NO: 15554 - DNA, 540 bp, Zea Mays
gcaaatatgcattgtggtgctatcatagatcatgttttcttcaacactacaatgaactacgtcgaggagaattgtgctccagcagtttatacaccagaattaagatacgtgtgcattgctggaaggtacattcaaggtgctcctcttctggggaactccgcagctgcttctgatgagatcctcacagttgacactccttcagaaggaggcgatgctgttattgtcagtagcagtgacaattctacatctactccatcagctgtctcgtggcgagcccggttcattgggcaaggttacaagcaggtttgtgggcgagcagatgtgtggggtgacgacgttgttcctgagatggcagctcatctggactacttatctattaatttcttgagaattaaagcaggaggtcttgaatatttgtccttaacagtttatattgtcagttttacaagagtagatatctcattacagatatctcattacactggttgttgttcttggatttgaaatttctgttagagttgttgtctggaaatgataaga

SEQ ID NO: 15555 - DNA, 1414 bp, Zea Mays
atgttctttgagaagcatgacgagtacaagttacagttcaaaggtctgggctagctcttcctgggtgttccaacgagcagctcgttgctctacaaggaggtcagtacatcgatctgtacaaggaggagttcaggaagatgaaggagagagcgtcggagaacttccgggtcgactacgccgtcagccgggagcagacgaacgcggcgggggagaggatgtacatccagacccggatggcggagtacaaagaggaattgtgggagctcctgaagaaggacaacacctacgtctacatgtgtgggctgaaaggcatggagaacggtatcgatgacattatgttggatcaagaatctctcaaatataataatgtgaatggtagatcaagcaggtggtctggtacagatactgtgcgctcgccttctccttcagctcagcacctgcttgtgcttctgatggcagaaaacctgagtgttcaaattcaacattggctacagagacaaccatatcaggaaccaaacgatgctgaccctgaaggtatgagctcttgctgtgaaattgatggtggcgctgagacttgtgtggcatatattgcttacttaaatgtcaagaatcgactggttcgactacaagaagcagctgaagaggggagatcaatggaatgtggaggtctactaaccgctgaattttgcaggtttggatgcgactggaagaagatcgaggagcatgtcggcaccaagacgacggtccagatacggagccacgcccagaaatacttcctcaaggtccagaagcttgggctggctgttgggctgccgctgatgtacccgaggcgccacttcgccatgcagcagcagcagcagagctcggtagccggtggtagcagcgcgaccgccatgccgctgctgcacggccggcaacctacttgcgcgccggtcgccatgccaggtctggccgagcccgacaccgtcgcccatcacggttccatcggatggagcagccccagtgtggtcgtccccgcggccagcggcggcggcgacaaggatgcaaggcttggacttggagtgggtggcagcattgatagaagtgattacaagtcgggcgaccagctggtcgtgctataggaccaaccaggcgcctaatcgtgattagggtaacgattaggacgcctaatcggtcttggtaagtgtgaactatgcaatctacatacatcctgtgaagtgtgaactataggattccagtggacagtggtaagagataggaaagggagagaaggaggggagcaggtgctaagggagtggtaactgcacataatcgttgtggcaaggtttttgaagcgagtagctaagcctcagcagtccgtaatttctgttgttgcttcgccaccctcagcacacgatgaagttgttgttctgaa

SEQ ID NO: 15556 - DNA, 1793 bp, Zea Mays
ggaagatgttctttgagaagcatgacgattcaaaggtctgggctagctcttcctgggtgttccaacgagcagctcgttgctctacaaggaggagttcaggaagatgaaggagagagcgtcggagaacttccgggtcgactacgccgtcagccgggagcagacgaacgcggcgggggagaggatgtacatccagacccggatggcggagtacaaagaggaattgtgggagctcctgaagaaggacaacacctacgtctacatgtgtgggctgaaaggcatggagaacggtatcgatgacattatggtatcgctggctgaaaaagacgtttggattcgatgcacccgaaatttttgcaatgattctaccgagactttgggggccttatttgggagcaacaacgcatgcgattttcgggtgcgcgcttccttcctgtcgctgcaggtggtctggtacagatactagacaaccgtacggcggcagaagaacatcttcaggcggaaggaaatgtggcagccattattgttgcttagtgttctattattattattactgtctagctatagctcatagctggtgtttctttccctttaactgatgatgtttgtaacaaccatagctttactgaatgatgagtaaacaatcagacaatgagcagcaggtcatgacaaagaactaccttgtctagctagctaggtctactttctggacaaagtcatcacatcaagggcggtctcaataccacaggccgggtcatcaaattgtggccttgatgatcctttctgcgctttatttgtttctctctttccctttccatctcactctccatggagatatcaggaaccaaacgatgctgaccctgaaggtatgagctcttgctgtgaaattgatggtggcgctgagacttgtgtggcatatattgcttacttaaatgtcaagaatcgactggttcgactacaagaagcagctgaagaggggagatcaatggaatgtggaggtctactaaccgctgaattttgcagatgatacaatagtacaagttattatttgaccctgattgttgcctctgcaggtttggatgcgactggaagaagatcgaggagcatgtcggcaccaagacgacggtccagatacggagccacgcccagaaatacttcctcaaggtccagaagcttgggctggctgttgggctgccgctgatgtacccgaggcgccacttcgccatgcagcagcagcagcagagctcggtagccggtggtagcagcgcgaccgccatgccgctgctgcacggccggcaacctacttgcgcgccggtcgccatgccaggtctggccgagcccgacaccgtcgcccatcacggttccatcggatggagcagccccagtgtggtcgtccccgcggccagcggcggcggcgacaaggatgcaaggcttggacttggagtgggtggcagcattgatagaagtgattacaagtcgggcgaccagctggtcgtgctataggaccaaccaggcgcctaatcgtgattagggtaacgattaggacgcctaatcggtcttggtaagtgtgaactatgcaatctacatacatcctgtgaagtgtgaactataggattccagtggacagtggtaagagataggaaagggagagaaggaggggagcaggtgctaagggagtggtaactgcacataatcgttgtggcaaggtttttgaagcgagtagctaagcctcagcagtccgtaatttctgttgttgcttcgccaccctcagcacacgatgaagttgttgttctgaa

SEQ ID NO: 15557 - DNA, 1843 bp, Zea Mays
ggaagatgttctttgagaagcatgacgagtacaagttacagttcaaaggtctgggctagctcttcctgggtgttccaacgagcagctcgttgctctacaaggaggagttcaggaagatgaaggagagagcgtcggagaacttccgggtcgactacgccgtcagccgggagcagacgaacgcggcgggggagaggatgtacatccagacccggatggcggagtacaaagaggaattgtgggagctcctgaagaaggacaacacctacgtctacatgtgtgggctgaaaggcatggagaacggtatcgatgacattatggtatcgctggctgaaaaagacgtttggattcgatgcacccgaaatttttgcaatgattctaccgagactttgggggccttatttgggagcaacaacgcatgcgattttcgggtgcgcgcttccttcctgtcgctgcaggtggtctggtacagatactgtgcgctcgccttctccttcagctcagcacctgcttgtgcttctgatggcagaaaacctgagtgttcaaattcaacattggctacagagacaaccgtacggcggcagaagaacatcttcaggcggaaggaaatgtggcagccattattgttgcttagtgttctattattattattactgtctagctatagctcatagctggtgtttctttccctttaactgatgatgtttgtaacaaccatagctttactgaatgatgagtaaacaatcagacaatgagcagcaggtcatgacaaagaactaccttgtctagctagctaggtctactttctggacaaagtcatcacatcaagggcggtctcaataccacaggccgggtcatcaaattgtggccttgatgatcctttctgcgctttatttgtttctctctttccctttccatctcactctccatggagatatcaggaaccaaacgatgctgaccctgaaggtatgagctcttgctgtgaaattgatggtggcgctgagacttgtgtggcatatattgcttacttaaatgtcaagaatcgactggttcgactacaagaagcagctgaagaggggagatcaatggaatgtggaggtctactaaccgctgaattttgcaggtttggatgcgactggaagaagatcgaggagcatgtcggcaccaagacgacggtccagatacggagccacgcccagaaatacttcctcaaggtccagaagcttgggctggctgttgggctgccgctgatgtacccgaggcgccacttcgccatgcagcagcagcagcagagctcggtagccggtggtagcagcgcgaccgccatgccgctgctgcacggccggcaacctacttgcgcgccggtcgccatgccaggtctggccgagcccgacaccgtcgcccatcacggttccatcggatggagcagccccagtgtggtcgtccccgcggccagcggcggcggcgacaaggatgcaaggcttggacttggagtgggtggcagcattgatagaagtgattacaagtcgggcgaccagctggtcgtgctataggaccaaccaggcgcctaatcgtgattagggtaacgattaggacgcctaatcggtcttggtaagtgtgaactatgcaatctacatacatcctgtgaagtgtgaactataggattccagtggacagtggtaagagataggaaagggagagaaggaggggagcaggtgctaagggagtggtaactgcacataatcgttgtggcaaggtttttgaagcgagtagctaagcctcagcagtccgtaatttctgttgttgcttcgccaccctcagcacacgatgaagttgttgttctgaa

SEQ ID NO: 15558 - DNA, 2199 bp, Zea Mays
ggaagatgttctttgagaagcatgacgagtacaagttacagttcaaaggtctgggctagctcttcctgggtgttccaacgagcagctcgttgctctacaaggaggtcagtacatcgatctgtacaaggaggagttcaggaagatgaaggagagagcgtcggagaacttccgggtcgactacgccgtcagccgggagcagacgaacgcggcgggggagaggatgtacatccagacccggatggcggagtacaaagaggaattgtgggagctcctgaagaaggacaacacctacgtctacatgtgtgggctgaaaggcatggagaacggtatcgatgacattatggtatcgctggctgaaaaagacggtatgcaaataatctttaattttgaacccttagttccaaataaagtagatatataaagcagcaggtgtgcagatgacgaaactaagccatatacttcctagcttcatctcaaaaatattcggtcacttttaagcacagcaaaagggctattaatttgcacttgatctctccgatgaccctttcgatccattcatgtttttgttgtgttcgctcaaacagttggatcaagaatctctcaaatataataatgtgaatggtagatcaagcaggtctgcatatgacgaaattaagttagacttctctcacttccttgatctgaaaataacttttattggtacggtaccttctaagcacagtaaaaaggctgtttcgctttatatctccgacgaccctttcgcctcatgttttcattgtgttcgctgaaacagtttggattcgatgcacccgaaatttttgcaatgattctaccgagactttgggggccttatttgggagcaacaacgcatgcgattttcgggtgcgcgcttccttcctgtcgctgcaggtggtctgagacaaccgtacggcggcagaagaacatcttcaggcggaaggaaatgtggcagccattattgttgcttagtgttctattattattattactgtctagctatagctcatagctggtgtttctttccctttaactgatgatgtttgtaacaaccatagctttactgaatgatgagtaaacaatcagacaatgagcagcaggtcatgacaaagaactaccttgtctagctagctaggtctactttctggacaaagtcatcacatcaagggcggtctcaataccacaggccgggtcatcaaattgtggccttgatgatcctttctgcgctttatttgtttctctctttccctttccatctcactctccatggagatatcaggaaccaaacgatgctgaccctgaaggtatgagctcttgctgtgaaattgatggtggcgctgagacttgtgtggcatatattgcttacttaaatgtcaagaatcgactggttcgactacaagaagcagctgaagaggggagatcaatggaatgtggaggtctactaaccgctgaattttgcaggtttggatgcgactggaagaagatcgaggagcatgtcggcaccaagacgacggtccagatacggagccacgcccagaaatacttcctcaaggtccagaagcttgggctggctgttgggctgccgctgatgtacccgaggcgccacttcgccatgcagcagcagcagcagagctcggtagccggtggtagcagcgcgaccgccatgccgctgctgcacggccggcaacctacttgcgcgccggtcgccatgccaggtctggccgagcccgacaccgtcgcccatcacggttccatcggatggagcagccccagtgtggtcgtccccgcggccagcggcggcggcgacaaggatgcaaggcttggacttggagtgggtggcagcattgatagaagtgattacaagtcgggcgaccagctggtcgtgctataggaccaaccaggcgcctaatcgtgattagggtaacgattaggacgcctaatcggtcttggtaagtgtgaactatgcaatctacatacatcctgtgaagtgtgaactataggattccagtggacagtggtaagagataggaaagggagagaaggaggggagcaggtgctaagggagtggtaactgcacataatcgttgtggcaaggtttttgaagcgagtagctaagcctcagcagtccgtaatttctgttgttgcttcgccaccctcagcacacgatgaagttgttgttctgaa

SEQ ID NO: 15559 - DNA, 3389 bp, Zea Mays
aaaaaccctagcgaccaaccacattgataacctctgctgccgccgacgtcgatgcctaggctctccctcaccgtcactgacgacgccgctgccatgccctttgtgcttcggcttggtggttccccagcgctccgccctggctcgcagtccccatcgtggctgcgctttggcggcagggccggggcgcggaaggcgctgttctgctccgccgaggacgctaggcggtgtggctcggacgatgatgcggaggcggaggagtgtcggaggagaggcgggagccgcgtgccatcagataggaggataaggggcaggaatgcggctgccacggtaggtgatctgcagtcaggtgataacgtccagataacaggaccagtcggcaaagaaatgttgatgcccaaagaccccaacgctaccattataatgcttgccaccggtacagttcaaaggtctgggctagctcttcctgggtgttccaacgagcagctcgttgctctacaaggaggtcagtacatcgatctgtacaaggaggagttcaggaagatgaaggagagagcgtcggagaacttccgggtcgactacgccgtcagccgggagcagacgaacgcggcgggggagaggatgtacatccagacccggatggcggagtacaaagaggaattgtgggagctcctgaagaaggacaacacctacgtctacatgtgtgggctgaaaggcatggagaacggtatcgatgacattatgttggatcaagaatctctcaaatataataatgtgaatggtagatcaagcaggtctgcatatgacgaaattaagttagacttctctcacttccttgatctgaaaataacttttattggtacggtaccttctaagcacagtaaaaaggctgtttcgctttatatctccgacgaccctttcgcctcatgttttcattgtgttcgctgaaacagtttggattcgatgcacccgaaatttttgcaatgattctaccgagactttgggggccttatttgggagcaacaacgcatgcgattttcgggtgcgcgcttccttcctgtcgctgcaggtggtctggtacagatactgtgcgctcgccttctccttcagctcagcacctgcttgtgcttctgatggcagaaaacctgagtgttcaaattcaacattggctacagagacaaccgtacggcggcagaagaacatcttcaggcggaaggaaatgtggcagccattattgttgcttagtgttctattattattattactgtctagctatagctcatagctggtgtttctttccctttaactgatgatgtttgtaacaaccatagctttactgaatgatgagtaaacaatcagacaatgagcagcaggtcatgacaaagaactaccttgtctagctagctaggtctactttctggacaaagtcatcacatcaagggcggtctcaataccacaggccgggtcatcaaattgtggccttgatgatcctttctgcgctttatttgtttctctctttccctttccatctcactctccatggagatatcaggaaccaaacgatgctgaccctgaaggtatgagctcttgctgtgaaattgatggtggcgctgagacttgtgtggcatatattgcttacttaaatgtcaagaatcgactggttcgactacaagaagcagctgaagaggggagatcaatggaatgtggaggtctactaaccgctgaattttgcaggtgacattttgtgttgtgcgtatctgtaagtgaggccagggtgtactgcgtatataatgtagatagtgagtgtgttctgcgtttttttactatggcagtctctgtttatagatttgtataagtactcttaatattatgcctattcgattttttgtatgagtaatgtgatcaagtgcccaagaatttctgtccccacatttttttttgatttgcaaagatcttgtagatatattatttttaagttttggtttatgacaatcctagagaaaattttattttattttgcatcgaaactgataccctacacaatgaacatttgcccctgacaaccaacagaagttacacaacaagcttactgcaatatcatagaccatactgtccctctctttttttcctgcacatttatcgtgtttcttcttttttcctgtgcagtaaatttatagttattatgctaatgcagaagcatgcataagaaaaaggcgaacagcaactgcgtactatatttgcaggaatattctgctctccagtattgcacacacactctactctgtatttctccagtattgatcgtcttgcttgataacgcagatgatacaatagtacaagttattatttgaccctgattgttgcctctgcaggtaaagccaacaaagttcaatatttacaataactcgatgtgtccagggtttgcaagacaagattaagcagctctaagattaagatagttgtcatctgattaaaagtagaattttattgctatgttatatgttctgcttgcctctgcttgatcacatcttatttgaaataccatgtttttgcggtactaataccttgatcacacttgatcctttttatgcttgtttctataacctctattaccaaggacatgatgagtggacttgatggtcattgagttatctgttttctcttctcaggtttggatgcgactggaagaagatcgaggagcatgtcggcaccaagacgacggtccagatacggagccacgcccagaaatacttcctcaaggtccagaagcttgggctggctgttgggctgccgctgatgtacccgaggcgccacttcgccatgcagcagcagcagcagagctcggtagccggtggtagcagcgcgaccgccatgccgctgctgcacggccggcaacctacttgcgcgccggtcgccatgccaggtctggccgagcccgacaccgtcgcccatcacggttccatcggatggagcagccccagtgtggtcgtccccgcggccagcggcggcggcgacaaggatgcaaggcttggacttggagtgggtggcagcattgatagaagtgattacaagtcgggcgaccagctggtcgtgctataggaccaaccaggcgcctaatcgtgattagggtaacgattaggacgcctaatcggtcttggtaagtgtgaactatgcaatctacatacatcctgtgaagtgtgaactataggattccagtggacagtggtaagagataggaaagggagagaaggaggggagcaggtgctaagggagtggtaactgcacataatcgttgtggcaaggtttttgaagcgagtagctaagcctcagcagtccgtaatttctgttgttgcttcgccaccctcagcacacgatgaagttgttgttctgaa

SEQ ID NO: 15560 - DNA, 3682 bp, Zea Mays
aaaacccccaacccaaaaaccctagcgaccaaccacattgataacctctgctgccgccgacgtcgatgcctaggctctccctcaccgtcactgacgacgccgctgccatgccctttgtgcttcggcttggtggttccccagcgctccgccctggctcgcagtccccatcgtggctgcgctttggcggcagggccggggcgcggaaggcgctgttctgctccgccgaggacgctaggcggtgtggctcggacgatgatgcggaggcggaggagtgtcggaggagaggcgggagccgcgtgccatcagataggaggataaggggcaggaatgcggctgccacggtgatctgcagtcaggtgataacgtccagataacaggaccagtcggcaaagaaatgttgatgcccaaagaccccaacgctaccattataatgcttgccaccggtacaggtatcgctccgttccgatcgttactgtggaagatgttctttgagaagcatgacgagtacaagttacagttcaaaggtctgggctagctcttcctgggtgttccaacgagcagctcgttgctctacaaggaggagttcaggaagatgaaggagagagcgtcggagaacttccgggtcgactacgccgtcagccgggagcagacgaacgcggcgggggagaggatgtacatccagacccggatggcggagtacaaagaggaattgtgggagctcctgaagaaggacaacacctacgtctacatgtgtgggctgaaaggcatggagaacggtatcgatgacattatggtatcgctggctgaaaaagacggtatgcaaataatctttaattttgaacccttagttccaaataaagtagatatataaagcagcaggtgtgcagatgacgaaactaagccatatacttcctagcttcatctcaaaaatattcggtcacttttaagcacagcaaaagggctattaatttgcacttgatctctccgatgaccctttcgatccattcatgtttttgttgtgttcgctcaaacagttggatcaagaatctctcaaatataataatgtgaatggtagatcaagcaggtctgcatatgacgaaattaagttagacttctctcacttccttgatctgaaaataacttttattggtacggtaccttctaagcacagtaaaaaggctgtttcgctttatatctccgacgaccctttcgcctcatgttttcattgtgttcgctgaaacagtttggattcgatgcacccgaaatttttgcaatgattctaccgagactttgggggccttatttgggagcaacaacgcatgcgattttcgggtgcgcgcttccttcctgtcgctgcaggtggtctggtacagatactgtgcgctcgccttctccttcagctcagcacctgcttgtgcttctgatggcagaaaacctgagtgttcaaattcaacattggctacagagacaaccgtacggcggcagaagaacatcttcaggcggaaggaaatgtggcagccattattgttgcttagtgttctattattattattactgtctagctatagctcatagctggtgtttctttccctttaactgatgatgtttgtaacaaccatagctttactgaatgatgagtaaacaatcagacaatgagcagcaggtcatgacaaagaactaccttgtctagctagctaggtctactttctggacaaagtcatcacatcaagggcggtctcaataccacaggccgggtcatcaaattgtggccttgatgatcctttctgcgctttatttgtttctctctttccctttccatctcactctccatggagatatcaggaaccaaacgatgctgaccctgaaggtatgagctcttgctgtgaaattgatggtggcgctgagacttgtgtggcatatattgcttacttaaatgtcaagaatcgactggttcgactacaagaagcagctgaagaggggagatcaatggaatgtggaggtctactaaccgctgaattttgcaggtgacattttgtgttgtgcgtatctgtaagtgaggccagggtgtactgcgtatataatgtagatagtgagtgtgttctgcgtttttttactatggcagtctctgtttatagatttgtataagtactcttaatattatgcctattcgattttttgtatgagtaatgtgatcaagtgcccaagaatttctgtccccacatttttttttgatttgcaaagatcttgtagatatattatttttaagttttggtttatgacaatcctagagaaaattttattttattttgcatcgaaactgataccctacacaatgaacatttgcccctgacaaccaacagaagttacacaacaagcttactgcaatatcatagaccatactgtccctctctttttttcctgcacatttatcgtgtttcttcttttttcctgtgcagtaaatttatagttattatgctaatgcagaagcatgcataagaaaaaggcgaacagcaactgcgtactatatttgcaggaatattctgctctccagtattgcacacacactctactctgtatttctccagtattgatcgtcttgcttgataacgcagatgatacaatagtacaagttattatttgaccctgattgttgcctctgcaggtaaagccaacaaagttcaatatttacaataactcgatgtgtccagggtttgcaagacaagattaagcagctctaagattaagatagttgtcatctgattaaaagtagaattttattgctatgttatatgttctgcttgcctctgcttgatcacatcttatttgaaataccatgtttttgcggtactaataccttgatcacacttgatcctttttatgcttgtttctataacctctattaccaaggacatgatgagtggacttgatggtcattgagttatctgttttctcttctcaggtttggatgcgactggaagaagatcgaggagcatgtcggcaccaagacgacggtccagatacggagccacgcccagaaatacttcctcaaggtccagaagcttgggctggctgttgggctgccgctgatgtacccgaggcgccacttcgccatgcagcagcagcagcagagctcggtagccggtggtagcagcgcgaccgccatgccgctgctgcacggccggcaacctacttgcgcgccggtcgccatgccaggtctggccgagcccgacaccgtcgcccatcacggttccatcggatggagcagccccagtgtggtcgtccccgcggccagcggcggcggcgacaaggatgcaaggcttggacttggagtgggtggcagcattgatagaagtgattacaagtcgggcgaccagctggtcgtgctataggaccaaccaggcgcctaatcgtgattagggtaacgattaggacgcctaatcggtcttggtaagtgtgaactatgcaatctacatacatcctgtgaagtgtgaactataggattccagtggacagtggtaagagataggaaagggagagaaggaggggagcaggtgctaagggagtggtaactgcacataatcgttgtggcaaggtttttgaagcgagtagctaagcctcagcagtccgtaatttctgttgttgcttcgccaccctcagcacacgatgaagttgttgttctgaa

SEQ ID NO: 15561 - DNA, 1689 bp, Zea Mays
gtggaagatgttctttgagaagcatgacgagtacaagttacagttcaaaggtctgggctagctcttcctgggtgttccaacgagcagctcgttgctctacaaggaggtcagtacatcgatctgtacaaggaggagttcaggaagatgaaggagagagcgtcggagaacttccgggtcgactacgccgtcagccgggagcagacgaacgcggcgggggagaggatgtacatccagacccggatggcggagtacaaagaggaattgtgggagctcctgaagaaggacaacacctacgtctacatgtgtgggctgaaaggcatggagaacggtatcgatgacattatgttggatcaagaatctctcaaatataataatgtgaatggtagatcaagcaggtggtctggtacagatactgtgcgctcgccttctccttcagctcagcacctgcttgtgcttctgatggcagaaaacctgagtgttcaaattcaacattggctacagagacaaccgtacggcggcagaagaacatcttcaggcggaaggaaatgtggcagccattattgttgcttagtgttctattattattattactgtctagctatagctcatagctggtgtttctttccctttaactgatgatgtttgtaacaaccatagctttactgaatgatgagtaaacaatcagacaatgagcagcaggtcatgacaaagaactaccttgtctagctagctaggtctactttctggacaaagtcatcacatcaagggcggtctcaataccacaggccgggtcatcaaattgtggccttgatgatcctttctgcgctttatttgtttctctctttccctttccatctcactctccatggagatatcaggaaccaaacgatgctgaccctgaaggtatgagctcttgctgtgaaattgatggtggcgctgagacttgtgtggcatatattgcttacttaaatgtcaagaatcgactggttcgactacaagaagcagctgaagaggggagatcaatggaatgtggaggtctactaaccgctgaattttgcaggtgacattttgtgttgtgcgtatctgtaagtgaggccagggtgtactgcgtatataatgtagatagtgagtgtgttctgcgtttttttactatggcagtctctgtttatagatttgtataagtactcttaatattatgcctattcgattttttgtatgagtaatgtgatcaagtgcccaagaatttctgtccccacatttttttttgatttgcaaagatcttgtagatatattatttttaagttttggtttatgacaatcctagagaaaattttattttattttgcatcgaaactgataccctacacaatgaacatttgcccctgacaaccaacagaagttacacaacaagcttactgcaatatcatagaccatactgtccctctctttttttcctgcacatttatcgtgtttcttcttttttcctgtgcagtaaatttatagttattatgctaatgcagaagcatgcataagaaaaaggcgaacagcaactgcgtactatatttgcaggaatattctgctctccagtattgcacacacactctactctgtatttctccagtattgatcgtcttgcttgataacgcagatgatacaatagtacaagttattatttgaccctgattgttg

SEQ ID NO: 15562 - DNA, 2511 bp, Zea Mays
cccaacccaaaaaccctagcgaccaaccacattgataacctctgctgccgccgacgtcgatgcctaggctctccctcaccgtcactgacgacgccgctgccatgccctttgtgcttcggcttggtggttccccagcgctccgccctggctcgcagtccccatcgtggctgcgctttggcggcagggccggggcgcggaaggcgctgttctgctccgccgaggacgctaggcggtgtggctcggacgatgatgcggaggcggaggagtgtcggaggagaggcgggagccgcgtgccatcagataggaggataaggggcaggaatgcggctgccacggtaggtgatctgcagtcaggtgataacgtccagataacaggaccagtcggcaaagaaatgttgatgcccaaagaccccaacgctaccattataatgcttgccaccggtacagttcaaaggtctgggctagctcttcctgggtgttccaacgagcagctcgttgctctacaaggaggtcagtacatcgatctgtacaaggaggagttcaggaagatgaaggagagagcgtcggagaacttccgggtcgactacgccgtcagccgggagcagacgaacgcggcgggggagaggatgtacatccagacccggatggcggagtacaaagaggaattgtgggagctcctgaagaaggacaacacctacgtctacatgtgtgggctgaaaggcatggagaacggtatcgatgacattatggtatcgctggctgaaaaagacggtatgcaaataatctttaattttgaacccttagttccaaataaagtagatatataaagcagcaggtgtgcagatgacgaaactaagccatatacttcctagcttcatctcaaaaatattcggtcacttttaagcacagcaaaagggctattaatttgcacttgatctctccgatgaccctttcgatccattcatgtttttgttgtgttcgctcaaacagttggatcaagaatctctcaaatataataatgtgaatggtagatcaagcaggtctgcatatgacgaaattaagttagacttctctcacttccttgatctgaaaataacttttattggtacggtaccttctaagcacagtaaaaaggctgtttcgctttatatctccgacgaccctttcgcctcatgttttcattgtgttcgctgaaacagtttggattcgatgcacccgaaatttttgcaatgattctaccgagactttgggggccttatttgggagcaacaacgcatgcgattttcgggtgcgcgcttccttcctgtcgctgcaggtggtctgagacaaccgtacggcggcagaagaacatcttcaggcggaaggaaatgtggcagccattattgttgcttagtgttctattattattattactgtctagctatagctcatagctggtgtttctttccctttaactgatgatgtttgtaacaaccatagctttactgaatgatgagtaaacaatcagacaatgagcagcaggtcatgacaaagaactaccttgtctagctagctaggtctactttctggacaaagtcatcacatcaagggcggtctcaataccacaggccgggtcatcaaattgtggccttgatgatcctttctgcgctttatttgtttctctctttccctttccatctcactctccatggagatatcaggaaccaaacgatgctgaccctgaaggtatgagctcttgctgtgaaattgatggtggcgctgagacttgtgtggcatatattgcttacttaaatgtcaagaatcgactggttcgactacaagaagcagctgaagaggggagatcaatggaatgtggaggtctactaaccgctgaattttgcaggtgacattttgtgttgtgcgtatctgtaagtgaggccagggtgtactgcgtatataatgtagatagtgagtgtgttctgcgtttttttactatggcagtctctgtttatagatttgtataagtactcttaatattatgcctattcgattttttgtatgagtaatgtgatcaagtgcccaagaatttctgtccccacatttttttttgatttgcaaagatcttgtagatatattatttttaagttttggtttatgacaatcctagagaaaattttattttattttgcatcgaaactgataccctacacaatgaacatttgcccctgacaaccaacagaagttacacaacaagcttactgcaatatcatagaccatactgtccctctctttttttcctgcacatttatcgtgtttcttcttttttcctgtgcagtaaatttatagttattatgctaatgcagaagcatgcataagaaaaaggcgaacagcaactgcgtactatatttgcaggaatattctgctctccagtattgcacacacactctactctgtatttctccagtattgatcgtcttgcttgataacgcagatgatacaatagtacaagttattatttgaccctgattgttg

SEQ ID NO: 15563 - DNA, 1629 bp, Zea Mays
ctttttttctcaagcgacactcaatcaatttagagataattgttgtaaaaaagattagatataatgggcaacattcctttactagctgatctctgcaagctatatttatttgctaactcacaaatggatatgacacatggacacagtttctgtttcttgtaaaggagtacttctcaaaatggggagaaagtggcactgttgatttgaagtatgagttggagcacctcatcatactgacagctagccggtgcttgctgggaagggaggtgcgagaaaagctgttcgacgatgtttctgctctcttccacgaccttgacaacgggatgcagccaatcagtgtcctcttcccatacctcccaatccctgcacataagcgccgcgacagggcacgtgcacgtctggcagaaatctttgccaccatcatcaagtcccgcaaggcctctggacagtctgaagaagacatgctgcagtgcttcattgattccaagtacaagaatgggcgttccaccagtgagggcgaggtaaccgggctacttatcgcagcactctttgctgggcagcacaccagctctatcacctcaacctggactggagcatacatgcttcggttcaagcagtacttcgcagaggctgtagaggagcagaaggatgtcatgaaacggcacggcgacaagattgatcatgacatcctcgcggagatggacgtcctctaccggtgcatcaaggaggccctccgtctccacccgccgctaatcatgttgcttcgtcaatcgcacagcgacttcaccgtgacaacaaaggaaggcaaagtgtatgacatccccaagggccacatcgtcgcgacatcaccatccttcgccaacaggctgccccacatctacaagaaccctgactcatatgaccctgaccggttcggtcccggaagggaggaggacaaggctgcaggtgccttctcgtacatctccttcggtggtggcaggcatgggtgcctcggtgagcccttcgcctaccttcagatcaaggcgatctggacgcacctactgaggaactttgagttcgagctggtatcgccgttcccagagaacgactggaacgccatggtggttggcatcaagggcgaggtgatggttaactacaagaggcggaagcttgtcgtggacaactaagattgtggtcgccagtctctatctcttagatgcttgcttgcttctttttgattcgattgctttcacctgtttgtcagcatttgttaagttctgctgcacacacgccagctttgtaggggtgtttctgttgtttaggattctgtaatttgcttcgccatgggggtctgccatgatatgcaacatccgcttgttagctagcttcctagctcagcattccccttagtcaaatctgtaacctgtagcatctacaagcgtgtggctttattgttgaaatcctgatgtttatcgttctctataaacacaaaactgaacaaataacctcgctgcaatgaataaactcaggtgttcagtgtgaatctgttggttgtgcccccatgctgcattgagttggacagtacaggcatttcagacttgttgggtaattaatatcatgtcgacactgaaggtgtccagttttcgtcca

SEQ ID NO: 15564 - DNA, 1686 bp, Zea Mays
ccctcctctctctcttcgccgcccctgtttccgccgccccctgtaaacctcccatccgccattgctaatccagccactcctccccaaaccacgggatctatcctactccctcctccattcggcagtgccgcgtggcacacctatatataaacacccggactccacactcccccggcatcgccgccccccgtcccgacgaattggaatacggaaagcgaaaggagtacttctcaaaatggggagaaagtggcactgttgatttgaagtatgagttggagcacctcatcatactgacagctagccggtgcttgctgggaagggaggtgcgagaaaagctgttcgacgatgtttctgctctcttccacgaccttgacaacgggatgcagccaatcagtgtcctcttcccatacctcccaatccctgcacataagcgccgcgacagggcacgtgcacgtctggcagaaatctttgccaccatcatcaagtcccgcaaggcctctggacagtctgaagaagacatgctgcagtgcttcattgattccaagtacaagaatgggcgttccaccagtgagggcgaggtaaccgggctacttatcgcagcactctttgctgggcagcacaccagctctatcacctcaacctggactggagcatacatgcttcggttcaagcagtacttcgcagaggctgtagaggagcagaaggatgtcatgaaacggcacggcgacaagattgatcatgacatcctcgcggagatggacgtcctctaccggtgcatcaaggaggccctccgtctccacccgccgctaatcatgttgcttcgtcaatcgcacagcgacttcaccgtgacaacaaaggaaggcaaagtgtatgacatccccaagggccacatcgtcgcgacatcaccatccttcgccaacaggctgccccacatctacaagaaccctgactcatatgaccctgaccggttcggtcccggaagggaggaggacaaggctgcaggtgccttctcgtacatctccttcggtggtggcaggcatgggtgcctcggtgagcccttcgcctaccttcagatcaaggcgatctggacgcacctactgaggaactttgagttcgagctggtatcgccgttcccagagaacgactggaacgccatggtggttggcatcaagggcgaggtgatggttaactacaagaggcggaagcttgtcgtggacaactaagattgtggtcgccagtctctatctcttagatgcttgcttgcttctttttgattcgattgctttcacctgtttgtcagcatttgttaagttctgctgcacacacgccagctttgtaggggtgtttctgttgtttaggattctgtaatttgcttcgccatgggggtctgccatgatatgcaacatccgcttgttagctagcttcctagctcagcattccccttagtcaaatctgtaacctgtagcatctacaagcgtgtggctttattgttgaaatcctgatgtttatcgttctctataaacacaaaactgaacaaataacctcgctgcaatgaataaactcaggtgttcagtgtgaatctgttggttgtgcccccatgctgcattgagttggacagtacaggcatttcagacttgttgggtaattaatatcatgtcgacactgaaggtgtccagttttcgtcca

SEQ ID NO: 15565 - DNA, 1420 bp, Zea Mays
ccatcctcggagtccttgatccgccgtcttgcaggctgcaggctgccatccgtctcgtctcccttcggtgccgccatcctcagagtcctcgatccatcgtcctgcaagttgcgtctcgtctccttccacggttcccctgatggatggccggtctcgttcccccttgtcacggccgtcggcgaagaataggtgtatgtctttgaataaggttcttgatgcaatcggaggtgcttcgtagcccgcccgtgccgcgtctcagcaagttccaacaccggcgtctcgctatcgtccgtcaatcgccgatggtgatcatcgatctgcatcacaggcgacacaacaggctcctttgtcgaacatggatggctatagctcgatgtcacctgggtacttcactaacctactgaaccgagagcatgacgatgtttttatccttgaggaaaacatgagaactgaaaatgaagttatcgagtacccaccagtgaacgaattgatctcacagtcaaaaccaaagggtcgttccaagaatttcaatgaagctgaagatatattgttgatttcagcatatcttaatataagtaaagatgctgttgttggaaaggatcaaaaggatggtagattttgggaaagagttgaaaaatactttcatgacaataagacgtttgattcggatcgcaattggtcgtccttgaagcatcgatggagtagtactattcataaagaaatgagtatgtttcaaggttttgtagatgccatagaaaggaagaatggaagtggcaagacaatgagtgataagctggcagaagctagtacaatgttccaggaacttaaaggaaagacattttcactcttccatgcatggaatattcttaagaatgagccaaagtgggcagaagagaagatagcaaaggaagacaatggcaacggggaaaatcatccgaattcagaaagacctctaggaaggaaagctgaaaaggaaaaggctaaaggaaaaaaccgtagtgaggaagaacctgatcctttcattgaggaagtcaaaaaaatgagagaaacaagagagaaaattgagacagaacgaaaggaacgtgatgacaagtttatcgagcttgacacaaaaaaactcaacttggagcaagaccagcatgataaggtgataatgacaatggacataagttcaatggatgaccaagcaaagcagtactttaggctgctgaaagatgagattttagctcgccgttttgggagtcagcactaggtttttagttttttagaataaatattctgaatgtttgtgttcaagcagtcataaaacatcttgggtatatgtttcagttttttagaataaatactctgaatgtttatgttcaagcagtcaccttttgaagacaggaaaacccaagagcaccgacatcatttcttttct

SEQ ID NO: 15566 - DNA, 1479 bp, Zea Mays
ttgtatctcaacccccactgacatttcacaaagccctttctccccttcgtacagccatcctcggagtccttgatccgccgtcttgcaggctgcaggctgccatccgtctcgtctcccttcggtgccgccatcctcagagtcctcgatccatcgtcctgcaagttgcgtctcgtctccttccacggttcccctgactagatggatggccggtctcgttcccccttgtcacggccgtcggcgaagaataggtgtatgtctttgaataaggttcttgatgcaatcggaggtgcttcgtagcccgcccgtgccgcgtctcagcaagttccaacaccggcgtctcgctatcgtccgtcaatcgccgatggtgatcatcgatctgcatcacaggcgacacaacaggctcctttgtcgaacatggatggctatagctcgatgtcacctgggtacttcactaacctactgaaccgagagcatgacgatgtttttatccttgaggaaaacatgagaactgaaaatgaagttatcgagtacccaccagtgaacgaattgatctcacagtcaaaaccaaagggtcgttccaagaatttcaatgaagctgaagatatattgttgatttcagcatatcttaatataagtaaagatgctgttgttggaaaggatcaaaaggatggtagattttgggaaagagttgaaaaatactttcatgacaataagacgtttgattcggatcgcaattggtcgtccttgaagcatcgatggagtagtactattcataaagaaatgagtatgtttcaaggttttgtagatgccatagaaaggaagaatggaagtggcaagacaatgagtgataagctggcagaagctagtacaatgttccaggaacttaaaggaaagacattttcactcttccatgcatggaatattcttaagaatgagccaaagtgggcagaagagaagatagcaaaggaagacaatggcaacggggaaaatcatccgaattcagaaagacctctaggaaggaaagctgaaaaggaaaaggctaaaggaaaaaaccgtagtgaggaagaacctgatcctttcattgaggaagtcaaaaaaatgagagaaacaagagagaaaattgagacagaacgaaaggaacgtgatgacaagtttatcgagcttgacacaaaaaaactcaacttggagcaagaccagcatgataaggtgataatgacaatggacataagttcaatggatgaccaagcaaagcagtactttaggctgctgaaagatgagattttagctcgccgttttgggagtcagcactaggtttttagttttttagaataaatattctgaatgtttgtgttcaagcagtcataaaacatcttgggtatatgtttcagttttttagaataaatactctgaatgtttatgttcaagcagtcaccttttgaagacaggaaaacccaagagcaccgacatcatttcttttct

SEQ ID NO: 15567 - DNA, 1420 bp, Zea Mays
agagcaactccaatagaggccctaaactcattaacaatttgaaatatgaggctccatccagaaaaatgaggtccaacggaggccctatttcaatagaattcataaaaaaaattagggcctaatctcaggagcagtaaatttgagaccctgggacgagcggcccaatacttgttcccttgtatctcaacccccactgacatttcacaaagccctttctccccttcgtacagccatcctcggagtccttgatccgccgtcttgcaggctgcaggctgccatccgtctcgtctcccttcggtgccgccatcctcagagtcctcgatccatcgtcctgcaagttgcgtctcgtctccttccacggttcccctgctcgatgtcacctgggtacttcactaacctactgaaccgagagcatgacgatgtttttatccttgaggaaaacatgagaactgaaaatgaagttatcgagtacccaccagtgaacgaattgatctcacagtcaaaaccaaagggtcgttccaagaatttcaatgaagctgaagatatattgttgatttcagcatatcttaatataagtaaagatgctgttgttggaaaggatcaaaaggatggtagattttgggaaagagttgaaaaatactttcatgacaataagacgtttgattcggatcgcaattggtcgtccttgaagcatcgatggagtagtactattcataaagaaatgagtatgtttcaaggttttgtagatgccatagaaaggaagaatggaagtggcaagacaatgagtgataagctggcagaagctagtacaatgttccaggaacttaaaggaaagacattttcactcttccatgcatggaatattcttaagaatgagccaaagtgggcagaagagaagatagcaaaggaagacaatggcaacggggaaaatcatccgaattcagaaagacctctaggaaggaaagctgaaaaggaaaaggctaaaggaaaaaaccgtagtgaggaagaacctgatcctttcattgaggaagtcaaaaaaatgagagaaacaagagagaaaattgagacagaacgaaaggaacgtgatgacaagtttatcgagcttgacacaaaaaaactcaacttggagcaagaccagcatgataaggtgataatgacaatggacataagttcaatggatgaccaagcaaagcagtactttaggctgctgaaagatgagattttagctcgccgttttgggagtcagcactaggtttttagttttttagaataaatattctgaatgtttgtgttcaagcagtcataaaacatcttgggtatatgtttcagttttttagaataaatactctgaatgtttatgttcaagcagtcaccttttgaagacaggaaaacccaagagcaccgacatcatttcttttct

SEQ ID NO: 15568 - DNA, 521 bp, Zea Mays
cgaagtacaagtaccacaccttggccgcgacgctgtgtgtggagcgcaccatgcggtagcttggagctggtgatggccagccaagcggtcgacggagagcatgatcctctcggacttgaagacgtgggagaggagcatgggctgccccgacacgcactcatcggcgccgggccagggctagcaggcggctggctgtggcgttgctttcttcttgcgggaggtgggcctggtccagatgctgttctcgtccttcgacttggatttggacttcttcttgggcaccgacaccgtcttgcgggagattcttgcacttcttcaagtccttggccctttgaagcacagtttttccatcatctgacactcttctcggtcttggcactctcaaatctctctcatgtccacaagcagttatctacaacactacgtaattattgtgaatcatctagacccctttggtgatgttttggtaattaatgataactgcttgtggactaacggttcttggagaaataagaatgcag

SEQ ID NO: 15569 - DNA, 4436 bp, Zea Mays
aaatgaaagagatagttttttttaggattttggtctgtactggaagctctcaatttttatggccagatgaattgttggtccaactcatggggatctcgtcttctactttcatatcaagctcagctcctcttgcaacgtacaaccatgtctaaaaaaaataggggactccaaggaaagctccaaaagctttctttgtctgtgtttattcactcgaactgcataattcagagcagtcccaatcgatacactagctcccaacaataattcagagcagtcctaatccatagactagtctactccgcttgttcaccgcttgttcacctttctcttttgcatgctgcttcctttcccagcgagcagtagaccctcagcagtctacggcaccttcggtctcttctacataaaaaacaaatcatctatcaccagcaatcagcaacaccatccggtattcctccgttccctgcccgacggagctgcttccctccttgctgtgctgtgcttgttccagattctactccatacgcccttgatttattttacttcgtgtaagatctccaatctccacttttttcgcttgctgtgttagctactatttcccctttgtgttgctggatctggcgagaaagaaaaataattggtttgtgcttcatttttttcattcagattcattaattttatgtgtctgcagagaaaaaagaaaaaaaaagcttcttactgaatttcatggccgacttggcgctcgccggcttaaggtgggcagcatcgccgattgtcaacgagcttcttactaaagcttcagcttacctcagtgtggacatggtgcgtgagatccaacgactagaagccactgtcctgccacagttcgagctggtgattcaagcggcccagaagagcccccacaggggcatactggaggcatggctccggcgtctcaaagaagcctactatgatgccgaggacttgttggacgagcatgagtacaatgtccttgagggcaaggccaagagcgaaaaaagtctcctgctgggagagcatggaagctcctccactgcaactactgtcatgaagccttttcatgctgctatgagcagggcacggaacttgctccctcaaaacagaaggctaattagcaagatgaacgagctcaaagcaatcctgacagaagcccaacaacttcgagatcttcttggtttgccacatggcaataccgtcgagtggccagctgcagcacctaccagtgttcccacaaccacatcacttcccacttccaaggtttttggtcgcgacagggatcgtgatcgtatagtagattttcttctcggcaagacaacaactgctgaggcaagctcagctaagtactcgggtttggccattgttggattgggaggaatggggaagtccaccttagcacagtatgtctataatgacaaaaggatagaagaatgctttgatatcaggatgtgggtgtgcatctcacgcaaacttgatgtgcatcgtcacacaagggagattatagagtctgcaaaaaagggagagtgcccacgtgttgataatctcgatactctccagtgcaaattacgtgatatactacaagagtcacagaaattcctgcttgtcttggatgatgtttggtttgaaaaatctcataatgagacagagtgggagttattccttgctccattagtctctaaacagtcagggagcaaagttttggtgacttctcgaagtaaaacacttcctgccgctatttgttgtgaacaagaacatgtcattcatttgaaaaacatggatgatactgagtttttggctctttttaaacaccatgctttctctggagcagaaatcaaagaccaagtattacgcacgaagctggaagacactgcagtggagattgctaaaaggcttggacaatgtcctttggcagcaaaagttctgggttctcgattgtgcaggaaaaaggatattgctgaatggaaagctgctctaaagattggagatttaagtgatcccttcacatctctgttgtggagttacgagaagttagatccacgtctgcagaggtgcttcttgtattgcagcttgtttccaaaaggtcatagatatgaatctaatgagttggttcacctttgggtggcagaaggatttgttggttcatgcaatttgagtaggagaacgttagaagaggttgggatggattacttcaatgatatggtctctgtatctttcttccaattggtttttcatatctattgtgattcgtactatgtcatgcatgatatccttcatgattttgcagagtcactctctagagaagactgctttagattagaagatgataatgtgacagaaataccatgcactgttcgacatctatctattcatgttcatagtatgcaaaagcataagcaaattatctgcaagctacatcatttacgcactattatctgcatcgatccgctaatggatggcccaagtgatatttttgatggcatgctacggaaccaaagaaaactgcgtgtattgtctctgtcattttacaacagcaaaaatttgccagaatctattgaagaagcaaggttatgagttgcgacagttgaaggacttgaatgagcttggtggcagtttaagagtgaaaaatcttgagaatgtcattggaaaggatgaagccgtagagtcgaagctatatctgaaaagtcgccttaaagagttggcacttgagtggagttccaataatagaatggatgcaatggatattctagaaggtctgagaccgccaccccaactgagtaagctcacaatcgaaggttacagatctgatacatatcctgggtggttactagagcgatcctattttgagaatttggaaagttttgaacttagtaattgcagtttgctagaaggcctaccaccagatacagagctccttcggaattgctctatgttgtgtataaactttgttccaaatttgaaggaactatctaatcttccagcaagccttgcatatttatcaattgataggtgcccactgcttatgtttatcaccaacaatgagctaggacagcatgactttagggaaaatataataatgaaggcagccgacctggcatctaaacttgcattgatgtgggaggtggattcaggaaaagaatttattaggagtgtactgtcgaaagactattcatctctgaagcagttgatgacattgatgatggatgatgatatatcaaagcatcttcaaattattgaaagtggtctggaggaaagagaagataaagtatggatgaaagaaaacatcatcaaggcatggctcttttgccatgagcagaggataagattcatttacggaaggaccatggagatgccattggttctaccgtcaggactccgtagactttccctttcttcatgcagtattacagatgaagctttagctatttgccttggtggcctcacttcaccgataactgtagaattggaatataatatggcattaactacacttccatctgaagaggtgtttgagcatttgacaaagcttgacagtttgattgtaagaggttgttggtgtctcaaatcactggggggcttacgtgctgctccatctctttcctatcttaactgtttggattgtccttctttagagctagcacgtggagcagaactaatgccattgaaccttgctcgcaatctcagcatccgtggctgcattcttgcagttgattcattcattaatggcttgccacacctgaaacatctttccattgatgtctgcagaagctccccatccttatcgattggccacctgacctcccttcaatcattacatctaaatggtctccctgatctttactttgttgaaggcttgtcttccctgcaccttaagcgcctaagtttagtagatgttgcaaacctcactgccaagtgcatctcacagtttcgtgtccaggaatcgctcacggttagtagctctgtattgctcaaccacatgctaatggctgaagggtttacagccccaccaaatcttactcttttagattgcaaggagccgtcagtttcatttgaagaacctgcaaatctctcatccgtcaagcacctgaagttttcatgttgcgaaacagagtccctgcctagaaatctaaaatccgtctcaagtctggagagtctttctatagaacattgccccaacatagcatctttaccagatctgccgtcctccctccagcgcataactatattgaattgccccgtcttgatgaagaattgccaagaacctgatggagaaagctggccaaagatttcgcacgttcgttggaagagctttctaccaataccgaactggcttccttagagttgccactttgaaataaatgagaaggcaccttgacgtcacccctcttctcttgaagctccagagttcaggctcaagtcagaagcca

SEQ ID NO: 15570 - DNA, 4489 bp, Zea Mays
aaatgaaagagatagttttttttaggattttggtctgtactggaagctctcaatttttatggccagatgaattgttggtccaactcatggggatctcgtcttctactttcatatcaagctcagctcctcttgcaacgtacaaccatgtctaaaaaaaataggggactccaaggaaagctccaaaagctttctttgtctgtgtttattcactcgaactgcataattcagagcagtcccaatcgatacactagctcccaacaataattcagagcagtcctaatccatagactagtctactccgcttgttcaccgcttgttcacctttctcttttgcatgctgcttcctttcccagcgagcagtagaccctcagcagtctacggcaccttcggtctcttctacataaaaaacaaatcatctatcaccagcaatcagcaacaccatccggtattcctccgttccctgcccgacggagctgcttccctccttgctgtgctgtgcttgttccagattctactccatacgcccttgatttattttacttcgtagaaaaaagaaaaaaaaagcttcttactgaatttcatggccgacttggcgctcgccggcttaaggtgggcagcatcgccgattgtcaacgagcttcttactaaagcttcagcttacctcagtgtggacatggtgcgtgagatccaacgactagaagccactgtcctgccacagttcgagctggtgattcaagcggcccagaagagcccccacaggggcatactggaggcatggctccggcgtctcaaagaagcctactatgatgccgaggacttgttggacgagcatgagtacaatgtccttgagggcaaggccaagagcgaaaaaagtctcctgctgggagagcatggaagctcctccactgcaactactgtcatgaagccttttcatgctgctatgagcagggcacggaacttgctccctcaaaacagaaggctaattagcaagatgaacgagctcaaagcaatcctgacagaagcccaacaacttcgagatcttcttggtttgccacatggcaataccgtcgagtggccagctgcagcacctaccagtgttcccacaaccacatcacttcccacttccaaggtttttggtcgcgacagggatcgtgatcgtatagtagattttcttctcggcaagacaacaactgctgaggcaagctcagctaagtactcgggtttggccattgttggattgggaggaatggggaagtccaccttagcacagtatgtctataatgacaaaaggatagaagaatgctttgatatcaggatgtgggtgtgcatctcacgcaaacttgatgtgcatcgtcacacaagggagattatagagtctgcaaaaaagggagagtgcccacgtgttgataatctcgatactctccagtgcaaattacgtgatatactacaagagtcacagaaattcctgcttgtcttggatgatgtttggtttgaaaaatctcataatgagacagagtgggagttattccttgctccattagtctctaaacagtcagggagcaaagttttggtgacttctcgaagtaaaacacttcctgccgctatttgttgtgaacaagaacatgtcattcatttgaaaaacatggatgatactgagtttttggctctttttaaacaccatgctttctctggagcagaaatcaaagaccaagtattacgcacgaagctggaagacactgcagtggagattgctaaaaggcttggacaatgtcctttggcagcaaaagttctgggttctcgattgtgcaggaaaaaggatattgctgaatggaaagctgctctaaagattggagatttaagtgatcccttcacatctctgttgtggagttacgagaagttagatccacgtctgcagaggtgcttcttgtattgcagcttgtttccaaaaggtcatagatatgaatctaatgagttggttcacctttgggtggcagaaggatttgttggttcatgcaatttgagtaggagaacgttagaagaggttgggatggattacttcaatgatatggtctctgtatctttcttccaattggtttttcatatctattgtgattcgtactatgtcatgcatgatatccttcatgattttgcagagtcactctctagagaagactgctttagattagaagatgataatgtgacagaaataccatgcactgttcgacatctatctattcatgttcatagtatgcaaaagcataagcaaattatctgcaagctacatcatttacgcactattatctgcatcgatccgctaatggatggcccaagtgatatttttgatggcatgctacggaaccaaagaaaactgcgtgtattgtctctgtcattttacaacagcaaaaatttgccagaatctattggtgagctgaagcacctccggtatttgaacctcatcaggacgttagtttctgaattgcctagatcattatgtactctctaccacttacaattactttggttaaaccacatggtggagaatttgcctgacaaactatgcaatttaagaaagctacgacatctaggagcgtactcatcgtacactcatgatttcgtgaatgaaaagcctatttgccaaattctgaatataggtaagttaacgtcgctacaacacatttatgtcttttctgtacagaagaagcaaggttatgagttgcgacagttgaaggacttgaatgagcttggtggcagtttaagagtgaaaaatcttgagaatgtcattggaaaggatgaagccgtagagtcgaagctatatctgaaaagtcgccttaaagagttggcacttgagtggagttccaataatagaatggatgcaatggatattctagaaggtctgagaccgccaccccaactgagtaagctcacaatcgaaggttacagatctgatacatatcctgggtggttactagagcgatcctattttgagaatttggaaagttttgaacttagtaattgcagtttgctagaaggcctaccaccagatacagagctccttcggaattgctctatgttgtgtataaactttgttccaaatttgaaggaactatctaatcttccagcaagccttgcatatttatcaattgataggtgcccactgcttatgtttatcaccaacaatgagctaggacagcatgactttagggaaaatataataatgaaggcagccgacctggcatctaaacttgcattgatgtgggaggtggattcaggaaaagaatttattaggagtgtactgtcgaaagactattcatctctgaagcagttgatgacattgatgatggatgatgatatatcaaagcatcttcaaattattgaaagtggtctggaggaaagagaagataaagtatggatgaaagaaaacatcatcaaggcatggctcttttgccatgagcagaggataagattcatttacggaaggaccatggagatgccattggttctaccgtcaggactccgtagactttccctttcttcatgcagtattacagatgaagctttagctatttgccttggtggcctcacttcaccgataactgtagaattggaatataatatggcattaactacacttccatctgaagaggtgtttgagcatttgacaaagcttgacagtttgattgtaagaggttgttggtgtctcaaatcactggggggcttacgtgctgctccatctctttcctatcttaactgtttggattgtccttctttagagctagcacgtggagcagaactaatgccattgaaccttgctcgcaatctcagcatccgtggctgcattcttgcagttgattcattcattaatggcttgccacacctgaaacatctttccattgatgtctgcagaagctccccatccttatcgattggccacctgacctcccttcaatcattacatctaaatggtctccctgatctttactttgttgaaggcttgtcttccctgcaccttaagcgcctaagtttagtagatgttgcaaacctcactgccaagtgcatctcacagtttcgtgtccaggaatcgctcacgattgcaaggagccgtcagtttcatttgaagaacctgcaaatctctcatccgtcaagcacctgaagttttcatgttgcgaaacagagtccctgcctagaaatctaaaatccgtctcaagtctggagagtctttctatagaacattgccccaacatagcatctttaccagatctgccgtcctccctccagcgcataactatattgaattgccccgtcttgatgaagaattgccaagaacctgatggagaaagctggccaaagatttcgcacgttcgttggaagagctttctaccaataccgaactggcttccttagagttgccactttgaaataaatgagaaggcaccttgacgtcacccctcttctcttgaagctccagagttcaggctcaagtcagaagcca

SEQ ID NO: 15571 - DNA, 3547 bp, Zea Mays
agaatttggatcacaaattcaacctgctcgagaaaaaatatatcttggaagcaagggcggcgacatggagcagaggtggtacctagcctcgggctatctgctaccattgcatcatcatcttcaagtgccagaacaacgagcatcaggcgctgacagatgtgtattatcctgagactttgctcaagcattgttagcatcgggcagatggacgaaggcaggtgccaagtcctctacaatggcatcatcatatgcatccacggttacgagcattggccccgagctcccgggatttgcttcctccaccgggcatctctgccgtgccgagcagctacgtcgcaagcaggcatccgcagaccgcaggaggacagagaacttgtccagcccccgcgacgagtcgagtcggctacttgcgtcgagtcaagcgttcccagggcctccagcaccgagctggacagggagttcatcgccgcctccgccttcgtcacagcatcagttgcctccagcaccagtgccctcgaggcaggcgcacacgtggacgtggctggcgaaccggagtttccgcctcgtgtcaccctcgatggccaccccgacgacgaactcctccatgtcgaaggggcggtggtccggccacttctcgaagagcgtgagcagcagcacggcacggcccagagggtcatcgttgcgcggggacaatcggtcctccaccgtcagtaccagctggactcgtccccgctcgactcctgcaacatcttcgctcctgaaagaccggccgaccgggagatggtcgaggcgtcagccgtcatggtggtgtgggcgtacgacgccgcgtgcgaccgcgtcggcgtgcaggaggtgaagcacgcgtgcgaggtcggatgcagcggtggcgagatgtgccttttcacggacctcctcggcgacttgctctgccgcattcaccgctcgccggactccctcatgttggtcgtggagacaacaatcggcaccaacagcacggagatcgccggaatcgttcgcggctgcgccaagaccgccgtctctgttggcaccacccagcaggccaaagacgaccccatctacaccaaggttggctccatccttggcctccgcgtctcgcccagccactggaggaagggcatggggaagaagctagcggatcgggaggaggacgaggttgtccaagcctcatacacgtacaacatctacaacaactgggctccattggaggatgcactcagactgtttgatagaatgtgcatggagcatgactcgcccaggacaagtgctgtgaaccttgggagctttaatgtgatggttgatgcatactgtcatgctggaagaggtcaatatgcgattaaggtgtttgggaagatgccgagaagaggcctgtgccagatgtactcctccaataatctgattgactggctagggaagaataaacttgttgggaagtctgaaggatggtacatggaggaagctgcaagagctgtattgggtgagtggaataaagcaatcatggccaccacctgtgcaaagtgtgatactgggtgatggtgttcaagtcaggcttccgccttggccaccacctgtttggaaagtatggttgtcaatgaagattactggtccactgagtttcaagttgggtcccaaatggcgagtggaaggattggtctattggaattattgtagtccacaatatacaccagaattgttgggagttcaggcatcggttcaccagatgacagtcaaagtgaccattggacagactatttcatgctcacatctgttgcgcagcggaaagatagctacgatttgccatgatgcaagtattgcccactctgagcatcagtacgttgctactgggatgcctacagaagttgttctggaggttttggttgagaacatgggacttcctggtggttataccccatctttcgattcatctgatttgcgaaggagttgtcagtggtggaataatctggccaagagagtagcaactctggaatttgatcgcactcgaaagtcaatgggagttattgtgaaagcaaactctgggaagaactcactgcttgttaagggagctgtagagaatctgctagagagatgtacctacattcagttgctcgatggatctgttgtgctattggatgatggtgccaaggcactcatattatttacactccatgacatgtctgccagtgccttgagttgtttgggttttgcttacaagtatgaattgtcagctccccgagaagaagtccacaaatcaattgacacatgttatggttgcaacaagagacaacaaagaaacaacagaggccatttgccgtaagattggggttttcagccctatgaaggtcaaactggcatggtccggcatggatcctgccttgcccacctaggaggatgctacagctttgaaggaacgctccctgcacgcgtcggcttggggacaagccgcatttgaagacccggggaatgtcagcactgatgatccacaagagaaggagacgatggagctgaagactgacaaaggcgacgtggcgtgactccagcgtttgaggcgcgacaatatttgtgtgtctgggccagaccgccagagtgggttgtctgatggccgggttgggccgggttgtaagcgctggtttgtaagcgtcgcatataagcgaactcttgggagagggtgaatcatggaacaacagaaagcttacaacaattaccttcgtcgcgtccacttctcctgttcttcttcccaaatccacctcgtccctctagctctctctggttctcccgattggttgctaacagagcatattctcctcgccaagataaagtgctccaagaaccgcctgtacctggttgatctgaacatcgtgcagctagtgtgcttggtggcgtggcacaacgaggagccgtggttgcggcatgcccactttgagcacctgagcttcgacgtgctcgggtggatggcaaggtagcagatacatggttggtggggaagccgaggaagctcctttcctaaggcagcaagcaagtatctcgctggagctcgtccacggtcacctttgcaggctaatcactccactgacgcacagagggcaacgatatttcttgctgctagccgatgactgcatctacttcatgcggttttaggatttccaggattgcccgagagccaaagttagacggatgggttgcaagagctgctatatttgacacccttcgtggcactgttagttccatgcaagtaacggtgattatcttaggccctcttgcacacatctgttgattgccgcaggaaacttgttgttgctgattggatcttgaggattccacggcgattgagcgcataactataagggattgtcccgtcttgaagaagaactgccaagaacctgatggagaaagctggccaaagatttcgcacgttcgttggaagagctttctaccaagaccgcactggattccttagagttgccactttgaaataaatgagaaggcaccttgacgtcacccctcttctcttgaagctccagagttcaggctc

SEQ ID NO: 15572 - DNA, 2930 bp, Zea Mays
agcatgttagcaaccgatcgggagaaccggagagctagagggacgaggtggatttgggaagaagaacaggagaactgctcttgctctctccggttctcccgatcagttgctaacatttggtatcagattcaatcatcctggatccacttgctgttttgccgcggctaccccgatcttccgcgatggagcaccaagacgccgccatctgcaagctgctcgatgaaatgcgactcatggaggcgcgtctgtccgagcgcatcagcggacgctgcgacgacgtcgagcaccacctggacgagcaccgtgaagagccctgtgacgagacgtctcgcttcgacaagggtcccatcttcgacgagaagccctgtttccaccgccacttccttgattcggatccgaactctccctgcaactgggtcgatctgctctcggtcatccgtgcagtggccccgagctcccgggatttgcttcctccaccgggcatctctgccgtgccgagcagctacgtcgcaagcaggcatccgcagaccgcaggaggacagagaacttgtccagcccccgcgacgagtcgagtcggctacttgcgtcgagtcaagcgttcccagggcctccagcaccgagctggacagggagttcatcgccgcctccgccttcgtcacagcatcagttgcctccagcaccagtgccctcgaggcaggcgcacacgtggacgtggctggcgaaccggagtttccgcctcgtgtcaccctcgatggccaccccgacgacgaactcctccatgtcgaaggggcggtggtccggccacttctcgaagagcgtgagcagcagcacggcacggcccagagggtcatcgttgcgcggggacaatcggtcctccaccgtcagtaccagctggactcgtccccgctcgactcctgcaacatcttcgctcctgaaagaccggccgaccgggagatggtcgaggcgtcagccgtcatggtggtgtgggcgtacgacgccgcgtgcgaccgcgtcggcgtgcaggaggtgaagcacgcgtgcgaggtcggatgcagcggtggcgagatgtgccttttcacggacctcctcggcgacttgctctgccgcattcaccgctcgccggactccctcatgttggtcgtggagacaacaatcggcaccaacagcacggagatcgccggaatcgttcgcggctgcgccaagaccgccgtctctgttggcaccacccagcaggccaaagacgaccccatctacaccaaggttggctccatccttggcctccgcgtctcgcccagccactggaggaagggcatggggaagaagctagcggatcgggaggaggacgaggttgtccaagcctcatacacgtacaacatctacaacaactgggctccattggaggatgcactcagactgtttgatagaatgtgcatggagcatgactcgcccaggacaagtgctgtgaaccttgggagctttaatgtgatggttgatgcatactgtcatgctggaagaggtcaatatgcgattaaggtgtttgggaagatgccgagaagaggcctgtgccagatgtactcctccaataatctgattgactggctagggaagaataaacttgttgggaagtctgaaggatggtacatggaggaagctgcaagagctgtattggaattgttgggagttcaggcatcggttcaccagatgacagtcaaagtgaccattggacagactatttcatgctcacatctgttgcgcagcggaaagatagctacgatttgccatgatgcaagtattgcccactctgagcatcagtacgttgctactgggatgcctacagaagttgttctggaggttttggttgagaacatgggacttcctggtggttataccccatctttcgattcatctgatttgcgaaggagttgtcagtggtggaataatctggccaagagagtagcaactctggaatttgatcgcactcgaaagtcaatgggagttattgtgaaagcaaactctgggaagaactcactgcttgttaagggagctgtagagaatctgctagagagatgtacctacattcagttgctcgatggatctgttgtgctattggatgatggtgccaaggcactcatattatttacactccatgacatgtctgccagtgccttgagttgtttgggttttgcttacaagtatgaattgtcagctccccgagaagaagtccacaaatcaattgacacatgttatggttgcaacaagagacaacaaagaaacaacagaggccatttgccgtaagattggggttttcagccctatgaaggtcaaactggcatggtccggcatggatcctgccttgcccacctaggaggatgctacagctttgaaggaacgctccctgcacgcgtcggcttggggacaagccgcatttgaagacccggggaatgtcagcactgatgatccacaagagaaggagacgatggagctgaagactgacaaaggcgacgtggcgtgactccagcgtttgaggcgcgacaatatttgtgtgtctgggccagaccgccagagtgggttgtctgatggccgggttgggccgggttgtaagcgctggtttgtaagcgtcgcatataagcgaactcttgggagagggtgaatcatggaacaacagaaagcttacaacaattaccttcgtcgcgtccacttctcctgttcttcttcccaaatccacctcgtccctctagctctctctggttctcccgattggttgctaacagagcatattctcctcgccaagataaagtgctccaagaaccgcctgtacctggttgatctgaacatcgtgcagctagtgtgcttggtggcgtggcacaacgaggagccgtggttgcggcatgcccactttgagcacctgagcttcgacgtgctcgggtgga

SEQ ID NO: 15573 - DNA, 2713 bp, Zea Mays
cttggaagcaagggcggcgacatggagcagaggtggtacctagcctcgggctatctgctaccattgcatcatcatcttcaagtgccagaacaacgagcatcaggcgctgacagatgtgtattatcctgagactttgctcaagcattgttagcatcgggcagatggacgaaggcaggtgccaagtcctctacaatggcatcatcatatgcatccacggttacgagcattggccccgagctcccgggatttgcttcctccaccgggcatctctgccgtgccgagcagctacgtcgcaagcaggcatccgcagaccgcaggaggacagagaacttgtccagcccccgcgacgagtcgagtcggctacttgcgtcgagtcaagcgttcccagggcctccagcaccgagctggacagggagttcatcgccgcctccgccttcgtcacagcatcagttgcctccagcaccagtgccctcgaggcaggcgcacacgtggacgtggctggcgaaccggagtttccgcctcgtgtcaccctcgatggccaccccgacgacgaactcctccatgtcgaaggggcggtggtccggccacttctcgaagagcgtgagcagcagcacggcacggcccagagggtcatcgttgcgcggggacaatcggtcctccaccgtcagtaccagctggactcgtccccgctcgactcctgcaacatcttcgctcctgaaagaccggccgaccgggagatggtcgaggcgtcagccgtcatggtggtgtgggcgtacgacgccgcgtgcgaccgcgtcggcgtgcaggaggtgaagcacgcgtgcgaggtcggatgcagcggtggcgagatgtgccttttcacggacctcctcggcgacttgctctgccgcattcaccgctcgccggactccctcatgttggtcgtggagacaacaatcggcaccaacagcacggagatcgccggaatcgttcgcggctgcgccaagaccgccgtctctgttggcaccacccagcaggccaaagacgaccccatctacaccaaggttggctccatccttggcctccgcgtctcgcccagccactggaggaagggcatggggaagaagctagcggatcgggaggaggacgaggttgtccaagcctcatacacgtacaacatctacaacaactgggctccattggaggatgcactcagactgtttgatagaatgtgcatggagcatgactcgcccaggacaagtgctgtgaaccttgggagctttaatgtgatggttgatgcatactgtcatgctggaagaggtcaatatgcgattaaggtgtttgggaagatgccgagaagaggcctgtgccagatgtactcctccaataatctgattgactggctagggaagaataaacttgttgggaagtctgaaggatggtacatggaggaagctgcaagagctgtattggaattgttgggagttcaggcatcggttcaccagatgacagtcaaagtgaccattggacagactatttcatgctcacatctgttgcgcagcggaaagatagctacgatttgccatgatgcaagtattgcccactctgagcatcagtacgttgctactgggatgcctacagaagttgttctggaggttttggttgagaacatgggacttcctggtggttataccccatctttcgattcatctgatttgcgaaggagttgtcagtggtggaataatctggccaagagagtagcaactctggaatttgatcgcactcgaaagtcaatgggagttattgtgaaagcaaactctgggaagaactcactgcttgttaagggagctgtagagaatctgctagagagatgtacctacattcagttgctcgatggatctgttgtgctattggatgatggtgccaaggcactcatattatttacactccatgacatgtctgccagtgccttgagttgtttgggttttgcttacaagtatgaattgtcagctccccgagaagaagtccacaaatcaattgacacatgttatggttgcaacaagagacaacaaagaaacaacagaggccatttgccgtaagattggggttttcagccctatgaaggtcaaactggcatggtccggcatggatcctgccttgcccacctaggaggatgctacagctttgaaggaacgctccctgcacgcgtcggcttggggacaagccgcatttgaagacccggggaatgtcagcactgatgatccacaagagaaggagacgatggagctgaagactgacaaaggcgacgtggcgtgactccagcgtttgaggcgcgacaatatttgtgtgtctgggccagaccgccagagtgggttgtctgatggccgggttgggccgggttgtaagcgctggtttgtaagcgtcgcatataagcgaactcttgggagagggtgaatcatggaacaacagaaagcttacaacaattaccttcgtcgcgtccacttctcctgttcttcttcccaaatccacctcgtccctctagctctctctggttctcccgattggttgctaacagagcatattctcctcgccaagataaagtgctccaagaaccgcctgtacctggttgatctgaacatcgtgcagctagtgtgcttggtggcgtggcacaacgaggagccgtggttgcggcatgcccactttgagcacctgagcttcgacgtgctcgggtgga

SEQ ID NO: 15574 - DNA, 3473 bp, Zea Mays
atctacttgctctattaccagttaaaaggtgattgcttgttgtttgtcaccaattggattgattacaagtgtgcttgctggtgtaggagatgaaaaggccttgtattttagtgcatcaaaactgaaggtttttggtggtatgctccattctgttggattgggaggaatggggaagtctaccttagcacaatatgtctataatgacaagaggattgaagaatgctttgatgtcaggatgtggatctgtatctcgcgcaaacttgatgtgcatcgtcacacaagggagatcattgagtccgcaaaaaagggggagtgcccacgtgtcgataatctcgatactctccagtgcaaactacgagacatactacaacagtcaaaaaaattcctgcttgtcttggatgatgtttggtttgaaaaatctgatagtgagacagagtgggacctactccttgctccattagtctctaaacagccgggaagcagagttttggtgacttctcgacgtgaaatgcttccagccgctgtttgctgtgaacgagttgttcgtttggaaaacatggatgatactgagttcttggctctctttaaacaacatgctttctctggagcaaaaatcaaagaccagctgttacgcacgaatctggaaaatactgcagcggagcttgctaaaaggcttggacaatgtcctttggcagcgaaagttcttggttctcagctgtgtaggaaaaaggatattgatgaatgggaagctgctctagagcttggagatttaagtgatcccttgacatctctgttgtggagctacgagaagttagatccatgtctgcaaaggtgcttcttgtattgcagcttgtttccaaaaggtcatagatatagacgtggtgagttggttcaactttgggtggcagaaggatttgtttgttcatgcaatttgagtaggagaacattggaagaggttgggatggattacttcactgagatggtctctggatctttcttccaattggttcctgaaagactttattcatactataccatgcacgatatccttcatgatttggcagagtcactctctagggaagactgcttcagattggaagatgataatgttacaaaaataccaggcactgttcgatatctatctgttcatgttgagagtatgcaaaagcataagaaaattatctgcaagctacttcatttacgcaccattatctgcatcaatccactaatggatggtgcaagtgatctttttgatcaaatgctacacaaccaaagaaaattgcgtgtattgtatttgtcattttacaccagcagcaagttgccggaatctattggtgagctaaagcacctccggtatttgaaccttgtcaggacattaatttctcaaatgcctagatcattatgtactctctaccacttacaattactttggttgaactgcatggtagagagattgcctgacaaactttgcaatttaagtaagctgcgacatctaggagcatacccatattactttcatggtttcgtggatgaaaggcctaattaccaagttccgaacataggtaagctaacttcactacagcacatttatgtcttttctgtgcaaaagaagcaagggtatgagttgcgacagctgagggacttgaatgagcttggtggcagtttaagagtaaaaaatcttgagaatgtcattggaaaggatgaagccttagagtcgaagctatttctgaaacgtcgccttaaagagttggcacttgagtggagttccgagaatgcaacagatatcctgcacttggatattctagaaggtctaagaccaccaccccaactgagtaagctcacaatcgaaggttacaaatctgacacataccctgggtggttacttgagcgatcctattttaagaatttggaatgttttgagcttaataattgcagtttattagaaggtctgccacctgatgccaggctgcttcggcgttgctctaggctacatataaaaaacgttccaaatttgaaggaactatcttatcttccagcaggccttacagagttgtcaattcacaagtgtccactgcttatgtttatcaccaacaatgagctaggacaacatggcttggaggaaaatgtaatgaagatagacaacctgacatcaaaacttgcattgatgtgggatgtggattcaggttcatgtattaggagagcgctatcagaggactgttcatctctgaagcagattattatgacactaatggatgatgatatatcaaagcacctccaaatcattgaaagtggtctagaggaaggaggagaaaaggtatggatgaaagaaaacatcatcaaaccatggctcttttgccatgagcagaggataagtttcatttatgggagggccatggagatgccactagttctaccgtcaggactctgtagtctttctctttgttcatgcagtattacaaatgaagctttagctatttgccttggtggccttacttcactgaggaatttagaattgaaatataatatggaattaactacacttccaacaaaaggagtgtttgagcatttagcaaagcttgacaggttgtttgtaagtggttgtttgtgtctcagatcactgggtggcctacgtgctgctccatctctttcctttattaactgttgggattgtccttctttagagctagcacgtggagcagaactagttccgtcgaaccttgatagatacctcaacatccgtggctgcattctttcagctgattcattcattaacggcctgctggaccttaaatacctttccattgatagctgcagaagctccccatccttgtcgattggccacatgacctcgcttcaatcattacatctagttggtctctccgatctttaccttgttgaaggcctgtcttgcctgcgccttaagttcctacaactagtagacgttccaaacctcactgcaaagtgcatctcacagtttcgtgtccgggtatcgctcaccgttagtagctccgtattgctcaaccacatgctcatggctgaagggtttagggtcccactgaatctttatcttttagattgcaaggagccgtcgatttcgtttgaagatcctgcaaatctgtcatctgtcaagtgcctgcagtttttgcgttgtgaaacggagtccctgccaggaaatctaaaatctctctcaagtctggagagtcttcatatagggcgttgccccaacatagcatctttaccagatctgccatcctccctccagcgcataactatatgggattgtcccgtcttgaagaagaactgccaagaacctgatggagaaagctggccaaagatttcgcacgttcgttggaagagctttctacaaataccgcactggcttccttagagttgccactttgaaataaatgagaaggcaccttgacgtcacccctcttctcttgaagctccagaattcaggctcaagtcagaag

SEQ ID NO: 15575 - DNA, 542 bp, Zea Mays
ccacaacaaaaaacagatattctatcgtcagcaatcctgcgttccctgcccgacggaggtgcttccctcgttgctgcgttgcactgcggcggcctcgagcttgttgtcgattccagctccatgcgcccatgatttactttacttgtaattgccaagaacctgatggagaaagctggccaaagatttcgcacgttcgttggaagagctttccaccaaaatcgatctggcttccttagagttgccactttgaaataaatgagaaggcaccttgacgtcacccctcttctcttgaagctccagagttgaggctcaagtcagaagccaatccgtcgttaatgctgccgtccccgcggttccctgtttttgccgcttgtattgctccgctatttcagttgctatatcattcattccttggttgtgcacaattgccaatatgtatttctctgacagaatgaagtaataactgtggccagggcttttgttttcatgtgcacaattgctatatcattcatgtggcaattagtataaatactccaggcaat

SEQ ID NO: 15576 - DNA, 4475 bp, Zea Mays
cccctctccacgctgctttcctctcccagcgagcagtcagcagtcagcagcaccaccggtctcctccacaacaaaaaacagatattctatcgtcagcaatcctgcgttccctgcccgacggaggtgcttccctcgttgctgcgttgcactgcggcggcctcgagcttgttgtcgattccagctccatgcgcccatgatttactttacttgtgttttctcgagtctgtagcggtttttatcagctgcttgccttctgcagaagaaaaagaaaaaaaaagaacagctttgttactacttcccatcgttcacccattcatattttttttcttggttcacaaagtaagaggaagcacaaactactccaacttcatggcggacttggcgctagttggcttaaggtgggcagcatcgccgattgtcaaggagcttcttactaaagcttcagcttacctcagtgtggacatggtgcgtgagatcgaacgactacaagacactgtcctgccacagttcgagttggtgattcaagcggcccagaagagcccccataggggcaagctggaatcctggcttcggcgtctcaaagaagccttctatgatgccgaggacctgctggacgagcatgagtacaacgtccttaaggccaaggccaagagcggaaaaggtcccctgctccgagaggatgaaagctcctccactgcaaccactgtcatgaagccttttcattctgctatgaacagggcacgcaacttgctccctgggaacagaaggctaattagcaagatgaacgagctcaaagctatcctgacagaagcccaacaacttcgagatcttcttggcttgccacatggcaataccgtcgagtgcccagctgcagcacctaccagtgttcccacaaccacatcacttcccacttccaaggttttcggtcgcgacagggatcgtgatcgcatagtaaaatttcttctcggcaagacaacaactgctgaggcaagctcaactaagtactccggtttggccattgttggattgggaggaatggggaagtctaccttagcacaatatgtctataatgacaagaggattgaagaatgctttgatgtcaggatgtggatctgtatctcgcgcaaacttgatgtgcatcgtcacacaagggagattatagagtctgcaaaaaagggagagtgcccacgtgttgataatctcgatactctccagtgcaaattacgtgatatactacaagagtcacagaaattcctgcttgtcttggatgatgtttggtttgaaaaatctcatagtgagacagagtgggagttattccttgctccattagtctctaaacagtcagggagcaaagttttggttacttctcaaagtggaacacttccggccgctatttgttgtgaacaagaacatgtcattcatttggaaaacatggatgatactgagtttttggctctttttaaacaccatgctttctctggagcagaaatcaaagaccaactgttacgcacgaagctggaagacactgcagaggagattgctaaaaggcttggacaatgtcctttggcagcaaaagttctgggttctcgattgtgcaggaaaaaggatattgctgaatggaaagctgctctaaagcttggagatttaagtgatcccttcacatctctgttgtggagttacgagaagttagatccacgtctgcagaggtgcttcttgtattgcagcttgttgccaaaaggtcacagatatagacctgaagagttggttcacctttgggtggcagaaggatttgttggttcatgcaatttgagtaggagaacgttagaagaggttgggatggattacttcaatgatatgagtcactctctagggaagactgctttagattagaagatgataatgtgacagaaataccatgcactgttcgacatctatctgttcatgttcaaagtatgcaaaagcataagcaaattatctgcaagctatatcatttacgcactattatctgcatcgatccgctaatggatggtccaagtgatatttttgatggcatgctacggaaccaaagaaaactgcgtgtattgtctctgtcattttacagcagcagcaagttgccagaatctattggtgagctgaagcacctccggtatttgaacctcgtcaggacgttagtttctgaattgcctacatcattatgtactctctaccacttacaattactttggttaaaccacatggtggagaatttgcctgacaaactatgcaatttaagaaagctacggcatctaggagcgtacgtgaatgatttcgcgattgaaaagcctatttgccaaattctgaatataggtaagttaacgtctctacaacacatttatgtcttttctgtacagaagaagcaaggctatgagttgcgacagttgaaggacttgaatgagcttggtggcagtttaaaagtgaaaaatcttgagaatgtcattggaaaggatgaagccgtagagtcgaagctatatctgaaaagtcgccttaaagagttggcatttgagtggagttccgagaatggcatggatgcaatggatattctagaaggtctaagaccgccaccccaactgagtaagctcagaatcaaaggttacagatctgatacatatcctgggtggttactagagcgatcctattttgagaatttggaaagttttgagcttagtaattgcagtttgctagaaggcctaccaccagatacagagctccttcggaattgctctaggttgcgtataaactttgttccaaatttgaaggaactatctaatcttccagcaggccttacagatttatcaattgattggtgcccactgcttatgtttatcaccaacaatgagctaggacagcatgacttgagggaaaatataataatcaaggcagacgacctggcatctaaacttacattgatgtgggaggtggattcaggaaaaaaagttaggagtatactgtcgaaagactattcatctctgaagcagttgatgacattgatgatggatgatgatatatcaaagcatcttcaaatcattgaaagtggtctggaggaaagagaagataaagtatggatgaaagaaaacatcatcaaggcatggctcttttgccatgagcagaggataagattcatttatggaaggaccatggagatgccattggttctaccgtcaggactctgtgaactttctctttcttcatgcagtattacagatgaagctttagctatttgccttggtggcctcacttcactgaggaatttaaaattgaaatataatatggcattaactacacttccatcagaaaaggtgtttgagcatttgacgaagcttgacaggttggttgtaataggttgtttgtgtctcaaatcactggggggcttacgtgctgctccatctctttcctgttttaactgttgggattgtccttctttagagctagcacggggagcagaactaatgccgttgaaccttgctagcaatctcagcatccttggctgcattcttgcagctgattcgttcattaatggcttgccacatctgaaacatctttccattgatgtctgcagatgctccccatccttatcgattggccacctgacctcccttgaatcattatgtctaaatggtctccctgatctttgctttgttgaaggcttgtcttccctgcaccttaagcgcctaagtttagtagatgttgcaaacctcactgccaagtgcatctcacagtttcgtgtccaggaatcgctcagggttagtagctctgtattgctcaaccacatgctaatggctgaagggtttacagccccaccaaatcttactcttttagattgcaaggagccgtcagtttcatttgaagaacctgcaaatctctcatccgtcaagcacctgcacttttcatgttgcgaaacagagtccctgcctagaaatctaaaatctgtctcaagtctggagagtctttctatagaacaatgccccaacatagcatctttaccagatctgccgtcctccctccagcgcataactatattgaattgccccgtcttgatgaagaattgccaagaacctgatggagaaagctggccaaagatttcgcacgttcgttggaagagctttccaccaaaatcgatctggcttccttagagttgccactttgaaataaatgagaaggcaccttgacgtcacccctcttctcttgaagctccagagttgaggctcaagtcagaagccaatccgtcgttaatgctgccgtccccgcggttccctgtttttgccgcttgtattgctccgctatttcagttgctatatcattcattccttggttgtgcacaattgccaatatgtatttctctgacagaatgaagtaataactgtggccagggcttttgttttcatgtgcacaattgctatatcattcatgtggcaattagtataaatactccaggcaat

SEQ ID NO: 15577 - DNA, 4328 bp, Zea Mays
cttcaccccaacagctcccaatgtttccaccttcccctctccacgctgctttcctctcccagcgagcagtcagcagtcagcagcaccaccggtctcctccacaacaaaaaacagatattctatcgtcagcaatcctgcgttccctgcccgacggaggtgcttccctcgttgctgcgttgcactgcggcggcctcgagcttgttgtcgattccagctccatgcgcccatgatttactttacttgttttctcgagtctgtagcggtttttatcagctgcttgccttctgcagaagaaaaagaaaaaaaaagaacagctttgttactacttcccatcgttcacccattcatattttttttcttggttcacaaagtaagaggaagcacaaactactccaacttcatggcggacttggcgctagttggcttaaggtgggcagcatcgccgattgtcaaggagcttcttactaaagcttcagcttacctcagtgtggacatggtgcgtgagatcgaacgactacaagacactgtcctgccacagttcgagttggtgattcaagcggcccagaagagcccccataggggcaagctggaatcctggcttcggcgtctcaaagaagccttctatgatgccgaggacctgctggacgagcatgagtacaacgtccttaaggccaaggccaagagcggaaaaggtcccctgctccgagaggatgaaagctcctccactgcaaccactgtcatgaagccttttcattctgctatgaacagggcacgcaacttgctccctgggaacagaaggctaattagcaagatgaacgagctcaaagctatcctgacagaagcccaacaacttcgagatcttcttggcttgccacatggcaataccgtcgagtgcccagctgcagcacctaccagtgttcccacaaccacatcacttcccacttccaaggttttcggtcgcgacagggatcgtgatcgcatagtaaaatttcttctcggcaagacaacaactgctgaggcaagctcaactaagtactccggtttggccattgttggattgggaggaatggggaagtctaccttagcacaatatgtctataatgacaagaggattgaagaatgctttgatgtcaggatgtggatctgtatctcgcgcaaacttgatgtgcatcgtcacacaagggagattatagagtctgcaaaaaagggagagtgcccacgtgttgataatctcgatactctccagtgcaaattacgtgatatactacaagagtcacagaaattcctgcttgtcttggatgatgtttggtttgaaaaatctcatagtgagacagagtgggagttattccttgctccattagtctctaaacagtcagggagcaaagttttggttacttctcaaagtggaacacttccggccgctatttgttgtgaacaagaacatgtcattcatttggaaaacatggatgatactgagtttttggctctttttaaacaccatgctttctctggagcagaaatcaaagaccaactgttacgcacgaagctggaagacactgcagaggagattgctaaaaggcttggacaatgtcctttggcagcaaaagttctgggttctcgattgtgcaggaaaaaggatattgctgaatggaaagctgctctaaagcttggagatttaagtgatcccttcacatctctgttgtggagttacgagaagttagatccacgtctgcagaggtgcttcttgtattgcagcttgttgccaaaaggtcacagatatagacctgaagagttggttcacctttgggtggcagaaggatttgttggttcatgcaatttgagtaggagaacgttagaagaggttgggatggattacttcaatgatatggtctctgtatctttcttccaattggtttctcaaatgtattgtgattcgtactatgtcatgcatgatatccttcatgattttgcagagtcactctctagggaagactgctttagattagaagatgataatgtgacagaaataccatgcactgttcgacatctatctgttcatgttcaaagtatgcaaaagcataagcaaattatctgcaagctatatcatttacgcactattatctgcatcgatccgctaatggatggtccaagtgatatttttgatggcatgctacggaaccaaagaaaactgcgtgtattgtctctgtcattttacagcagcagcaagttgccagaatctattgaagaagcaaggctatgagttgcgacagttgaaggacttgaatgagcttggtggcagtttaaaagtgaaaaatcttgagaatgtcattggaaaggatgaagccgtagagtcgaagctatatctgaaaagtcgccttaaagagttggcatttgagtggagttccgagaatggcatggatgcaatggatattctagaaggtctaagaccgccaccccaactgagtaagctcagaatcaaaggttacagatctgatacatatcctgggtggttactagagcgatcctattttgagaatttggaaagttttgagcttagtaattgcagtttgctagaaggcctaccaccagatacagagctccttcggaattgctctaggttgcgtataaactttgttccaaatttgaaggaactatctaatcttccagcaggccttacagatttatcaattgattggtgcccactgcttatgtttatcaccaacaatgagctaggacagcatgacttgagggaaaatataataatcaaggcagacgacctggcatctaaacttacattgatgtgggaggtggattcaggaaaaaaagttaggagtatactgtcgaaagactattcatctctgaagcagttgatgacattgatgatggatgatgatatatcaaagcatcttcaaatcattgaaagtggtctggaggaaagagaagataaagtatggatgaaagaaaacatcatcaaggcatggctcttttgccatgagcagaggataagattcatttatggaaggaccatggagatgccattggttctaccgtcaggactctgtgaactttctctttcttcatgcagtattacagatgaagctttagctatttgccttggtggcctcacttcactgaggaatttaaaattgaaatataatatggcattaactacacttccatcagaaaaggtgtttgagcatttgacgaagcttgacaggttggttgtaataggttgtttgtgtctcaaatcactggggggcttacgtgctgctccatctctttcctgttttaactgttgggattgtccttctttagagctagcacggggagcagaactaatgccgttgaaccttgctagcaatctcagcatccttggctgcattcttgcagctgattcgttcattaatggcttgccacatctgaaacatctttccattgatgtctgcagatgctccccatccttatcgattggccacctgacctcccttgaatcattatgtctaaatggtctccctgatctttgctttgttgaaggcttgtcttccctgcaccttaagcgcctaagtttagtagatgttgcaaacctcactgccaagtgcatctcacagtttcgtgtccaggaatcgctcagggttagtagctctgtattgctcaaccacatgctaatggctgaagggtttacagccccaccaaatcttactcttttagattgcaaggagccgtcagtttcatttgaagaacctgcaaatctctcatccgtcaagcacctgcacttttcatgttgcgaaacagagtccctgcctagaaatctaaaatctgtctcaagtctggagagtctttctatagaacaatgccccaacatagcatctttaccagatctgccgtcctccctccagcgcataactatattgaattgccccgtcttgatgaagaattgccaagaacctgatggagaaagctggccaaagatttcgcacgttcgttggaagagctttccaccaaaatcgatctggcttccttagagttgccactttgaaataaatgagaaggcaccttgacgtcacccctcttctcttgaagctccagagttgaggctcaagtcagaagccaatccgtcgttaatgctgccgtccccgcggttccctgtttttgccgcttgtattgctccgctatttcagttgctatatcattcattccttggttgtgcacaattgccaatatgtatttctctgacagaatgaagtaataactgtggccagggcttttgttttcatgtgcacaattgctatatcattcatgtggcaattagtataaatactccaggcaat

SEQ ID NO: 15578 - DNA, 4791 bp, Zea Mays
cttcctttgtctctgtcgatgctgactccttcaccccaacagctcccaatcttcccaacgctgcttcctttcccagcgagcagtcagcagcaccatcggtctcctccacgacaaaaaacagatattctatcgtcaggaatcaatcagcaatcctgcgttgcctgcccgacggagctgcttccctcgttgctgcattgcactgcggcggcctcgcgcttgttgtcgattccagctccatgcgcccatgatttactttacttgtgttttctcgagtctgtagcggtttttatcagctgcttgccttctgcagaagaaaaaaaaaacagccttgttactacttcccatcgttcatccattcatttttttttcttggttcacaaagtaagaggaagcacaaactactccaacttcatggcggacttggcgctagttggcttaaggtgggcagcatcgccgattgtcaaggagcttcttactaaagcttcagcttacctcagtgtggacatggtgcgtgagatcgaacgactacaagacactgtcctgccacagttcgagttggtgattcaagcggcccagaagagcccccataggggcaagctggaatcctggcttcggcgtctcaaaaaagccttctatgatgccgaggacctgctggacgagcatgagtacaacgtccttaaggccaaggccaagagcggaaaaggtcccctgctccgagaggatgaaagctcctccactgcaaccactgtcatgaagccttttaattctgctataaacatggcacgcaacttgctccctgggaacaaaaggctaattaccaagatgaacgagctcaaaaatattctggaagatgccaagcagcttcgagaacttcttggcttgccacatggcaatatcgcagagtggccaactgcagcacctaccggtgttgccacaaccacatcacttcccaattccaaggttttcggtcgcgacggggatcgtgatcgtatagtagattttcttctcggcaagacaacaactgctgaggcaagctcagctaagtactcgggtttggccattgttggattgggaggaatggggaagtccaccttagcacagtatgtctataatgacaaaaggatagaagaatgctttgatatcaggatgtgggtgtgcatctcacgcaaacttgatgtgcatcgtcacacaagggagattatggagtctgcaaaaaagggagagtgcccacgtgttgataatctcgatactctccagtgcaaattacgtgatatactacaagagtcacagaaattcctgcttgtcttggatgatgtttggtttgaaaaatctcataatgagacagagtgggagttattccttgctccattagtctctaaacagtcagggagcaaagttttggtgacttctcgaagtgaaacacttccggccgctatttgttgtgaacaagaacatgtcattcaattgcaaaacatggatgatactgagtttttggctctttttaaacaccatgctttctctggagcagaaatcaaagaccaactgttacgcacgaagctggaagacactgcagaggagattgctaaaaggcttggacaatgtcctttggcagcaaaagttctgggttctcgattgtgcaggaaaaaggatattgctgaatggaaagctgctctaaagcttggagatttaagtgatcccttcacatctctgttgtggagttacgagaagttagatccacgtctgcagaggtgcttcttgtattgcagcttgtttccaaaaggtcatagatatgaatctaatgagttggttcacctctgggtggcagaaggatttgttgattcatgcaatttgagtaggagaacattggaagaggttgggatggattacttcaatgatatggtctctggatctttcttccaattggtttctcaaatgtatcgtggttcgtactatgtcatgcatgatatccttcatgattttgcagagtcactctctagagaagactgctttagattagaagatgataatgtgacagaaataccatgcactgttcgacatctatctgttcatgttcaaagtatgcaaaagcataagcaaattatctgcaagctatatcatttacgcactattatctgcctcgatccgctaatggatggcctaagtgatatttttgatggcatgctacggaaccaaagaaaactgcgtgtattgtctctgtcattttacaacagcagcaagttgccagaatctattggtgagctgaagcacctccggtatttgaacctcatcaggacattagtttctgaattgcctacatcattatgtactctctaccacttacaattactttggttaaaccacatggtggagaatttgcctgacaaactatgcaatttaagaaatctacgacatctaggagcgtactcatcggacgcttatgatttcgtgaatgaaaggcctatttgccaaattctgaatataggtaagttaacatcgctacaacacatttatgtcttttctgtacagaagaagcaaggttatgagttgcgacagttgaaggacttgaatgagcttggtggcagtttaagagtgaaaaatcttgagaatgtcattggaaaggatgaagccgtagagtcgaagctatatctgaaaagtcgccttaaagagttggcacttgagtggagttccgagaatggaatggatgcaatggatattctagaaggtctgagaccgccaccccaactgagtaagctcacaatcgaaggttacagatctgatacatatcctgggtggttactagagcgatcctattttgagaatttggaaagttttgagcttagtaattgcagtttgctagaaggcctaccaccagatacagagctccttcggaattgctctaggttgcgtataaactctgttccaaatttgaaggaactatctaatcttccagtaggccttacagatttatcaattgattgttgcccactgcttatgtttatcaccaacaatgagctaggacagcatgatttgagggaaaatataataatgaaggcagacgacctggcatctaaacttgcattgatgtgggaggtggattcaggagttattaggagagtactgtcgaaagactattcatctctgaagcagttggtgacattgatgatggatgatgatatatcaaagcatcttcaaattattgaaagtggtctggaggaaagtgaagataaagtatggatgaaagaaaacatcatcaaggcatggctcttttgccatgagcagaggataagattcatttatggaaggaccatggagattccattggttctaccgtcaggactctgtgaactttctctttcttcatgcagtattacagatgaagctttagctatttgccttggtggcctcacttcactgagaactttacaattggaatataatatggcattaactacacttccatcagaaaaggtgtttgagcatttgacaaagcttgacaggttggttgtaataggttgtttgtgtctcaaatcactggggggcttacgtgctgctccatctctttcctgttttaactgttggggttgtccttctttagagctagcacggggagcagaactaatgccgttgaaccttgatatggagctcagcatccttggctgcattcttgcagctgattcgttcattaatggcttgccacatctgaatcatctttccatttatgtctgcagaagctccccatccttatcgattggccacctgacctcccttgaatcattatgtctaaatggcctccctgatctttgctttgttgaaggcttgtcttccctgcaccttaagcacctaagtttagtagatgttgcaaacctcactgccaagtgcatctcacagtttcgtgtccaggaatcgctcacgattgcaaggagccgtcagtttcatttgaagaacctgcaaatctctcatccgtcaagcacctgaacttttcatggtgcaaaacagagtccctgcctagaaatctaaaatctgtctcaagtctggagagtctttctatagaacattgccccaacataacatctttaccagatctgccgtcctccctccagcgcataactatattgtattgccccgtcttgatgaagaattgccaagaacctgatggagaaagctggccaaagatttcgcacgttcgttggaagagctttctaccaagaccgcaccactttgaaataaatgagaaggcaccttgacgtcacccctcttctcttgaagctccagagttcaggctcaagtcagaagccaatccgtcgttaattctgccgtccccgcggttccctgtttttgccgcttgtattgctccgctatttcagttgctatatcattcattccttggttgtgcacaattgccaatatgtatttctctgacagaatggagtaataactgtggccagagcttttgttttcatgtgcacaattgctatatcattcatgtggcaattagtataaatactccaggcaatgcaatagagaagatagctcattttcctacacttgtgcttgtggatggtgtggcagagaagttcaccatggaaccagttccagtaatgtgtgtgctacagtcaaaataggtcttaattctctgctacgtacagtcaaaatgtgtctgctacagtccgagtgtttctggagattcgttgttggcggatgatgagctacatttgtacagtatggattgagctcgaggacttgttcatctccttgctctattaccagttaaaaggtgattgcttgttctct

SEQ ID NO: 15579 - DNA, 924 bp, Zea Mays
ccagaagcttcctttgtctctgtcgatgctgactccttcaccccaacagctcccaatcttcccaacgctgcttcctttcccagcgagcagtcagcagcaccatcggtctcctccacgacaaaaaacagatattctatcgtcaggaatcaatcagcaatcctgcgttgcctgcccgacggagctgcttccctcgttgctgcattgcactgcggcggcctcgcgcttgttgtcgattccagctccatgcgcccatgatttactttacttgtaattgccaagaacctgatggagaaagctggccaaagatttcgcacgttcgttggaagagctttctaccaagaccgcaccactttgaaataaatgagaaggcaccttgacgtcacccctcttctcttgaagctccagagttcaggctcaagtcagaagccaatccgtcgttaattctgccgtccccgcggttccctgtttttgccgcttgtattgctccgctatttcagttgctatatcattcattccttggttgtgcacaattgccaatatgtatttctctgacagaatggagtaataactgtggccagagcttttgttttcatgtgcacaattgctatatcattcatgtggcaattagtataaatactccaggcaatgcaatagagaagatagctcattttcctacacttgtgcttgtggatggtgtggcagagaagttcaccatggaaccagttccagtaatgtgtgtgctacagtcaaaataggtcttaattctctgctacgtacagtcaaaatgtgtctgctacagtccgagtgtttctggagattcgttgttggcggatgatgagctacatttgtacagtatggattgagctcgaggacttgttcatctccttgctctattaccagttaaaaggtgattgcttgttctct

SEQ ID NO: 15580 - DNA, 4546 bp, Zea Mays
gaaaaaggtcgcctcctaccttcacatcgagatccactccaggtcccctttccacgatcttcattactctttccacgctccttcctttcccagcgagcagcaaggctggaaggcgagtggactctcagcagtcagcaccaccatcagtctcatctacgacaaaaacagatcttctatcgccaggaatcagcaacaccatccggtattcctggcttcctgcgctccctgcccgacggagctgcttccctgcttgctgtgcttgttccagagtctactccaccactgcgcccacctgtcgacaccagatccatgcgccctcgatttattttatttggtgttttctccactccgtagcggtctttatcagctgcttgccttctgcagagaaaaaaagaaaaaaaacagctttccatcgttcacccattctacatacatcctacatcttcatgttgttcatttcgctcacaaagtaagaggaagcacaaaccaatacaatttcatggccgacttggccctcgccggcttaaggtggacagcatcgccgattgtcaacgagcttcttactaaagcttcagcttacctcagtgtggacatggtgcgtgagatccaacgactagaagccactgtcctgccacagttcgagctggtgattcaagcggcccagaagagcccccacaggggcatactggagggatggctccggcgtctcaaagaagcctactatgatgccgaggacttgttggacgagcatgagtacaatgtccttgagggcaaggccaagagcggaaaaagtctcctgttaggagagcatggaagctcctccactgcaactactgtcatgaagccttttcatgctgctctgagcagggcgcggaacttgctccctcaaaacagaaggctacttagcaagatgaacgagctcaaagcaatcctgacagaagcccaacaacttcgagatcttcttggtttgccacatggcaataccgtcgagtggccagctgcagcacctaccagtgttcccacaaccacatcacttcccacttccaaggtttttggtcgcgacagggatcgtgatcatatagtagattttcttctcgacaagacaacaactgctcaggcaagctcagctaagtactcgggtttggccattgttggagtaggaggaatggggaagtccaccttagcacagtatgtctacaacgacaaaaggatagaagaatgcttcgatgtcaggatgtgggtgtgtatctcacgcaaacttgatgtccatcgtcacacaagggagatcatggagtctgcaaaaaagggggagtgcccacatgttgataatctcgatactctccagtgcaaattacgtgatatactacaagagtcacataaattcctgcttgtcttggatgatgtttggtttgaaaaatctgatactgagacagagtgggagctactccttgctccattagtctctaaacagtcggggagcaaggttttggtgactactcgatgtgagacacttccggccgctgtttgctgtgaacaagtcgttcatttgaaaaacttggatgatactgagttcttggctctctttaaacaccatgctttctctggagcagaaatcaaagacaagctcctacacacgaagttggaacacactacagaggagattgctaaaaggcttgggcaatgtcctttggcagcaaaagttctgggttcccgattgtgcaggaaaaaggatattgctgaatggaaagctgctctaaagcttggagatttaagtgatcccttcacatctctgttgtggagttacgagaagttagatccacgtctccagaggtgcttcttgtattgcagcttgtttccaaaaggtcatagatatgaacctaatgagttggttcacctctgggtggcagaaggatttgttggttcatgcaatttgagtaggagaacattggaagaggctgggatggattacttcaatgatatggtctctggatctttcttccaattggtttctaaaagacattattcatactatatcatgcatgatatccttcatgatttggcagagtcactctctagagaagactgctttagattagaagatgataatgtgacagagataccatgcactgttcgatatctatctgtccgtgttgaaagtatgcaaaagcataaggaaattatctacaagctacatcatttacgcactgttatctgcatcgattcactaatggataatgcaagtattatttttgatcagatgctgtggaacttgaagaagttacgcgtattgtctttgtcattttacaacagcaacaagttacctaaatctgttggtgagctgaagcaccttcggtatttggacctcaccagaacatcagtgtttgaattgcctagatcattatgtgctctttggcacttacaactacttcagctaaacggcatggtggagaggttgcctaacaaagtttgcaatttaagtaagttacggtatctgcgagggtataaggaccaaattcccaacattggcaagcttacttctttacaacagatatatgtcttttctgtgcaaaagaagcaaggatatgagttgcgacagctaaaggacttgaatgagcttggcggcagtttacatgtacaaaatcttgagaatgttattggaaaggatgaagccttagcgtcgaagctatatctgaaaagtcgccttaaagagttgacacttgagtggagttctgagaatggcatggatgcaatgaatattctgcatttggatgttctagagggtctgcgaccgccaccccaactgagtaagctcacaatcaaaggttacaaatctgacacatatcctgggtggttacttgagcgatcctattttaagaatttggaacgttttgagcttaataattgcagtttgctagaaggcttaccaccagatacagagctccttcagcattgttctagactgttgctgttggacgttccaaaactgaagacattaccatgtcttccaccaagccttacaaagttgtcaatttgtggcctccccctgcttacttttgtcaccaaaaatcagctcgaacaacatgactctagggaaaatataatgatggcaaaccacctggcatctaaactttcattgatgtgggaggtggattcaggatctagtgttaggagtgtactgtcgaaagactattcatctcttaagcagttgatgacattgatgatagatgatgatatatcaaagcatcttcaaattattgaaagtggtctagaggaaggagataaagtatggatgaaagaaaacatcatcaaggcatggctcttttgccatgagcagaggataagattcacttatggaagggccatggagctgcaagtggttctaccattaggactttgtaaactttccctttcgtcatgcaatattatagatgaagctttagctatttgccttgaaggcctcacttcactggcaactttagaattggaatataatatggcactaactacacttccatcagaagaggtgtttcaacatttgacaaaccttgacatgttgattctaagtggttgttggtgtctcaagtcactggggggcttacgtgttgcttcatctctttccattcttcactgttgggattgtccttctttagagctagcacgtggagcagaactaatgccgttgaaccttgctagcaatctcagcatccgtggctgcattcttgcagctgattcgttcattaatggcttgccacatctgaaacatctttccattgatgtctgcagaagctccccatccttgtcgattggccacctgacctcccttgaattattagatctaaatggtctccctgatctttgctttgttgaaggcttgtcttccctgcaccttaagcacctaagtttagtagatgttgcaaacctcactgccaagtgcatctcacagtttcgtgtccaggaatcgctcacggttagtagctctgtattgctcaaccacatgctaatggctgaagggtttacagccccaccaaatcttactcttttagattgcaaggagccatcattttcatttgaagaacctgcaaatctctcatctgtcaagcgcctggatttttcgctttgcgaaatggagtccctgccaagaaatcttaaatctctctcaagtctagagagtcttcatatagggcgttgccccaacgtagcatctttacctgatctgccatcctccctccagcgcatagctatatggtgttgtcccgtcttgaagaagaactgccaagaacctgatggggaaagctggccaaagatttcgcaccttcgctggaagcacatctactaataccaaacttgcttctttagacttgccacttgaaatgaatgagaaggtacaggttctacttattcattttccagcacaattgatgagtttctcaatatttaaaacattttatgttctaaacaggcacctcgatgtcaccccaacgcgacgctctctcctcttgaagctccagagttcaggaccaagtcagaagcgaatgcgtcagctaat

SEQ ID NO: 15581 - DNA, 614 bp, Zea Mays
cccttgtccacatcgcgcgaatttgtgccgccggcggacatcaccatacgggacaacaggccgccgtcgaccatccgccgtccatgcagacaccgggcgccagcagactgcgtggggaatcaccgtgccgtaccgtgtccgtgcgggtttgggcactcgggatctaaagctgggaggccgtggggttcctcaaccacgctctccgccgccgagaagccttctatcgccgtgaaccaatctgtccattgccccgaaagcccgaggagaagaatatgaggttcaagaggagtcacttatcgaggagtgtgatttgatataggtggcgtcttcgagttgactttctggcgccaaggatagattttagattcttttatatttatcttctattttgtaagacttccgctatgtaataaatactctgattattatgacatttatctttatatactttgttattatatatgttgtcttctttgacgcatgtatgagatgcatccagctttgtcctttaaagccgggtgtgacaacaactgtaatcatctagtgccttgtttatagttcatatatttgtaacataatgtataactgataatgttaaactatgtttgtttaag

SEQ ID NO: 15582 - DNA, 5294 bp, Zea Mays
catctttctaccttcgcattccagcctcctatattgcaaattgcgatgccattaaaacatggatattcacccaacatttggaaattgggattgaacaactcgatgtggtattgttctcaccttgagctcctgtgatgtgtgcggttgtccacctggacgaactcgaactcgcctttcttctgcctcgcaaatcaaatcaaaacgggctagcacctgtaagtaaatttgtgtttgtcaaattgagagggcccggttccaattcaaacacctattactatatggataataggacccactgtccgtaaagatgacttttttcgccatcctctttccgcgcttcttccttcctctttccctcagctgtctgtcagcagcaccatcggtctcctctacgacaaaaacagatcttctatcaccagcaatcagcaacaccatccgctattcctgcattccctgcccgacggagctgcttccctccttgctgtgctgttctgggctgtgcttgttctagagtctactccaccactgcggcgacctcgcgctcgttgtcgattccagctccatgcgcccttgatttattttacttgtgttttctccagtccgtagcgtctttatcagttgcttgccttctgcagaggaaaaaagaaaaaaaaagagtcagctttgttactgcatcttcagcttgttcatttcgctctagtctggaaatattcatccaagatctctccatcttctccactcacaaagtaagaggaagcacaaaccactgcaatttcatggcagactttgctctcactggcttaaggtggacagcagctccgattgtcaaagagcttcttactaaagcttcagcttacctcagtgtggacatggtgcgcgagatccaacaactggaagccactgtcctgccacagttcgagctgataattcaagcggcccagaagagcccccacaggggcatgctggaggcatggctccggcgtctcaaagaagcctattatgatgccgaggatctgctggacgagcatgagtactatgtccttaaggccaaggccaagagctcctcccctgcaagtactgttatgaagccctttcataatgctatgagcagggcacgcaactttctccctcagaagagaaggctaattagcaagatgagcgagcttaaagctatcctgacagaagcccagcagcttcgagatcttcttagtttgccacatggcaataccgtcgagtggccaactgtagcagctaccgttgttcccacaacaacatcatatcccacttcaaaggttttcggccgtgatcgagatcgtgaccgtatagttgatttccttctcggcaagacaacaactgctgaggcaagctcagccaagtactcgggtttggccattgttggaattggaggaatggggaagtccaccatagcacagtatgtctataatgacgagaggattgaaaaatgctttgatgtcaggatgtggatctgcatctcacgcaaacttgatgtgcatcgtcacacaagagagatcatcgagtccgcaaaaaatggggagtgcccacgtgttgataatctcaatactctccagcgcaaattaagtgacatactacaacagtcacagaaattcctgcttgtcttggatgatgtttggtttgaaaaatctgatagtgagactgagtgggcggaattccttgctccattagtctctaaacagtcagggagcaaagttttggtgacttctcgatgtgaaacacttccggctgctgtttgctgtgaacaagtcgttcatttggaaaacatggatgatactgagtttttgaatctctttaaacaccatgctttctctggagcagaaatcaaggaccaactgttacgcacgaagctggaacacactgcagaggagattgctaaaaggcttggacaatgtcctttagcagcaaaagttatgggttcccgattgtgcaggaaaaaggatattgctgaatggaaagctgctctaaagcttggagatttgagtcatcccttcacatctctgttgtggagttatgagaagttagatccacgtttgcagagatgcttcttgtattgcagtttgtttccaaaaggtcatagatatcaatctgatgaattggttcacctctgggtggcagaaggatttgttggttcatgcaattggagtaggagaacattggaagagattgggatggattacttcaatgatatggtctctgggtctttcttccaattggtttctaaaggatgttattcgtactataccatgcacgacatccttcatgatttggcagagtcactctctagagaagactgcttcagattagaagatgataatgtgacagaaataccatgcactgttcgacatctatctgttcgtgttgaaagtatgcaaaagcataagcaaattatctacaagctacatcatttacgcactgttatctgcattgatcgactaatggataatgcaagtattattttttatcagatgctatggaacatgaagaagttgcgtgtattgtctttgtcatttgccaacagcaggaagttgccagaatctattggtgagctgaagcaccttcggtatttggacctcgccagaacatcagtttctgaattgcctagatcattatgtactctctaccacttacaattactttcgttaaactacatggcggagaggttgcctgacaaactttgcaatttaagtaagctacgacatctaagagtgaacaacaatcaaattcccaacattggcaagcttacttcattacaacgaatagagatattttccgtgcaaaagaagcaaggatatgagttgcaacaactgaagtacttgaatgagcttggtggcagtttaagcgtacaaaatcttgagaatgtcatcggaaaggatgaagccttagagtcgaagctatatctgaaaagtcgccttaaagagttgacacttgtgtggagttctgataatggcatggatgcaatggatattctgcatttggatattctagaaggtctgagaccgccaccccaattgagtaaactcacaatcgaaggctacaaatctagcacatatcctgggtggttacttgagcgatcctattttgagaatttagaaagttttgagctcaataattgcagtttgctagcagtcctaccaccagatacagagctccttcggcattgctctaggctgcatataaaaaatgttccaaaattgaaggaactaccgtatcttccagcaggccttacagagttgtcaatttgtaggtgtccattacttatgtttatcaccaacaaggagctaggacaacatgacttgagggaaaatataatgaaggcagacgacctgtcgtctaaacttgcatcgatgtgggaggtggattcaagatcacatgttacgagcgtactgtcggaagactattcatttctgaagcagttgatgacattgatgatggatgatgatatatcaaagcatcttcaaattattgaaagtggtctagaggaaggaggagatgaagtatggatgaaagaaaacatcatcaaggcatggctcttttgccatgagcagaggataagattcatttatggaaggaccatggagatgtcactggttctaccgtcaggactctataaactttctctttcttcatgcattattacagatgaagctttagctatttgcctcagtggcctcacttcactgagaactttggaattgaaatataatatgacattaactacacttccgtcagaagaggcgtttcaacaaatgacaaagctgaagtgcttcgctataagtggttgttggtgtctcaaatcactggggggattacatgctgctccatctctttcggctcttgattgttgggattgtccttctttagagctagcacgtggagccgaactaatgccattgaaccttgctagctaccttgacatccagggctgcattcttgcagccgattcattcactaattatgtgccagacctgaaacaacttaccattattaactgcagatgctccccatccttatcgattggccacctgacctcccttgaatcattacaactaattggtctccctgatctttactttgttgaaggcttgtcttccctgcaccttaagcgcctaaagttaggagatgttgcaaaccttactgccaagtgcttctcacagtttcgtgtcatggaatcgctcaccgttagtagctccgtattgctcaaccagatgctcatggctgaagggtttatggtcccaccaaatcttgaattcttatattgcaaggagccgtcgattttatttgaagagcctgcaaatctctcatctgtcaagtgcctgaatttttcgttatgtgaaaccgagtccctgccaagaaatctaaaatctctatcaagtctggagagtctcgagatagggttttgccccaacatagcatctttaccagatctgccgtcctccctcgagcgcataactatatgggagtgccctgtcttgaagaagaactgccaagaacctgatggagaaagctggccaaagatttcacgcatccgtcggaaggacataggcttccaatattttatttaggaaacatttcatgttgtaaacaggcacctcgagctcaaggtcaccccgtcaccactcgccgccctcatcttctacagagtcggcaccgaactaggtacttagcacccaggccagctacctgcgtccataataggctctgcatttatgggggccctacattgtttatgccgcccacttctgctgcagaaacagtctgaatatgggcttttccaaccagccaatccagagaacagggctagcccaagacagctgtatgggctgagcagaattctgccgagtttatcaccaagaatgatcaatcccttgtcgctgaatgaatcaagttcatttttccgagaattaattttggtatccaaatctaagttcatggaattcataccagtgatatattgtaaaggtagcaccctcactgtcgacggtggccttgtactgcattgaatttgggtgtttatgccacattttcatagttgtgacaatagtgtagaacaggttggtagcaggccttaaaaactgattagcataatcaaatgaatatggttatagatggggtttgacctgagctcaaaaatatattgttgaccctaattagggtttctactgcgtcattagttttactcctcttgcaagactacgttctgtaaacattccatattatagtgaaggtttcgcttggttggtgcctatgtttttcctttt

SEQ ID NO: 15583 - DNA, 776 bp, Zea Mays
ggcgatcatgtgttaattaatgcacctcgagctcaaggtcaccccgtcaccactcgccgccctcatcttctacagagtcggcaccgaactaggtacttagcacccaggccagctacctgcgtccataataggctctgcatttatgggggccctacattgtttatgccgcccacttctgctgcagaaacagtctgaatatgggcttttccaaccagccaatccagagaacagggctagcccaagacaggtgactcagttttttcaacttgtacgtactttaattccatggtctattgctgactgttgtacgtacggggtacctgacgcagctgtatgggctgagcagaattctgccgagtttatcaccaagaatgatcaatcccttgtcgctgaatgaatcaagttcatttttccgagaattaattttggtatccaaatctaagttcatggaattcataccagtgatatattgtaaaggtagcaccctcactgtcgacggtggccttgtactgcattgaatttgggtgtttatgccacattttcatagttgtgacaatagtgtagaacaggttggtagcaggccttaaaaactgattagcataatcaaatgaatatggttatagatggggtttgacctgagctcaaaaatatattgttgaccctaattagggtttctactgcgtcattagttttactcctcttgcaagactacgttctgtaaacattccatattatagtgaaggtttcgcttggttggtgcctatgtttttcctttt

SEQ ID NO: 15584 - DNA, 4782 bp, Zea Mays
cccgctccggctgagcaggcgtggggcggcaggggcatcctgggctcaggctggtggcgatcatgtgttaattaatgttttctccagtccgtagcgtctttatcagttgcttgccttctgcagaggaaaaaagaaaaaaaaagagtcagctttgttactgcatcttcagcttgttcatttcgctctagtctggaaatattcatccaagatctctccatcttctccactcacaaagtaagaggaagcacaaaccactgcaatttcatggcagactttgctctcactggcttaaggtggacagcagctccgattgtcaaagagcttcttactaaagcttcagcttacctcagtgtggacatggtgcgcgagatccaacaactggaagccactgtcctgccacagttcgagctgataattcaagcggcccagaagagcccccacaggggcatgctggaggcatggctccggcgtctcaaagaagcctattatgatgccgaggatctgctggacgagcatgagtactatgtccttaaggccaaggccaagagctcctcccctgcaagtactgttatgaagccctttcataatgctatgagcagggcacgcaactttctccctcagaagagaaggctaattagcaagatgagcgagcttaaagctatcctgacagaagcccagcagcttcgagatcttcttagtttgccacatggcaataccgtcgagtggccaactgtagcagctaccgttgttcccacaacaacatcatatcccacttcaaaggttttcggccgtgatcgagatcgtgaccgtatagttgatttccttctcggcaagacaacaactgctgaggcaagctcagccaagtactcgggtttggccattgttggaattggaggaatggggaagtccaccatagcacagtatgtctataatgacgagaggattgaaaaatgctttgatgtcaggatgtggatctgcatctcacgcaaacttgatgtgcatcgtcacacaagagagatcatcgagtccgcaaaaaatggggagtgcccacgtgttgataatctcaatactctccagcgcaaattaagtgacatactacaacagtcacagaaattcctgcttgtcttggatgatgtttggtttgaaaaatctgatagtgagactgagtgggcggaattccttgctccattagtctctaaacagtcagggagcaaagttttggtgacttctcgatgtgaaacacttccggctgctgtttgctgtgaacaagtcgttcatttggaaaacatggatgatactgagtttttgaatctctttaaacaccatgctttctctggagcagaaatcaaggaccaactgttacgcacgaagctggaacacactgcagaggagattgctaaaaggcttggacaatgtcctttagcagcaaaagttatgggttcccgattgtgcaggaaaaaggatattgctgaatggaaagctgctctaaagcttggagatttgagtcatcccttcacatctctgttgtggagttatgagaagttagatccacgtttgcagagatgcttcttgtattgcagtttgtttccaaaaggtcatagatatcaatctgatgaattggttcacctctgggtggcagaaggatttgttggttcatgcaattggagtaggagaacattggaagagattgggatggattacttcaatgatatggtctctgggtctttcttccaattggtttctaaaggatgttattcgtactataccatgcacgacatccttcatgatttggcagagtcactctctagagaagactgcttcagattagaagatgataatgtgacagaaataccatgcactgttcgacatctatctgttcgtgttgaaagtatgcaaaagcataagcaaattatctacaagctacatcatttacgcactgttatctgcattgatcgactaatggataatgcaagtattattttttatcagatgctatggaacatgaagaagttgcgtgtattgtctttgtcatttgccaacagcaggaagttgccagaatctattggtgagctgaagcaccttcggtatttggacctcgccagaacatcagtttctgaattgcctagatcattatgtactctctaccacttacaattactttcgttaaactacatggcggagaggttgcctgacaaactttgcaatttaagtaagctacgacatctaagagtgaacaacaatcaaattcccaacattggcaagcttacttcattacaacgaatagagatattttccgtgcaaaagaagcaaggatatgagttgcaacaactgaagtacttgaatgagcttggtggcagtttaagcgtacaaaatcttgagaatgtcatcggaaaggatgaagccttagagtcgaagctatatctgaaaagtcgccttaaagagttgacacttgtgtggagttctgataatggcatggatgcaatggatattctgcatttggatattctagaaggtctgagaccgccaccccaattgagtaaactcacaatcgaaggctacaaatctagcacatatcctgggtggttacttgagcgatcctattttgagaatttagaaagttttgagctcaataattgcagtttgctagcagtcctaccaccagatacagagctccttcggcattgctctaggctgcatataaaaaatgttccaaaattgaaggaactaccgtatcttccagcaggccttacagagttgtcaatttgtaggtgtccattacttatgtttatcaccaacaaggagctaggacaacatgacttgagggaaaatataatgaaggcagacgacctgtcgtctaaacttgcatcgatgtgggaggtggattcaagatcacatgttacgagcgtactgtcggaagactattcatttctgaagcagttgatgacattgatgatggatgatgatatatcaaagcatcttcaaattattgaaagtggtctagaggaaggaggagatgaagtatggatgaaagaaaacatcatcaaggcatggctcttttgccatgagcagaggataagattcatttatggaaggaccatggagatgtcactggttctaccgtcaggactctataaactttctctttcttcatgcattattacagatgaagctttagctatttgcctcagtggcctcacttcactgagaactttggaattgaaatataatatgacattaactacacttccgtcagaagaggcgtttcaacaaatgacaaagctgaagtgcttcgctataagtggttgttggtgtctcaaatcactggggggattacatgctgctccatctctttcggctcttgattgttgggattgtccttctttagagctagcacgtggagccgaactaatgccattgaaccttgctagctaccttgacatccagggctgcattcttgcagccgattcattcactaattatgtgccagacctgaaacaacttaccattattaactgcagatgctccccatccttatcgattggccacctgacctcccttgaatcattacaactaattggtctccctgatctttactttgttgaaggcttgtcttccctgcaccttaagcgcctaaagttaggagatgttgcaaaccttactgccaagtgcttctcacagtttcgtgtcatggaatcgctcaccgttagtagctccgtattgctcaaccagatgctcatggctgaagggtttatggtcccaccaaatcttgaattcttatattgcaaggagccgtcgattttatttgaagagcctgcaaatctctcatctgtcaagtgcctgaatttttcgttatgtgaaaccgagtccctgccaagaaatctaaaatctctatcaagtctggagagtctcgagatagggttttgccccaacatagcatctttaccagatctgccgtcctccctcgagcgcataactatatgggagtgccctgtcttgaagaagaactgccaagaacctgatggagaaagctggccaaagatttcacgcatccgtcggaaggacataggcttccaatattttatttaggaaacatttcatgttgtaaacaggcacctcgagctcaaggtcaccccgtcaccactcgccgccctcatcttctacagagtcggcaccgaactaggtacttagcacccaggccagctacctgcgtccataataggctctgcatttatgggggccctacattgtttatgccgcccacttctgctgcagaaacagtctgaatatgggcttttccaaccagccaatccagagaacagggctagcccaagacagctgtatgggctgagcagaattctgccgagtttatcaccaagaatgatcaatcccttgtcgctgaatgaatcaagttcatttttccgagaattaattttggtatccaaatctaagttcatggaattcataccagtgatatattgtaaaggtagcaccctcactgtcgacggtggccttgtactgcattgaatttgggtgtttatgccacattttcatagttgtgacaatagtgtagaacaggttggtagcaggccttaaaaactgattagcataatcaaatgaatatggttatagatggggtttgacctgagctcaaaaatatattgttgaccctaattagggtttctactgcgtcattagttttactcctcttgcaagactacgttctgtaaacattccatattatagtgaaggtttcgcttggttggtgcctatgtttttcctttt

SEQ ID NO: 15585 - DNA, 3174 bp, Zea Mays
atttttttatcattctttgtcatgtgctcagctattcttaccacgagttgaactttgaatgctggattatagtttctaataataggttattgaatcctatggaacaaaaaaacaatgggaatttgcaataagatatatctacaactatgttaatctttccaagatatctaacacaatgttacattcctatggaatcgaggtcagtagaactgtagaagccatttcttgcaaattgggcatcctcagtcttcttttcgaacaagcaacatgggagaacttccttcctattgaaatcatgtgaacattttttttttgaaaaatcttgcaatccaaaagggccccaagactcatccaaattttaattggtatatattcattgcgaaatgttgaattggagatggagcatttaacttgtcaaactgcatccaatttgtattgtggtttctgttaatttatttttcagggattaaactagattactagaattggtatatatgcatggttggattattaaactgcattgtaattgaacttttggtacaactgtcattctcagatttattggaaggtagccttgagtccctggagcctgatcccctgtactccatggttcagttgttactattatacacaaaaagccggctgcctttttatctctatgtttgtgttgatgcctatccatcaccccaatatgcctttaattgctgatgatattgatatttgattaatgattagaccactcatacatttttttatgcttaacatatagatgcacatcatcttactgcttagcctcctactttttcatatctcaatgtgctgatattagtgctaaatatttctaaaggtcatttgggattgtaatgccagagcatttatgataccatatacacccttcttcttaatataaagatgcgcagctctcctgcatttttcgaaaaaaaaattccagggacatgtcagtcacctggaatctcgacctgtgtagtcattgtacatgatctcatggttgcatgctctcttggtatttctggactgaggattccaaatgataaaatcagataattttttggacttccaagaatttaatgtcccgaatattctgtagaaatataaattggccactagctgcaaatatggagatggaggagggagtgattgttggtgaaattgttataatgtaagttaagatctaatatcttggctagtgaatgcaactcctacttgcagaccgggtaataccccagtggtgaagatggtgaggacgtgaggtcccttgcaccaggtcacgggttcgacccctggcactgcactaaaaaaatccccttgttgttcctcactctgctctcgggttgcggcttggatgtgcgtcagtgcgtcacccttggacctgtcacctgtgtgggcagcttgacccgacccgttagtgatgggagcaaagggttcgggggtttctcggtcgggactggtaccacggcttggcggggacggcaatgggatagggtggggctagggaccagttccccgtccctgccccgttcccctaaacctattccccgggccctgtttagcctaacggggacaacctcatccccgtccccgcggatgcctgttccccatttgggcccccatggagaatactgtaacaaaaaaatattcactgtatgataacaattacaaatgttagaatcccgtgttaggttatggtcagtccccgtgtaattatctgtatacccttctgtgtaatgggcttggcccaactatatatgcactcccaaccctaattagggttagggtttttacacaacaaatatattaattatcaaaatacaacaaaataaaaaagtctaaaacaactaacaagtaacaaccttatattacaaatcataactcacaagtcacaattatttcaacttatctgacactctcacaaatcacataatacacatacacattagggtttcttattggtccccaatcagccctgtgggggtagtttcttctccgtctccgccccattaattttcggggcagagaaaccgtccccgaacccgctccgaacaggttggatccccgcggagccttgcccccacggggaacctgggtggccttaccctgccggaccgagttttgaaagcaactccttcccattttattaacaaaacacctgataggaataacgatcatctctactctgttgatcaaaccttggtgctgcttcactacattaaacatgcaactgtggacttgaaaaggacttggctgtgattcgagtgttctgtctactttgcaggatttacatcaatatcaaaatatggagtgcacgaacatgctggacagcaagaacaaactgccgcattatacttatttaagctatattggtcagactaattccacggtatcccaaggatggtgcaagaggaagcccatactgcgctgccctgtggaggtcgcgagcatgggaaatcagttgaggatgggctgagctagtaaagggttgttttctgacaaggccagtactattgttttttttgacatacctgggtggagttgcgaactcttgtacaggcgcaggctttacttattacattgtttggattggggatatagttcacatggtgcatatgaaacggttagattggtttaaattctctacctcgtccttaaatcatttatcatactaattagttattgaaagatgaaacacccgaaccactagttcttgtaatacttccactgcttttgtgaaggatgttatgagcatcaaaccgaactgaatggatgccctgctcctgttgatcaacttgacttgaatggacggtccggtccctatttgatgtggatgcatggatggcagtaccaaatctgctagggcttgcttgtcgtcggttcatccatgaggtatacgcgtgtaggcgtccacgaatttttcaaatgagtggacgtaagagtcatggactacgctgctcttgcttatgtgtataatcacccggccaatgctagctttgattggaagaagaacgtagatctgctggagtcgtgttgttgggtgtttggttaatgttgtaggttaattaaaattggttttagaagtgaagtgtaaaggctagttttcttttattcctcgaagaagaatgtaaaaggacgtgccgctgtaatactactacatttgtt

SEQ ID NO: 15586 - DNA, 5301 bp, Zea Mays
atttttttatcattctttgtcatgtgctcagctattcttaccacgagttgaactttgaatgctggattatagtttctaataataggttattgaatcctatggaacaaaaaaacaatgggaatttgcaataagatatatctacaactatgttaatctttccaagatatctaacacaatgttacattcctatggaatcgaggtcagtagaactgtagaagccatttcttgcaaattgggcatcctcagtcttcttttcgaacaagcaacatgggagaacttccttcctattgaaatcatgtgaacattttttttttgaaaaatcttgcaatccaaaagggccccaagactcatccaaattttaattggtatatattcattgcgaaatgttgaattggagatggagcatttaacttgtcaaactgcatccaatttgtattgtggtttctgttaatttatttttcagggattaaactagattactagaattggtatatatgcatggttggattattaaactgcattgtaattgaacttttggtacaactgtcattctcagatttattggaaggatttacatcaatatcaaaatatggagtgcacgaacatgctggacagcaagaacaaactgccgcattatacttatttaagctatattggtcagactaattccacggtatcccaaggatggtgcaagaggaagcccatactgcgctgccctgtggaggtcgcgagcatgggaaatcagttgaggatgggctgagctagtaaagggttgttttctgacaaggtaccaaatctgctagggcttgcttgtcgtcggttcatccatgaggtatacgcgtgtaggcgtccacgaatttttcaaatgagtgccagagttttgagaccctgactaccaataaccctttcaaagatttagtttatttagaggcaaacatgcctcacaaagtcacaacctcataaaatctacgagcttttatttacaaatacgtctcgataatgaagtttggagacaacaagtatcacatgtactgaaaagacacttctgtgatctcatcatgccaacggagggattctgtaacatgttacaacagaaatacaaaatagtggccacaagcatacaacggagaacatgtcatgtcaagtatttttaatggcatggaacatttctctcttttttaccatgaaagctcgagcctcgagcgaacactgcctcctgattcacactgttttgtgtttagccagagggattaggtttggcagctcgacaaggttagcctacgcaatatggccaatgattaatctcctcctccccaccccccaaaaaaataaaaaaaaaaattgccttgggcttttgggcctagatgtgagcccgagattatggatttcttcctgggcctgcctcttggccaatactcctacaccatctccttacagcagccccaacacagtggctttggtgtatggtttgaaagaatggttgttaaggctcagatgaaaaaatgggtgtcctgcaggtgacagtgatatctgcagaagctatgttagtttcaagagaaagaaggtgaggaccacaaaaattattagggaagtagagaaaaggagagagccgtgtggacaataaaaaaccacaactgtgctggatatttaaaagttcttcatttccatttgaacctactgtttttgaatgaaactgccacggccatgttttatattacaaaagtgagcccagttccacgtgaagatcgaagttgtcgagtactccgtccggtcaaaagtgcccgatgttttggatgcgtacttcaaccattattttatctggctacatttataaaaatctagcaagtacataagattcgaacagagatctgtgtatcttaaaacttagttgttatccgtagttaaactttcacaagcttgtcccgatctcttctccaaaagggccgggaccggctgaagtattattaaataatactcccttcgtttctgagttaagatgtttatgacaggataattactttatttttaaactaattagcttgttctaaacactatatactctgtctcttcattttgaatcgaattgtataagccgttttagttttgccataagttaaacttttctatttgtttaccaagtttatgaaaaatatatatattaatatctaaatatcaaataatgcactattaaaatatatttcattgtatatctgatgaatcttgttttaatatttcattatattattttaaagttgcttgcattattaaacaaaaaatgccgcgtcgaagaactcgaccagggggagaggtacaccattagcctataggctggatagcaaaaacaaggccacgtataacttgctgtaggtgactttttgctctcgagtaaaattatctcgacgagattctcagtttatcgtgggtcaactggtcatgctcactagatggtattaatggtaggaaaatgaatcctcggcagtatgattttgatgtttgattactagtgtttttgatatactccctccgtttctttttatttgtcgctggatagtacaaaattacactatccagcgacaaataaaaagaaacggagtactatccagcgacaaataaaaagaaacggagggagtagtttaaaggatgtaaagtagacttgaaatcaggtaagtaaagtgatgatccgaatgatcaacctctcaagcaagactttagaagcaacattgaagacttgaaaaaggctacaaaagtccaatacataatatagagccaaatcgggcgaaggtaatgaagaaacaaagtaaaagaggattctatagagcatccaatcctgtggggcgttagaccctgaggagcctcggtctatatgatcgatggcatgtttggttcgctgtttaacttttgtgtctaagattagttcttcaattctagcgactaaccttagataaagtgtggtataattatccatgaatcaaacaggctccaagtaaacgctagttggcatcagcaggagcgttgaaccaacaatggtgtagtataaaggattttacttctcgtgctcagaggagcattgtatcaagtgttggaccaacaatggaacgtggcgtcggatcaaacggtctcactatccatgcttagaggagtcaggagtgaaagaccgagcatgtgtagaggcatcagatcaccggagatggagtctaacggtctccaataaggttctagagaggtttgttttaagggtgtcgaactggtttgacaaggattgtcagactatacgctacataggggtgcatcaacgattgacaatggctacgtttgatatatacctcctccatttctttttagttgtcgctggatagttcaattttgtactatccagcgacaactaaaacgaaacggagggagtagttgccattgagttggtggaccctaacacaatggttggactggcacatgtcaggcgaggcgattcgacggtgtgcagtgatagtttttgatgttccaacatatatctctcaccttggggggctataaacatgaccttaaccggccaaataaggggggtgtggactcaaaaaagactcatctcttatagctcaagctcgatgattagcataactgctttatgaaatgcttacgttagatagactgccaattatgtgctttttcttagttcaagcctagtgtttagtgatatttgcatacctcaaaatcctgggtgcttgcgcccccatatttctattcaaagaagcttgtagtcttgtgagatcatatcaatcgtgtttgtggtgtggccaccatcatataggaaagaacatggatcacaatgttacgataaaaaacttgatagtgagaacggtggggagtaagtccgagagaggccattctgaagactcacttatgtgtggcgaaggtctaggtctattcacagagttatccgatcgagagcttagtctttacacaagcatccttgcgaggcacttcaatgacgactagggaaagcttccgcgcttcttgatacctcattaaaaaaatattggagtcgttgatcttgtcttgcgtctctatcttaatcatgcttccacgctttacttattatttaactagtttgtgtgtttatttttctagtttagatcgctaggctaagtgatatgattgatacataggttgtgtaaccactcctttgcggttgcggtagggatatgaacacacatataggtaagcctagtgtttagtgatatttgcatacctcgaagtcttgagtgcttgcacccccccaatatttgtattcaaagaagcttgtagtcttgtgagatcatatcaatcgtgtttatggtgtggccaccatcatatagtaaggaacgaggatcaccgtgttacgataaaaaacttgatagtgaaaacggtggggagtagtccgagagaggccattctgaagactcacttatgtgtggcgaatgtctaggtcttattcacagagttatccgatcgagagctttgtctttacgcaagcatccttgcgaggcacttcaatgacgactagggaaagcttccgcgcttcttgatacctcattaaaaaaaatcggagtcgttgatgtttgatgtcggtttgcgtctctatcttaatcatgcttccacgctttatttattatttaactagtttgtgtgtttatttttctagtttagattgctaggctaagtgatatgattgatacatagattgcgtgactcctttgcggttgcggtagggatatgaacacacatagttaaaatgacaattgcatgtatatatattttatttatttcatagtttataactatataaaaaattcaagttattagttttaagtatttttttaggttgtctaattcacacacttttaggcgtcatcatccccttcattacctaatgctgtaaatggtaggtctgttttttgttttctgtcgataggttctatcatatatgtagatggtgtatatctgtgtttagacaattatgtatttaaaaatctagatagatggtgcatatgtatgtgtagagaaaacttatgtattcaaaaaatgctaaaaggacgtaagagtcatggactacgctgctcttgcttatgtgtataatcacccggccaatgctagctttgattggaagaagaacgtagatctgctggagtcgtgttgttgggtgtttggttaatgttgtaggttaattaaaattggttttagaagtgaagtgtaaaggctagttttcttttattcctcgaagaagaatgtaaaaggacgtgccgctgtaatactactacatttgtt

SEQ ID NO: 15587 - DNA, 2860 bp, Zea Mays
gttttttttgcagtgtgaaattcatagattatttttttatcattctttgtcatgtgctcagctattcttaccacgagttgaactttgaatgctggattatagtttctaataataggttattgaatcctatggaacaaaaaaacaatgggaatttgcaataagatatatctacaactatgttaatctttccaagatatctaacacaatgttacattcctatggaatcgaggtcagtagaactgtagaagccatttcttgcaaattgggcatcctcagtcttcttttcgaacaagcaacatgggagaacttccttcctattgaaatcatgtgaacattttttttttgaaaaatcttgcaatccaaaagggccccaagactcatccaaattttaattggtatatattcattgcgaaatgttgaattggagatggagcatttaacttgtcaaactgcatccaatttgtattgtggtttctgttaatttatttttcagggattaaactagattactagaattggtatatatgcatggttggattattaaactgcattgtaattgaacttttggtacaactgtcattctcagatttattggaaggtagccttgagtccctggagcctgatcccctgtactccatggttcagttgttactattatacacaaaaagccggctgcctttttatctctatgtttgtgttgatgcctatccatcaccccaatatgcctttaattgctgatgatattgatatttgattaatgattagaccactcatacatttttttatgcttaacatatagatgcacatcatcttactgcttagcctcctactttttcatatctcaatgtgctgatattagtgctaaatatttctaaaggtcatttgggattgtaatgccagagcatttatgataccatatacacccttcttcttaatataaagatgcgcagctctcctgcatttttcgaaaaaaaaattccagggacatgtcagtcacctggaatctcgacctgtgtagtcattgtacatgatctcatggttgcatgctctcttggtatttctggactgaggattccaaatgataaaatcagataattttttggacttccaagaatttaatgtcccgaatattctgtagaaatataaattggccactagctgcaaatatggagatggaggagggagtgattgttggtgaaattgttataatgtaagttaagatctaatatcttggctagtgaatgcaactcctacttgcagaccgggtaataccccagtggtgaagatggtgaggacgtgaggtcccttgcaccaggtcacgggttcgacccctggcactgcactaaaaaaatccccttgttgttcctcactctgctctcgggttgcggcttggatgtgcgtcagtgcgtcacccttggacctgtcacctgtgtgggcagcttgacccgacccgttagtgatgggagcaaagggttcgggggtttctcggtcgggactggtaccacggcttggcggggacggcaatgggatagggtggggctagggaccagttccccgtccctgccccgttcccctaaacctattccccgggccctgtttagcctaacggggacaacctcatccccgtccccgcggatgcctgttccccatttgggcccccatggagaatactgtaacaaaaaaatattcactgtatgataacaattacaaatgttagaatcccgtgttaggttatggtcagtccccgtgtaattatctgtatacccttctgtgtaatgggcttggcccaactatatatgcactcccaaccctaattagggttagggtttttacacaacaaatatattaattatcaaaatacaacaaaataaaaaagtctaaaacaactaacaagtaacaaccttatattacaaatcataactcacaagtcacaattatttcaacttatctgacactctcacaaatcacataatacacatacacattagggtttcttattggtccccaatcagccctgtgggggtagtttcttctccgtctccgccccattaattttcggggcagagaaaccgtccccgaacccgctccgaacaggttggatccccgcggagccttgcccccacggggaacctgggtggccttaccctgccggaccgagttttgaaagcaactccttcccattttattaacaaaacacctgataggaataacgatcatctctactctgttgatcaaaccttggtgctgcttcactacattaaacatgcaactgtggacttgaaaaggacttggctgtgattcgagtgttctgtctactttgcaggatttacatcaatatcaaaatatggagtgcacgaacatgctggacagcaagaacaaactgccgcattatacttatttaagctatattggtcagactaattccacggtatcccaaggatggtgcaagaggaagcccatactgcgctgccctgtggaggtcgcgagcatgggaaatcagttgaggatgggctgagctagtaaagggttgttttctgacaaggtaccaaatctgctagggcttgcttgtcgtcggttcatccatgaggtatacgcgtgtaggcgtccacgaatttttcaaatgagtggacgtaagagtcatggactacgctgctcttgcttatgtgtataatcacccggccaatgctagctttgattggaagaagaacgtagatctgctggagtcgtgttgttgggtgtttggttaatgttgtaggttaattaaaattggttttagaagtgaagtgtaaaggctagttttcttttattcctcgaagaagaatgtaaaaggacgtgccgctgtaatactactacatttgtt

SEQ ID NO: 15588 - DNA, 7673 bp, Zea Mays
agttttttttgcagtgtgaaattcatagattatttttttatcattctttgtcatgtgctcagctattcttaccacgagttgaactttgaatgctggattatagtttctaataataggttattgaatcctatggaacaaaaaaacaatgggaatttgcaataagatatatctacaactatgttaatctttccaagatatctaacacaatgttacattcctatggaatcgaggtcagtagaactgtagaagccatttcttgcaaattgggcatcctcagtcttcttttcgaacaagcaacatgggagaacttccttcctattgaaatcatgtgaacattttttttttgaaaaatcttgcaatccaaaagggccccaagactcatccaaattttaattggtatatattcattgcgaaatgttgaattggagatggagcatttaacttgtcaaactgcatccaatttgtattgtggtttctgttaatttatttttcagggattaaactagattactagaattggtatatatgcatggttggattattaaactgcattgtaattgaacttttggtacaactgtcattctcagatttattggaaggtagccttgagtccctggagcctgatcccctgtactccatggttcagttgttactattatacacaaaaagccggctgcctttttatctctatgtttgtgttgatgcctatccatcaccccaatatgcctttaattgctgatgatattgatatttgattaatgattagaccactcatacatttttttatgcttaacatatagatgcacatcatcttactgcttagcctcctactttttcatatctcaatgtgctgatattagtgctaaatatttctaaaggtcatttgggattgtaatgccagagcatttatgataccatatacacccttcttcttaatataaagatgcgcagctctcctgcatttttcgaaaaaaaaattccagggacatgtcagtcacctggaatctcgacctgtgtagtcattgtacatgatctcatggttgcatgctctcttggtatttctggactgaggattccaaatgataaaatcagataattttttggacttccaagaatttaatgtcccgaatattctgtagaaatataaattggccactagctgcaaatatggagatggaggagggagtgattgttggtgaaattgttataatgtaagttaagatctaatatcttggctagtgaatgcaactcctacttgcagaccgggtaataccccagtggtgaagatggtgaggacgtgaggtcccttgcaccaggtcacgggttcgacccctggcactgcactaaaaaaatccccttgttgttcctcactctgctctcgggttgcggcttggatgtgcgtcagtgcgtcacccttggacctgtcacctgtgtgggcagcttgacccgacccgttagtgatgggagcaaagggttcgggggtttctcggtcgggactggtaccacggcttggcggggacggcaatgggatagggtggggctagggaccagttccccgtccctgccccgttcccctaaacctattccccgggccctgtttagcctaacggggacaacctcatccccgtccccgcggatgcctgttccccatttgggcccccatggagaatactgtaacaaaaaaatattcactgtatgataacaattacaaatgttagaatcccgtgttaggttatggtcagtccccgtgtaattatctgtatacccttctgtgtaatgggcttggcccaactatatatgcactcccaaccctaattagggttagggtttttacacaacaaatatattaattatcaaaatacaacaaaataaaaaagtctaaaacaactaacaagtaacaaccttatattacaaatcataactcacaagtcacaattatttcaacttatctgacactctcacaaatcacataatacacatacacattagggtttcttattggtccccaatcagccctgtgggggtagtttcttctccgtctccgccccattaattttcggggcagagaaaccgtccccgaacccgctccgaacaggttggatccccgcggagccttgcccccacggggaacctgggtggccttaccctgccggaccgagttttgaaagcaactccttcccattttattaacaaaacacctgataggaataacgatcatctctactctgttgatcaaaccttggtgctgcttcactacattaaacatgcaactgtggacttgaaaaggacttggctgtgattcgagtgttctgtctactttgcaggatttacatcaatatcaaaatatggagtgcacgaacatgctggacagcaagaacaaactgccgcattatacttatttaagctatattggtcagactaattccacggtatcccaaggatggtgcaagaggaagcccatactgcgctgccctgtggaggtcgcgagcatgggaaatcagttgaggatgggctgagctagtaaagggttgttttctgacaaggccagtactattgttttttttgacatacctgggtggagttgcgaactcttgtacaggcgcaggctttacttattacattgtttggattggggatatagttcacatggtgcatatgaaacggatgttatgagcatcaaaccgaactgaatggatgccctgctcctgttgatcaacttgacttgaatggacggtccggtccctatttgatgtggatgcatggatggcagtatgaaactagccactggatgaccattttctgcttcagtgcatcctggaaataataaagcatctattttccaccagggtgtacacgttttgcagcaataatctagactaccttttggttttagctatctcgtccattccgaatggcgtggaaaggatctacttactgtacccttggtgtcactttgtgcacatcctattctatagtagtgcactggggtacaagttgtctttttgtaaaagcggtgcaagtgttttattcatggacctactgttcttgcatgcaggtaccaaatctgctagggcttgcttgtcgtcggttcatccatgaggtatacgcgtgtaggcgtccacgaatttttcaaatgagtggtatgtgttccatctcttgattggctgtctatattcgtgcattttttattatcaaacaatagaaccgctaactcacaaatactcatgttttggacaagatacagccagagttttgagaccctgactaccaataaccctttcaaagatttagtttatttagaggcaaacatgcctcacaaagtcacaacctcataaaatctacgagcttttatttacaaatacgtctcgataatgaagtttggagacaacaagtatcacatgtactgaaaagacacttctgtgatctcatcatgccaacggagggattctgtaacatgttacaacagaaatacaaaatagtggccacaagcatacaacggagaacatgtcatgtcaagtatttttaatggcatggaacatttctctcttttttaccatgaaagctcgagcctcgagcgaacactgcctcctgattcacactgttttgtgtttagccagagggattaggtttggcagctcgacaaggttagcctacgcaatatggccaatgattaatctcctcctccccaccccccaaaaaaataaaaaaaaaaattgccttgggcttttgggcctagatgtgagcccgagattatggatttcttcctgggcctgcctcttggccaatactcctacaccatctccttacagcagccccaacacagtggctttggtgtatggtttgaaagaatggttgttaaggctcagatgaaaaaatgggtgtcctgcaggtgacagtgatatctgcagaagctatgttagtttcaagagaaagaaggtgaggaccacaaaaattattagggaagtagagaaaaggagagagccgtgtggacaataaaaaaccacaactgtgctggatatttaaaagttcttcatttccatttgaacctactgtttttgaatgaaactgccacggccatgttttatattacaaaagtgagcccagttccacgtgaagatcgaagttgtcgagtactccgtccggtcaaaagtgcccgatgttttggatgcgtacttcaaccattattttatctggctacatttataaaaatctagcaagtacataagattcgaacagagatctgtgtatcttaaaacttagttgttatccgtagttaaactttcacaagcttgtcccgatctcttctccaaaagggccgggaccggctgaagtattattaaataatactcccttcgtttctgagttaagatgtttatgacaggataattactttatttttaaactaattagcttgttctaaacactatatactctgtctcttcattttgaatcgaattgtataagccgttttagttttgccataagttaaacttttctatttgtttaccaagtttatgaaaaatatatatattaatatctaaatatcaaataatgcactattaaaatatatttcattgtatatctgatgaatcttgttttaatatttcattatattattttaaagttgcttgcattattaaacaaaaaatgccgcgtcgaagaactcgaccagggggagaggtacaccattagcctataggctggatagcaaaaacaaggccacgtataacttgctgtaggtgactttttgctctcgagtaaaattatctcgacgagattctcagtttatcgtgggtcaactggtcatgctcactagatggtattaatggtaggaaaatgaatcctcggcagtatgattttgatgtttgattactagtgtttttgatatactccctccgtttctttttatttgtcgctggatagtacaaaattacactatccagcgacaaataaaaagaaacggagtactatccagcgacaaataaaaagaaacggagggagtagtttaaaggatgtaaagtagacttgaaatcaggtaagtaaagtgatgatccgaatgatcaacctctcaagcaagactttagaagcaacattgaagacttgaaaaaggctacaaaagtccaatacataatatagagccaaatcgggcgaaggtaatgaagaaacaaagtaaaagaggattctatagagcatccaatcctgtggggcgttagaccctgaggagcctcggtctatatgatcgatggcatgtttggttcgctgtttaacttttgtgtctaagattagttcttcaattctagcgactaaccttagataaagtgtggtataattatccatgaatcaaacaggctccaagtaaacgctagttggcatcagcaggagcgttgaaccaacaatggtgtagtataaaggattttacttctcgtgctcagaggagcattgtatcaagtgttggaccaacaatggaacgtggcgtcggatcaaacggtctcactatccatgcttagaggagtcaggagtgaaagaccgagcatgtgtagaggcatcagatcaccggagatggagtctaacggtctccaataaggttctagagaggtttgttttaagggtgtcgaactggtttgacaaggattgtcagactatacgctacataggggtgcatcaacgattgacaatggctacgtttgatatatacctcctccatttctttttagttgtcgctggatagttcaattttgtactatccagcgacaactaaaacgaaacggagggagtagttgccattgagttggtggaccctaacacaatggttggactggcacatgtcaggcgaggcgattcgacggtgtgcagtgatagtttttgatgttccaacatatatctctcaccttggggggctataaacatgaccttaaccggccaaataaggggggtgtggactcaaaaaagactcatctcttatagctcaagctcgatgattagcataactgctttatgaaatgcttacgttagatagactgccaattatgtgctttttcttagttcaagcctagtgtttagtgatatttgcatacctcaaaatcctgggtgcttgcgcccccatatttctattcaaagaagcttgtagtcttgtgagatcatatcaatcgtgtttgtggtgtggccaccatcatataggaaagaacatggatcacaatgttacgataaaaaacttgatagtgagaacggtggggagtaagtccgagagaggccattctgaagactcacttatgtgtggcgaaggtctaggtctattcacagagttatccgatcgagagcttagtctttacacaagcatccttgcgaggcacttcaatgacgactagggaaagcttccgcgcttcttgatacctcattaaaaaaatattggagtcgttgatcttgtcttgcgtctctatcttaatcatgcttccacgctttacttattatttaactagtttgtgtgtttatttttctagtttagatcgctaggctaagtgatatgattgatacataggttgtgtaaccactcctttgcggttgcggtagggatatgaacacacatataggtaagcctagtgtttagtgatatttgcatacctcgaagtcttgagtgcttgcacccccccaatatttgtattcaaagaagcttgtagtcttgtgagatcatatcaatcgtgtttatggtgtggccaccatcatatagtaaggaacgaggatcaccgtgttacgataaaaaacttgatagtgaaaacggtggggagtagtccgagagaggccattctgaagactcacttatgtgtggcgaatgtctaggtcttattcacagagttatccgatcgagagctttgtctttacgcaagcatccttgcgaggcacttcaatgacgactagggaaagcttccgcgcttcttgatacctcattaaaaaaaatcggagtcgttgatgtttgatgtcggtttgcgtctctatcttaatcatgcttccacgctttatttattatttaactagtttgtgtgtttatttttctagtttagattgctaggctaagtgatatgattgatacatagattgcgtgactcctttgcggttgcggtagggatatgaacacacatagttaaaatgacaattgcatgtatatatattttatttatttcatagtttataactatataaaaaattcaagttattagttttaagtatttttttaggttgtctaattcacacacttttaggcgtcatcatccccttcattacctaatgctgtaaatggtaggtctgttttttgttttctgtcgataggttctatcatatatgtagatggtgtatatctgtgtttagacaattatgtatttaaaaatctagatagatggtgcatatgtatgtgtagagaaaacttatgtattcaaaaaatgctaaaaggacgtaagagtcatggactacgctgctcttgcttatgtgtataatcacccggccaatgctagctttgattggaagaagaacgtagatctgctggagtcgtgttgttgggtgtttggttaatgttgtaggttaattaaaattggttttagaagtgaagtgtaaaggctagttttcttttattcctcgaagaagaatgtaaaaggacgtgccgctgtaatactactacatttgtt

SEQ ID NO: 15589 - DNA, 5949 bp, Zea Mays
catatagttttttttgcagtgtgaaattcatagattatttttttatcattctttgtcatgtgctcagctattcttaccacgagttgaactttgaatgctggattatagtttctaataataggttattgaatcctatggaacaaaaaaacaatgggaatttgcaataagatatatctacaactatgttaatctttccaagatatctaacacaatgttacattcctatggaatcgaggtcagtagaactgtagaagccatttcttgcaaattgggcatcctcagtcttcttttcgaacaagcaacatgggagaacttccttcctattgaaatcatgtgaacattttttttttgaaaaatcttgcaatccaaaagggccccaagactcatccaaattttaattggtatatattcattgcgaaatgttgaattggagatggagcatttaacttgtcaaactgcatccaatttgtattgtggtttctgttaatttatttttcagggattaaactagattactagaattggtatatatgcatggttggattattaaactgcattgtaattgaacttttggtacaactgtcattctcagatttattggaaggtagccttgagtccctggagcctgatcccctgtactccatggttcagttgttactattatacacaaaaagccggctgcctttttatctctatgtttgtgttgatgcctatccatcaccccaatatgcctttaattgctgatgatattgatatttgattaatgattagaccactcatacatttttttatgcttaacatatagatgcacatcatcttactgcttagcctcctactttttcatatctcaatgtgctgatattagtgctaaatatttctaaaggtcatttgggattgtaatgccagagcatttatgataccatatacacccttcttcttaatataaagatgcgcagctctcctgcatttttcgaaaaaaaaattccagggacatgtcagtcacctggaatctcgacctgtgtagtcattgtacatgatctcatggttgcatgctctcttggtatttctggactgaggattccaaatgataaaatcagataattttttggacttccaagaatttaatgtcccgaatattctgtagaaatataaattggccactagctgcaaatatggagatggaggagggagtgattgttggtgaaattgttataatgatttacatcaatatcaaaatatggagtgcacgaacatgctggacagcaagaacaaactgccgcattatacttatttaagctatattggtcagactaattccacggtatcccaaggatggtgcaagaggaagcccatactgcgctgccctgtggaggtcgcgagcatgggaaatcagttgaggatgggctgagctagtaaagggttgttttctgacaaggtaccaaatctgctagggcttgcttgtcgtcggttcatccatgaggtatacgcgtgtaggcgtccacgaatttttcaaatgagtgccagagttttgagaccctgactaccaataaccctttcaaagatttagtttatttagaggcaaacatgcctcacaaagtcacaacctcataaaatctacgagcttttatttacaaatacgtctcgataatgaagtttggagacaacaagtatcacatgtactgaaaagacacttctgtgatctcatcatgccaacggagggattctgtaacatgttacaacagaaatacaaaatagtggccacaagcatacaacggagaacatgtcatgtcaagtatttttaatggcatggaacatttctctcttttttaccatgaaagctcgagcctcgagcgaacactgcctcctgattcacactgttttgtgtttagccagagggattaggtttggcagctcgacaaggttagcctacgcaatatggccaatgattaatctcctcctccccaccccccaaaaaaataaaaaaaaaaattgccttgggcttttgggcctagatgtgagcccgagattatggatttcttcctgggcctgcctcttggccaatactcctacaccatctccttacagcagccccaacacagtggctttggtgtatggtttgaaagaatggttgttaaggctcagatgaaaaaatgggtgtcctgcaggtgacagtgatatctgcagaagctatgttagtttcaagagaaagaaggtgaggaccacaaaaattattagggaagtagagaaaaggagagagccgtgtggacaataaaaaaccacaactgtgctggatatttaaaagttcttcatttccatttgaacctactgtttttgaatgaaactgccacggccatgttttatattacaaaagtgagcccagttccacgtgaagatcgaagttgtcgagtactccgtccggtcaaaagtgcccgatgttttggatgcgtacttcaaccattattttatctggctacatttataaaaatctagcaagtacataagattcgaacagagatctgtgtatcttaaaacttagttgttatccgtagttaaactttcacaagcttgtcccgatctcttctccaaaagggccgggaccggctgaagtattattaaataatactcccttcgtttctgagttaagatgtttatgacaggataattactttatttttaaactaattagcttgttctaaacactatatactctgtctcttcattttgaatcgaattgtataagccgttttagttttgccataagttaaacttttctatttgtttaccaagtttatgaaaaatatatatattaatatctaaatatcaaataatgcactattaaaatatatttcattgtatatctgatgaatcttgttttaatatttcattatattattttaaagttgcttgcattattaaacaaaaaatgccgcgtcgaagaactcgaccagggggagaggtacaccattagcctataggctggatagcaaaaacaaggccacgtataacttgctgtaggtgactttttgctctcgagtaaaattatctcgacgagattctcagtttatcgtgggtcaactggtcatgctcactagatggtattaatggtaggaaaatgaatcctcggcagtatgattttgatgtttgattactagtgtttttgatatactccctccgtttctttttatttgtcgctggatagtacaaaattacactatccagcgacaaataaaaagaaacggagtactatccagcgacaaataaaaagaaacggagggagtagtttaaaggatgtaaagtagacttgaaatcaggtaagtaaagtgatgatccgaatgatcaacctctcaagcaagactttagaagcaacattgaagacttgaaaaaggctacaaaagtccaatacataatatagagccaaatcgggcgaaggtaatgaagaaacaaagtaaaagaggattctatagagcatccaatcctgtggggcgttagaccctgaggagcctcggtctatatgatcgatggcatgtttggttcgctgtttaacttttgtgtctaagattagttcttcaattctagcgactaaccttagataaagtgtggtataattatccatgaatcaaacaggctccaagtaaacgctagttggcatcagcaggagcgttgaaccaacaatggtgtagtataaaggattttacttctcgtgctcagaggagcattgtatcaagtgttggaccaacaatggaacgtggcgtcggatcaaacggtctcactatccatgcttagaggagtcaggagtgaaagaccgagcatgtgtagaggcatcagatcaccggagatggagtctaacggtctccaataaggttctagagaggtttgttttaagggtgtcgaactggtttgacaaggattgtcagactatacgctacataggggtgcatcaacgattgacaatggctacgtttgatatatacctcctccatttctttttagttgtcgctggatagttcaattttgtactatccagcgacaactaaaacgaaacggagggagtagttgccattgagttggtggaccctaacacaatggttggactggcacatgtcaggcgaggcgattcgacggtgtgcagtgatagtttttgatgttccaacatatatctctcaccttggggggctataaacatgaccttaaccggccaaataaggggggtgtggactcaaaaaagactcatctcttatagctcaagctcgatgattagcataactgctttatgaaatgcttacgttagatagactgccaattatgtgctttttcttagttcaagcctagtgtttagtgatatttgcatacctcaaaatcctgggtgcttgcgcccccatatttctattcaaagaagcttgtagtcttgtgagatcatatcaatcgtgtttgtggtgtggccaccatcatataggaaagaacatggatcacaatgttacgataaaaaacttgatagtgagaacggtggggagtaagtccgagagaggccattctgaagactcacttatgtgtggcgaaggtctaggtctattcacagagttatccgatcgagagcttagtctttacacaagcatccttgcgaggcacttcaatgacgactagggaaagcttccgcgcttcttgatacctcattaaaaaaatattggagtcgttgatcttgtcttgcgtctctatcttaatcatgcttccacgctttacttattatttaactagtttgtgtgtttatttttctagtttagatcgctaggctaagtgatatgattgatacataggttgtgtaaccactcctttgcggttgcggtagggatatgaacacacatataggtaagcctagtgtttagtgatatttgcatacctcgaagtcttgagtgcttgcacccccccaatatttgtattcaaagaagcttgtagtcttgtgagatcatatcaatcgtgtttatggtgtggccaccatcatatagtaaggaacgaggatcaccgtgttacgataaaaaacttgatagtgaaaacggtggggagtagtccgagagaggccattctgaagactcacttatgtgtggcgaatgtctaggtcttattcacagagttatccgatcgagagctttgtctttacgcaagcatccttgcgaggcacttcaatgacgactagggaaagcttccgcgcttcttgatacctcattaaaaaaaatcggagtcgttgatgtttgatgtcggtttgcgtctctatcttaatcatgcttccacgctttatttattatttaactagtttgtgtgtttatttttctagtttagattgctaggctaagtgatatgattgatacatagattgcgtgactcctttgcggttgcggtagggatatgaacacacatagttaaaatgacaattgcatgtatatatattttatttatttcatagtttataactatataaaaaattcaagttattagttttaagtatttttttaggttgtctaattcacacacttttaggcgtcatcatccccttcattacctaatgctgtaaatggtaggtctgttttttgttttctgtcgataggttctatcatatatgtagatggtgtatatctgtgtttagacaattatgtatttaaaaatctagatagatggtgcatatgtatgtgtagagaaaacttatgtattcaaaaaatgctaaaaggacgtaagagtcatggactacgctgctcttgcttatgtgtataatcacccggccaatgctagctttgattggaagaagaacgtagatctgctggagtcgtgttgttgggtgtttggttaatgttgtaggttaattaaaattggttttagaagtgaagtgtaaaggctagttttcttttattcctcgaagaagaatgtaaaaggacgtgccgctgtaatactactacatttgtt

SEQ ID NO: 15590 - DNA, 6409 bp, Zea Mays
tcaatcaggtttcatatagttttttttgcagtgtgaaattcatagattatttttttatcattctttgtcatgtgctcagctattcttaccacgagttgaactttgaatgctggattatagtttctaataataggttattgaatcctatggaacaaaaaaacaatgggaatttgcaataagatatatctacaactatgttaatctttccaagatatctaacacaatgttacattcctatggaatcgaggtcagtagaactgtagaagccatttcttgcaaattgggcatcctcagtcttcttttcgaacaagcaacatgggagaacttccttcctattgaaatcatgtgaacattttttttttgaaaaatcttgcaatccaaaagggccccaagactcatccaaattttaattggtatatattcattgcgaaatgttgaattggagatggagcatttaacttgtcaaactgcatccaatttgtattgtggtttctgttaatttatttttcagggattaaactagattactagaattggtatatatgcatggttggattattaaactgcattgtaattgaacttttggtacaactgtcattctcagatttattggaaggtagccttgagtccctggagcctgatcccctgtactccatggttcagttgttactattatacacaaaaagccggctgcctttttatctctatgtttgtgttgatgcctatccatcaccccaatatgcctttaattgctgatgatattgatatttgattaatgattagaccactcatacatttttttatgcttaacatatagatgcacatcatcttactgcttagcctcctactttttcatatctcaatgtgctgatattagtgctaaatatttctaaaggtcatttgggattgtaatgccagagcatttatgataccatatacacccttcttcttaatataaagatgcgcagctctcctgcatttttcgaaaaaaaaattccagggacatgtcagtcacctggaatctcgacctgtgtagtcattgtacatgatctcatggttgcatgctctcttggtatttctggactgaggattccaaatgataaaatcagataattttttggacttccaagaatttaatgtcccgaatattctgtagaaatataaattggccactagctgcaaatatggagatggaggagggagtgattgttggtgaaattgttataatgatttacatcaatatcaaaatatggagtgcacgaacatgctggacagcaagaacaaactgccgcattatacttatttaagctatattggtcagactaattccacggtatcccaaggatggtgcaagaggaagcccatactgcgctgccctgtggaggtcgcgagcatgggaaatcagttgaggatgggctgagctagtaaagggttgttttctgacaaggccagtactattgttttttttgacatacctgggtggagttgcgaactcttgtacaggcgcaggctttacttattacattgtttggattggggatatagttcacatggtgcatatgaaacggttagattggtttaaattctctacctcgtccttaaatcatttatcatactaattagttattgaaagatgaaacacccgaaccactagttcttgtaatacttccactgcttttgtgaaggatgttatgagcatcaaaccgaactgaatggatgccctgctcctgttgatcaacttgacttgaatggacggtccggtccctatttgatgtggatgcatggatggcagtaccaaatctgctagggcttgcttgtcgtcggttcatccatgaggtatacgcgtgtaggcgtccacgaatttttcaaatgagtggtatgtgttccatctcttgattggctgtctatattcgtgcattttttattatcaaacaatagaaccgctaactcacaaatactcatgttttggacaagatacagccagagttttgagaccctgactaccaataaccctttcaaagatttagtttatttagaggcaaacatgcctcacaaagtcacaacctcataaaatctacgagcttttatttacaaatacgtctcgataatgaagtttggagacaacaagtatcacatgtactgaaaagacacttctgtgatctcatcatgccaacggagggattctgtaacatgttacaacagaaatacaaaatagtggccacaagcatacaacggagaacatgtcatgtcaagtatttttaatggcatggaacatttctctcttttttaccatgaaagctcgagcctcgagcgaacactgcctcctgattcacactgttttgtgtttagccagagggattaggtttggcagctcgacaaggttagcctacgcaatatggccaatgattaatctcctcctccccaccccccaaaaaaataaaaaaaaaaattgccttgggcttttgggcctagatgtgagcccgagattatggatttcttcctgggcctgcctcttggccaatactcctacaccatctccttacagcagccccaacacagtggctttggtgtatggtttgaaagaatggttgttaaggctcagatgaaaaaatgggtgtcctgcaggtgacagtgatatctgcagaagctatgttagtttcaagagaaagaaggtgaggaccacaaaaattattagggaagtagagaaaaggagagagccgtgtggacaataaaaaaccacaactgtgctggatatttaaaagttcttcatttccatttgaacctactgtttttgaatgaaactgccacggccatgttttatattacaaaagtgagcccagttccacgtgaagatcgaagttgtcgagtactccgtccggtcaaaagtgcccgatgttttggatgcgtacttcaaccattattttatctggctacatttataaaaatctagcaagtacataagattcgaacagagatctgtgtatcttaaaacttagttgttatccgtagttaaactttcacaagcttgtcccgatctcttctccaaaagggccgggaccggctgaagtattattaaataatactcccttcgtttctgagttaagatgtttatgacaggataattactttatttttaaactaattagcttgttctaaacactatatactctgtctcttcattttgaatcgaattgtataagccgttttagttttgccataagttaaacttttctatttgtttaccaagtttatgaaaaatatatatattaatatctaaatatcaaataatgcactattaaaatatatttcattgtatatctgatgaatcttgttttaatatttcattatattattttaaagttgcttgcattattaaacaaaaaatgccgcgtcgaagaactcgaccagggggagaggtacaccattagcctataggctggatagcaaaaacaaggccacgtataacttgctgtaggtgactttttgctctcgagtaaaattatctcgacgagattctcagtttatcgtgggtcaactggtcatgctcactagatggtattaatggtaggaaaatgaatcctcggcagtatgattttgatgtttgattactagtgtttttgatatactccctccgtttctttttatttgtcgctggatagtacaaaattacactatccagcgacaaataaaaagaaacggagtactatccagcgacaaataaaaagaaacggagggagtagtttaaaggatgtaaagtagacttgaaatcaggtaagtaaagtgatgatccgaatgatcaacctctcaagcaagactttagaagcaacattgaagacttgaaaaaggctacaaaagtccaatacataatatagagccaaatcgggcgaaggtaatgaagaaacaaagtaaaagaggattctatagagcatccaatcctgtggggcgttagaccctgaggagcctcggtctatatgatcgatggcatgtttggttcgctgtttaacttttgtgtctaagattagttcttcaattctagcgactaaccttagataaagtgtggtataattatccatgaatcaaacaggctccaagtaaacgctagttggcatcagcaggagcgttgaaccaacaatggtgtagtataaaggattttacttctcgtgctcagaggagcattgtatcaagtgttggaccaacaatggaacgtggcgtcggatcaaacggtctcactatccatgcttagaggagtcaggagtgaaagaccgagcatgtgtagaggcatcagatcaccggagatggagtctaacggtctccaataaggttctagagaggtttgttttaagggtgtcgaactggtttgacaaggattgtcagactatacgctacataggggtgcatcaacgattgacaatggctacgtttgatatatacctcctccatttctttttagttgtcgctggatagttcaattttgtactatccagcgacaactaaaacgaaacggagggagtagttgccattgagttggtggaccctaacacaatggttggactggcacatgtcaggcgaggcgattcgacggtgtgcagtgatagtttttgatgttccaacatatatctctcaccttggggggctataaacatgaccttaaccggccaaataaggggggtgtggactcaaaaaagactcatctcttatagctcaagctcgatgattagcataactgctttatgaaatgcttacgttagatagactgccaattatgtgctttttcttagttcaagcctagtgtttagtgatatttgcatacctcaaaatcctgggtgcttgcgcccccatatttctattcaaagaagcttgtagtcttgtgagatcatatcaatcgtgtttgtggtgtggccaccatcatataggaaagaacatggatcacaatgttacgataaaaaacttgatagtgagaacggtggggagtaagtccgagagaggccattctgaagactcacttatgtgtggcgaaggtctaggtctattcacagagttatccgatcgagagcttagtctttacacaagcatccttgcgaggcacttcaatgacgactagggaaagcttccgcgcttcttgatacctcattaaaaaaatattggagtcgttgatcttgtcttgcgtctctatcttaatcatgcttccacgctttacttattatttaactagtttgtgtgtttatttttctagtttagatcgctaggctaagtgatatgattgatacataggttgtgtaaccactcctttgcggttgcggtagggatatgaacacacatataggtaagcctagtgtttagtgatatttgcatacctcgaagtcttgagtgcttgcacccccccaatatttgtattcaaagaagcttgtagtcttgtgagatcatatcaatcgtgtttatggtgtggccaccatcatatagtaaggaacgaggatcaccgtgttacgataaaaaacttgatagtgaaaacggtggggagtagtccgagagaggccattctgaagactcacttatgtgtggcgaatgtctaggtcttattcacagagttatccgatcgagagctttgtctttacgcaagcatccttgcgaggcacttcaatgacgactagggaaagcttccgcgcttcttgatacctcattaaaaaaaatcggagtcgttgatgtttgatgtcggtttgcgtctctatcttaatcatgcttccacgctttatttattatttaactagtttgtgtgtttatttttctagtttagattgctaggctaagtgatatgattgatacatagattgcgtgactcctttgcggttgcggtagggatatgaacacacatagttaaaatgacaattgcatgtatatatattttatttatttcatagtttataactatataaaaaattcaagttattagttttaagtatttttttaggttgtctaattcacacacttttaggcgtcatcatccccttcattacctaatgctgtaaatggtaggtctgttttttgttttctgtcgataggttctatcatatatgtagatggtgtatatctgtgtttagacaattatgtatttaaaaatctagatagatggtgcatatgtatgtgtagagaaaacttatgtattcaaaaaatgctaaaaggacgtaagagtcatggactacgctgctcttgcttatgtgtataatcacccggccaatgctagctttgattggaagaagaacgtagatctgctggagtcgtgttgttgggtgtttggttaatgttgtaggttaattaaaattggttttagaagtgaagtgtaaaggctagttttcttttattcctcgaagaagaatgtaaaaggacgtgccgctgtaatactactacatttgtt

SEQ ID NO: 15591 - DNA, 6473 bp, Zea Mays
tcaatcaggtttcatatagttttttttgcagtgtgaaattcatagattatttttttatcattctttgtcatgtgctcagctattcttaccacgagttgaactttgaatgctggattatagtttctaataataggttattgaatcctatggaacaaaaaaacaatgggaatttgcaataagatatatctacaactatgttaatctttccaagatatctaacacaatgttacattcctatggaatcgaggtcagtagaactgtagaagccatttcttgcaaattgggcatcctcagtcttcttttcgaacaagcaacatgggagaacttccttcctattgaaatcatgtgaacattttttttttgaaaaatcttgcaatccaaaagggccccaagactcatccaaattttaattggtatatattcattgcgaaatgttgaattggagatggagcatttaacttgtcaaactgcatccaatttgtattgtggtttctgttaatttatttttcagggattaaactagattactagaattggtatatatgcatggttggattattaaactgcattgtaattgaacttttggtacaactgtcattctcagatttattggaaggtagccttgagtccctggagcctgatcccctgtactccatggttcagttgttactattatacacaaaaagccggctgcctttttatctctatgtttgtgttgatgcctatccatcaccccaatatgcctttaattgctgatgatattgatatttgattaatgattagaccactcatacatttttttatgcttaacatatagatgcacatcatcttactgcttagcctcctactttttcatatctcaatgtgctgatattagtgctaaatatttctaaaggtcatttgggattgtaatgccagagcatttatgataccatatacacccttcttcttaatataaagatgcgcagctctcctgcatttttcgaaaaaaaaattccagggacatgtcagtcacctggaatctcgacctgtgtagtcattgtacatgatctcatggttgcatgctctcttggtatttctggactgaggattccaaatgataaaatcagataattttttggacttccaagaatttaatgtcccgaatattctgtagaaatataaattggccactagctgcaaatatggagatggaggagggagtgattgttggtgaaattgttataatgatttacatcaatatcaaaatatggagtgcacgaacatgctggacagcaagaacaaactgccgcattatacttatttaagctatattggtcagactaattccacggtatcccaaggatggtgcaagaggaagcccatactgcgctgccctgtggaggtcgcgagcatgggaaatcagttgaggatgggctgagctagtaaagggttgttttctgacaaggccagtactattgttttttttgacatacctgggtggagttgcgaactcttgtacaggcgcaggctttacttattacattgtttggattggggatatagttcacatggtgcatatgaaacggatgttatgagcatcaaaccgaactgaatggatgccctgctcctgttgatcaacttgacttgaatggacggtccggtccctatttgatgtggatgcatggatggcagtatgaaactagccactggatgaccattttctgcttcagtgcatcctggaaataataaagcatctattttccaccagggtgtacacgttttgcagcaataatctagactaccttttggttttagctatctcgtccattccgaatggcgtggaaaggatctacttactgtacccttggtgtcactttgtgcacatcctattctatagtagtgcactggggtacaagttgtctttttgtaaaagcggtgcaagtgttttattcatggacctactgttcttgcatgcaggtaccaaatctgctagggcttgcttgtcgtcggttcatccatgaggtatacgcgtgtaggcgtccacgaatttttcaaatgagtgccagagttttgagaccctgactaccaataaccctttcaaagatttagtttatttagaggcaaacatgcctcacaaagtcacaacctcataaaatctacgagcttttatttacaaatacgtctcgataatgaagtttggagacaacaagtatcacatgtactgaaaagacacttctgtgatctcatcatgccaacggagggattctgtaacatgttacaacagaaatacaaaatagtggccacaagcatacaacggagaacatgtcatgtcaagtatttttaatggcatggaacatttctctcttttttaccatgaaagctcgagcctcgagcgaacactgcctcctgattcacactgttttgtgtttagccagagggattaggtttggcagctcgacaaggttagcctacgcaatatggccaatgattaatctcctcctccccaccccccaaaaaaataaaaaaaaaaattgccttgggcttttgggcctagatgtgagcccgagattatggatttcttcctgggcctgcctcttggccaatactcctacaccatctccttacagcagccccaacacagtggctttggtgtatggtttgaaagaatggttgttaaggctcagatgaaaaaatgggtgtcctgcaggtgacagtgatatctgcagaagctatgttagtttcaagagaaagaaggtgaggaccacaaaaattattagggaagtagagaaaaggagagagccgtgtggacaataaaaaaccacaactgtgctggatatttaaaagttcttcatttccatttgaacctactgtttttgaatgaaactgccacggccatgttttatattacaaaagtgagcccagttccacgtgaagatcgaagttgtcgagtactccgtccggtcaaaagtgcccgatgttttggatgcgtacttcaaccattattttatctggctacatttataaaaatctagcaagtacataagattcgaacagagatctgtgtatcttaaaacttagttgttatccgtagttaaactttcacaagcttgtcccgatctcttctccaaaagggccgggaccggctgaagtattattaaataatactcccttcgtttctgagttaagatgtttatgacaggataattactttatttttaaactaattagcttgttctaaacactatatactctgtctcttcattttgaatcgaattgtataagccgttttagttttgccataagttaaacttttctatttgtttaccaagtttatgaaaaatatatatattaatatctaaatatcaaataatgcactattaaaatatatttcattgtatatctgatgaatcttgttttaatatttcattatattattttaaagttgcttgcattattaaacaaaaaatgccgcgtcgaagaactcgaccagggggagaggtacaccattagcctataggctggatagcaaaaacaaggccacgtataacttgctgtaggtgactttttgctctcgagtaaaattatctcgacgagattctcagtttatcgtgggtcaactggtcatgctcactagatggtattaatggtaggaaaatgaatcctcggcagtatgattttgatgtttgattactagtgtttttgatatactccctccgtttctttttatttgtcgctggatagtacaaaattacactatccagcgacaaataaaaagaaacggagtactatccagcgacaaataaaaagaaacggagggagtagtttaaaggatgtaaagtagacttgaaatcaggtaagtaaagtgatgatccgaatgatcaacctctcaagcaagactttagaagcaacattgaagacttgaaaaaggctacaaaagtccaatacataatatagagccaaatcgggcgaaggtaatgaagaaacaaagtaaaagaggattctatagagcatccaatcctgtggggcgttagaccctgaggagcctcggtctatatgatcgatggcatgtttggttcgctgtttaacttttgtgtctaagattagttcttcaattctagcgactaaccttagataaagtgtggtataattatccatgaatcaaacaggctccaagtaaacgctagttggcatcagcaggagcgttgaaccaacaatggtgtagtataaaggattttacttctcgtgctcagaggagcattgtatcaagtgttggaccaacaatggaacgtggcgtcggatcaaacggtctcactatccatgcttagaggagtcaggagtgaaagaccgagcatgtgtagaggcatcagatcaccggagatggagtctaacggtctccaataaggttctagagaggtttgttttaagggtgtcgaactggtttgacaaggattgtcagactatacgctacataggggtgcatcaacgattgacaatggctacgtttgatatatacctcctccatttctttttagttgtcgctggatagttcaattttgtactatccagcgacaactaaaacgaaacggagggagtagttgccattgagttggtggaccctaacacaatggttggactggcacatgtcaggcgaggcgattcgacggtgtgcagtgatagtttttgatgttccaacatatatctctcaccttggggggctataaacatgaccttaaccggccaaataaggggggtgtggactcaaaaaagactcatctcttatagctcaagctcgatgattagcataactgctttatgaaatgcttacgttagatagactgccaattatgtgctttttcttagttcaagcctagtgtttagtgatatttgcatacctcaaaatcctgggtgcttgcgcccccatatttctattcaaagaagcttgtagtcttgtgagatcatatcaatcgtgtttgtggtgtggccaccatcatataggaaagaacatggatcacaatgttacgataaaaaacttgatagtgagaacggtggggagtaagtccgagagaggccattctgaagactcacttatgtgtggcgaaggtctaggtctattcacagagttatccgatcgagagcttagtctttacacaagcatccttgcgaggcacttcaatgacgactagggaaagcttccgcgcttcttgatacctcattaaaaaaatattggagtcgttgatcttgtcttgcgtctctatcttaatcatgcttccacgctttacttattatttaactagtttgtgtgtttatttttctagtttagatcgctaggctaagtgatatgattgatacataggttgtgtaaccactcctttgcggttgcggtagggatatgaacacacatataggtaagcctagtgtttagtgatatttgcatacctcgaagtcttgagtgcttgcacccccccaatatttgtattcaaagaagcttgtagtcttgtgagatcatatcaatcgtgtttatggtgtggccaccatcatatagtaaggaacgaggatcaccgtgttacgataaaaaacttgatagtgaaaacggtggggagtagtccgagagaggccattctgaagactcacttatgtgtggcgaatgtctaggtcttattcacagagttatccgatcgagagctttgtctttacgcaagcatccttgcgaggcacttcaatgacgactagggaaagcttccgcgcttcttgatacctcattaaaaaaaatcggagtcgttgatgtttgatgtcggtttgcgtctctatcttaatcatgcttccacgctttatttattatttaactagtttgtgtgtttatttttctagtttagattgctaggctaagtgatatgattgatacatagattgcgtgactcctttgcggttgcggtagggatatgaacacacatagttaaaatgacaattgcatgtatatatattttatttatttcatagtttataactatataaaaaattcaagttattagttttaagtatttttttaggttgtctaattcacacacttttaggcgtcatcatccccttcattacctaatgctgtaaatggtaggtctgttttttgttttctgtcgataggttctatcatatatgtagatggtgtatatctgtgtttagacaattatgtatttaaaaatctagatagatggtgcatatgtatgtgtagagaaaacttatgtattcaaaaaatgctaaaaggacgtaagagtcatggactacgctgctcttgcttatgtgtataatcacccggccaatgctagctttgattggaagaagaacgtagatctgctggagtcgtgttgttgggtgtttggttaatgttgtaggttaattaaaattggttttagaagtgaagtgtaaaggctagttttcttttattcctcgaagaagaatgtaaaaggacgtgccgctgtaatactactacatttgtt

SEQ ID NO: 15592 - DNA, 3604 bp, Zea Mays
aacccagcaaggttgaataagatttacacgatggatgagaaaaactgacataagattctgttgaaattcgtggaagtcttccctgcttttcgttcctgatttacgataatctatacacttgatgtgcatctagattcttcactctcatactacacctttcctcctaactcatgtgctaacttatgaaataagttctgatttctgaacatagtttacaatctgaatatctgataattttactcagatttaccatgttgatggcaaatttggcccattcacacttgtatcactgatgggtatgtggagtggggaacacacagagcgttcggaggccacagctaacgagtctgcatcattgaatggcttagtgggtgacatggttgatgatgatgttagccatcagctgcatgcagggattatgaaatcagctcgcagggttttaatcgatgaaatattcagctctatacttccagatttaattgtttccaagaagactgagaagcaacttgctgcaaaacttaagaaccaagttactaagtctggcagtgtgagcaacaagaaggattccacggctaaggtcaaagttaacacattgtctactattccaaaaaaaggaaactcctataatacatcccaggtggattgtttagcggaaattcaatctacagcagtgcatggtaaatttgctgatatagtatcagcagtttggcaaacagtctatcacgaatccatgaataatgtatgggacgaaatactgtctgaacgtgttatggactactgtgatgtatggttacagagaaattgtatattgaatctgccctctacaagtatttccgtcatctctgatgataacataaaagcccaaggcagtcatgaattgtcaccaaaggatttagatgctactgaatgtgacatggactttccacctggatttggaccatgttggaaatctcctgagagctccctctctccatccctattagaagttaatggaagtgctaagttggatgggaagtctgaatcaagtaccacattattttctggccccttagcagtagtccagaggatgctggcaaatgaactatatatctcatcgaagcaatctttatttcactattttgaggaggttattgcagacgatataacaaattgtttatgctttggacttgaaagcaatattgatcagattggtactcctatacacgcaccagaatcacccatttcagccgaaacgtctatgcatgaaacagccaattccattgagatgactggaggcgatgtactgaatattgttgaaatagccacgtccacaagaaccagtccacttgaaatgactgtagatgaaaagctgaataccgttgaagctacaagaaccagtcgaactgaaccgacttcagttgaaacatcaactgttgctgaaatggcaacagataaaatgaccacttatcatgtggaagagcacttatccatgtcgtatgcaagggtatttgaaaagatgaacatatgtaagacagcagaattggatgagaaatttgatgaagtgcctcctggaatggagactggcttagtccctttaccacttatggacaaaaatatatatcagccttcaaagtcagtgaactctattcctttgatttctagatatataacattggctctctgtcggcaaaaactacatgagaatgtcgtgagagagtggacatatctcttctcagatacaattagcaagtgcttgggctcatggtacaccaggagaaatgctgtacctaaaagcgcagacggatcatcaaaactcaaagaaaaaacatactacaggaagaggaaattcgagaaaacatgtcaagcaaaatcatcaaaaagaccagtggaaatctcaatggacgagcagctttcaaaacctctctgtcagcttgttgaccgcaagatttatgtgaaaaatatccaagaaccaaacaaatctttgacatcaaagagagtttcatttgtggacaagccctccgaaaaaggagccaaaactgtggctaatgatgcttatgatttgaatatccagcaagatctgacactcctttccagtgaggtgccaaaaagagccaggtcatctcatccaactaagaagcatatggttgctaacaggacacctacggtgaatgataatgtggcgaataatagtatgctcacgaaacatgtcaagaaaaaaaagggcaggaacatttccagtgagaccagtcagaaggtaaaaccggtgatctcatgcccagaatcagatggttgtgctagagcttccattaatggatgggagtggcgcaattgggcacggaatgctactccgtcggaaagggctcgtgtgagagggtaccatgttcggactattctttctgcctcaaatgataatgtgtggaaaaattctcaagcaaaggtttcatctgcaagaacaaatcgggttaaactgcgaaatctgttagcagccgctgaaggttctgaactgctgaaaattacccaaatgaaggcaaggaaaaagcgtttgcgttttcaaaggagcaagatccatgattggggtctggtcgcacttgagtcgatcgaagcagaagactttgtaatagaatatgttggtcaactgattcaccggcgggtatctgacatacgtgagtctcaatatgagaagagtgggattggaagcagttacctctttcgcttggatgatgattttgtggtcgatgccactaagcgtggtgggttagcaaggttcataaatcattcttgtgagccaaattgctacacaaaggtgatcactgttgatggacagaagaagattttcatttatgcaaagaggcgtatatatgccggtgaggaaatcacatataattacaaatttccattggaggaaaaaaagataccgtgccattgtggttctcggaggtaaatctgttaatcactatacaggaggcagaaggcttttcttttttgtcagctgagacctatttaataagataatgtgttgcaaatggtgttacgggtattaaatttggccacccttgtagtattattgatgttattggcactacttgcatgtctacataataaaaaaatcggagccaacataaaatgattttcgtactaaactgtttataatgcgagattataatcaaagtttttctaggtgctaggcggaatctaggcgatgacccttagcctagggcctagcctaggctagcctaggcgttttgccaacttatataatatatacatttatagataaaaaatagggaaggaccagtagatataccttaggtcctttgtccttgcaaatctgctgatcactgaatcctcaagcactgctgcaatagaagtggacaacacttttagatgcaattgggcatcaatacaagtgataaaaaaaaggaaatagcaagttagatacttatctgaggtctgacccttctcccatccattaagtactgatcaacaacataggatagccttttgaaatcacaaacacgaagggacagcaggcagcaacacatataaaatgcatagcagactagcagtaggcagtagcagtaccttacatcacatgattcagttctcacaattcacaagtcacaac

SEQ ID NO: 15593 - DNA, 1100 bp, Zea Mays
aagcccaatagcttcaaccgccagcccatcaaaggtgctagctccggcggccctcctcgcgtcgccccttcgccactccccatcgcaccctcctcactcagcggtccttgtcctccgctcctcctgtcgcggaaatcggaatcccctgctcggccgtcgtcgccgtcgccgcccccgccgcctcctgtcactccaccagatccatagcggctagcgctggacgccggcgcttgcaaatcgagggtcagcgcagcgaatcagtgctagcggcgggcaggcaaatcagcgcggacaggtcgcgtattggggtcgaattggaccgacgcgtccgcgcgggcaaatcctagaggccgtgctcgtgccgtactgatacggctgcggcctgccggccgacgttgctcatttgcgcacaggacaggcgacggtctccagctcgagttcggcgccccgggcggctggcagcagcagaagagcagggcctggatgctgaaccaatggtgtcaggctttggctgctcttacgctgtcactggaaggaagcgcgtaaagttgttggcagccgagtcatcggatggtgctccgagtggcatcacatgccttccgattgtggtgatcaaacacaacacactggtgtgtttgctgcaatgcaagaatacacctgttccactggtaacaatggtgtgatttatccacaatctgggattagccattcatctggtcaaaatggggcacagggcacatacttgcaacaccaacattttgaaggctgcatgtatatgagcgggaatggacagatgtgcggaccttacctgcctgaacaactgtatgaggggctatctagtggtttcttgcctcaaagccttgctatctatgctgtttttggtgggaaaacagtcgatcctgtgcaattgatctttctgaaacaattcctttcacaatggaatgtcggtgccgtggcttccaccccaaatgtatcgacagagacagagagagtgacttcccatgctaaaatggtttttccagattctctttcaagtgaagaatcatgctggatgtttgaggatgcagaaggttgccgacaagggccacattctcttgctg

SEQ ID NO: 15594 - DNA, 1003 bp, Zea Mays
aagcccaatagcttcaaccgccagcccatcaaaggtgctagctccggcggccctcctcgcgtcgccccttcgccactccccatcgcaccctcctcactcagcggtccttgtcctccgctcctcctgtcgcggaaatcggaatcccctgctcggccgtcgtcgccgtcgccgcccccgccgcctcctgtcactccaccagatccatagcggctagcgctggacgccggcgcttgcaaatcgagggtcagcgcagcgaatcagtgctagcggcgggcaggcaaatcagcgcggacaggtcgcgtattggggtcgaattggaccgacgcgtccgcgcgggcaaatcctagaggccgtgctcgtgccgtactgatacggctgcggcctgccggccgacgttgctcatttgcgcacaggacaggcgacggtctccagctcgagttcggcgccccgggcggctggcagcagcagaagagcaggtgctccgagtggcatcacatgccttccgattgtggtgatcaaacacaacacactggtgtgtttgctgcaatgcaagaatacacctgttccactggtaacaatggtgtgatttatccacaatctgggattagccattcatctggtcaaaatggggcacagggcacatacttgcaacaccaacattttgaaggctgcatgtatatgagcgggaatggacagatgtgcggaccttacctgcctgaacaactgtatgaggggctatctagtggtttcttgcctcaaagccttgctatctatgctgtttttggtgggaaaacagtcgatcctgtgcaattgatctttctgaaacaattcctttcacaatggaatgtcggtgccgtggcttccaccccaaatgtatcgacagagacagagagagtgacttcccatgctaaaatggtttttccagattctctttcaagtgaagaatcatgctggatgtttgaggatgcagaaggttgccgacaagggccacattctcttgctg

SEQ ID NO: 15595 - DNA, 1209 bp, Zea Mays
tccctctcttcctaacgacctcattgacctcatgaatttgtgtagcccaagcccaatagcttcaaccgccagcccatcaaaggtgctagctccggcggccctcctcgcgtcgccccttcgccactccccatcgcaccctcctcactcagcggtccttgtcctccgctcctcctgtcgcggaaatcggaatcccctgctcggccgtcgtcgccgtcgccgcccccgccgcctcctgtcactccaccagatccatagcggctagcgctggacgccggcgcttgcaaatcgagggtcagcgcagcgaatcagtgctagcggcgggcaggcaaatcagcgcggacaggtcgcgtattggggtcgaattggaccgacgcgtccgcgcgggcaaatcctagaggccgtgctcgtgccgtactgatacggctgcggcctgccggccgacgttgctcatttgcgcacaggacaggcgacggtctccagctcgagttcggcgccccgggcggctggcagcagcagaagagcagggcctggatgctgaaccaatggtgtcaggctttggctgctcttacgctgtcactggaaggaagcgcgtaaagttgttggcagccgagtcatcggatggtgaacccctcggctgttgcgtgccaatatgtgatgattcactgggggacttgattgagtggtgctccgagtggcatcacatgccttccgattgtggtgatcaaacacaacacactggtgtgtttgctgcaatgcaagaatacacctgttccactggtaacaatggtgtgatttatccacaatctgggattagccattcatctggtcaaaatggggcacagggcacatacttgcaacaccaacattttgaaggctgcatgtatatgagcgggaatggacagatgtgcggaccttacctgcctgaacaactgtatgaggggctatctagtggtttcttgcctcaaagccttgctatctatgctgtttttggtgggaaaacagtcgatcctgtgcaattgatctttctgaaacaattcctttcacaatggaatgtcggtgccgtggcttccaccccaaatgtatcgacagagacagagagagtgacttcccatgctaaaatggtttttccagattctctttcaagtgaagaatcatgctggatgtttgaggatgcagaaggttgccgacaagggccacattctcttgctg

SEQ ID NO: 15596 - DNA, 506 bp, Zea Mays
gccagatcagatgccaggtccatcctccaaagtccaaaccaacaacaacaaaaaacatcgagggctttttcggcttcggctccggctccggcgacggcggccgtggcttcgtgggcgatcgatcaccgtactgggacagatgcagttccaccaagccccagggacactttacctgctatgaagactttgcaggatgtgccttacagaggctgctggaagtgagatggttacaattgcaactcaaagtgaaagtctagacattggcacaccaacattctaccatgcgggacagcatttacaacttttgagacataatttctgtctctctgcacgtccattttcttttcttgtctcacatattatactctctacagtacacacataacatactcgtgtctctttcttgtcacacctcacggtgcaatcaatggctgtctacatatattttcagagatcatctcgtacgcccatatattttcagagatcatctcggaggtaacctcaag

SEQ ID NO: 15597 - DNA, 1167 bp, Zea Mays
tcctccagctgccttgcgaaccccaacacttgtgtcacaactcggttcctgctccagctccacacctccttatcgcaacgcgagcagcagttgcattggaggcgaggaggagccacgccggggctcaaggaatggccgctctccgccacctcgccgccggccccacctgccaccaccaccaccaccacggcgtcgcggcagccaccgcctccctccggctccatcgcctccccctccccttccgcccccttcgctcccgctccggctccttcaccagggtttatgcgatctccagcaatgacatcagggtcggcaccaacgtcgaggtcgacggcgcgccatggaaagttctagagttcctccacgtcaagcctggaaaaggcgctgctttcgtcaggacaaaactgcgtaactatgtaactggcaacacggtcgagaaaaccttccgtgctggaactacaggaaccatccctttcaaaggagaccaagcaatttacatacaaggatggctcccagttcgtgttcatggatctgacaacatttgaagaaagtcggttaaatgaagcagatgtcggtgacaaacaaaaatggctgaaagaggggatggactgcaatttgttgtactggaatgggaagatcattgatttcgacctcccaatcactgtgaggctgactgtaactgatactgacccaggggcaagtgatagtgcgcaaggaggaacaaagcctgcaaccctggaaactggagctgttgtcactgtgccctcttttgtgaacgtaggcgatgatattctggtggattcaagaactgggcagtatatgaatcgagcataacgaattgaagaggatttcggatttgaggagagtactgcttttttgtttgaccattttagtcccattcacttgtacaaacgccctgggtctttggccccaggaaatttacatttctgctgcatgtgaatcctcactctgattataaccatgtacatctttggtttccagatataaggaaaattgtgttcagatttttaaagctgaaatctcaaactctgattataaacatgttactactgaccacaaaacatgagcaaataacaggatcaaatgtatttataagaaccagctgccaggttaccacttgtattgttattgcgcaccaaaatgtcg

SEQ ID NO: 15598 - DNA, 1518 bp, Zea Mays
tcctccagctgccttgcgaaccccaacacttgtgtcacaactcggttcctgctccagctccacacctccttatcgcaacgcgagcagcagttgcattggaggcgaggaggagccacgccggggctcaaggaatggccgctctccgccacctcgccgccggccccacctgccaccaccaccaccaccacggcgtcgcggcagccaccgcctccctccggctccatcgcctccccctccccttccgcccccttcgctcccgctccggctccttcaccagggtttatgcgatctccagcaatgacatcagggtcggcaccaacgtcgaggtcgacggcgcgccatggaaagttctagagttcctccacgtcaagcctggaaaaggcgctgctttcgtcaggacaaaactgcgtaactatgtaactggcaacacggtcgagaaaaccttccgtgctggaagtacggtaaatcattcacacctcaaaccccacgtcttctgaacatgacaagaattcagcacttgttatattcctttccccgctctgtgcctgttctagtactacaaatgtttttttccttccttggaacaaattactgtacatgatgtagctttcttctgttacataattcaattcacaaatttcttgcttttttttcttaatttctgcggttgaactctggtatgacgtagtaccattggcctatggtggactgcccttgcttcaccaatacatgttttatgttcgctctatatccctcagtgttttactgttatgcaacgactaatagtcacttcattgaaactttcagctacaggaaccatccctttcaaaggagaccaagcaatttacatacaaggatggctcccagttcgtgttcatggatctgacaacatttgaagaaagtcggttaaatgaagcagatgtcggtgacaaacaaaaatggctgaaagaggggatggactgcaatttgttgtactggaatgggaagatcattgatttcgacctcccaatcactgtgaggctgactgtaactgatactgacccaggggcaagtgatagtgcgcaaggaggaacaaagcctgcaaccctggaaactggagctgttgtcactgtgccctcttttgtgaacgtaggcgatgatattctggtggattcaagaactgggcagtatatgaatcgagcataacgaattgaagaggatttcggatttgaggagagtactgcttttttgtttgaccattttagtcccattcacttgtacaaacgccctgggtctttggccccaggaaatttacatttctgctgcatgtgaatcctcactctgattataaccatgtacatctttggtttccagatataaggaaaattgtgttcagatttttaaagctgaaatctcaaactctgattataaacatgttactactgaccacaaaacatgagcaaataacaggatcaaatgtatttataagaaccagctgccaggttaccacttgtattgttattgcgcaccaaaatgtcg

SEQ ID NO: 15599 - DNA, 1363 bp, Zea Mays
tcctccagctgccttgcgaaccccaacacttgtgtcacaactcggttcctgctccagctccacacctccttatcgcaacgcgagcagcagttgcattggaggcgaggaggagccacgccggggctcaaggaatggccgctctccgccacctcgccgccggccccacctgccaccaccaccaccaccacggcgtcgcggcagccaccgcctccctccggctccatcgcctccccctccccttccgcccccttcgctcccgctccggctccttcaccagggtttatgcgatctccagcaatgacatcagggtcggcaccaacgtcgaggtcgacggcgcgccatggaaagttctagagttcctccacgtcaagcctggaaaaggcgctgctttcgtcaggacaaaactgcgtaactatgtaactggcaacacggtcgagaaaaccttccgtgctggaagtacggtaaatcattcacacctcaaaccccacgtcttctgaacatgacaagaattcagcacttgttatattcctttccccgctctgtgcctgttctagtactacaaatgtttttttccttccttggaacaaattactgtacatgatgtagctttcttctgttacataattcaattcacaaatttcttgcttttttttcttaatttctgcggttgaactctggtatgacgtagtaccattggcctatggtggactgcccttgcttcaccaatacatctacaggaaccatccctttcaaaggagaccaagcaatttacatacaaggatggctcccagttcgtgttcatggatctgacaacatttgaagaaagtcggttaaatgaagcagatgtcggtgacaaacaaaaatggctgaaagaggggatggactgcaatttgttgtactggaatgggaaggaggaacaaagcctgcaaccctggaaactggagctgttgtcactgtgccctcttttgtgaacgtaggcgatgatattctggtggattcaagaactgggcagtatatgaatcgagcataacgaattgaagaggatttcggatttgaggagagtactgcttttttgtttgaccattttagtcccattcacttgtacaaacgccctgggtctttggccccaggaaatttacatttctgctgcatgtgaatcctcactctgattataaccatgtacatctttggtttccagatataaggaaaattgtgttcagatttttaaagctgaaatctcaaactctgattataaacatgttactactgaccacaaaacatgagcaaataacaggatcaaatgtatttataagaaccagctgccaggttaccacttgtattgttattgcgcaccaaaatgtcg

SEQ ID NO: 15600 - DNA, 1093 bp, Zea Mays
tcctccagctgccttgcgaaccccaacacttgtgtcacaactcggttcctgctccagctccacacctccttatcgcaacgcgagcagcagttgcattggaggcgaggaggagccacgccggggctcaaggaatggccgctctccgccacctcgccgccggccccacctgccaccaccaccaccaccacggcgtcgcggcagccaccgcctccctccggctccatcgcctccccctccccttccgcccccttcgctcccgctccggctccttcaccagggtttatgcgatctccagcaatgacatcagggtcggcaccaacgtcgaggtcgacggcgcgccatggaaagttctagagttcctccacgtcaagcctggaaaaggcgctgctttcgtcaggacaaaactgcgtaactatgtaactggcaacacggtcgagaaaaccttccgtgctggaagtacgctacaggaaccatccctttcaaaggagaccaagcaatttacatacaaggatggctcccagttcgtgttcatggatctgacaacatttgaagaaagtcggttaaatgaagcagatgtcggtgacaaacaaaaatggctgaaagaggggatggactgcaatttgttgtactggaatgggaaggaggaacaaagcctgcaaccctggaaactggagctgttgtcactgtgccctcttttgtgaacgtaggcgatgatattctggtggattcaagaactgggcagtatatgaatcgagcataacgaattgaagaggatttcggatttgaggagagtactgcttttttgtttgaccattttagtcccattcacttgtacaaacgccctgggtctttggccccaggaaatttacatttctgctgcatgtgaatcctcactctgattataaccatgtacatctttggtttccagatataaggaaaattgtgttcagatttttaaagctgaaatctcaaactctgattataaacatgttactactgaccacaaaacatgagcaaataacaggatcaaatgtatttataagaaccagctgccaggttaccacttgtattgttattgcgcaccaaaatgtcg

SEQ ID NO: 15601 - DNA, 1731 bp, Zea Mays
tcctccagctgccttgcgaaccccaacacttgtgtcacaactcggttcctgctccagctccacacctccttatcgcaacgcgagcagcagttgcattggaggcgaggaggagccacgccggggctcaaggaatggccgctctccgccacctcgccgccggccccacctgccaccaccaccaccaccacggcgtcgcggcagccaccgcctccctccggctccatcgcctccccctccccttccgcccccttcgctcccgctccggctccttcaccagggtttatgcgatctccagcaatgacatcagggtcggcaccaacgtcgaggtcgacggcgcgccatggaaagttctaggtgacaagacagcattcctctcccttccttcttttatccgaaggctattcattcacccacgattgctcaaggatatgcaacactgtaccagcataagttttatggatactactcatctagtcttcattgaaaaacaaaaattacgtcgttgcgcaaaatgcacatcattgttatgcaagatatgccggttaacttctctccacccaacaacagagttcctccacgtcaagcctggaaaaggcgctgctttcgtcaggacaaaactgcgtaactatgtaactggcaacacggtcgagaaaaccttccgtgctggaagtacggtaaatcattcacacctcaaaccccacgtcttctgaacatgacaagaattcagcacttgttatattcctttccccgctctgtgcctgttctagtactacaaatgtttttttccttccttggaacaaattactgtacatgatgtagctttcttctgttacataattcaattcacaaatttcttgcttttttttcttaatttctgcggttgaactctggtatgacgtagtaccattggcctatggtggactgcccttgcttcaccaatacatgttttatgttcgctctatatccctcagtgttttactgttatgcaacgactaatagtcacttcattgaaactttcagctacaggaaccatccctttcaaaggagaccaagcaatttacatacaaggatggctcccagttcgtgttcatggatctgacaacatttgaagaaagtcggttaaatgaagcagatgtcggtgacaaacaaaaatggctgaaagaggggatggactgcaatttgttgtactggaatgggaagatcattgatttcgacctcccaatcactgtgaggctgactgtaactgatactgacccaggggcaagtgatagtgcgcaaggaggaacaaagcctgcaaccctggaaactggagctgttgtcactgtgccctcttttgtgaacgtaggcgatgatattctggtggattcaagaactgggcagtatatgaatcgagcataacgaattgaagaggatttcggatttgaggagagtactgcttttttgtttgaccattttagtcccattcacttgtacaaacgccctgggtctttggccccaggaaatttacatttctgctgcatgtgaatcctcactctgattataaccatgtacatctttggtttccagatataaggaaaattgtgttcagatttttaaagctgaaatctcaaactctgattataaacatgttactactgaccacaaaacatgagcaaataacaggatcaaatgtatttataagaaccagctgccaggttaccacttgtattgttattgcgcaccaaaatgtcg

SEQ ID NO: 15602 - DNA, 1235 bp, Zea Mays
cttaaagctcaacacattatacacacaaaaaaattagaagaagaaaaaacaaaatcttgctaacccaaccatcgaaaatgagccctaacataacttctgggcctctacgacgatgggctacaagtgtaacgggctggtccagcccaatcctccagctgccttgcgaaccccaacacttgtgtcacaactcggttcctgctccagctccacacctccttatcgcaacgcgagcagcagttgcattggaggcgaggaggagccacgccggggctcaaggaatggccgctctccgccacctcgccgccggccccacctgccaccaccaccaccaccacggcgtcgcggcagccaccgcctccctccggctccatcgcctccccctccccttccgcccccttcgctcccgctccggctccttcaccagggtttatgcgatctccagcaatgacatcagggtcggcaccaacgtcgaggtcgacggcgcgccatggaaagttctagagttcctccacgtcaagcctggaaaaggcgctgctttcgtcaggacaaaactgcgtaactatgtaactggcaacacggtcgagaaaaccttccgtgctggaactacaggaaccatccctttcaaaggagaccaagcaatttacatacaaggatggctcccagttcgtgttcatggatctgacaacatttgaagaaagtcggttaaatgaagcagatgtcggtgacaaacaaaaatggctgaaagaggggatggactgcaatttgttgtactggaatgggaaggaggaacaaagcctgcaaccctggaaactggagctgttgtcactgtgccctcttttgtgaacgtaggcgatgatattctggtggattcaagaactgggcagtatatgaatcgagcataacgaattgaagaggatttcggatttgaggagagtactgcttttttgtttgaccattttagtcccattcacttgtacaaacgccctgggtctttggccccaggaaatttacatttctgctgcatgtgaatcctcactctgattataaccatgtacatctttggtttccagatataaggaaaattgtgttcagatttttaaagctgaaatctcaaactctgattataaacatgttactactgaccacaaaacatgagcaaataacaggatcaaatgtatttataagaaccagctgccaggttaccacttgtattgttattgcgcaccaaaatgtcg

SEQ ID NO: 15603 - DNA, 1684 bp, Zea Mays
gtttcagtcgattgccatgaaaacggaaagcaaagagagcgagagggaggagataatatgaaaacaccctctgctcccgttcctcctcacaagtaccatccaacatgatccatgcaattgcaatacctcaggtgcagagcgagggagagtgcgagacacacacacacacaccaccgccccatcacacagaggcgcgcgcgccatcgccatgcgcgtgctcaacgacagccgccccaccgtcgcccccgacgcgtcgtcggcgccgccgctgctcatcacgccaacggcggcggcggggatggtcggcgtggtccagctgcagccgggcgccgccggagggagcgacgctggcttcgacgccgacatggtcgtcatcctcgccgcgctgctctgcgtcctcgtctgcgccctcggcgtcaactccctcgtccaccacttcgtgctcaactgcggccgcaccgtggccgcacctgcaccaccacacgctgccgctgccgctgctccggccactgacagtgacagcaccgggctgaagaagagggagctgaggaggatacccgtggtgctgtacgaggccaataagcagcccagcgcgtcgtcggggaccgacgacgacgacgactgcgccatctgcctcggcgagttcgacgacggcgaggagctgcgcctgctcccgggctgccaccacggcttccacgtgcaatgcatcgacgtgtggctggtcatgcacgcgtcttgcccgacgtgccggaactcgctcctggtccaccaagaccgtcacgccggcgccggcgacggcgaggcagcaacggtggcaggggaagaggcatagtgccgcgcgcagaggctcgtttatgttttgcagtttctcgtaggggctacagtgcaaaacaagccattttgttgctaaaatgttttgctatattgtttgtgttaggtttaggcactgttcgaatgcgctaaagctaataattaggtgctaaaattagttgaagacattcaaacaatctagctaatattttaaatatcagttacttttaacaaattagctagctaaatccactagcaattttagctaactaactatcattatattaaatcgtgggctaagagttttagcgcccgggttcaagaacaactaagcccagctataaccggctataacagaagctaagtcgtttaacggatttgcaaaaaaaaacagagtataaacataacacaaatggatagatgacaaatttgatagccatacatgtaggagttcagcttcacacaggactgttgcaaaatgtccgaggtcagcttaacttaaaacaaaatgtctgagctccatggtattgagaccattagttttattcacagttcacataaaatgatcgtccacatggtcaaatataacactgcagtcttagcatcaatcagaatcagaggcatatggagacttatcaaattcagaggattccattgcaatgccagcatcaccatcaccatcttctaaatgttgaagactgctgcacttgtgcttgaacatcatgcatcagagactggaggcttgttaacttcttcttcctaggcttcacatgtttctttcattttacttgtacttgagcttgtgcttgtgatgtttgttctcccagtcttgcaatggttcaacaacgtcacttggaagaggtacaataccagt

SEQ ID NO: 15604 - DNA, 2473 bp, Zea Mays
ctcacccacgcgcttctctctctcaccagcaggccacgccgccgctgcaccaccgctctccggatcatcggctgtccccctcctcctcctcctcgcccactcaccggccatccctgctgcggtgccgcgcgttcaagcaggaggccgacgacggcgacggcgacccgactgaggccgacgcgcggaagcgcaggaagggcccgatgtacaagctcaaggcggcgatccagggcctcgcgggatctcgctccgccgccgcggaggtgtatgggggagagtaccagttccagcgcgccgtcgagaatttgtgcgagccaaggttccccaatccactcacgcgcgcgcatcgctgtggtttcctgtgttgctttccaccctcgcgcgctcttcttcttcatggagccatggcaggaagcggcaacaggagatttggccgggatatggtgtctagcagcacacatttctcccaatggcagatggtctgggttggagaccacgttcctggcggcagagtcgatctgcaatgtggaggtccaatctggccaccgatgtcagctcgctccggagccaattccgattccctagcagtgacgacgttcagatgcagcttcagatgcagcgacgacctctctctccatccatggatctctaggcaactgcgaacaagggaaccaggcatcaaaatgaagggaaccaggaatcgaaacggccccgagaatcccaaagcacgagaaggggaacaagggaactaggcatcgtgaagagagcccggggtgatgaattgttacggttcatggacggagcaagcaaggagcctctccgcaaggtaaacactaacacgcgattcctcttcaatccccggtcgtttcccgagatctggtgttataacccttgtagcttcgactcctagcttcagttggggggcaataacggattcggaaattttgggctgaaagttgttccttgtgttgttgaggtgctggaggggagtggttaattgtggtgtagcgctatggtgtcaaaaggtggatggagtccgtgacattttctcattgatttattttagagctgcttttttgtgtgccataattaggcttgcccaaccggtgcaggtgacttatttagcatgctgaactgtaggtagtattctagtttgtggccgtcgtgcaagtacatatgtgttggctttcagttcaaccgtctttacagtattcggaaattgcttaaaattcagtgttgatcatagaggcagcacaaatgtttcctattcagagctggtaatggtatggtcattactctgaatcatagtatcagacaatggctggcatagtatttatccaccatgaaaacacaattagcttgcaggtctaaatttggcatcctctacatgaactgaaaccagttaacctcttacgaagtaagaatccttggccttgaacaaatcaaagctaccatgcttgatggaaccaaacatttcctcaccagtaacacatttgttgaaacaatactttcattacactccaggtacagccgtacagtgttcagcttaacctcatgatttcttactactgcaggtctaacatttacattggtaaccttttttttatctttccagcactgtcggtccagtcactattcccttatctatacttcatggtacgtaggcatgtttttatcccaattttcgccttctcactattaacttgtatgcagagtacttgctctgttccacaatttgattcagaaaaaaaaaacaaatattcacctttattgcaatcaaacaagatatcagggacttgaaagtggcgaaagaggagcaagacattgggttttatgctggttttgttggggctacctatttccttggaagggccatcagcgccatgccatggggcatgttcgctgacaagtatggaaggaagccatgcatcgtgatcagcatcctctcagtgattgtgttcaacacactgtttggacttagcacaacttactggatggcaattgtgactaggggattacttgggttgctatgtggtatacttggacccatcaaggcttatgcttcagaagtctgcaggaaagagcaccaagctctgggaatctctcttgttacatcttcacgagccatagctcttgttattgggcctgctattggaggcttccttgcacaggattccggctctcatcaagtgactcctttccctcacattgactttgcggacagatgtctcaattctagtggtggagctacgaacaacaatccgatgtcctgatcgagagcgatggagctaatgtttgaacttgtgtgtttgaacttgtgaactaaaaatgtgaactatggatgtgaacttgtgtgaatatgtgaacttatttatttagacatatgtgaatttgtgaacttatatatttggacttgtgtgaatttgtgatatgaacatatatcaatgtgtttgaaatctgtattgtatgtgat

SEQ ID NO: 15605 - DNA, 2686 bp, Zea Mays
ctcacccacgcgcttctctctctcaccagcaggccacgccgccgctgcaccaccgctctccggatcatcggctgtccccctcctcctcctcctcgcccactcaccggccatccctgctgcggtgccgcgcgttcaagcaggaggccgacgacggcgacggcgacccgactgaggccgacgcgcggaagcgcaggaagggcccgatgtacaagctcaaggcggcgatccagggcctcgcgggatctcgctccgccgccgcggaggtgtatgggggagagtaccagttccagcgcgccgtcgagaatttgtgcgagccaaggttccccaatccactcacgcgcgcgcatcgctgtggtttcctgtgttgctttccaccctcgcgcgctcttcttcttcatggagccatggcaggaagcggcaacaggagatttggccgggatatggtgtctagcagcacacatttctcccaatggcagatggtctgggttggagaccacgttcctggcggcagagtcgatctgcaatgtggaggtccaatctggccaccgatgtcagctcgctccggagccaattccgattccctagcagtgacgacgttcagatgcagcttcagatgcagcgacgacctctctctccatccatggatctctaggcaactgggaaccaggcatcaaaatgaagggaaccaggaatcgaaacggccccgagaatcccaaagcacgagaaggggaacaagggaactaggcatcgtgaagagagcccggggtgatgaattgttacggttcatggacggagcaagcaaggagcctctccgcaaggtaaacactaacacgcgattcctcttcaatccccggtcgtttcccgagatctggtgttataacccttgtagcttcgactcctagcttcagttggggggcaataacggattcggaaattttgggctgaaagttgttccttgtgttgttgaggtgctggaggggagtggttaattgtggtgtagcgctatggtgtcaaaaggtggatggagtccgtgacattttctcattgatttattttagagctgcttttttgtgtgccataattaggcttgcccaaccggtgcaggtgacttatttagcatgctgaactgtaggtagtattctagtttgtggccgtcgtgcaagtacatatgtgttggctttcagttcaaccgtctttacagtattcggaaattgcttaaaattcagtgttgatcatagaggcagcacaaatgtttcctattcagagctggtaatggtatggtcattactctgaatcatagtatcagacaatggctggcatagtatttatccaccatgaaaacacaattagcttgcaggtctaaatttggcatcctctacatgaactgaaaccagttaacctcttacgaagtaagaatccttggccttgaacaaatcaaagctaccatgcttgatggaaccaaacatttcctcaccagtaacacatttgttgaaacaatactttcattacactccaggtacagccgtacagtgttcagcttaacctcatgatttcttactactgcaggtctaacatttacattggtaaccttttttttatctttccagcactgtcggtccagtcactattcccttatctatacttcatggtacgtaggcatgtttttatcccaattttcgccttctcactattaacttgtatgcagagtacttgctctgttccacaatttgattcagaaaaaaaaaacaaatattcacctttattgcaatcaaacaagatatcagggacttgaaagtggcgaaagaggagcaagacattgggttttatgctggttttgttggggctacctatttccttggaagggccatcagcgccatgccatggggcatgttcgctgacaagtatggaaggaagccatgcatcgtgatcagcatcctctcagtgattgtgttcaacacactgtttggacttagcacaacttactggatggcaattgtgactaggggattacttgggttgctatgtggtatacttggacccatcaaggcttatgcttcagaagtctgcaggaaagagcaccaagctctgggaatctctcttgttacatcttcacgagccatagctcttgttattgggcctgctattggaggcttccttgcacaggtgaagattatggaatttagatagcagtataagttaaattcgaaatgctaatgagtgccttcatcatgtatcccttaatcataattgacctctgatgtgtaaaaaagggatagtggtcgacaaaaatatttctagcatcaggaaggtttccataattccttccttgctttgtaatatcgttgctagcagcaggatcatgtattgcatgcatttggcttccggattccggctctcatcaagtgactcctttccctcacattgactttgcggacagatgtctcaattctagtggtggagctacgaacaacaatccgatgtcctgatcgagagcgatggagctaatgtttgaacttgtgtgtttgaacttgtgaactaaaaatgtgaactatggatgtgaacttgtgtgaatatgtgaacttatttatttagacatatgtgaatttgtgaacttatatatttggacttgtgtgaatttgtgatatgaacatatatcaatgtgtttgaaatctgtattgtatgtgat

SEQ ID NO: 15606 - DNA, 2329 bp, Zea Mays
ctcacccacgcgcttctctctctcaccagcaggccacgccgccgctgcaccaccgctctccggatcatcggctgtccccctcctcctcctcctcgcccactcaccggccatccctgctgcggtgccgcgcgttcaagcaggaggccgacgacggcgacggcgacccgactgaggccgacgcgcggaagcgcaggaagggcccgatgtacaagctcaaggcggcgatccagggcctcgcgggatctcgctccgccgccgcggaggtgtatgggggagagtaccagttccagcgcgccgtcgagaatttgtgcgagccaaggttccccaatccactcacgcgcgcgcatcgctgtggtttcctgtgttgctttccaccctcgcgcgctcttcttcttcatggagccatggcaggaagcggcaacaggagatttggccgggatatggtgtctagcagcacacatttctcccaatggcagatggtctgggttggagaccacgttcctggcggcagagtcgatctgcaatgtggaggtccaatctggccaccgatgtcagctcgctccggagccaattccgattccctagcagtgacgacgttcagatgcagcttcagatgcagcgacgacctctctctccatccatggatctctaggcaactgggaaccaggcatcaaaatgaagggaaccaggaatcgaaacggccccgagaatcccaaagcacgagaaggggaacaagggaactaggcatcgtgaagagagcccggggtgatgaattgttacggttcatggacggagcaagcaaggagcctctccgcaaggtaaacactaacacgcgattcctcttcaatccccggtcgtttcccgagatctggtgttataacccttgtagcttcgactcctagcttcagttggggggcaataacggattcggaaattttgggctgaaagttgttccttgtgttgttgaggtgctggaggggagtggttaattgtggtgtagcgctatggtgtcaaaaggtggatggagtccgtgacattttctcattgatttattttagagctgcttttttgtgtgccataattaggcttgcccaaccggtgcaggtgacttatttagcatgctgaactgtaggtagtattctagtttgtggccgtcgtgcaagtacatatgtgttggctttcagttcaaccgtctttacagtattcggaaattgcttaaaattcagtgttgatcatagaggcagcacaaatgtttcctattcagagctggtaatggtatggtcattactctgaatcatagtatcagacaatggctggcatagtatttatccaccatgaaaacacaattagcttgcaggtctaaatttggcatcctctacatgaactgaaaccagttaacctcttacgaagtaagaatccttggccttgaacaaatcaaagctaccatgcttgatggaaccaaacatttcctcaccagtaacacatttgttgaaacaatactttcattacactccaggtacagccgtacagtgttcagcttaacctcatgatttcttactactgcaggtctaacatttacattggtaaccttttttttatctttccagcactgtcggtccagtcactattcccttatctatacttcatgggacttgaaagtggcgaaagaggagcaagacattgggttttatgctggttttgttggggctacctatttccttggaagggccatcagcgccatgccatggggcatgttcgctgacaagtatggaaggaagccatgcatcgtgatcagcatcctctcagtgattgtgttcaacacactgtttggacttagcacaacttactggatggcaattgtgactaggggattacttgggttgctatgtggtatacttggacccatcaaggcttatgcttcagaagtctgcaggaaagagcaccaagctctgggaatctctcttgttacatcttcacgagccatagctcttgttattgggcctgctattggaggcttccttgcacaggattccggctctcatcaagtgactcctttccctcacattgactttgcggacagatgtctcaattctagtggtggagctacgaacaacaatccgatgtcctgatcgagagcgatggagctaatgtttgaacttgtgtgtttgaacttgtgaactaaaaatgtgaactatggatgtgaacttgtgtgaatatgtgaacttatttatttagacatatgtgaatttgtgaacttatatatttggacttgtgtgaatttgtgatatgaacatatatcaatgtgtttgaaatctgtattgtatgtgat

SEQ ID NO: 15607 - DNA, 1564 bp, Zea Mays
cggctctctctcacctgtctcattctcacccacgcgcttctctctctcaccagcaggccacgccgccgctgcaccaccgctctccggatcatcggctgtccccctcctcctcctcctcgcccactcaccggccatccctgctgcggtgccgcgcgttcaagcaggaggccgacgacggcgacggcgacccgactgaggccgacgcgcggaagcgcaggaagggcccgatgtacaagctcaaggcggcgatccagggcctcgcgggatctcgctccgccgccgcggaggtgtatgggggagagtaccagttccagcgcgccgtcgagaatttgtgcgagccaaggttccccaatccactcacgcgcgcgcatcgctgtggtttcctgtgttgctttccaccctcgcgcgctcttcttcttcatggagccatggcaggaagcggcaacaggagatttggccgggatatggtgtctagcagcacacatttctcccaatggcagatggtctgggttggagaccacgttcctggcggcagagtcgatctgcaatgtggaggtccaatctggccaccgatgtcagctcgctccggagccaattccgattccctagcagtgacgacgttcagatgcagcttcagatgcagcgacgacctctctctccatccatggatctctaggcaactgggaaccaggcatcaaaatgaagggaaccaggaatcgaaacggccccgagaatcccaaagcacgagaaggggaacaagggaactaggcatcgtgaagagagcccggggtgatgaattgttacggttcatggacggagcaagcaaggagcctctccgcaagcactgtcggtccagtcactattcccttatctatacttcatgggacttgaaagtggcgaaagaggagcaagacattgggttttatgctggttttgttggggctacctatttccttggaagggccatcagcgccatgccatggggcatgttcgctgacaagtatggaaggaagccatgcatcgtgatcagcatcctctcagtgattgtgttcaacacactgtttggacttagcacaacttactggatggcaattgtgactaggggattacttgggttgctatgtggtatacttggacccatcaaggcttatgcttcagaagtctgcaggaaagagcaccaagctctgggaatctctcttgttacatcttcacgagccatagctcttgttattgggcctgctattggaggcttccttgcacaggattccggctctcatcaagtgactcctttccctcacattgactttgcggacagatgtctcaattctagtggtggagctacgaacaacaatccgatgtcctgatcgagagcgatggagctaatgtttgaacttgtgtgtttgaacttgtgaactaaaaatgtgaactatggatgtgaacttgtgtgaatatgtgaacttatttatttagacatatgtgaatttgtgaacttatatatttggacttgtgtgaatttgtgatatgaacatatatcaatgtgtttgaaatctgtattgtatgtgat

SEQ ID NO: 15608 - DNA, 1630 bp, Zea Mays
cctaaatccaatgccacgcgcggctctctctcacctgtctcattctcacccacgcgcttctctctctcaccagcaggccacgccgccgctgcaccaccgctctccggatcatcggctgtccccctcctcctcctcctcgcccactcaccggccatccctgctgcggtgccgcgcgttcaagcaggaggccgacgacggcgacggcgacccgactgaggccgacgcgcggaagcgcaggaagggcccgatgtacaagctcaaggcggcgatccagggcctcgcgggatctcgctccgccgccgcggaggtgtatgggggagagtaccagttccagcgcgccgtcgagaatttgtgcgagccaaggttccccaatccactcacgcgcgcgcatcgctgtggtttcctgtgttgctttccaccctcgcgcgctcttcttcttcatggagccatggcaggaagcggcaacaggagatttggccgggatatggtgtctagcagcacacatttctcccaatggcagatggtctgggttggagaccacgttcctggcggcagagtcgatctgcaatgtggaggtccaatctggccaccgatgtcagctcgctccggagccaattccgattccctagcagtgacgacgttcagatgcagcttcagatgcagcgacgacctctctctccatccatggatctctaggcaactgcgaacaagggaaccaggcatcaaaatgaagggaaccaggaatcgaaacggccccgagaatcccaaagcacgagaaggggaacaagggaactaggcatcgtgaagagagcccggggtgatgaattgttacggttcatggacggagcaagcaaggagcctctccgcaagagtacttgctctgttccacaatttgattcagaaaaaaaaaacaaatattcacctttattgcaatcaaacaagatatcagggacttgaaagtggcgaaagaggagcaagacattgggttttatgctggttttgttggggctacctatttccttggaagggccatcagcgccatgccatggggcatgttcgctgacaagtatggaaggaagccatgcatcgtgatcagcatcctctcagtgattgtgttcaacacactgtttggacttagcacaacttactggatggcaattgtgactaggggattacttgggttgctatgtggtatacttggacccatcaaggcttatgcttcagaagtctgcaggaaagagcaccaagctctgggaatctctcttgttacatcttcacgagccatagctcttgttattgggcctgctattggaggcttccttgcacaggattccggctctcatcaagtgactcctttccctcacattgactttgcggacagatgtctcaattctagtggtggagctacgaacaacaatccgatgtcctgatcgagagcgatggagctaatgtttgaacttgtgtgtttgaacttgtgaactaaaaatgtgaactatggatgtgaacttgtgtgaatatgtgaacttatttatttagacatatgtgaatttgtgaacttatatatttggacttgtgtgaatttgtgatatgaacatatatcaatgtgtttgaaatctgtattgtatgtgat

SEQ ID NO: 15609 - DNA, 1790 bp, Zea Mays
ctcacccacgcgcttctctctctcaccagcaggccacgccgccgctgcaccaccgctctccggatcatcggctgtccccctcctcctcctcctcgcccactcaccggccatccctgctgcggtgccgcgcgttcaagcaggaggccgacgacggcgacggcgacccgactgaggccgacgcgcggaagcgcaggaagggcccgatgtacaagctcaaggcggcgatccagggcctcgcgggatctcgctccgccgccgcggaggtgtatgggggagagtaccagttccagcgcgccgtcgagaatttgtgcgagccaaggttccccaatccactcacgcgcgcgcatcgctgtggtttcctgtgttgctttccaccctcgcgcgctcttcttcttcatggagccatggcaggaagcggcaacaggagatttggccgggatatggtgtctagcagcacacatttctcccaatggcagatggtctgggttggagaccacgttcctggcggcagagtcgatctgcaatgtggaggtccaatctggccaccgatgtcagctcgctccggagccaattccgattccctagcagtgacgacgttcagatgcagcttcagatgcagcgacgacctctctctccatccatggatctctaggcaactgcgaacaagggaaccaggcatcaaaatgaagggaaccaggaatcgaaacggccccgagaatcccaaagcacgagaaggggaacaagggaactaggcatcgtgaagagagcccggggtgatgaattgttacggttcatggacggagcaagcaaggagcctctccgcaagcactgtcggtccagtcactattcccttatctatacttcatgggacttgaaagtggcgaaagaggagcaagacattgggttttatgctggttttgttggggctacctatttccttggaagggccatcagcgccatgccatggggcatgttcgctgacaagtatggaaggaagccatgcatcgtgatcagcatcctctcagtgattgtgttcaacacactgtttggacttagcacaacttactggatggcaattgtgactaggggattacttgggttgctatgtggtatacttggacccatcaaggcttatgcttcagaagtctgcaggaaagagcaccaagctctgggaatctctcttgttacatcttcacgagccatagctcttgttattgggcctgctattggaggcttccttgcacagggatagtggtcgacaaaaatatttctagcatcaggaaggtttccataattccttccttgctttgtaatatcgttgctagcagcaggatcatgtattgcatgcatttggcttccgatagaattggcaatatacctattttcctacacatccaatggggccttggggacgccctccatggcaaacacagccacttccatcaccagcggtatgttcctgattcatgctgcttgctacttttatttgctacaaattggacttttttgggactactccactactgcttatacatctggtgtttgatcaagctcgtagtggacatacttgcaagtctggatattgtacaacatattacagcgtgagctacagcgtgctgaaaattttagattgtgaataatgactgaatctggaattttgtgttgtgagagctgttttggagttcttttgtggctgatctaggaagttttaagctgaggtgttggtagagtaactctctgtctggttagtttggtgctcagttcaacactaaattctgaattctgtcagg

SEQ ID NO: 15610 - DNA, 827 bp, Zea Mays
catccatccaccattatttccattttccaccgatcacacgtacacaggcctatttaaggagcgacatcccactgcaactctcctcaccactcatcaccagctagctctagcaaagcacttgccatctaccgaccgccgcattccaaacagcccgacgagctagcagagcggcaggcacctccctcctcaaggaacgccgccagcatcccctccaagtgcggcgtcagcatcccctacaccatcagcacctccaccgactgctccagggtgaactgaaccctaaacgacgacgacggcgccggcggccgcctgaagacgatccatatctatcccgccgtcgtcggcgcccgcggatcggaccgtcatgaccatatctacctacgcatgatcacgacttgcatgtctactactactactgaataaaaaacctctccgcgcacgtcgtccttgtgtttgtgtgtgtgagagagagaggagatggagagccggccatgtccttttggctgtttggtttatttttgagttcatgcggtctttatttatttccatgtacgctgcttcctcgtatacccactttaaatttgtaccatgcatgcatgttccttatgatacactcacctctttttgtttgcaaactgtgttacgcatgcgctgcaggcatatgtgaccgtgtgttccatatgtccacacgcctttttttcatgacacgtacgacgacacgcactgcatgtgctactcggatactacaaaatttgtcttaataattcagaaaatacaaaacaaaaactataaaacaaagctgggcgaggggctgatgtaccctctcc

SEQ ID NO: 15611 - DNA, 660 bp, Zea Mays
ctcaagctttgtatttcaacaggacctttataaacgaataacttaagtcggctagatttcctgatgtgaaaacgaagaaccaacagaaacggatataatggggcataatgctggtcgcacaccattcatagacatctcaaacacaagcattataggtgatcaaaatggatcaaactcgcttgtaccaatagtcgatgctaatgaatgtaagaggcaaagggataaggaaagatatgccacgatgtccattgaacaaaagaatgagaaaaataggaagcgccgtgaagcacgtcaacgaaataaagcactacccctaaagtccgagtcatctagagacattaatacgaatcagacacgtgagacggttaacgttgaaataagtcgagatgtgcatcttggttcaggtcctattaaaaacactccatcgcctggtaattctatcgaacgaaagaggcaaagggatagagaaaggcgtgcaacaatgtcggttgaacaaaggaatgagtacaataacaagcgtcgtcaaatgcgtcaacgaaataagggacaaaatgtgatgcccaatgtttcaggatgtgatgaaacccgtcaaatttaaattaatatgtatgttcatagacctactattgtaaagtaattgtattcatattttgtagatgg

SEQ ID NO: 15612 - DNA, 1868 bp, Zea Mays
ctctctctctctccccgaccttaccttctccctcacacattccactttccaccgaacaacgaccgccattctctccctctctctcttaatttctccatccacgaacgacacgcaccagctagctagctagctactagcctactactcctgtcctgacgacgactccaccgccatagacctgcgcattcgcgataatgggatgcacaggaacccagacccagcagcagcgactccgactccggccgccccgaggcagaggcagcagcttcgtcttcgtcctccgcgcgctcacgctcatcctcctcatcttgctcgccgtcttcgcacagcctgcttccagccgcaggcctctgccgctcgtcgacgaccaccacaacaacggcgtcgtcaaggccgccgccgccgccgccgccaccgacgtcatactgctgctgcctcctctacacgccgacgccgagaaggctatggtcgtcgcggcaccgtcgtccgtactgccgcccgtagaggaggacgaggatcggcggcggcattggctcgccggtggccgccaccagtggctgctcaacaagaagccccgggggaaggccccgccctccgcccccagcaaacgcaccaactgatctcaacacttcatcttgcatcatacatgatggtggcctcggccgacgaggccgtggcgtcggagctcgactcggtggccgcgctgcagtgcctgtgcagctcccgccgcgggatcgggccgctggtagacgaccggtggtccctggtgcagcgcctggaggccgaggccagggggagggacgccgacatcgccgcgctcgggagggagctccggaggctgcagcacgacaacgccaggctgagcaggcgggtcgtcaggagcaggaacgacgacgagcgtcgcaggacgcgtctgctgctctccgtgcccaaggagctggcgacgccggcggccctcgtgagccggttcgtggcggcgtccaggtcggtcggcgagttcgcggggctgctgcatggcgctggtacctgtgccagcagcagcgacgacgcagttgcagagcaggcgcggtcgtggaggaggtacgcgatcgaggcgcacctgtggcgagcgatgctgctcgctggcaccggcggcggcgacgccggcagcagtttccacgggatcatgaagccacgcgacgcgctcgacgccctgatgcagttcccacgctcggggctctcagcgttctgccgggcagcctacctggccgccgtgcagccggaggcggaggcggccgcgtgccggaacctggaccacagggccttcgtgtcccgcggcgggcacccgaggacgcggctctaccgcgcgttcgcggcggccgcgaggtccgtgtgggcgcttcgggtgctgatggcgggctgctcggagtcggagcagagtggtggtggtggtgatggtgtcaggatgttctacgcgagcagggggagcctgtacagggcggagttcatggagagcgtgcctgcccttggcgcggaagaagaccgccgcgtggagacgggtgaggagaagctcagcgtcgcatttaccgtgacgcccggtgtcaaggtcggcgacacggtggtgccgtgcagggtacttctttgccgtcgccgggagggcttcgtccggattcgatgacgactctcatcagcaagatagtttttttagtacattttgcttttgtttacgttctgtatcttggtatgggtagctcgaaatatgaatatgcaagagttacatgttgatattgccatcccaaacccaaacctcttagattatataagttagtttatgataattgataaaaagatataaaggtaaaatatcactttaatactataaataaact

SEQ ID NO: 15613 - DNA, 1883 bp, Zea Mays
cgttcctcctttacatacatatacataaacttgacagagggagaaacccaagcttttgctttcgtggttcccaatgccatgtcgccttgtcttcacagcaccaccactggccactgtcccctgcggccctgctttcctgtttcacctcccgtagtcctgctcctgctcctgcttgcatcgacttgacgccgccgccgaccgaacgtttcgagttcaggcgaggcaagggcgaaggcgtatctgccactctggtctcatcttcctcggtccgtctagagtagagttcgtcagttccaccggcaggcaggcagaggcagcagcggcagattggctttattttgttatgctaacttgatatactgctgctgctgtatagtttagtggccaatgtgacaagccgccgtcgccaagacaagcaatggagtcaccagcgccagcaagaagcgcgagggctccagccactccaacatgcaccgttccggggctcctagtgggcctcaccaagctgttgagcctcaccaaggcctgcgcggctccaacgccggcggctgacgatggcggccgcgaggcagcggcggcggcggccacgaagcccggacacgaccccggccccgacccgaggctcgtcctcgtgaggctgttcgacgcggtgtcggcgctcaagtcggggtacgtgaagctgcagcgggcgcacttcccgtacgaccccgacagggtggcctcggccgacgaggccgtggcgtcggagctcgactcggtggccgcgctgcagtgcctgtgcagctcccgccgcgggatcgggccgctggtagacgaccggtggtccctggtgcagcgcctggaggccgaggccagggggagggacgccgacatcgccgcgctcgggagggagctccggaggctgcagcacgacaacgccaggctgagcaggcgggtcgtcaggagcaggaacgacgacgagcgtcgcaggacgcgtctgctgctctccgtgcccaaggagctgacgacgccggcggccctcgtgagccggttcgtggcggcgtccaggtcggtcggcgacttcgcggggctgctgcatggcgctggtacctgtgccagcagcagcgacgacgcagttgcagagcaggcgcggtcgtggaggaggtacgcgatcgaggcgcacctgtggcgagcgatgctgctcgttggcaccggcggcggcgacgccggcagcagcttccacgggatcatgaagccacgcgacgcgctcgatgccctgatgcagttcccacgctcggggctctcggcgttctgccgggcggcctacctggccgccgtgtcgccggaggcggaggcggccgcgtgccggaacctggaccacagggccttcgtgtcccgcggcgggcacccgaggacgcggctctaccgcgcgttcgcggcggccgcgaggtccgtgtgggcgcttcgggtgctgatggcgggctgctcggagtcggagcagagtggtggtggtggtgatggtgtcaggatgttctacgcgagcagggggagcctgtacagggcggagttcatggagagcgtgcctgcccttggcgcggaagaagaccgccgcgtggagacgggtgaggagaagctcagcgtcgcatttaccgtgacgcccggtgtcaaggtcggcgacacggtggtgccgtgcagggtacttctttgccgtcgccgggagggcttcgtccggatccgatgacgactctcagcaagatagttttttttagtacattttgcttttgtttacgttctgtatcttggtatgggtagctcaaaatatgaataagcaagagttacaggttgatattgtcatcccaaactcatctatatactaatctattaaggcaactgttgataccacg

SEQ ID NO: 15614 - DNA, 2308 bp, Zea Mays
gccctggccaccttcgttcctcctttacatacatatacataaacttgacagagggagaaacccaagcttttgctttcgtggttcccaatgccatgtcgccttgtcttcacagcaccaccactggccactgtcccctgcggccctgctttcctgtttcacctcccgtagtcctgctcctgctcctgcttgcatcgacttgacgccgccgccgaccgaacgtttcgagttcaggcgaggcaagggcgaaggcgtatctgccactctggtctcatcttcctcggtccgtctagagtagagttcgtcagttccaccggcaggcaggcagaggcagcagcggcagattggctttattttgttatgctaacttgatatactgctgctgctgtatagtttagtggccaatgtgacaaggtatataaagcctagcttgacgaatgatttgttttggttgctcattattcaaatcgtttcgcttgaaaattttcaagtcggctcggcacccttcagatctatcctgctcattcagtcgtcgaccctgcacgcgatgcatttttttctctctcatctagacgtagagtcctgcgtgaattaatcagttactaataatttctactaggaaaccgcacgcattctcacaaaatgcaaaaaaaaaagtatacactgtgttgtttctgaatgcacgagtagagttttcatttatttccccaccaatggatctagttcgttaagaaaagaactttttttattcccgtcgcgcgaattcgttaataagagaaggagaagaagaggatcgatcatattctttctggatgctgcaagcagccgccgtcgccaagacaagcaatggagtcaccagcgccagcaagaagcgcgagggctccagccactccaacatgcaccgttccggggctcctagtgggcctcaccaagctgttgagcctcaccaaggcctgcgcggctccaacgccggcggctgacgatggcggccgcgaggcagcggcggcggcggccacgaagcccggacacgaccccggccccgacccgaggctcgtcctcgtgaggctgttcgacgcggtgtcggcgctcaagtcggggtacgtgaagctgcagcgggcgcacttcccgtacgaccccgacagggtggcctcggccgacgaggccgtggcgtcggagctcgactcggtggccgcgctgcagtgcctgtgcagctcccgccgcgggatcgggccgctggtagacgaccggtggtccctggtgcagcgcctggaggccgaggccagggggagggacgccgacatcgccgcgctcgggagggagctccggaggctgcagcacgacaacgccaggctgagcaggcgggtcgtcaggagcaggaacgacgacgagcgtcgcaggacgcgtctgctgctctccgtgcccaaggagctgacgacgccggcggccctcgtgagccggttcgtggcggcgtccaggtcggtcggcgacttcgcggggctgctgcatggcgctggtacctgtgccagcagcagcgacgacgcagttgcagagcaggcgcggtcgtggaggaggtacgcgatcgaggcgcacctgtggcgagcgatgctgctcgttggcaccggcggcggcgacgccggcagcagcttccacgggatcatgaagccacgcgacgcgctcgatgccctgatgcagttcccacgctcggggctctcggcgttctgccgggcggcctacctggccgccgtgtcgccggaggcggaggcggccgcgtgccggaacctggaccacagggccttcgtgtcccgcggcgggcacccgaggacgcggctctaccgcgcgttcgcggcggccgcgaggtccgtgtgggcgcttcgggtgctgatggcgggctgctcggagtcggagcagagtggtggtggtggtgatggtgtcaggatgttctacgcgagcagggggagcctgtacagggcggagttcatggagagcgtgcctgcccttggcgcggaagaagaccgccgcgtggagacgggtgaggagaagctcagcgtcgcatttaccgtgacgcccggtgtcaaggtcggcgacacggtggtgccgtgcagggtacttctttgccgtcgccgggagggcttcgtccggatccgatgacgactctcagcaagatagttttttttagtacattttgcttttgtttacgttctgtatcttggtatgggtagctcaaaatatgaataagcaagagttacaggttgatattgtcatcccaaactcatctatatactaatctattaaggcaactgttgataccacg

SEQ ID NO: 15615 - DNA, 1921 bp, Zea Mays
atgagttctcatgattcttgtgcacaaccacaaccggtggcctgcctttccatatgaacactcctatggataggatagcaatcatccggattcatgccctggccaccttcgttcctcctttacatacatatacataaacttgacagagggagaaacccaagcttttgctttcgtggttcccaatgccatgtcgccttgtcttcacagcaccaccactggccactgtcccctgcggccctgctttcctgtttcacctcccgtagtcctgctcctgctcctgcttgcatcgacttgacgccgccgccgaccgaacgtttcgagttcaggcgaggcaagggcgaaggcgtatctgccactctggtctcatcttcctcggtccgtctagagtagagttcgtcagttccaccggcaggcaggcagaggcagcagcggcagccgccgtcgccaagacaagcaatggagtcaccagcgccagcaagaagcgcgagggctccagccactccaacatgcaccgttccggggctcctagtgggcctcaccaagctgttgagcctcaccaaggcctgcgcggctccaacgccggcggctgacgatggcggccgcgaggcagcggcggcggcggccacgaagcccggacacgaccccggccccgacccgaggctcgtcctcgtgaggctgttcgacgcggtgtcggcgctcaagtcggggtacgtgaagctgcagcgggcgcacttcccgtacgaccccgacagggtggcctcggccgacgaggccgtggcgtcggagctcgactcggtggccgcgctgcagtgcctgtgcagctcccgccgcgggatcgggccgctggtagacgaccggtggtccctggtgcagcgcctggaggccgaggccagggggagggacgccgacatcgccgcgctcgggagggagctccggaggctgcagcacgacaacgccaggctgagcaggcgggtcgtcaggagcaggaacgacgacgagcgtcgcaggacgcgtctgctgctctccgtgcccaaggagctgacgacgccggcggccctcgtgagccggttcgtggcggcgtccaggtcggtcggcgacttcgcggggctgctgcatggcgctggtacctgtgccagcagcagcgacgacgcagttgcagagcaggcgcggtcgtggaggaggtacgcgatcgaggcgcacctgtggcgagcgatgctgctcgttggcaccggcggcggcgacgccggcagcagcttccacgggatcatgaagccacgcgacgcgctcgatgccctgatgcagttcccacgctcggggctctcggcgttctgccgggcggcctacctggccgccgtgtcgccggaggcggaggcggccgcgtgccggaacctggaccacagggccttcgtgtcccgcggcgggcacccgaggacgcggctctaccgcgcgttcgcggcggccgcgaggtccgtgtgggcgcttcgggtgctgatggcgggctgctcggagtcggagcagagtggtggtggtggtgatggtgtcaggatgttctacgcgagcagggggagcctgtacagggcggagttcatggagagcgtgcctgcccttggcgcggaagaagaccgccgcgtggagacgggtgaggagaagctcagcgtcgcatttaccgtgacgcccggtgtcaaggtcggcgacacggtggtgccgtgcagggtacttctttgccgtcgccgggagggcttcgtccggatccgatgacgactctcagcaagatagttttttttagtacattttgcttttgtttacgttctgtatcttggtatgggtagctcaaaatatgaataagcaagagttacaggttgatattgtcatcccaaactcatctatatactaatctattaaggcaactgttgataccacg

SEQ ID NO: 15616 - DNA, 1152 bp, Zea Mays
ccaccaagaggaaggggaacgcgcagcgcaggcggcggcgtcttcctccgcggatccctcctcttcgcggacgacgcgattccacaccgcaaaccctccctccctccctggattgatcgagctgctcgtccacctccgctccgcccctcgcctcgccatttcgtagcttgtttctttttcccttctccctccctttcggtttctgctcgattcatcaaattagtttattggaggggagggagacgttaggtgggctgggcgcctcagcgcctgcgtgctccgcctcgggagaagccgagaaggtcaaaagaaatccccaccaccaacgcaggcgactcccgcaatccaccatagcttcctattctccccgtcgccagacgcccagagccccccgcccccagctcggagcaagcaataaaaggcaaagggggctcaacgccgagccggaccagttcgacgccgacgccgacgccgacgagtcgggatcccccagggcgcccctgcctctgcattccaaggttggatcggctgtgaaagcagggttctggacgatggtggacatggcaagcgggcgttacctctggcgcacccttgttgcacagcctgcgaattcagaatccgagaaggtccggtgacgaatgctcggttgttcgtaaattgtctcgtcctgcggatggagtgccacatagatagacataggtgaaggctggtgcaatcctgttgtatcttcttgttacatactccctccgtttctttttatttgtcgctggatagtgcaaaattacactatccagcgacaaataaaaagaaacggagggagtattggtatgatggtgttggtgtgtaatatagatgttacacgggggtcaatatattgaagtaaatttgcaacattgttcatgtgttgagttgaaccttgtgtcgtgtaaaactggaagtgggtgtattctggccatgtgatctgggtccaagtttgcaggttttgtcgttcggctaaatcccttaaatgtgagacttgaaatatagaataaaagcgaagctgagtacatggaaatttgtgattgctggattgcaatatgctcagttgttaaagaagcttgttggatgcaaatgtgtacccttgttttgttgaaacgttgtttggaagaagcg

SEQ ID NO: 15617 - DNA, 1444 bp, Zea Mays
agcttttctccaccaccaagaggaaggggaacgcgcagcgcaggcggcggcgtcttcctccgcggatccctcctcttcgcggacgacgcgattccacaccgcaaaccctccctccctccctggattgatcgagctgctcgtccacctccgctccgcccctcgcctcgccatttcgtagcttgtttctttttcccttctccctccctttcggtttctgctcgattcatcaaattagtttattggaggggagggagacgttaggtgggctgggcgcctcagcgcctgcgtgctccgcctcgggagaagccgagaaggtcaaaagaaatccccaccaccaacgcaggcgactcccgcaatccaccatagcttcctattctccccgtcgccagacgcccagagccccccgcccccagctcggagcaagcaataaaaggcaaaggtgccgacttttctgaaccgcttgccctccgtccacgccatattggtcgattgctcgattcctcggtcgggggagggaccccgggcccggagaagtcagcaagagatgtgcccgctgcgggtcatcctcatcttcctctccgccaccgtcgcgggcttcttcctcgtcagggggctcaacgccgagccggaccagttcgacgccgacgccgacgccgacgagtcgggatcccccagggcgcccctgcctctgcattccaagtattgcctaattaccacgcttaaatttgctcgatgtaacaactgatttgagcaatggcgaatctgcggctcgccagccaacgcagcccactccccattacgtgcacagaggttggatcggctgtgaaagcagggttctggacgatggtggacatggcaagcgggcgttacctctggcgcacccttgttgcacagcctgcgaattcagaatccgagaaggtccggtgacgaatgctcggttgttcgtaaattgtctcgtcctgcggatggagtgccacatagatagacataggtgaaggctggtgcaatcctgttgtatcttcttgttacatactccctccgtttctttttatttgtcgctggatagtgcaaaattacactatccagcgacaaataaaaagaaacggagggagtattggtatgatggtgttggtgtgtaatatagatgttacacgggggtcaatatattgaagtaaatttgcaacattgttcatgtgttgagttgaaccttgtgtcgtgtaaaactggaagtgggtgtattctggccatgtgatctgggtccaagtttgcaggttttgtcgttcggctaaatcccttaaatgtgagacttgaaatatagaataaaagcgaagctgagtacatggaaatttgtgattgctggattgcaatatgctcagttgttaaagaagcttgttggatgcaaatgtgtacccttgttttgttgaaacgttgtttggaagaagcg

SEQ ID NO: 15618 - DNA, 3102 bp, Zea Mays
cgtctccctctcctttgccttgcccaccgagaaagaagagagagagagagaaaattcaagcaggcaacccaaaaagaagaggaaaggattggaaaagctagggttttcgccatggccgtcgcccacctcgaactcccctccctcgaatccacccatcccacgctctcctagctcccgcatctcgcatctccacaaaaagccgccgccttcgattcccctccccgctgcctcgcccccattcgagggtttcccctccccccccccctaaatcgaaacgcagcattaccgaccgagcaagcaacccccgccacccgtcttcaagggtccgagccgagcgacggcgctggcgatccagcagggcgtgagggcggcggagggcggataatcaatgtgtacgctgtgcgccgtgcagcgctggtcgcggcgcgtcgccaccatgctcccgtggctcgtcgtcccgctcatcgtcatctgggccgccacccagctgctcctcccggccgcctaccgcttcgaggtcacctccccgcgcctcgcctgcgtctccgtcctcctcctcaccctcttctggtacgagatcctcctcccgcgcctctccctctggcgcgcccgccgctctgcgcgcctccgcgaggagcgccgcgcccacgccctcgagctgcacaagctccgcaagaccgcaacgcggcgctgccgcaactgcagcaacccgtacagggaccagaaccctggcggtggtaagttcatgtgctcttactgcggtcatgtctccaagcgccccgtgcttgacctcaattcagccgggaaggcccccaccggatggccttgtgctcaggattgtggatattggctcgacttgcgctgctcctccggcaataacagctccttcttgggattctcctggcgcttgctttcgtccttttgctcgacagcaatgaggtggttattgaggaatatattcagacttacgtcctcaggagatggtgagggcttgagcatagatggtaaaaggttggcaaagagaggggagaatggaggaaaaaccgaggagagcaagaccgagaaggcgagaaggaaggcggaggagaagagactggcaaggctggagagagaaatgctggaggaagaggaaaggaagcagcgagaggagatggctaagctagtggaggaacgcaggaagctgagggatgaaaaagcagaggccgaggagcggtcaaaaagtgctacacctgtcggggagaaggatgctaagagggaggcagagaagcggcgccaggagaggaagaagaaagaggacaaggggtcaagcaagagcaattcagattgtgaggacattgataggagattggtccgagaaggcgataggaagagagactttgacagaaagagtgacttggataggcgtgagggttacaagcctcattactttgattctaacaatcacagtaataaaacaggtgagagcagatcgaaatactttggccgtatgacaggtggttttttatcttcttcaagagggtttggcagcagttcattctttggcagaagtgctcaggcccctgcccctcaagttagcaaggcaaatctgctacagctggagaaactagaaatgcatggactaattttaatcgacctgttagtccaaatgtgcatccataccctactggccttaaaaagtcatggcatcagttatttagtcgttcagcatcagtgtctccttgtcctgacgttacaacttcagctcatgatatggttcggaaggcagaaccaaatggagctcaaatatacaatgctcatacatttctctctcagtatccgcctctggactacaagccaagttcaagccagtctatgcaatttccaggttttccaccgcttaatggagcacctcccagtaacccactacctcattttcctgctggacatatgcctttctatgatgatgcagaatcaacactacttgaagaaccagagcaatttgaggacccatgctatgatccagatgcaattgcattacttgggccagtttcagaatctctagataacttcccgttggacttagattgtgggtttttctcgagtgatgttgctaaagagtcacatgggaggccttcaccaattgagtctcctctctcaagatctcgtacggttgaagaaaagcctatcgagcccccacactcctcagttgcaagaggccctggtggttccattctacccgagtctagcagtgaacaaggcacatggcaaatgtggagcacaccattggttcaggaaagtttaggtctgcaaggtcctcagagccagtggcttcgacaaaacacaaatcaattcaaccatagtgccaaccttttcagcagcggaggcggagcaataagtccccttggtactggtttgaatgacagtgatccatggctgcagaaagcacctttccagcaattgccacctgatacaccaagcctgttcctttcacatgaaatgccaggaaaattacacaatgacttggtttttgggtctccaaacaaatcagcccgtgaacgcccatttggaccgcctggttatttgtggcccaaggaggaactggcgctgaatggagctcaggacggtggcggtgggcatatcctgtcgccgtctggtggcgcacgagttggcggcggcgttggcttattttcttcagcaagtccagatgtacagtcactgtggtcattccatgaaacattcaatgaaaaagagagcatagaatgaacaaacttttataatagaaggaagggaaaaagtgtggagccaaggcttccttgcctcctctctcttgtagggttttaccgtctttaccgaggtgataagctggactgtgttccttaatgatgcaaaaaaagaagaagatatggggtcattttgtttcctagcactcaccctcacctgttaacatgcgtcgatgcactgcattaggccttgtttcacctgatgtcattttttaccccggttccgcattgtttttgtcgcgcacaggtgatccatccgtccacggctgtagttatcaactgtgtttctgggacgattttggttttatatatcacccgctaacgttcattttgtatgttatca

SEQ ID NO: 15619 - DNA, 3197 bp, Zea Mays
tcgtctccctctcctttgccttgcccaccgagaaagaagagagagagagagaaaattcaagcaggcaacccaaaaagaagaggaaaggattggaaaagctagggttttcgccatggccgtcgcccacctcgaactcccctccctcgaatccacccatcccacgctctcctagctcccgcatctcgcatctccacaaaaagccgccgccttcgattcccctccccgctgcctcgcccccattcgagggtttcccctccccccccccctaaatcgaaacgcagcattaccgaccgagcaagcaacccccgccacccgtcttcaagggtccgagccgagcgacggcgctggcgatccagcagggcgtgagggcggcggagggcggataatcaatgtgtacgctgtgcgccgtgcagcgctggtcgcggcgcgtcgccaccatgctcccgtggctcgtcgtcccgctcatcgtcatctgggccgccacccagctgctcctcccggccgcctaccgcttcgaggtcacctccccgcgcctcgcctgcgtctccgtcctcctcctcaccctcttctggtacgagatcctcctcccgcgcctctccctctggcgcgcccgccgctctgcgcgcctccgcgaggagcgccgcgcccacgccctcgagctgcacaagctccgcaagaccgcaacgcggcgctgccgcaactgcagcaacccgtacagggaccagaaccctggcggtggtaagttcatgtgctcttactgcggtcatgtctccaagcgccccgtgcttgacctcaattcagccgggaaggcccccaccggatggccttgtgctcaggattgtggatattggctcgacttgcgctgctcctccggcaataacagctccttcttgggattctcctggcgcttgctttcgtccttttgctcgacagcaatgaggtggttattgaggaatatattcagacttacgtcctcaggagatggtgagggcttgagcatagatggtaaaaggttggcaaagagaggggagaatggaggaaaaaccgaggagagcaagaccgagaaggcgagaaggaaggcggaggagaagagactggcaaggctggagagagaaatgctggaggaagaggaaaggaagcagcgagaggagatggctaagctagtggaggaacgcaggaagctgagggatgaaaaagcagaggccgaggagcggtcaaaaagtgctacacctgtcggggagaaggatgctaagagggaggcagagaagcggcgccaggagaggaagaagaaagaggacaaggggtcaagcaagagcaattcagattgtgaggacattgataggagattggtccgagaaggcgataggaagagagactttgacagaaagagtgacttggataggcgtgagggttacaagcctcattactttgattctaacaatcacagtaataaaacaggtgagagcagatcgaaatactttggccgtatgacaggtggttttttatcttcttcaagagggtttggcagcagttcattctttggcagaagtgctcaggcccctgcccctcaagttagcaaggttagtagacctgtagttcctgcaactgaccagggtaatacagtcaaaagagatgtccctcatgcagccacacaagctacaggcaaatctgctacagctggagaaactagaaatgcatggactaattttaatcgacctgtgagtaacaaggttagtccaaatgtgcatccataccctactggccttaaaaagtcatggcatcagttatttagtcgttcagcatcagtgtctccttgtcctgacgttacaacttcagctcatgatatggttcggaaggcagaaccaaatggagctcaaatatacaatgctcatacatttctctctcagtatccgcctctggactacaagccaagttcaagccagtctatgcaatttccaggttttccaccgcttaatggagcacctcccagtaacccactacctcattttcctgctggacatatgcctttctatgatgatgcagaatcaacactacttgaagaaccagagcaatttgaggacccatgctatgatccagatgcaattgcattacttgggccagtttcagaatctctagataacttcccgttggacttagattgtgggtttttctcgagtgatgttgctaaagagtcacatgggaggccttcaccaattgagtctcctctctcaagatctcgtacggttgaagaaaagcctatcgagcccccacactcctcagttgcaagaggccctggtggttccattctacccgagtctagcagtgaacaaggcacatggcaaatgtggagcacaccattggttcaggaaagtttaggtctgcaaggtcctcagagccagtggcttcgacaaaacacaaatcaattcaaccatagtgccaaccttttcagcagcggaggcggagcaataagtccccttggtactggtttgaatgacagtgatccatggctgcagaaagcacctttccagcaattgccacctgatacaccaagcctgttcctttcacatgaaatgccaggaaaattacacaatgacttggtttttgggtctccaaacaaatcagcccgtgaacgcccatttggaccgcctggttatttgtggcccaaggaggaactggcgctgaatggagctcaggacggtggcggtgggcatatcctgtcgccgtctggtggcgcacgagttggcggcggcgttggcttattttcttcagcaagtccagatgtacagtcactgtggtcattccatgaaacattcaatgaaaaagagagcatagaatgaacaaacttttataatagaaggaagggaaaaagtgtggagccaaggcttccttgcctcctctctcttgtagggttttaccgtctttaccgaggtgataagctggactgtgttccttaatgatgcaaaaaaagaagaagatatggggtcattttgtttcctagcactcaccctcacctgttaacatgcgtcgatgcactgcattaggccttgtttcacctgatgtcattttttaccccggttccgcattgtttttgtcgcgcacaggtgatccatccgtccacggctgtagttatcaactgtgtttctgggacgattttggttttatatatcacccgctaacgttcattttgtatgttatca

SEQ ID NO: 15620 - DNA, 2218 bp, Zea Mays
gcagattttgttcgtctccctctcctttgccttgcccaccgagaaagaagagagagagagagaaaattcaagcaggcaacccaaaaagaagaggaaaggattggaaaagctagggttttcgccatggccgtcgcccacctcgaactcccctccctcgaatccacccatcccacgctctcctagctcccgcatctcgcatctccacaaaaagccgccgccttcgattcccctccccgctgcctcgcccccattcgagggtttcccctccccccccccctaaatcgaaacgcagcattaccgaccgagcaagcaacccccgccacccgtcttcaagggtccgagccgagcgacggcgctggcgatccagcagggcgtgagggcggcggagggcggataatcaatgtgtacgctgtgcgccgtgcagcgctggtcgcggcgcgtcgccaccatgctcccgtggctcgtcgtcccgctcatcgtcatctgggccgccacccagctgctcctcccggccgcctaccgcttcgaggttagtccaaatgtgcatccataccctactggccttaaaaagtcatggcatcagttatttagtcgttcagcatcagtgtctccttgtcctgacgttacaacttcagctcatgatatggttcggaaggcagaaccaaatggagctcaaatatacaatgctcatacatttctctctcagtatccgcctctggactacaagccaagttcaagccagtctatgcaatttccaggttttccaccgcttaatggagcacctcccagtaacccactacctcattttcctgctggacatatgcctttctatgatgatgcagaatcaacactacttgaagaaccagagcaatttgaggacccatgctatgatccagatgcaattgcattacttgggccagtttcagaatctctagataacttcccgttggacttagattgtgggtttttctcgagtgatgttgctaaagagtcacatgggaggccttcaccaattgagtctcctctctcaagatctcgtacggttgaagaaaagcctatcgagcccccacactcctcagttgcaagaggccctggtggttccattctacccgagtctagcagtgaacaaggcacatggcaaatgtggagcacaccattggttcaggaaagtttaggtctgcaaggtcctcagagccagtggcttcgacaaaacacaaatcaattcaaccatagtgccaaccttttcagcagcggaggcggagcaataagtccccttggtactggtttgaatgacagtgatccatggctgcagaaagcacctttccagcaattgccacctgatacaccaagcctgttcctttcacatgaaatgccaggaaaattacacaatgacttggtttttgggtctccaaacaaatcagcccgtgaacgcccatttggaccgcctggttatttgtggcccaatgccacaatccttgaacatatggtcttatttatggggaactgctgttccatattttgccaaggacctttggctcagtgggaaagcttctcaccactgtgccaggcctgtcctttgtagatatagaaaatattcactagtgatggttggtgactgcatcatgtttgaccttgttgtcaatgaggaggattatagggtgttggctcaacctgttgcttcattagggaggaactggcgctgaatggagctcaggacggtggcggtgggcatatcctgtcgccgtctggtggcgcacgagttggcggcggcgttggcttattttcttcagcaagtccagatgtacagtcactgtggtcattccatgaaacattcaatgaaaaagagagcatagaatgaacaaacttttataatagaaggaagggaaaaagtgtggagccaaggcttccttgcctcctctctcttgtagggttttaccgtctttaccgaggtgataagctggactgtgttccttaatgatgcaaaaaaagaagaagatatggggtcattttgtttcctagcactcaccctcacctgttaacatgcgtcgatgcactgcattaggccttgtttcacctgatgtcattttttaccccggttccgcattgtttttgtcgcgcacaggtgatccatccgtccacggctgtagttatcaactgtgtttctgggacgattttggttttatatatcacccgctaacgttcattttgtatgttatca

SEQ ID NO: 15621 - DNA, 5394 bp, Zea Mays
accgtcaatccgctacgccacagcaacgaccaaccggagccgccgccgccgccgccgacggggacggggacagggaaaccaccaccaccaccaccggccatattaacagctgcgcgtgcacggtggagttctacttccgcccgcgattcgactcgactcgactgctcgttccgtctcgaccttcaggtaagcaggttgaccgtccgcgaattcaccgtatcccgggatacgtatgggttccaaagcgtccttccgcgtcacgctcctcttgctgctcctcgccgccgcctggggacctgctgcacaggccgacgacgctggtattggtaacaggctttgccatccttttggttgtcttctaatcacatcttggactccactccattatctgctgctagctgctgcaccttttttttgactacttagttaaaacccggtttccaaaccgttattagcggctaaaacttagctgagagatctagagccggtggtctatttgagaggtttggaacgggtgatctaataggccatctaattgtttgcctatatctctcaaatagctgttacttgttatctgctccaacccaattcttccttactattagttgttgttggaccatacccaattcactgccctctcactttttctccatcttgcacagctgagctcccggatcatattgctattaccttgaaggagcaggtttcttcgaccaagattcctgtccgtctcaagagtggcagcccgctgtgctcagcctgtgaaaacttcacgggcaaagctgtcagttatatcagtgagaaacagacgcaagataaggtcatgggattccttcatgacgcttgctctcagtcattctcgtttgaacagaagtgtgatgaattgatggactcttacgcaaccctcctgtttgccaagatcacggagatcaaaccagaagcgttctgcaaacagtatggcctgtgcaggggcacggctcttttctctggtgtgacaagtgacagcacatgtgtgttctgccaccacctgcttgatgaagttatgtccaaactgaaagatccggacgcggagtttgagataattcagattcttatcaaggagtgcaataagattgaaggccacgtccagcagtgcaagcgactggtcctgcaatacattcccctcatcctggtgaacggcgagaagttcctcgagaagaacgatgtttgcgcgctcgtacaggcttgtccagccacccataagaagactttcagctcagtcttgaagggagccttgttgctgagtgacgcttgaaggttggagaagaacacgcaaagcgtttagcagtggttggaaatagtgtgtccaagtgccgtgtttgtacatataattgtcatatgaatgcatgaagacgtgtcttgtgccctgcattgttttcatcttgtatcataattcataaacacgttgtatttatggacatccacagggggtgaaggttaaaatatatttgtatcataattcatataagcacattgtcttgagctacggtgcagtcagtcaatttatatccagaaaatttcagcgctggtgactagaaaccgcagatgctgcggtattttatttgcagcaaaattttaaggtttcagagcacgaaagggtaatgttttttttttcagaaacaagagaaacttccattgcatcaaagcaacacgactcatttcgttcagtggttgcttcgatcaacgaaagcattgctcctaaaatgatgtcctgatcatgcacttgcactttgaccagagaatgaattttgctcaaggtgggcacgggattcgctggatctcgcctaaacaatgactcttccaggcacatcacatggctggccgatgcaggaggcataggactgcggatgcggaagagtagagtcaacccaagccgtcaggagaggagcgggggaatggcgacgcctcgccggctcatccgggagcgcgccgaggcggcggtggctactctcgtggcagtccgcccccacgagatccccccgttgatgagcgcggccgccaccttcttcttcatcctgagcgcctacttcgtggtgctgccgctgcgggacgagggcgccatctccctggggctcgacactctcccgggcctcttcgccggctccctcctcctcaccgtcgtcgctgcccccatcgcctccctcgccttctccctcccctccatccccaagcccaaggctttgatgatgatacacaggtttttcagcatatctcttcttgcattttttgtgctttggtatacctctacaccagggcagtccggacctacctcccagtcaagtgaaggaggttcagataaacctgcaggatggagaaaccagagctggttctacatagttgtgagaataagtttgttcctttgggttgctttgctaaatctcattaccatatcgtcaacttgggcaagggtaattgatgtcatggacagtgagtcaggttcaaggttatttggttttattggagctggtgctacgctagggcaactttttggttcattgttcgctgcgagtatggcatggctgggaccatttctgctcctattttcttcactcttgatggaacttgctgccctgtcatcaaaaggaatttgtcttgatggaaatcatgcttcggctgaattacatcaaacaggggcaggacaagctcctaataccatggctgatgatgaaatttcttcactagtcacttcacctagacaacctgtccaatctcaagaatccaaacctgaacttttcataatgtttgaaggtttctggctgatcttgcgatcaccctacctgatatacatatctctgtttctttggttaagtgcagttgtctcgtctgtattttactttcagaaagtgacgatagttgctactacaatatcaagcccaacagccagaaggagaacgtttgctctgataaacagctttatagcagtttttattcttgcgggacagctcactttgacgggtcatattcttacagtagctggtgtcacagttgctatctgtgcatctccctttgttgctgcctcaaatttggttgcccttgctgtatggccaacttgggttgccgtggctgtcactgaaacaattagaaaggtaacaacttatgttttgacaagacctggaagggagttattattcactgttgtctcacaggatgaaaaatacaaagcaaaggtctgtatagatgtgattgtccagaggcttggtgacgcaacagctgctggaatttacaggtggttgttcagtagccttgagaagaaaacatccaaggtcaccctgtttgcattgccgctctgcttcctgtggcttgtcattgcatttcacttgggccggctgcagactaatcttgccaggcttcaggctgcttctgctccgtcctactcctgaacaggaagctgctgcgagtgtctttggagatgtgcttccagaatgtttgaacaggcatggcgagaagtggttgtcatcaatagttagttacttagtttacacgtcttgcaggaatttcaggttttattgatggagaaaccttcagaatacagtagcaaccattactacactacagaagagtttagcatacacaaggggggagaaatagtacaccatagacatagactagcacactatatacaaattcaatatcccatttcgatgtgcactgcaggaaactgtagcatgcaatctgtgagtttattataaatgatgtagtagtagggccggatttgttgggcactgctctgcctttggaactactgctgtcctgacagacactgcatcattctgcatttcacctaccccagttcccagactaaatggctgtaaagacagattcataaaaatgtctgctttatggaacatgaacatttctttatagacaggaggagtaaagagatatctcacgttcttcgtgttaaccatataagaaaatggcaagcgacacgagttgaactataaagacgaggcagtgaatcatcggatgggcaccggcatagcacagacctctctagctagctaccttctagctgcatttcatctgctcgctccggtcctgtggttgatctgaactgtcacagcaatgcaagccatcatcagtagcaaggaggcgacagcagcatccatggccaagtgcattgccaccatgctcgccgtcgcggccatgctcacgtcggtgcagccatcggtggcggcgagcaacccggcagacgccgacgcgctccggttcccgggccgcccgggcagcaggccgcgtaaccccgtgttcccggggtacccgagaccgaggccgtcgccgccggtgtccagcggctcgtcctccccggtggtgccgtcacccatgcccggcctgccgtcgtcgtcgggtccagtgtcaccggcgccctgcgccaggcctggcgcggtggtgccgcagctgccgggcttccccggcctgccggcgggcagcgtgggcggcggctccacgccgtcgtcgccgaccgactgcgtgaccccgctcgcggggctgatgacgtgcgggacgttcctgacggggagcgagccggagacccccacgccgcagagcgagtgctgcgcgggtctcggggcgttcctcaacagctccagctcggcggcggaaggcgacgaccgcatccttcggtgcctgtgccccgtcatcctcggggacgtgaacaagatgctgcccaagccggtggaccccgtgcgcatgatgtacctgcccatcgcctgcggcgtcgtgctgccgccacaggtcctctacatctgcttcactgggcagcaaaccgcgccgctcgtcggccgcattcctgacgtctgggagaagccgacttcagccttgtcgccctgatgagcaacttgaatctgaatggaggccggccacgaatgatccgatccaatcagcatcgtcatttatagttcatataagcacacaagatcaaatttattagcagctgcgtgcctctctacaacatgcatgcttccatatatatagttgacttgatacgtatataaatagttcctatataaatttgaatatatgacagtttcaagttatcagaaattagtagcccgagaaattgaccatcaggtctcatgtaagagcatgctcttttacacgaaagaattaatatataatgtaagccaggtaattgcacttctttgagcgccgccgatcatccacagcgaaagaacactacgatccaattacctgaggaaagaaaagaaatttgacaacaaataactgcattgcaggaaataaactttctattggaatgccatttctttgtcgacgtaacttactcataaacacgtatatatgggttagcagcaaaatgcaaaatacacattacttctaacaaaaagaaggaaaaaa

SEQ ID NO: 15622 - DNA, 1732 bp, Zea Mays
aaacatttccctcacgattgattcatggctttgatgatgatacacaggtttttcagcatatctcttcttgcattttttgtgctttggtatacctctacaccagggcagtccggacctacctcccagtcaagtgaaggaggttcagataaacctgcaggatggagaaaccagagctggttctacatagttgtgagaataagtttgttcctttgggttgctttgctaaatctcattaccatatcgtcaacttgggcaagggtaattgatgtcatggacagtgagtcaggttcaaggttatttggttttattggagctggtgctacgctagggcaactttttggttcattgttcgctgcgagtatggcatggctgggaccatttctgctcctattttcttcactcttgatggaacttgctgccctgtcatcaaaaggaatttgtcttgatggaaatcatgcttcggctgaattacatcaaacaggggcaggacaagctcctaataccatggctgatgatgaaatttcttcactagtcacttcacctagacaacctgtccaatctcaagaatccaaacctgaacttttcataatgtttgaaggtttctggctgatcttgcgatcaccctacctgatatacatatctctgtttctttggttaagtgcagttgtctcgtctgtattttactttcagaaagtgacgatagttgctactacaatatcaagcccaacagccagaaggagaacgtttgctctgataaacagctttatagcagtttttattcttgcgggacagctcactttgacgggtcatattcttacagtagctggtgtcacagttgctatctgtgcatctccctttgttgctgcctcaaatttggttgcccttgctgtatggccaacttgggttgccgtggctgtcactgaaacaattagaaaggtaacaacttatgttttgacaagacctggaagggagttattattcactgttgtctcacaggatgaaaaatacaaagcaaaggtctgtatagatgtgattgtccagaggcttggtgacgcaacagctgctggaatttacaggtggttgttcagtagccttgagaagaaaacatccaaggtcaccctgtttgcattgccgctctgcttcctgtggcttgtcattgcatttcacttgggccggctgcagactaatcttgccaggcttcaggctgcttctgctccgtcctactcctgaacaggaagctgctgcgagtgtctttggagatgtgcttccagaatgtttgaacaggcatggcgagaagtggttgtcatcaatagttagttacttagtttacacgtcttgcaggaatttcaggttttattgatggagaaaccttcagaatacagtagcaaccattactacactacagaagagtttagcatacacaaggggggagaaatagtacaccatagacatagactagcacactatatacaaattcaatatcccatttcgatgtgcactgcaggaaactgtagcatgcaatctgtgagtttattataaatgatgtagtagtagggccggatttgttgggcactgctctgcctttggaactactgctgtcctgacagacactgcatcattctgcatttcacctaccccagttcccagactaaatggctgtaaagacagattcataaaaatgtctgctttatggaacatgaacatttctttatagacaggaggagtaaagaga

SEQ ID NO: 15623 - DNA, 4964 bp, Zea Mays
accgtcaatccgctacgccacagcaacgaccaaccggagccgccgccgccgccgccgacggggacggggacagggaaaccaccaccaccaccaccggccatattaacagctgcgcgtgcacggtggagttctacttccgcccgcgattcgactcgactcgactgctcgttccgtctcgaccttcaggcgggtgaggcgacctttccttccccctcaattctctgtatttttgctcgcccacccggtccgtaatctgcaatctcgccggcgatgggtgggtgggggatgtccgatcgcttgcttcgatgattgagccccccttcctccgttgctctccgtccccccaccctcccgccccgatcggcttccccagtggatctctcgtcgttcagggggttggttccatgtgttccgccggatctggaagtggggctaccctgggatcctggctaaccgaaacgaactggaattcgttttagagcaccctaccgcacgtaacagtatatttcttccttcccatggcaggtaagcaggttgaccgtccgcgaattcaccgtatcccgggatacgtatgggttccaaagcgtccttccgcgtcacgctcctcttgctgctcctcgccgccgcctggggacctgctgcacaggccgacgacgctggtattggtaacaggctttgccatccttttggttgtcttctaatcacatcttggactccactccattatctgctgctagctgctgcaccttttttttgactacttagttaaaacccggtttccaaaccgttattagcggctaaaacttagctgagagatctagagccggtggtctatttgagaggtttggaacgggtgatctaataggccatctaattgtttgcctatatctctcaaatagctgttacttgttatctgctccaacccaattcttccttactattagttgttgttggaccatacccaattcactgccctctcactttttctccatcttgcacagctgagctcccggatcatattgctattaccttgaaggagcaggtttcttcgaccaagattcctgtccgtctcaagagtggcagcccgctgtgctcagcctgtgaaaacttcacgggcaaagctgtcagttatatcagtgagaaacagacgcaagataaggtcatgggattccttcatgacgcttgctctcagtcattctcgtttgaacagaaggtgatcatcttgagcatgttttgtatgttcttataaccagttgtgtgtgtgtattgtagagagttaaaatactgccgtggttgcaagatatgttaaataaatttcataaacatttggtttccatactgcatagtacatactgctggaaggtgcccccccccccccccctaaaaatgaactactatgtgagtttaccgtaatttttctcttgacagctgcgctatccctgcagtgtgatgaattgatggactcttacgcaaccctcctgtttgccaagatcacggagatcaaaccagaagcgttctgcaaacagtatggcctgtgcaggggcacggctcttttctctggtgtgacaagtgacagcacatgtgtgttctgccaccacctgcttgatgaagttatgtccaaactgaaagatccggacgcggagtttgagataattcagattcttatcaaggagtgcaataagattgaaggccacgtccagcagtgcaagcgactggtcctgcaatacattcccctcatcctggtgaacggcgagaagttcctcgagaagaacgatgtttgcgcgctcgtacaggcttgtccagccacccataagaagactttcagctcagtcttgaagggagccttgttgctgagtgacgcttgaaggttggagaagaacacgcaaagcgtttagcagtggttggaaatagtgtgtccaagtgccgtgtttgtacatataattgtcatatgaatgcatgaagacgtgtcttgtgccctgcattgttttcatcttgtatcataattcataaacacgttgtatttatggacatccacagggggtgaaggttaaaatatatttgtatcataattcatataagcacattgtcttgagctacggtgcagtcagtcaatttatatccagaaaatttcagcgctggtgactagaaaccgcagatgctgcggtattttatttgcagcaaaattttaaggtttcagagcacgaaagggtaatgttttttttttcagaaacaagagaaacttccattgcatcaaagcaacacgactcatttcgttcagtggttgcttcgatcaacgaaagcattgctcctaaaatgatgtcctgatcatgcacttgcactttgaccagagaatgaattttgctcaaggtgggcacgggattcgctggatctcgcctaaacaatgactcttccaggcacatcacatggctggccgatgcaggaggcataggactgcggatgcggaagagtagagtcaacccaagccgtcaggagaggagcgggggaatggcgacgcctcgccggctcatccgggagcgcgccgaggcggcggtggctactctcgtggcagtccgcccccacgagatccccccgttgatgagcgcggccgccaccttcttcttcatcctgagcgcctacttcgtggtgctgccgctgcgggacgagggcgccatctccctggggctcgacactctcccgggcctcttcgccggctccctcctcctcaccgtcgtcgctgcccccatcgcctccctcgccttctccctcccctccatccccaagcccaaggctttgatgatgatacacaggtttttcagcatatctcttcttgcattttttgtgctttggtatacctctacaccagggcagtccggacctacctcccaggtaatagatgttgatgaaagcttgctgttcatatccatcaatagtacattagtaccacatttccttgcaatctttggaaaactaactgtccatgaatagttctttctttcacttcaccacttcctatgtgcttcaatttttattttatttcaattttgagcaagaagggtaggcctggtgcagtggtgagagctatctcacggagtcaccaagtcgcggttcaaagcatcctctctgcatttgcgggggaaagcttgtctcggtttatctcttgcgcagaccccactcatgtgggacctccagcgctgggtttgcccttgaacttgagcaacaattcctgacacaaaagagctgttgtccttttgttctcttatccaatgatgaagtcaagtgaaggaggttcagataaacctgcaggatggagaaaccagagctggttctacatagttgtgagaataagtttgttcctttgggttgctttgctaaatctcattaccatatcgtcaacttgggcaagggtaattgatgtcatggacagtgagtcaggttcaaggttatttggttttattggagctggtgctacgctagggcaactttttggttcattgttcgctgcgagtatggcatggctgggaccatgtatgtatcattgtctttagtaagttaatgagttagtttctaatgtctcatggaatgtgacttcacatctcccaattgatcctcagttctgctcctattttcttcactcttgatggaacttgctgccctgtcatcaaaaggaatttgtcttgatggaaatcatgcttcggctgaattacatcaaacaggggcaggacaagctcctaataccatggctgatgatgaaatttcttcactagtcacttcacctagacaacctgtccaatctcaagaatccaaacctgaacttttcataatgtttgaaggtttctggctgatcttgcgatcaccctacctgatatacatatctctgtttctttggttaagtgcagttgtctcgtctgtattttactttcagaaagtgacgatagttgctactacaatatcaagcccaacagccagaaggagaacgtttgctctgataaacagctttatagcagtttttattcttgcgggacagctcactttgacgggtcatattcttacagtagctggtgtcacagttgctatctgtgcatctccctttgttgctgcctcaaatttggttgcccttgctgtatggccaacttgggttgccgtggctgtcactgaaacaattagaaaggtaacaacttatgttttgacaagacctggaagggagttattattcactgttgtctcacaggatgaaaaatacaaagcaaaggtctgtatagatgtgattgtccagaggcttggtgacgcaacagctgctggaatttacaggtggttgttcagtagccttgagaagaaaacatccaaggtcaccctgtttgcattgccgctctgcttcctgtggcttgtcattgcatttcacttgggccggctgcagactaatcttgccaggcttcaggctgcttctgctccgtcctactcctgaacaggaagctgctgcgagtgtctttggagatgtgcttccagaatgtttgaacaggcatggcgagaagtggttgtcatcaatagttagttacttagtttacacgtcttgcaggaatttcaggttttattgatggagaaaccttcagaatacagtagcaaccattactacactacagaagagtttagcatacacaaggggggagaaatagtacaccatagacatagactagcacactatatacaaattcaatatcccatttcgatgtgcactgcaggaaactgtagcatgcaatctgtgagtttattataaatgatgtagtagtagggccggatttgttgggcactgctctgcctttggaactactgctgtcctgacagacactgcatcattctgcatttcacctaccccagttcccagactaaatggctgtaaagacagattcataaaaatgtctgctttatggaacatgaacatttctttatagacaggaggagtaaagaga

SEQ ID NO: 15624 - DNA, 4883 bp, Zea Mays
accgtcaatccgctacgccacagcaacgaccaaccggagccgccgccgccgccgccgacggggacggggacagggaaaccaccaccaccaccaccggccatattaacagctgcgcgtgcacggtggagttctacttccgcccgcgattcgactcgactcgactgctcgttccgtctcgaccttcaggcgggtgaggcgacctttccttccccctcaattctctgtatttttgctcgcccacccggtccgtaatctgcaatctcgccggcgatgggtgggtgggggatgtccgatcgcttgcttcgatgattgagccccccttcctccgttgctctccgtccccccaccctcccgccccgatcggcttccccagtggatctctcgtcgttcagggggttggttccatgtgttccgccggatctggaagtggggctaccctgggatcctggctaaccgaaacgaactggaattcgttttagagcaccctaccgcacgtaacagtatatttcttccttcccatggcaggtaagcaggttgaccgtccgcgaattcaccgtatcccgggatacgtatgggttccaaagcgtccttccgcgtcacgctcctcttgctgctcctcgccgccgcctggggacctgctgcacaggccgacgacgctggtattggtaacaggctttgccatccttttggttgtcttctaatcacatcttggactccactccattatctgctgctagctgctgcaccttttttttgactacttagttaaaacccggtttccaaaccgttattagcggctaaaacttagctgagagatctagagccggtggtctatttgagaggtttggaacgggtgatctaataggccatctaattgtttgcctatatctctcaaatagctgttacttgttatctgctccaacccaattcttccttactattagttgttgttggaccatacccaattcactgccctctcactttttctccatcttgcacagctgagctcccggatcatattgctattaccttgaaggagcaggtttcttcgaccaagattcctgtccgtctcaagagtggcagcccgctgtgctcagcctgtgaaaacttcacgggcaaagctgtcagttatatcagtgagaaacagacgcaagataaggtcatgggattccttcatgacgcttgctctcagtcattctcgtttgaacagaaggtgatcatcttgagcatgttttgtatgttcttataaccagttgtgtgtgtgtattgtagagagttaaaatactgccgtggttgcaagatatgttaaataaatttcataaacatttggtttccatactgcatagtacatactgctggaaggtgcccccccccccccccctaaaaatgaactactatgtgagtttaccgtaatttttctcttgacagctgcgctatccctgcagtgtgatgaattgatggactcttacgcaaccctcctgtttgccaagatcacggagatcaaaccagaagcgttctgcaaacagtatggcctgtgcaggggcacggctcttttctctggtgtgacaagtgacagcacatgtgtgttctgccaccacctgcttgatgaagttatgtccaaactgaaagatccggacgcggagtttgagataattcagattcttatcaaggagtgcaataagattgaaggccacgtccagcagtgcaagcgactggtcctgcaatacattcccctcatcctggtgaacggcgagaagttcctcgagaagaacgatgtttgcgcgctcgtacaggcttgtccagccacccataagaagactttcagctcagtcttgaagggagccttgttgctgagtgacgcttgaaggttggagaagaacacgcaaagcgtttagcagtggttggaaatagtgtgtccaagtgccgtgtttgtacatataattgtcatatgaatgcatgaagacgtgtcttgtgccctgcattgttttcatcttgtatcataattcataaacacgttgtatttatggacatccacagggggtgaaggttaaaatatatttgtatcataattcatataagcacattgtcttgagctacggtgcagtcagtcaatttatatccagaaaatttcagcgctggtgactagaaaccgcagatgctgcggtattttatttgcagcaaaattttaaggtttcagagcacgaaagggtaatgttttttttttcagaaacaagagaaacttccattgcatcaaagcaacacgactcatttcgttcagtggttgcttcgatcaacgaaagcattgctcctaaaatgatgtcctgatcatgcacttgcactttgaccagagaatgaattttgctcaaggtgggcacgggattcgctggatctcgcctaaacaatgactcttccaggcacatcacatggctggccgatgcaggaggcataggactgcggatgcggaagagtagagtcaacccaagccgtcaggagaggagcgggggaatggcgacgcctcgccggctcatccgggagcgcgccgaggcggcggtggctactctcgtggcagtccgcccccacgagatccccccgttgatgagcgcggccgccaccttcttcttcatcctgagcgcctacttcgtggtgctgccgctgcgggacgagggcgccatctccctggggctcgacactctcccgggcctcttcgccggctccctcctcctcaccgtcgtcgctgcccccatcgcctccctcgccttctccctcccctccatccccaagcccaaggctttgatgatgatacacaggtttttcagcatatctcttcttgcattttttgtgctttggtatacctctacaccagggcagtccggacctacctcccaggtaatagatgttgatgaaagcttgctgttcatatccatcaatagtacattagtaccacatttccttgcaatctttggaaaactaactgtccatgaatagttctttctttcacttcaccacttcctatgtgcttcaatttttattttatttcaattttgagcaagaagggtaggcctggtgcagtggtgagagctatctcacggagtcaccaagtcgcggttcaaagcatcctctctgcatttgcgggggaaagcttgtctcggtttatctcttgcgcagaccccactcatgtgggacctccagcgctgggtttgcccttgaacttgagcaacaattcctgacacaaaagagctgttgtccttttgttctcttatccaatgatgaagtcaagtgaaggaggttcagataaacctgcaggatggagaaaccagagctggttctacatagttgtgagaataagtttgttcctttgggttgctttgctaaatctcattaccatatcgtcaacttgggcaagggtaattgatgtcatggacagtgagttcagtcaggttcaaggttatttggttttattggagctggtgctacgctagggcaactttttggttcattgttcgctgcgagtatggcatggctgggaccatttctgctcctattttcttcactcttgatggaacttgctgccctgtcatcaaaaggaatttgtcttgatggaaatcatgcttcggctgaattacatcaaacaggggcaggacaagctcctaataccatggctgatgatgaaatttcttcactagtcacttcacctagacaacctgtccaatctcaagaatccaaacctgaacttttcataatgtttgaaggtttctggctgatcttgcgatcaccctacctgatatacatatctctgtttctttggttaagtgcagttgtctcgtctgtattttactttcagaaagtgacgatagttgctactacaatatcaagcccaacagccagaaggagaacgtttgctctgataaacagctttatagcagtttttattcttgcgggacagctcactttgacgggtcatattcttacagtagctggtgtcacagttgctatctgtgcatctccctttgttgctgcctcaaatttggttgcccttgctgtatggccaacttgggttgccgtggctgtcactgaaacaattagaaaggtaacaacttatgttttgacaagacctggaagggagttattattcactgttgtctcacaggatgaaaaatacaaagcaaaggtctgtatagatgtgattgtccagaggcttggtgacgcaacagctgctggaatttacaggtggttgttcagtagccttgagaagaaaacatccaaggtcaccctgtttgcattgccgctctgcttcctgtggcttgtcattgcatttcacttgggccggctgcagactaatcttgccaggcttcaggctgcttctgctccgtcctactcctgaacaggaagctgctgcgagtgtctttggagatgtgcttccagaatgtttgaacaggcatggcgagaagtggttgtcatcaatagttagttacttagtttacacgtcttgcaggaatttcaggttttattgatggagaaaccttcagaatacagtagcaaccattactacactacagaagagtttagcatacacaaggggggagaaatagtacaccatagacatagactagcacactatatacaaattcaatatcccatttcgatgtgcactgcaggaaactgtagcatgcaatctgtgagtttattataaatgatgtagtagtagggccggatttgttgggcactgctctgcctttggaactactgctgtcctgacagacactgcatcattctgcatttcacctaccccagttcccagactaaatggctgtaaagacagattcataaaaatgtctgctttatggaacatgaacatttctttatagacaggaggagtaaagaga

SEQ ID NO: 15625 - DNA, 3640 bp, Zea Mays
ctcggtttcttgccgtgccgaacgaccccaagtccccaacacggaacggaaccgtcaatccgctacgccacagcaacgaccaaccggagccgccgccgccgccgccgacggggacggggacagggaaaccaccaccaccaccaccggccatattaacagctgcgcgtgcacggtggagttctacttccgcccgcgattcgactcgactcgactgctcgttccgtctcgaccttcaggtaagcaggttgaccgtccgcgaattcaccgtatcccgggatacgtatgggttccaaagcgtccttccgcgtcacgctcctcttgctgctcctcgccgccgcctggggacctgctgcacaggccgacgacgctggtattgctgagctcccggatcatattgctattaccttgaaggagcaggtttcttcgaccaagattcctgtccgtctcaagagtggcagcccgctgtgctcagcctgtgaaaacttcacgggcaaagctgtcagttatatcagtgagaaacagacgcaagataaggtcatgggattccttcatgacgcttgctctcagtcattctcgtttgaacagaagtgtgatgaattgatggactcttacgcaaccctcctgtttgccaagatcacggagatcaaaccagaagcgttctgcaaacagtatggcctgtgcaggggcacggctcttttctctggtgtgacaagtgacagcacatgtgtgttctgccaccacctgcttgatgaagttatgtccaaactgaaagatccggacgcggagtttgagataattcagattcttatcaaggagtgcaataagattgaaggccacgtccagcagtgcaagcgactggtcctgcaatacattcccctcatcctggtgaacggcgagaagttcctcgagaagaacgatgtttgcgcgctcgtacaggcttgtccagccacccataagaagactttcagctcagtcttgaagggagccttgttgctgagtgacgcttgaaggttggagaagaacacgcaaagcgtttagcagtggttggaaatagtgtgtccaagtgccgtgtttgtacatataattgtcatatgaatgcatgaagacgtgtcttgtgccctgcattgttttcatcttgtatcataattcataaacacgttgtatttatggacatccacagggggtgaaggttaaaatatatttgtatcataattcatataagcacattgtcttgagctacggtgcagtcagtcaatttatatccagaaaatttcagcgctggtgactagaaaccgcagatgctgcggtattttatttgcagcaaaattttaaggtttcagagcacgaaagggtaatgttttttttttcagaaacaagagaaacttccattgcatcaaagcaacacgactcatttcgttcagtggttgcttcgatcaacgaaagcattgctcctaaaatgatgtcctgatcatgcacttgcactttgaccagagaatgaattttgctcaaggtgggcacgggattcgctggatctcgcctaaacaatgactcttccaggcacatcacatggctggccgatgcaggaggcataggactgcggatgcggaagagtagagtcaacccaagccgtcaggagaggagcgggggaatggcgacgcctcgccggctcatccgggagcgcgccgaggcggcggtggctactctcgtggcagtccgcccccacgagatccccccgttgatgagcgcggccgccaccttcttcttcatcctgagcgcctacttcgtggtgctgccgctgcgggacgagggcgccatctccctggggctcgacactctcccgggcctcttcgccggctccctcctcctcaccgtcgtcgctgcccccatcgcctccctcgccttctccctcccctccatccccaagcccaaggctttgatgatgatacacaggtttttcagcatatctcttcttgcattttttgtgctttggtatacctctacaccagggcagtccggacctacctcccagtcaagtgaaggaggttcagataaacctgcaggatggagaaaccagagctggttctacatagttgtgagaataagtttgttcctttgggttgctttgctaaatctcattaccatatcgtcaacttgggcaagggtaattgatgtcatggacagtgagttcagtcaggttcaaggttatttggttttattggagctggtgctacgctagggcaactttttggttcattgttcgctgcgagtatggcatggctgggaccatttctgctcctattttcttcactcttgatggaacttgctgccctgtcatcaaaaggaatttgtcttgatggaaatcatgcttcggctgaattacatcaaacaggggcaggacaagctcctaataccatggctgatgatgaaatttcttcactagtcacttcacctagacaacctgtccaatctcaagaatccaaacctgaacttttcataatgtttgaaggtttctggctgatcttgcgatcaccctacctgatatacatatctctgtttctttggttaagtgcagttgtctcgtctgtattttactttcagaaagtgacgatagttgctactacaatatcaagcccaacagccagaaggagaacgtttgctctgataaacagctttatagcagtttttattcttgcgggacagctcactttgacgggtcatattcttacagtagctggtgtcacagttgctatctgtgcatctccctttgttgctgcctcaaatttggttgcccttgctgtatggccaacttgggttgccgtggctgtcactgaaacaattagaaaggtaacaacttatgttttgacaagacctggaagggagttattattcactgttgtctcacaggatgaaaaatacaaagcaaaggtctgtatagatgtgattgtccagaggcttggtgacgcaacagctgctggaatttacaggtggttgttcagtagccttgagaagaaaacatccaaggtcaccctgtttgcattgccgctctgcttcctgtggcttgtcattgcatttcacttgggccggctgcagactaatcttgccaggcttcaggctgcttctgctccgtcctactcctgaacaggaagctgctgcgagtgtctttggagatgtgcttccagaatgtttgaacaggcatggcgagaagtggttgtcatcaatagttagttacttagtttacacgtcttgcaggaatttcaggttttattgatggagaaaccttcagaatacagtagcaaccattactacactacagaagagtttagcatacacaaggggggagaaatagtacaccatagacatagactagcacactatatacaaattcaatatcccatttcgatgtgcactgcaggaaactgtagcatgcaatctgtgagtttattataaatgatgtagtagtagggccggatttgttgggcactgctctgcctttggaactactgctgtcctgacagacactgcatcattctgcatttcacctaccccagttcccagactaaatggctgtaaagacagattcataaaaatgtctgctttatggaacatgaacatttctttatagacaggaggagtaaagaga

SEQ ID NO: 15626 - DNA, 1962 bp, Zea Mays
gacccggacccggaccgggggagggcctgtacccctcctcggtttcttgccgtgccgaacgaccccaagtccccaacacggaacggaaccgtcaatccgctacgccacagcaacgaccaaccggagccgccgccgccgccgccgacggggacggggacagggaaaccaccaccaccaccaccggccatattaacagctgcgcgtgcacggtggagttctacttccgcccgcgattcgactcgactcgactgctcgttccgtctcgaccttcaggcgggtgaggcgacctttccttccccctcaattctctgtatttttgctcgcccacccggtccgtaatctgcaatctcgccggcgatgggtgggtgggggatgtccgatcgcttgcttcgatgattgagccccccttcctccgttgctctccgtccccccaccctcccgccccgatcggcttccccagtggatctctcgtcgttcagggggttggttccatgtgttccgccggatctggaagtggggctaccctgggatcctggctaaccgaaacgaactggaattcgttttagagcaccctaccgcacgtaacagtatatttcttccttcccatggcaggtaagcaggttgaccgtccgcgaattcaccgtatcccgggatacgtatgggttccaaagcgtccttccgcgtcacgctcctcttgctgctcctcgccgccgcctggggacctgctgcacaggccgacgacgctggtattggtaacaggctttgccatccttttggttgtcttctaatcacatcttggactccactccattatctgctgctagctgctgcaccttttttttgactacttagttaaaacccggtttccaaaccgttattagcggctaaaacttagctgagagatctagagccggtggtctatttgagaggtttggaacgggtgatctaataggccatctaattgtttgcctatatctctcaaatagctgttacttgttatctgctccaacccaattcttccttactattagttgttgttggaccatacccaattcactgccctctcactttttctccatcttgcacagctgagctcccggatcatattgctattaccttgaaggagcaggtttcttcgaccaagattcctgtccgtctcaagagtggcagcccgctgtgctcagcctgtgaaaacttcacgggcaaagctgtcagttatatcagtgagaaacagacgcaagataaggtcatgggattccttcatgacgcttgctctcagtcattctcgtttgaacagaagctgcgctatccctgcagtgtgatgaattgatggactcttacgcaaccctcctgtttgccaagatcacggagatcaaaccagaagcgttctgcaaacagtatggcctgtgcaggggcacggctcttttctctggtgtgacaagtgacagcacatgtgtgttctgccaccacctgcttgatgaagttatgtccaaactgaaagatccggacgcggagtttgagataattcagattcttatcaaggagtgcaataagattgaaggccacgtccagcagtgcaagcgactggtcctgcaatacattcccctcatcctggtgaacggcgagaagttcctcgagaagaacgatgtttgcgcgctcgtacaggcttgtccagccacccataagaagactttcagctcagtcttgaagggagccttgttgctgagtgacgcttgaaggttggagaagaacacgcaaagcgtttagcagtggttggaaatagtgtgtccaagtgccgtgtttgtacatataattgtcatatgaatgcatgaagacgtgtcttgtgccctgcattgttttcatcttgtatcataattcataaacacgttgtatttatggacatccacagggggtgaaggttaaaatatatttgtatcataattcatataagcacattgtctt

SEQ ID NO: 15627 - DNA, 1216 bp, Zea Mays
agacgacccttgtttatatatttacaacactgtttatgcatggatgtagaactgggaccatctggaggctgtgtttgaacaacttaatcagttgccatcaaaagaacatggaaccaatgtgatgcgaattaggccgtggtacttggatcagcatgcacagtactatcggcagacaatactgttaagctcataccttacaccagagattaatgctttatttaacggattatgcttaaattatgaaggaaagattaaaatggtgaccgagtatgcaggagttcttcccaaaatacaacttgaagtgcggcaggtgtatgaaagatttgatgcatcttctattgctgaagctgacggtgctcgttttgattatttctgcaacaaggtatatccaaagatccaggacttggatgagggtgggctgctgctattcgtcagttcgtattttgaatacattcgaataagcaatttcttaaaatccaaggaagcgtccttttgtcgaatcggagaggctacgtctcagcaggatatatcccgtgcaaggctctggttttttgagggcaagaaaaagatcttgctttacagcgaaagatctcacttctaccaccgatacaagatcaggggaacgaagcatctactagtctattcgttgcctgggagaaaagaattttatccggagcttgtaaatatgctgggcgaatcagaaaaccgcaagtgcaacgtcctcttctctcgtctagaccttctcaagttggagcggatcgttgggaagtcttcggcgcgaaggttgatttcctcggagaagggcatgtttgtcttctgctgatgtagcagcctagcccgtactgtagagcaggcgaatggttttatacattgatccctagcaaatgtacccacagcagggggtcacgttgttgtttgcctgtcaggcaagaatctggaccatgttatgtaggcaaaaaaaaaaaaaaatctgaatcccgtttgtacggctaacattatacttttatgcccctatttgtttccatcaaacttatagattatatagtcacctaatgacttgcttatttgttatcatagtctaggtatgtaaattatatattccatctaataatttgtgttataataatttgtgttgtttgtttgttttttaacttagctaagttggattatataatctaaagtgtaagaccatgtttatttccttccaggattaaat

SEQ ID NO: 15628 - DNA, 2607 bp, Zea Mays
actcttcctcaacccgccgccagtcccaaatacgcaaacggcaaatcagccgccgccccctcccgacctgcacaggctgcacgcagctcccatctccggctccggtgaccggcgctccccctcctcgcccaggtccagagccgccccctctcgacctgcaagctgcacgcagcggggccagggccagagccgccacccccggtgaccggcgccccgcgcccccagtccccctcccccacggctgacggccccactgccacctgccaggcgccccagccgcctcctctcccggctcactcaccggtaaccggcgtccggccgggacctggacgtgccgcgtgcggcccaacgccccaagcccccaacccaggaatcagcgaccagccgaccacagcagccagcagagaagggaatacgaataaccaaagaagcgaagaacagatagagaaactgataaagagaaaggtagatagatggggaagcgcaagcccatgccttccgccgccgctgctcgaggaccgaagaaccggccaaagaggccaaagtctgtgaagcagggagctgagttacgggagcagaatctccaactgccggaacacgattacgaaaatatagatactgaatctggagcagcagagaccgttcaccgtgataaaaaagcaaatgggatctttcaagacacatcacagagtgatgaagaagaaatagaagacgagtatgatgctcctagtaatgacacgccaggtgatgcgacaaacaatggaaatggttgttttgatgaaacagagatttcatgttcatttcatcgccatgtaagccacgtcataacaaatgaagaagtcaagatgttgatgaagaagaactataaatttaaatgggaaatgcctgctgtgggcattccaaggtccaaatgggttggaacaggtgaaaaagtgcaggaagcatgtgatgatcatcttcatgatgtcaaaggaaagttgagagaccattggcaacatacactgtccgatcatttaaattctcgaatgagcttttactctctttgttctttttttgttgcctctcaaaagttttgcacggcgcattgtgaagagattgatccagctttccccattgccacaaaaggatagtgccatgggacaatttaaaaaggagtttggtgaatcagatgacgaggggatacctgaacatagcacaaaacctgcagactttgacctcctttttgccggagacattgatgaccactttgtttttggcgtaaagttaacaaagaaatctattaagctgtacagtaacttctattcttctgatataatagttgcatctcctttagcgctgaaacgcaaaattgatggaggaggacatgacaagaaggattttgatttcctatcttcaattgaaatagtggttgttgatcatgcggatgtgatgtctatgcagaactgggaccatctggaggctgtgtttgaacaacttaatcagttgccatcaaaagaacatggaaccaatgtgatgcgaattaggccgtggtacttggatcagcatgcacagtactatcggcagacaatactgttaagctcataccttacaccagagattaatgctttatttaacggattatgcttaaattatgaaggaaagattaaaatggtgaccgagtatgcaggagttcttcccaaaatacaacttgaagtgcggcaggtgtatgaaagatttgatgcatcttctattgctgaagctgacggtgctcgttttgattatttctgcaacaaggtatatccaaagatccaggacttggatgagggtgggctgctgctattcgtcagttcgtattttgaatacattcgaataagcaatttcttaaaatccaaggaagcgtccttttgtcgaatcggagaggctacgtctcagcaggatatatcccgtgcaaggctctggttttttgagggcaagaaaaagatcttgctttacagcgaaagatctcacttctaccaccgatacaagatcaggggaacgaagcatctactagtctattcgttgcctgggagaaaagaattttatccggagcttgtaaatatgctgggcgaatcagaaaaccgcaagtgcaacgtcctcttctctcgtctagaccttctcaagttggagcggatcgttgggaagtcttcggcgcgaaggttgatttcctcggagaagggcatgtttgtcttctgctgatgtagcagcctagcccgtactgtagagcaggcgaatggttttatacattgatccctagcaaatgtacccacagcagggggtcacgttgttgtttgcctgtcaggcaagaatctggaccatgttatgtaggcaaaaaaaaaaaaaaatctgaatcccgtttgtacggctaacattatacttttatgcccctatttgtttccatcaaacttatagattatatagtcacctaatgacttgcttatttgttatcatagtctaggtatgtaaattatatattccatctaataatttgtgttataataatttgtgttgtttgtttgttttttaacttagctaagttggattatataatctaaagtgtaagaccatgtttatttccttccaggattaaat

SEQ ID NO: 15629 - DNA, 3354 bp, Zea Mays
actcttcctcaacccgccgccagtcccaaatacgcaaacggcaaatcagccgccgccccctcccgacctgcacaggctgcacgcagctcccatctccggctccggtgaccggcgctccccctcctcgcccaggtccagagccgccccctctcgacctgcaagctgcacgcagcggggccagggccagagccgccacccccggtgaccggcgccccgcgcccccagtccccctcccccacggctgacggccccactgccacctgccaggcgccccagccgcctcctctcccggctcactcaccggtaaccggcgtccggccgggacctggacgtgccgcgtgcggcccaacgccccaagcccccaacccaggaatcagcgaccagccgaccacagcagccagcagagaagggaatacgaataaccaaagaagcgaagaacagatagagaaactgataaagagaaaggtagatagatggggaagcgcaagcccatgccttccgccgccgctgctcgaggaccgaagaaccggccaaagaggccaaagtctgtgaagcagggagctgagttacgggagcagaatctccaactgccggaacacgattacgaaaatatagatactgaatctggagcagcagagaccgttcaccgtgataaaaaagcaaatgggatctttcaagacacatcacagagtgatgaagaagaaatagaagacgagtatgatgctcctagtaatgacacgccaggtgatgcgacaaacaatggaaatggttgttttgatgaaacagagatttcatgttcatttcatcgccatgtaagccacgtcataacaaatgaagaagtcaagatgttgatgaagaagaactataaatttaaatgggaaatgcctgctgtgggcattccaaggtccaaatgggttggaacaggtgaaaaagtgcaggaagcatgtgatgatcatcttcatgatgtcaaaggaaagttgagagaccattggcaacatacactgtccgatcatttaaattctcgaatgagcttttactctctttgtaacagttatcgtgacataatgcattgcaataagaagccattttatctgaaaagtaacggtcctgattctagtaccatggacgcatatcttatgcatgctttgaatcatgtgcataggacgcgagatgttgtaattagaaatgacgcaaagcttaggaatgacactgacagagatattacggatgataagacataccttgatcagggttttacacgcccgaaggttctttttttgttgcctctcaaaagttttgcacggcgcattgtgaagagattgatccagctttccccattgccacaaaaggatagtgccatgggacaatttaaaaaggagtttggtgaatcagatgacgaggggatacctgaacatagcacaaaacctgcagactttgacctcctttttgccggagacattgatgaccactttgtttttggcgtaaagttaacaaagaaatctattaagctgtacagtaacttctattcttctgatataatagttgcatctcctttagcgctgaaacgcaaaattgatggaggaggacatgacaagaaggattttgatttcctatcttcaattgaaatagtggttgttgatcatgcggatgtgatgtctatgcagaactgggaccatctggaggctgtgtttgaacaacttaatcagttgccatcaaaagaacatggaaccaatgtgatgcgaattaggccgtggtacttggatcagcatgcacagtactatcggcagacaatactgttaagctcataccttacaccaggtatggattcagctggaaagtggttgtaacctgcccccttctctcttgttttcagtaacgtagaaactgatgctcaacgcgacgcgactagttattatgcacgggaaccgcgaaaccttgatttgttttattaggttgataaatgataagataatgatgctatgcagatttcttttgcatctattacatagttgtccatttgtttgttcatacgcctatgtgaatttcaaagctcaactggtttccatgttatgcagagattaatgctttatttaacggattatgcttaaattatgaaggaaagattaaaatggtgaccgagtatgcaggagttcttcccaaaatacaacttgaagtgcggcaggtgtatgaaagatttgatgcatcttctattgctgaagctgacggtgctcgttttgattatttctgcaacaaggtatatccaaagatccaggacttggatgaggtatgctctattctgttatgttcgaacgttcagttgtatttgatacttctgaaattctgtaggaacttagttcctaatgctcggcatctcctgtaaatattgataatgttaaggggggtgtctgtatggtatgggtgttgcactttacaactcttcttcttgatgaaacgatgcacgcgtatttgagagaaaaaaatattgacaatgttcatgcttctacaatgactatctcctgcaagatttgctaactgtctagtgcaacgcagggtgggctgctgctattcgtcagttcgtattttgaatacattcgaataagcaatttcttaaaatccaaggaagcgtccttttgtcgaatcggagaggctacgtctcagcaggatatatcccgtgcaaggctctggttttttgagggcaagaaaaagatcttgctttacagcgaaagatctcacttctaccaccgatacaagatcaggggaacgaagcatctactagtctattcgttgcctgggagaaaagaattttatccggagcttgtaaatatgctgggcgaatcagaaaaccgcaagtgcaacgtcctcttctctcgtctagaccttctcaagttggagcggatcgttgggaagtcttcggcgcgaaggttgatttcctcggagaagggcatgtttgtcttctgctgatgtagcagcctagcccgtactgtagagcaggcgaatggttttatacattgatccctagcaaatgtacccacagcagggggtcacgttgttgtttgcctgtcaggcaagaatctggaccatgttatgtaggcaaaaaaaaaaaaaaatctgaatcccgtttgtacggctaacattatacttttatgcccctatttgtttccatcaaacttatagattatatagtcacctaatgacttgcttatttgttatcatagtctaggtatgtaaattatatattccatctaataatttgtgttataataatttgtgttgtttgtttgttttttaacttagctaagttggattatataatctaaagtgtaagaccatgtttatttccttccaggattaaat

SEQ ID NO: 15630 - DNA, 2641 bp, Zea Mays
actcttcctcaacccgccgccagtcccaaatacgcaaacggcaaatcagccgccgccccctcccgacctgcacaggctgcacgcagctcccatctccggctccggtgaccggcgctccccctcctcgcccaggtccagagccgccccctctcgacctgcaagctgcacgcagcggggccagggccagagccgccacccccggtgaccggcgccccgcgcccccagtccccctcccccacggctgacggccccactgccacctgccaggcgccccagccgcctcctctcccggctcactcaccggtaaccggcgtccggccgggacctggacgtgccgcgtgcggcccaacgccccaagcccccaacccaggaatcagcgaccagccgaccacagcagccagcagagaagggaatacgaataaccaaagaagcgaagaacagatagagaaactgataaagagaaaggtagatagatggggaagcgcaagcccatgccttccgccgccgctgctcgaggaccgaagaaccggccaaagaggccaaagtctgtgaagcagggagctgagttacgggagcagaatctccaactgccggaacacgattacgttcatttcatcgccatgtaagccacgtcataacaaatgaagaagtcaagatgttgatgaagaagaactataaatttaaatgggaaatgcctgctgtgggcattccaaggtccaaatgggttggaacaggtgaaaaagtgcaggaagcatgtgatgatcatcttcatgatgtcaaaggaaagttgagagaccattggcaacatacactgtccgatcatttaaattctcgaatgagcttttactctctttgtaacagttatcgtgacataatgcattgcaataagaagccattttatctgaaaagtaacggtcctgattctagtaccatggacgcatatcttatgcatgctttgaatcatgtgcataggacgcgagatgttgtaattagaaatgacgcaaagcttaggaatgacactgacagagatattacggatgataagacataccttgatcagggttttacacgcccgaaggttctttttttgttgcctctcaaaagttttgcacggcgcattgtgaagagattgatccagctttccccattgccacaaaaggatagtgccatgggacaatttaaaaaggagtttggtgaatcagatgacgaggggatacctgaacatagcacaaaacctgcagactttgacctcctttttgccggagacattgatgaccactttgtttttggcgtaaagttaacaaagaaatctattaagctgtacagtaacttctattcttctgatataatagttgcatctcctttagcgctgaaacgcaaaattgatggaggaggacatgacaagaaggattttgatttcctatcttcaattgaaatagtggttgttgatcatgcggatgtgatgtctatgcagaactgggaccatctggaggctgtgtttgaacaacttaatcagttgccatcaaaagaacatggaaccaatgtgatgcgaattaggccgtggtacttggatcagcatgcacagtactatcggcagacaatactgttaagctcataccttacaccagagattaatgctttatttaacggattatgcttaaattatgaaggaaagattaaaatggtgaccgagtatgcaggagttcttcccaaaatacaacttgaagtgcggcaggtgtatgaaagatttgatgcatcttctattgctgaagctgacggtgctcgttttgattatttctgcaacaaggtatatccaaagatccaggacttggatgagggtgggctgctgctattcgtcagttcgtattttgaatacattcgaataagcaatttcttaaaatccaaggaagcgtccttttgtcgaatcggagaggctacgtctcagcaggatatatcccgtgcaaggctctggttttttgagggcaagaaaaagatcttgctttacagcgaaagatctcacttctaccaccgatacaagatcaggggaacgaagcatctactagtctattcgttgcctgggagaaaagaattttatccggagcttgtaaatatgctgggcgaatcagaaaaccgcaagtgcaacgtcctcttctctcgtctagaccttctcaagttggagcggatcgttgggaagtcttcggcgcgaaggttgatttcctcggagaagggcatgtttgtcttctgctgatgtagcagcctagcccgtactgtagagcaggcgaatggttttatacattgatccctagcaaatgtacccacagcagggggtcacgttgttgtttgcctgtcaggcaagaatctggaccatgttatgtaggcaaaaaaaaaaaaaaatctgaatcccgtttgtacggctaacattatacttttatgcccctatttgtttccatcaaacttatagattatatagtcacctaatgacttgcttatttgttatcatagtctaggtatgtaaattatatattccatctaataatttgtgttataataatttgtgttgtttgtttgttttttaacttagctaagttggattatataatctaaagtgtaagaccatgtttatttccttccaggattaaat

SEQ ID NO: 15631 - DNA, 3196 bp, Zea Mays
actcttcctcaacccgccgccagtcccaaatacgcaaacggcaaatcagccgccgccccctcccgacctgcacaggctgcacgcagctcccatctccggctccggtgaccggcgctccccctcctcgcccaggtccagagccgccccctctcgacctgcaagctgcacgcagcggggccagggccagagccgccacccccggtgaccggcgccccgcgcccccagtccccctcccccacggctgacggccccactgccacctgccaggcgccccagccgcctcctctcccggctcactcaccggtaaccggcgtccggccgggacctggacgtgccgcgtgcggcccaacgccccaagcccccaacccaggaatcagcgaccagccgaccacagcagccagcagagaagggaatacgaataaccaaagaagcgaagaacagatagagaaactgataaagagaaaggtagatagatggggaagcgcaagcccatgccttccgccgccgctgctcgaggaccgaagaaccggccaaagaggccaaagtctgtgaagcagggagctgagttacgggagcagaatctccaactgccggaacacgattacgaaaatatagatactgaatctggagcagcagagaccgttcaccgtgataaaaaagcaaatgggatctttcaagacacatcacagagtgatgaagaagaaatagaagacgagtatgatgctcctagtaatgacacgccaggtgatgcgacaaacaatggaaatggttgttttgatgaaacagagatttcatgttcatttcatcgccatgtaagccacgtcataacaaatgaagaagtcaagatgttgatgaagaagaactataaatttaaatgggaaatgcctgctgtgggcattccaaggtccaaatgggttggaacaggtgaaaaagtgcaggaagcatgtgatgatcatcttcatgatgtcaaaggaaagttgagagaccattggcaacatacactgtccgatcatttaaattctcgaatgagcttttactctctttgtaacagttatcgtgacataatgcattgcaataagaagccattttatctgaaaagtaacggtcctgattctagtaccatggacgcatatcttatgcatgctttgaatcatgtgcataggacgcgagatgttgtaattagaaatgacgcaaagcttaggaatgacactgacagagatattacggatgataagacataccttgatcagggttttacacgcccgaaggttctttttttgttgcctctcaaaagttttgcacggcgcattgtgaagagattgatccagctttccccattgccacaaaaggatagtgccatgggacaatttaaaaaggagtttggtgaatcagatgacgaggggatacctgaacatagcacaaaacctgcagactttgacctcctttttgccggagacattgatgaccactttgtttttggcgtaaagttaacaaagaaatctattaagctgtacagtaacttctattcttctgatataatagttgcatctcctttagcgctgaaacgcaaaattgatggaggaggacatgacaagaaggattttgatttcctatcttcaattgaaatagtggttgttgatcatgcggatgtgatgtctatgcagtttatgcatggatgtagaactgggaccatctggaggctgtgtttgaacaacttaatcagttgccatcaaaagaacatggaaccaatgtgatgcgaattaggccgtggtacttggatcagcatgcacagtactatcggcagacaatactgttaagctcataccttacaccaggtatggattcagctggaaagtggttgtaacctgcccccttctctcttgttttcagtaacgtagaaactgatgctcaacgcgacgcgactagttattatgcacgggaaccgcgaaaccttgatttgttttattaggttgataaatgataagataatgatgctatgcagatttcttttgcatctattacatagttgtccatttgtttgttcatacgcctatgtgaatttcaaagctcaactggtttccatgttatgcagagattaatgctttatttaacggattatgcttaaattatgaaggaaaggtatgccatgattgaaatcactgggttaccccctctcccaaaaaagggattacatgtattgttgagctaatagttttaggacttctactagattaaaatggtgaccgagtatgcaggagttcttcccaaaatacaacttgaagtgcggcaggtgtatgaaagatttgatgcatcttctattgctgaagctgacggtgctcgttttgattatttctgcaacaaggtatatccaaagatccaggacttggatgagggtgggctgctgctattcgtcagttcgtattttgaatacattcgaataagcaatttcttaaaatccaaggaagcgtccttttgtcgaatcggagaggctacgtctcagcaggatatatcccgtgcaaggctctggttttttgagggcaagaaaaagatcttgctttacagcgaaagatctcacttctaccaccgatacaagatcaggggaacgaagcatctactagtctattcgttgcctgggagaaaagaattttatccggagcttgtaaatatgctgggcgaatcagaaaaccgcaagtgcaacgtcctcttctctcgtctagaccttctcaagttggagcggatcgttgggaagtcttcggcgcgaaggttgatttcctcggagaagggcatgtttgtcttctgctgatgtagcagcctagcccgtactgtagagcaggcgaatggttttatacattgatccctagcaaatgtacccacagcagggggtcacgttgttgtttgcctgtcaggcaagaatctggaccatgttatgtaggcaaaaaaaaaaaaaaatctgaatcccgtttgtacggctaacattatacttttatgcccctatttgtttccatcaaacttatagattatatagtcacctaatgacttgcttatttgttatcatagtctaggtatgtaaattatatattccatctaataatttgtgttataataatttgtgttgtttgtttgttttttaacttagctaagttggattatataatctaaagtgtaagaccatgtttatttccttccaggattaaat

SEQ ID NO: 15632 - DNA, 2848 bp, Zea Mays
actcttcctcaacccgccgccagtcccaaatacgcaaacggcaaatcagccgccgccccctcccgacctgcacaggctgcacgcagctcccatctccggctccggtgaccggcgctccccctcctcgcccaggtccagagccgccccctctcgacctgcaagctgcacgcagcggggccagggccagagccgccacccccggtgaccggcgccccgcgcccccagtccccctcccccacggctgacggccccactgccacctgccaggcgccccagccgcctcctctcccggctcactcaccggtaaccggcgtccggccgggacctggacgtgccgcgtgcggcccaacgccccaagcccccaacccaggaatcagcgaccagccgaccacagcagccagcagagaagggaatacgaataaccaaagaagcgaagaacagatagagaaactgataaagagaaaggtagatagatggggaagcgcaagcccatgccttccgccgccgctgctcgaggaccgaagaaccggccaaagaggccaaagtctgtgaagcagggagctgagttacgggagcagaatctccaactgccggaacacgattacgaaaatatagatactgaatctggagcagcagagaccgttcaccgtgataaaaaagcaaatgggatctttcaagacacatcacagagtgatgaagaagaaatagaagacgagtatgatgctcctagtaatgacacgccaggtgatgcgacaaacaatggaaatggttgttttgatgaaacagagatttcatgttcatttcatcgccatgtaagccacgtcataacaaatgaagaagtcaagatgttgatgaagaagaactataaatttaaatgggaaatgcctgctgtgggcattccaaggtccaaatgggttggaacaggtgaaaaagtgcaggaagcatgtgatgatcatcttcatgatgtcaaaggaaagttgagagaccattggcaacatacactgtccgatcatttaaattctcgaatgagcttttactctctttgtaacagttatcgtgacataatgcattgcaataagaagccattttatctgaaaagtaacggtcctgattctagtaccatggacgcatatcttatgcatgctttgaatcatgtgcataggacgcgagatgttgtaattagaaatgacgcaaagcttaggaatgacactgacagagatattacggatgataagacataccttgatcagggttttacacgcccgaaggttctttttttgttgcctctcaaaagttttgcacggcgcattgtgaagagattgatccagctttccccattgccacaaaaggatagtgccatgggacaatttaaaaaggagtttggtgaatcagatgacgaggggatacctgaacatagcacaaaacctgcagactttgacctcctttttgccggagacattgatgaccactttgtttttggcgtaaagttaacaaagaaatctattaagctgtacagtaacttctattcttctgatataatagttgcatctcctttagcgctgaaacgcaaaattgatggaggaggacatgacaagaaggattttgatttcctatcttcaattgaaatagtggttgttgatcatgcggatgtgatgtctatgcagtttatgcatggatgtagaactgggaccatctggaggctgtgtttgaacaacttaatcagttgccatcaaaagaacatggaaccaatgtgatgcgaattaggccgtggtacttggatcagcatgcacagtactatcggcagacaatactgttaagctcataccttacaccagagattaatgctttatttaacggattatgcttaaattatgaaggaaagattaaaatggtgaccgagtatgcaggagttcttcccaaaatacaacttgaagtgcggcaggtgtatgaaagatttgatgcatcttctattgctgaagctgacggtgctcgttttgattatttctgcaacaaggtatatccaaagatccaggacttggatgagggtgggctgctgctattcgtcagttcgtattttgaatacattcgaataagcaatttcttaaaatccaaggaagcgtccttttgtcgaatcggagaggctacgtctcagcaggatatatcccgtgcaaggctctggttttttgagggcaagaaaaagatcttgctttacagcgaaagatctcacttctaccaccgatacaagatcaggggaacgaagcatctactagtctattcgttgcctgggagaaaagaattttatccggagcttgtaaatatgctgggcgaatcagaaaaccgcaagtgcaacgtcctcttctctcgtctagaccttctcaagttggagcggatcgttgggaagtcttcggcgcgaaggttgatttcctcggagaagggcatgtttgtcttctgctgatgtagcagcctagcccgtactgtagagcaggcgaatggttttatacattgatccctagcaaatgtacccacagcagggggtcacgttgttgtttgcctgtcaggcaagaatctggaccatgttatgtaggcaaaaaaaaaaaaaaatctgaatcccgtttgtacggctaacattatacttttatgcccctatttgtttccatcaaacttatagattatatagtcacctaatgacttgcttatttgttatcatagtctaggtatgtaaattatatattccatctaataatttgtgttataataatttgtgttgtttgtttgttttttaacttagctaagttggattatataatctaaagtgtaagaccatgtttatttccttccaggattaaat

SEQ ID NO: 15633 - DNA, 2855 bp, Zea Mays
ttttttctaattttcctggcgccctccatcctcactcttcctcaacccgccgccagtcccaaatacgcaaacggcaaatcagccgccgccccctcccgacctgcacaggctgcacgcagctcccatctccggctccggtgaccggcgctccccctcctcgcccaggtccagagccgccccctctcgacctgcaagctgcacgcagcggggccagggccagagccgccacccccggtgaccggcgccccgcgcccccagtccccctcccccacggctgacggccccactgccacctgccaggcgccccagccgcctcctctcccggctcactcaccggtaaccggcgtccggccgggacctggacgtgccgcgtgcggcccaacgccccaagcccccaacccaggaatcagcgaccagccgaccacagcagccagcagagaagggaatacgaataaccaaagaagcgaagaacagatagagaaactgataaagagaaaggtagatagatggggaagcgcaagcccatgccttccgccgccgctgctcgaggaccgaagaaccggccaaagaggccaaagtctgtgaagcagggagctgagttacgggagcagaatctccaactgccggaacacgattacgatactgaatctggagcagcagagaccgttcaccgtgataaaaaagcaaatgggatctttcaagacacatcacagagtgatgaagaagaaatagaagacgagtatgatgctcctagtaatgacacgccaggtgatgcgacaaacaatggaaatggttgttttgatgaaacagagatttcatgttcatttcatcgccatgtaagccacgtcataacaaatgaagaagtcaagatgttgatgaagaagaactataaatttaaatgggaaatgcctgctgtgggcattccaaggtccaaatgggttggaacaggtgaaaaagtgcaggaagcatgtgatgatcatcttcatgatgtcaaaggaaagttgagagaccattggcaacatacactgtccgatcatttaaattctcgaatgagcttttactctctttgtaacagttatcgtgacataatgcattgcaataagaagccattttatctgaaaagtaacggtcctgattctagtaccatggacgcatatcttatgcatgctttgaatcatgtgcataggacgcgagatgttgtaattagaaatgacgcaaagcttaggaatgacactgacagagatattacggatgataagacataccttgatcagggttttacacgcccgaaggttctttttttgttgcctctcaaaagttttgcacggcgcattgtgaagagattgatccagctttccccattgccacaaaaggatagtgccatgggacaatttaaaaaggagtttggtgaatcagatgacgaggggatacctgaacatagcacaaaacctgcagactttgacctcctttttgccggagacattgatgaccactttgtttttggcgtaaagttaacaaagaaatctattaagctgtacagtaacttctattcttctgatataatagttgcatctcctttagcgctgaaacgcaaaattgatggaggaggacatgacaagaaggattttgatttcctatcttcaattgaaatagtggttgttgatcatgcggatgtgatgtctatgcagaactgggaccatctggaggctgtgtttgaacaacttaatcagttgccatcaaaagaacatggaaccaatgtgatgcgaattaggccgtggtacttggatcagcatgcacagtactatcggcagacaatactgttaagctcataccttacaccagagattaatgctttatttaacggattatgcttaaattatgaaggaaagattaaaatggtgaccgagtatgcaggagttcttcccaaaatacaacttgaagtgcggcaggtgtatgaaagatttgatgcatcttctattgctgaagctgacggtgctcgttttgattatttctgcaacaaggtatatccaaagatccaggacttggatgagggtgggctgctgctattcgtcagttcgtattttgaatacattcgaataagcaatttcttaaaatccaaggaagcgtccttttgtcgaatcggagaggctacgtctcagcaggatatatcccgtgcaaggctctggttttttgagggcaagaaaaagatcttgctttacagcgaaagatctcacttctaccaccgatacaagatcaggggaacgaagcatctactagtctattcgttgcctgggagaaaagaattttatccggagcttgtaaatatgctgggcgaatcagaaaaccgcaagtgcaacgtcctcttctctcgtctagaccttctcaagttggagcggatcgttgggaagtcttcggcgcgaaggttgatttcctcggagaagggcatgtttgtcttctgctgatgtagcagcctagcccgtactgtagagcaggcgaatggttttatacattgatccctagcaaatgtacccacagcagggggtcacgttgttgtttgcctgtcaggcaagaatctggaccatgttatgtaggcaaaaaaaaaaaaaaatctgaatcccgtttgtacggctaacattatacttttatgcccctatttgtttccatcaaacttatagattatatagtcacctaatgacttgcttatttgttatcatagtctaggtatgtaaattatatattccatctaataatttgtgttataataatttgtgttgtttgtttgttttttaacttagctaagttggattatataatctaaagtgtaagaccatgtttatttccttccaggattaaat

SEQ ID NO: 15634 - DNA, 2775 bp, Zea Mays
ccggcctcccattcatgctccactgccatccctacgggcaggggcggattcaggccctggaacacacgggctatggcccgggtctggcccatctaactggaataggctatgggcctttttttttctaattttcctggcgccctccatcctcactcttcctcaacccgccgccagtcccaaatacgcaaacggcaaatcagccgccgccccctcccgacctgcacaggctgcacgcagctcccatctccggctccggtgaccggcgctccccctcctcgcccaggtccagagccgccccctctcgacctgcaagctgcacgcagcggggccagggccagagccgccacccccggtgaccggcgccccgcgcccccagtccccctcccccacggctgacggccccactgccacctgccaggcgccccagccgcctcctctcccggctcactcaccggtaaccggcgtccggccgggacctggacgtgccgcgtgcggcccaacgccccaagcccccaacccaggaatcagcgaccagccgaccacagcagccagcagagaagggaatacgaataaccaaagaagcgaagaacagatagagaaactgataaagagaaaggtagatagatggggaagcgcaagcccatgccttccgccgccgctgctcgaggaccgaagaaccggccaaagaggccaaagtctgtgaagcagggagctgagttacgggagcagaatctccaactgccggaacacgattacgaaaatatagatactgaatctggagcagcagagaccgttcaccgtgataaaaaagcaaatgggatctttcaagacacatcacagagtgatgaagaagaaatagaagacgagtatgatgctcctagtaatgacacgccaggtgatgcgacaaacaatggaaatggttgttttgatgaaacagagatttcatgttcatttcatcgccatgtaagccacgtcataacaaatgaagaagtcaagatgttgatgaagaagaactataaatttaaatgggaaatgcctgctgtgggcattccaaggtccaaatgggttggaacaggtgaaaaagtgcaggaagcatgtgatgatcatcttcatgatgtcaaaggaaagttgagagaccattggcaacatacactgtccgatcatttaaattctcgaatgagcttttactctctttgttctttttttgttgcctctcaaaagttttgcacggcgcattgtgaagagattgatccagctttccccattgccacaaaaggatagtgccatgggacaatttaaaaaggagtttggtgaatcagatgacgaggggatacctgaacatagcacaaaacctgcagactttgacctcctttttgccggagacattgatgaccactttgtttttggcgtaaagttaacaaagaaatctattaagctgtacagtaacttctattcttctgatataatagttgcatctcctttagcgctgaaacgcaaaattgatggaggaggacatgacaagaaggattttgatttcctatcttcaattgaaatagtggttgttgatcatgcggatgtgatgtctatgcagtttatgcatggatgtagaactgggaccatctggaggctgtgtttgaacaacttaatcagttgccatcaaaagaacatggaaccaatgtgatgcgaattaggccgtggtacttggatcagcatgcacagtactatcggcagacaatactgttaagctcataccttacaccagagattaatgctttatttaacggattatgcttaaattatgaaggaaagattaaaatggtgaccgagtatgcaggagttcttcccaaaatacaacttgaagtgcggcaggtgtatgaaagatttgatgcatcttctattgctgaagctgacggtgctcgttttgattatttctgcaacaaggtatatccaaagatccaggacttggatgagggtgggctgctgctattcgtcagttcgtattttgaatacattcgaataagcaatttcttaaaatccaaggaagcgtccttttgtcgaatcggagaggctacgtctcagcaggatatatcccgtgcaaggctctggttttttgagggcaagaaaaagatcttgctttacagcgaaagatctcacttctaccaccgatacaagatcaggggaacgaagcatctactagtctattcgttgcctgggagaaaagaattttatccggagcttgtaaatatgctgggcgaatcagaaaaccgcaagtgcaacgtcctcttctctcgtctagaccttctcaagttggagcggatcgttgggaagtcttcggcgcgaaggttgatttcctcggagaagggcatgtttgtcttctgctgatgtagcagcctagcccgtactgtagagcaggcgaatggttttatacattgatccctagcaaatgtacccacagcagggggtcacgttgttgtttgcctgtcaggcaagaatctggaccatgttatgtaggcaaaaaaaaaaaaaaatctgaatcccgtttgtacggctaacattatacttttatgcccctatttgtttccatcaaacttatagattatatagtcacctaatgacttgcttatttgttatcatagtctaggtatgtaaattatatattccatctaataatttgtgttataataatttgtgttgtttgtttgttttttaacttagctaagttggattatataatctaaagtgtaagaccatgtttatttccttccaggattaaat

SEQ ID NO: 15635 - DNA, 1398 bp, Zea Mays
ctctcccctcctctctcgtctcgcttccggttttccaccacacaaaacaaaaacagagtagatagttcttgaaactgaaatcttcgccgttccactctcccccagcgatctgctcgtttccttgcaacttgcaaccttggtgctgtggatgacgctcgcgatgagcgcactcgcctgccaccgcccactccccttcaaaagttggaaacggaaactgcgaacctcggttgctacatggaaacatatgcggcctgaccgacgtaacgaggccgtagcatttgcggcgaagaacacaaagaggaaacggagaagttctccgaacgagtcgaaggatttgctgttggtggtaagtgaggaagctgcttcgggcagtggaggaagtgctggcacaagcctcgagaccaacggcgaggatgttgctactgacgatgaggtttcaggtgctccgaggagtgctgttcttcaggcttgcgctctcacgtcaggcttgctgcttgccggagggcttctgcttcgcgaggcatcacacctagcatcaataaatggatggccaattgctgaccctacagatgtgtcattcagttttgaaacttggcatcttgagttggttgcgggacttgtcatagtaatctcctctgcccggtacatcctgctacaaacatggccagatttcagagattccagtgaatctgcaaatagacaaatccttgcatcgctagagcctctggactacattgtcgttgcttgtctcccggggataagtgaggagttgctgtttcgaggggcgatgatgcctaccttgggattgaactggattagcgcccttattattggaaccgtttttggtgttcttcacttgggcaatggcaggaaatattcgtttgcaatctgggcaacatttgttggctttgcctatggtatgggaaccatagcttcctcgagcattgtagttccaatagcttctcactccataaacaatattatcggaggtttactttggcgccttaccaagaactcgcaaaagtagatatacataatgccctcaacagtcatccctgttcagtttagagtttagactttctagtccttaatccttacaaggttgccgtcagtattagtgtcgcatgattggttcacccatgtattttcaatagcaaaatgaggacgggactgccgtaaaatcaggacttgcttcatttttttttgtgtcaatgtgtccctttaaatgaattatggagattttatatttcatattaggtataaaataaaatttaaccgtggggccatttgcatttgcagtaaatttgtctggtgcggcaaaaggtggaaccatcgtacgagagtgttacttgcgttctgtgcggtaatctacagagtagtgttcggtaaaagcaaata

SEQ ID NO: 15636 - DNA, 895 bp, Zea Mays
ctctcccctcctctctcgtctcgcttccggttttccaccacacaaaacaaaaacagagtagatagttcttgaaactgaaatcttcgccgttccactctcccccagcgatctgctcgtttccttgcaacttgcaaccttggtgctgtggatgacgctcgcgatgagcgcactcgcctgccaccgcccactccccttcaaaaatccttgcatcgctagagcctctggactacattgtcgttgcttgtctcccggggataagtgaggagttgctgtttcgaggggcgatgatgcctaccttgggattgaactggattagcgcccttattattggaaccgtttttggtgttcttcacttgggcaatggcaggaaatattcgtttgcaatctgggcaacatttgttggctttgcctatggtatgggaaccatagcttcctcgagcattgtagttccaatagcttctcactccataaacaatattatcggaggtttactttggcgccttaccaagaactcgcaaaagtagatatacataatgccctcaacagtcatccctgttcagtttagagtttagactttctagtccttaatccttacaaggttgccgtcagtattagtgtcgcatgattggttcacccatgtattttcaatagcaaaatgaggacgggactgccgtaaaatcaggacttgcttcatttttttttgtgtcaatgtgtccctttaaatgaattatggagattttatatttcatattaggtataaaataaaatttaaccgtggggccatttgcatttgcagtaaatttgtctggtgcggcaaaaggtggaaccatcgtacgagagtgttacttgcgttctgtgcggtaatctacagagtagtgttcggtaaaagcaaata

SEQ ID NO: 15637 - DNA, 1078 bp, Zea Mays
ctctcccctcctctctcgtctcgcttccggttttccaccacacaaaacaaaaacagagtagatagttcttgaaactgaaatcttcgccgttccactctcccccagcgatctgctcgtttccttgcaacttgcaaccttggtgctgtggatgacgctcgcgatgagcgcactcgcctgccaccgcccactccccttcaaaagcatcacacctagcatcaataaatggatggccaattgctgaccctacagatgtgtcattcagttttgaaacttggcatcttgagttggttgcgggacttgtcatagtaatctcctctgcccggtacatcctgctacaaacatggccagatttcagagattccagtgaatctgcaaatagacaaatccttgcatcgctagagcctctggactacattgtcgttgcttgtctcccggggataagtgaggagttgctgtttcgaggggcgatgatgcctaccttgggattgaactggattagcgcccttattattggaaccgtttttggtgttcttcacttgggcaatggcaggaaatattcgtttgcaatctgggcaacatttgttggctttgcctatggtatgggaaccatagcttcctcgagcattgtagttccaatagcttctcactccataaacaatattatcggaggtttactttggcgccttaccaagaactcgcaaaagtagatatacataatgccctcaacagtcatccctgttcagtttagagtttagactttctagtccttaatccttacaaggttgccgtcagtattagtgtcgcatgattggttcacccatgtattttcaatagcaaaatgaggacgggactgccgtaaaatcaggacttgcttcatttttttttgtgtcaatgtgtccctttaaatgaattatggagattttatatttcatattaggtataaaataaaatttaaccgtggggccatttgcatttgcagtaaatttgtctggtgcggcaaaaggtggaaccatcgtacgagagtgttacttgcgttctgtgcggtaatctacagagtagtgttcggtaaaagcaaata

SEQ ID NO: 15638 - DNA, 1772 bp, Zea Mays
cgccaccgctcgacatctctcccctcctctctcgtctcgcttccggttttccaccacacaaaacaaaaacagagtagatagttcttgaaactgaaatcttcgccgttccactctcccccagcgatctgctcgtttccttgcaacttgcaaccttggtgctgtggatgacgctcgcgatgagcgcactcgcctgccaccgcccactccccttcaaaattttccggcccttcgcctgttgtatgcgtggtctcgtgaatcgtgatgtccagccagcccattgctgtcctctaatgaaatgcagaggtaaactgaatccaatcacccgctctttccttttcgccaaccacaaccatggcgcaattggttggttctgtagtacctagtccatcacgatttatgttcaattcagtgtgaggaagcacgactaattcctttctctgtgtaaatcgacctccttgcttgcatgtgttgactacctgcgctgtcatgtggaaatgtctgaaccttatcgttccttctcagagttagagaccattgcttatgccatcctgatacccctacattgacagaccatacttgatcaggttggaaacggaaactgcgaacctcggttgctacatggaaacatatgcggcctgaccgacgtaaccatttgcggcgaagaacacaaagaggaaacggagaagttctccgaacgagtcgaaggatttgctgttggtggtaagtgaggaagctgcttcgggcagtggaggaagtgctggcacaagcctcgagaccaacggcgaggatgttgctactgacgatgaggtttcaggtgctccgaggagtgctgttcttcaggcttgcgctctcacgtcaggcttgctgcttgccggagggcttctgcttcgcgaggcatcacacctagcatcaataaatggatggccaattgctgaccctacagatgtgtcattcagttttgaaacttggcatcttgagttggttgcgggacttgtcatagtaatctcctctgcccggtacatcctgctacaaacatggccagatttcagagattccagtgaatctgcaaatagacaaatccttgcatcgctagagcctctggactacattgtcgttgcttgtctcccggggataagtgaggagttgctgtttcgaggggcgatgatgcctaccttgggattgaactggattagcgcccttattattggaaccgtttttggtgttcttcacttgggcaatggcaggaaatattcgtttgcaatctgggcaacatttgttggctttgcctatggtatgggaaccatagcttcctcgagcattgtagttccaatagcttctcactccataaacaatattatcggaggtttactttggcgccttaccaagaactcgcaaaagtagatatacataatgccctcaacagtcatccctgttcagtttagagtttagactttctagtccttaatccttacaaggttgccgtcagtattagtgtcgcatgattggttcacccatgtattttcaatagcaaaatgaggacgggactgccgtaaaatcaggacttgcttcatttttttttgtgtcaatgtgtccctttaaatgaattatggagattttatatttcatattaggtataaaataaaatttaaccgtggggccatttgcatttgcagtaaatttgtctggtgcggcaaaaggtggaaccatcgtacgagagtgttacttgcgttctgtgcggtaatctacagagtagtgttcggtaaaagcaaata

SEQ ID NO: 15639 - DNA, 1265 bp, Zea Mays
tcacgtcattagcccgcacctcatctcagcgcacccgcacccgcacccggccgccttcgtcttcgtcccgttccctccagtccggctatataacccgcgcgccctcccatccgccgctccattccgtcgtcgtcgtcagcagcttctgcttgctctggggggaaggagagagagagagcgagagagagatctagtagagaggctagctaggtggtcctcgaacgaagatgttggcggtgttcagcgggcaggtggtggaggtgttctgcctgttcgagggggtgctggacaacctgggtcgtctgagccagcagcacgggctgtcaagcaagggcgccaacgaggtgctcctcgtcatcgaggcctacaagacgctgcgcgaccgcgcgccctacccggccagcttcatgctcgcccagctcaccggctcctacgccttcgtcctcttcgacaagtccaccaactccctgctagtcgcatccggtgccgctcttctgggggatcaccgccgacggctgcgtcgccttctccgacgacatcgacatgctcaaaggctcatgcggcaagtcgctcgcgccgttcccgcaaggctgcttctactccaacgccctcggagggctcaagtgctacgagaaccccaagcacaaggtcaccgctgtccccgccgacgaagaagagatctgcggtgccactttcaaggtggtggaaggctctactgtcctgacggcgctgcactgatcggtcatcagctggcggaggcgatgcgatgatgatgcagaactttgtacatgcgttggtggatggtggtgtaacatagtggctgccaacaagtcatgctcatgcaaaccgatgaatctatctctgtatcatcgatctcggttgcttgctagtccagactccagacatggctatatatatatagctggtgctaataaataggagtataatcgtcatatcgatcggttgcgtgtggaatgccaatcatgtgtgtaatctgttggcaaataacaaacctctgttcctccctgctgctgttgtccgtgcgatcatgattcagaactggcgtgggcgccaataactcagaagagagacttgctgtatatgcatgctagtatgcattgtccctctcttgtcaatgcttgtaatcgaactttattatgaaaaccaaaacgagaatccaaccaaataaacactggttattttgtccaactctaaactagcaaaactgagactgagaatatacacacacaaaaaaaaaactctcg

SEQ ID NO: 15640 - DNA, 1433 bp, Zea Mays
tcacgtcattagcccgcacctcatctcagcgcacccgcacccgcacccggccgccttcgtcttcgtcccgttccctccagtccggctatataacccgcgcgccctcccatccgccgctccattccgtcgtcgtcgtcagcagcttctgcttgctctggggggaaggagagagagagagcgagagagagatctagtagagaggctagctaggtggtcctcgaacgaagatgttggcggtgttcagcgggcagccggacgccgtcgcccaagacgaaggcgtcgcagctggtggggcgcttcctggccgcctccgagccggccgtgtccgtgcagctcggcgaccacggccacctcgcctactcccacaccaaccaggcgctcctccgccccaggtcgttcgcggccaaggacgaggtgttctgcctgttcgagggggtgctggacaacctgggtcgtctgagccagcagcacgggctgtcaagcaagggcgccaacgaggtgctcctcgtcatcgaggcctacaagacgctgcgcgaccgcgcgccctacccggccagcttcatgctcgcccagctcaccggctcctacgccttcgtcctcttcgacaagtccaccaactccctgctagtcgcatccgaccccgagggcagggtgccgctcttctgggggatcaccgccgacggctgcgtcgccttctccgacgacatcgacatgctcaaaggctcatgcggcaagtcgctcgcgccgttcccgcaaggctgcttctactccaacgccctcggagggctcaagtgctacgagaaccccaagcacaaggtcaccgctgtccccgccgacgaagaagagatctgcggtgccactttcaaggtggtggaaggctctactgtcctgacggcgctgcactgatcggtcatcagctggcggaggcgatgcgatgatgatgcagaactttgtacatgcgttggtggatggtggtgtaacatagtggctgccaacaagtcatgctcatgcaaaccgatgaatctatctctgtatcatcgatctcggttgcttgctagtccagactccagacatggctatatatatatagctggtgctaataaataggagtataatcgtcatatcgatcggttgcgtgtggaatgccaatcatgtgtgtaatctgttggcaaataacaaacctctgttcctccctgctgctgttgtccgtgcgatcatgattcagaactggcgtgggcgccaataactcagaagagagacttgctgtatatgcatgctagtatgcattgtccctctcttgtcaatgcttgtaatcgaactttattatgaaaaccaaaacgagaatccaaccaaataaacactggttattttgtccaactctaaactagcaaaactgagactgagaatatacacacacaaaaaaaaaactctcg

SEQ ID NO: 15641 - DNA, 1227 bp, Zea Mays
tcacgtcattagcccgcacctcatctcagcgcacccgcacccgcacccggccgccttcgtcttcgtcccgttccctccagtccggctatataacccgcgcgccctcccatccgccgctccattccgtcgtcgtcgtcagcagcttctgcttgctctggggggaaggagagagagagagcgagagagagatctagtagagaggctagctaggtggtcctcgaacgaagatgttggcggtgttcagcgggcaggtggtggaggtgccggcggagctggtggcggcgggcagccggacgccgtcgcccaagacgaaggcgtcgcagctggtggggcgcttcctggccgcctccgagccggccgtgtccgtgcagctcggcgaccacggccacctcgcctactcccacaccaaccaggcgctcctccgccccaggaccccgagggcagggtgccgctcttctgggggatcaccgccgacggctgcgtcgccttctccgacgacatcgacatgctcaaaggctcatgcggcaagtcgctcgcgccgttcccgcaaggctgcttctactccaacgccctcggagggctcaagtgctacgagaaccccaagcacaaggtcaccgctgtccccgccgacgaagaagagatctgcggtgccactttcaaggtggtggaaggctctactgtcctgacggcgctgcactgatcggtcatcagctggcggaggcgatgcgatgatgatgcagaactttgtacatgcgttggtggatggtggtgtaacatagtggctgccaacaagtcatgctcatgcaaaccgatgaatctatctctgtatcatcgatctcggttgcttgctagtccagactccagacatggctatatatatatagctggtgctaataaataggagtataatcgtcatatcgatcggttgcgtgtggaatgccaatcatgtgtgtaatctgttggcaaataacaaacctctgttcctccctgctgctgttgtccgtgcgatcatgattcagaactggcgtgggcgccaataactcagaagagagacttgctgtatatgcatgctagtatgcattgtccctctcttgtcaatgcttgtaatcgaactttattatgaaaaccaaaacgagaatccaaccaaataaacactggttattttgtccaactctaaactagcaaaactgagactgagaatatacacacacaaaaaaaaaactctcg

SEQ ID NO: 15642 - DNA, 1102 bp, Zea Mays
gaaagagaatcatggttatccctagactagagagggggggcaagagagaagattgtggtgtgtcgacaaggagattttgctgtgcctctctggcacttcacgaagctttaacaagggtaacagaagtttgggagtggcccatcgcactcgttctgaagctcacaataccatcaacccttccttccgagtggagcaaagtttacatcagcgcaaacatcggcctgtgccctctcctaatcctgtactccttcagctcgttcatccctctagacacccgaatagtgttcctcctcccgcaagtccgcttccctctatggtccgtcgtgctcttcgccagcctgtgcctagccctctcccactacctcctcgagaaagaagccccagagacagagaccatcgcaagcaccatcatctccttcatcatgagcgtcttctggatctcgaccacggccggagagctcctgagctgcctcgccgcggtcggagccatcatggacttccctcccgccattctcggcatgacggtcctggcgtgggggaactccgtgggcgacctcgtcgcggacgtggcgctggccagggctgggcagcctacgatcgccgtcgccggctgcttcgctggccccatgttcaacatgctggtcgggctgggaaccgcccttgtggtacagacggcgagggtgtatcccggagcttttgtgctcgagttccatgttgggatcgtcgtcgcgtttgtgttcctgctcctgagcctgatgggcaccctgttggtggtcacctgggctaggtttcgggtgcccaggttctggggatactgccttatgggcatgtacatcttgttcaccgtagtcagtattgccatcgccagttattcaggatgatatgtcatccctttttttgtgaagatagccggccgctgatagattgtggtatatagttagcatgcgcaatctgtctgtctggttcaatgcctacgtttgctgattttggcggtgccggtgtggcacgcggaatttaatgtgatatttaatttgctgccgcatttacaaacgacgacgagtgctcagatgtcagctttgggtgggtttctacattttttttg

SEQ ID NO: 15643 - DNA, 2240 bp, Zea Mays
ccaacccagaccaaatccaccgtttcgttgctgttctattcgggtacagaacacccattggtttggaagccatcaccaccaccacctataataaattgcacgagatttgccgcgagaccgcatctccatcccgcatcgcgcatcgcatccaccgccgagcttgctttctttctttcttttttctgggagaagaggaagaagaggggaggcgcgacaaaaagggcgccgcgccccgccccgccccgcatcgcccccgacgccggcatctctccctcgctctccttctcccgatctgatccgaagcgcggcggcgtcgacgacgacgacctaagggcacgatgcattcgaccaacctgctgctggaggagcccatccggatggcctccatcctggagccatccaagaccagcttcttcccggcgatgaccaagatcgtcggcacgctcggccccaagtcgcgctccgtcgacaccatctcctcctgcctcaaggccggcatgtccgtcgcgcggttcgatttctcgtggggagacgccgcctaccaccaggagacgctcgagaacctcaagctcgccatcaagtccaccaagaagctgtgcgctgttatgcttgacacggttggaccggagctgcaggtggtcaacaagagtgaaacccccatctccctcgaggagaacgggactgtcgtgctcacgccgcatcagggccaagaagcctcctccaccttgctgcccatcaacttcgatggactcgccaaggctttgacaccaggtgcaacgatatttgtgggccaatacttgttcactggtagcgagactacttcagtttggttggaggtttctgaagttaaaggagatgatgtggtttgtatcatcaagaacacagctaccttggctgggtcgctcttcacgctgcattgttcccagattcatattgacttgcccacgctgtctgatgaggataaggatgttatcaaaaaatggggtgctccaaataagattgacttcctctctctgtcttacacaagacatgcagaagatgtgcggcaggcacgtgagttcctctcgaaattgggtgatcttagccaaactcagatctttgccaaaattgagaatgttgagggcttgaaccattttgatgaaatactggcagaggcagatggtatcattctgtcaagaggaaaccttggaattgaccttccacctgagaaggtctttttgtttcaaaagtctgcgcttcacaagtgcaacatggctggaaagcctgctgttgttactcgtgtcgtggacagcatgactgacaacctcagacctactcgcgcagaggcaactgatgtggcaaatgcagttcttgacgggagtgacgccattctccttggtgctgagactctccgtggtttatatccagtggagactatttcaacagtgggcagaatttgtgctgaggctgagaaggtattcaaccaagatttatactacaagcggactgtgaagtatgtgggagaacctatgacccacttggagtctattgcttcttcagcgtgcgagctgcactcaaagttaaggcatcagtcatcatttgcttcacctcttctggacgagctgcaaggctcattgctaagtacaggcccagcatgcctgttttgtctgttgtcattcctcgtctaaagacaaaccaactgaggtggagtttcacaggtgtttttgaggcaagacaatcactcatagttagaggcctcttccctatgcttgctgatccacgacacccagctgaatctaccagtgctacaaatgagtctgtgttgaaggttgctcttgaccatggcaaagcctcgggcgtgatcaagtcccacgaccgcgtcgtcgtttgccagaaagtgggtgattcctctgtggtgaagatcattgagctggatgattagacaatcaggctatgctgttgtctactagggcacgtttttgccaatttttttgcctaggccgaaacttattggctatgtataatcctatagcgcttgaaaactgagcagtttttcctatggtgacatcataggatttgcttttacagttccaattatggtgtagttcgaaatttgctcgactaaactgcggtgtaacagttaaatgggcagatggaataatgtaatcatactgttccctcgttaggttgtcacttgaattgatgatctgggcttttttttttggttaatcctacctcttgctgcggtgcggcctgctagt

SEQ ID NO: 15644 - DNA, 2326 bp, Zea Mays
attgaccgccgtccggcgcgacccgatggaaaaagcaaaccggcggcatgtccgccgtccaaagaaagtccaacccagaccaaatccaccgtttcgttgctgttctattcgggtacagaacacccattggtttggaagccatcaccaccaccacctataataaattgcacgagatttgccgcgagaccgcatctccatcccgcatcgcgcatcgcatccaccgccgagcttgctttctttctttcttttttctgggagaagaggaagaagaggggaggcgcgacaaaaagggcgccgcgccccgccccgccccgcatcgcccccgacgccggcatctctccctcgctctccttctcccgatctgatccgaagcgcggcggcgtcgacgacgacgacctaagggcacgatgcattcgaccaacctgctgctggaggagcccatccggatggcctccatcctggagccatccaagaccagcttcttcccggcgatgaccaagatcgtcggcacgctcggccccaagtcgcgctccgtcgacaccatctcctcctgcctcaaggccggcatgtccgtcgcgcggttcgatttctcgtggggagacgccgcctaccaccaggagacgctcgagaacctcaagctcgccatcaagtccaccaagaagctgtgcgctgttatgcttgacacggttggaccggagctgcaggtggtcaacaagagtgaaacccccatctccctcgaggagaacgggactgtcgtgctcacgccgcatcagggccaagaagcctcctccaccttgctgcccatcaacttcgatggactcgccaaggctttgacaccaggtgcaacgatatttgtgggccaatacttgttcactggtagcgagactacttcagtttggttggaggtttctgaagttaaaggagatgatgtggtttgtatcatcaagaacacagctaccttggctgggtcgctcttcacgctgcattgttcccagattcatattgacttgcccacgctgtctgatgaggataaggatgttatcaaaaaatggggtgctccaaataagattgacttcctctctctgtcttacacaagacatgcagaagatgtgcggcaggcacgtgagttcctctcgaaattgggtgatcttagccaaactcagatctttgccaaaattgagaatgttgagggcttgaaccattttgatgaaatactggcagaggcagatggtatcattctgtcaagaggaaaccttggaattgaccttccacctgagaaggttctccatattgtaggtctttttgtttcaaaagtctgcgcttcacaagtgcaacatggctggaaagcctgctgttgttactcgtgtcgtggacagcatgactgacaacctcagacctactcgcgcagaggcaactgatgtggcaaatgcagttcttgacgggagtgacgccattctccttggtgctgagactctccgtggtttatatccagtggagactatttcaacagtgggcagaatttgtgctgaggctgagaaggtattcaaccaagatttatactacaagcggactgtgaagtatgtgggagaacctatgacccacttggagtctattgcttcttcagcagtgcgagctgcactcaaagttaaggcatcagtcatcatttgcttcacctcttctggacgagctgcaaggctcattgctaagtacaggcccagcatgcctgttttgtctgttgtcattcctcgtctaaagacaaaccaactgaggtggagtttcacaggtgtttttgaggcaagacaatcactcatagttagaggcctcttccctatgcttgctgatccacgacacccagctgaatctaccagtgctacaaatgagtctgtgttgaaggttgctcttgaccatggcaaagcctcgggcgtgatcaagtcccacgaccgcgtcgtcgtttgccagaaagtgggtgattcctctgtggtgaagatcattgagctggatgattagacaatcaggctatgctgttgtctactagggcacgtttttgccaatttttttgcctaggccgaaacttattggctatgtataatcctatagcgcttgaaaactgagcagtttttcctatggtgacatcataggatttgcttttacagttccaattatggtgtagttcgaaatttgctcgactaaactgcggtgtaacagttaaatgggcagatggaataatgtaatcatactgttccctcgttaggttgtcacttgaattgatgatctgggcttttttttttggttaatcctacctcttgctgcggtgcggcctgctagt

SEQ ID NO: 15645 - DNA, 914 bp, Zea Mays
cgatgtcttctacaaactttggtgtaatccgatctaaaacagagacacacccagcgcgcgagatatctacatcgatcatcatcaccagcgagcgagccggccgagcagcaccgatggcggcgtacatgcgcgtgacgcaccgcgacgaggaaggcaagaaggtgacggagaagatgccggtcccggagacgcggcgcccggacacggccaagcacttcgagcgcaagctggaggagcagggcctccaccgcttcgagcggcacccggcgaacgcgccccggggcgtgggcatcggcgccccgccgcccaagtccgggcgcggcggcaagtacacctgggagggccccggcagcgtcgtcgaggaccagctcgacccggcgccgcccgccatcgaccccaacgaccccaactacgaggagggaggggcggcggacgaggacgacgaggcggccagggaggtggtcgtcggggaggtggaggtcgctaaggtcgccgagagcagggacggcgtcgccagggtcgacgtcgcgccgggcctgctccaggaccagaagcagtaaaaggactgtcttttctggatacgtctagactctataagactgtgtgtcagtgtgttcgagtttgttccgtgcagagagtgcacgtcaactccgctttaattaatctgcttttgttaatatttttactgatcagtaatatgaaccagtggttgatatttggatggacttgctctcagcttaacctgtaaagtttctccctgaagagaactcctgcacacagctactgattgggggcacattcctaaagatcttgtggtttcttacaaattctagttgattgtggtttctaacaaattctagttggtaaccttaaccttgggacttagttccaacatatcagaagctagctttagg

SEQ ID NO: 15646 - DNA, 912 bp, Zea Mays
ctgggaccaatacatctgggaccaatacatctgatattagagacacacccagcgcgcgagatatctacatcgatcatcatcaccagcgagcgagccggccgagcagcaccgatggcggcgtacatgcgcgtgacgcaccgcgacgaggaaggcaagaaggtgacggagaagatgccggtcccggagacgcggcgcccggacacggccaagcacttcgagcgcaagctggaggagcagggcctccaccgcttcgagcggcacccggcgaacgcgccccggggcgtgggcatcggcgccccgccgcccaagtccgggcgcggcggcaagtacacctgggagggccccggcagcgtcgtcgaggaccagctcgacccggcgccgcccgccatcgaccccaacgaccccaactacgaggagggaggggcggcggacgaggacgacgaggcggccagggaggtggtcgtcggggaggtggaggtcgctaaggtcgccgagagcagggacggcgtcgccagggtcgacgtcgcgccgggcctgctccaggaccagaagcagtaaaaggactgtcttttctggatacgtctagactctataagactgtgtgtcagtgtgttcgagtttgttccgtgcagagagtgcacgtcaactccgctttaattaatctgcttttgttaatatttttactgatcagtaatatgaaccagtggttgatatttggatggacttgctctcagcttaacctgtaaagtttctccctgaagagaactcctgcacacagctactgattgggggcacattcctaaagatcttgtggtttcttacaaattctagttgattgtggtttctaacaaattctagttggtaaccttaaccttgggacttagttccaacatatcagaagctagctttagg

SEQ ID NO: 15647 - DNA, 383 bp, Zea Mays
cttctctgtgggcgcttgggcagagatctggatagcgaagcctactccacgccgctgctcctccttccccgcgaatgtccgctccgtcgccggcgactatgatcctgtttctgatcgcgtcgcattccccatcagcaactgtactgttactgacggccactgcgtggtgttcccgacgtgtgctaccatctccggtacacccaatcctcaacgtgccgacgatccccgcaagtgatttagatagcgtgcatattttgtcaccaacgggaccaatacatctgggaccaatacatctgggaccaatacatctgatattgttttatacacaaatgaatttcaaaaacgaggtcttcctcattcacatattatattttgggtctcca

SEQ ID NO: 15648 - DNA, 1193 bp, Zea Mays
ctcagatctatacatatccaaaacaagattacctttcttaactctaaccttcttaagtcctacaaatccagatatatatatacattcatacttacatgtttctctttcttgactctaaccttctcaagtgttcttgatttcatatagactaaaaaataaaggcaaaaacatgtaaaaaaacacaacatgccatcttcatcatccggtccacctagcaatgatgtaaggctgattccatatcttgatgaatgtgatgccccaagaagaaaaagaaggcacagcgcttctgccatctataatcctcctaatataactgccactcaagcaagggcaacaaggcgacatcttctaaatcagagtcgaattgctagaaaagggttggcagctaaaacattgacgaatttccatactggacagttcacaaccgaatatgtggaagcattaaaagcctcatacccaaataggtcatactacggaacaccagattacgaatgctcttattgtcatgctgtgttctggtatgctgaaagggtcaggagtaatcaacacgattcatctatcagatacaacaactgctgcaaaggtggaaaaatcagcattcctcccttcaagcctcggcctgagcctttagcatctcttgcaagatttgatggtgatgccacatcaagaaaattcattcgcaatattagacaatacaattgtctgtttgcttttacatcaatgggagcacaaatagataactctgtcaatgatggtcgtggtccacctctctttaaaatttgcggccaagttcaccatcgtattggaactttgttaccagacgatggatctcctccaagattcattcaattgtatatttacgacaccacaaacgaagtccaaaacagaataaatgctttagacagtggtgacagaacccaagacaatttcgatcctgtaataataagaaatttaattaaaatgcttgatgatcataacccattcgtcaagaaattcagaatggcaagagatcgtttggcggataatccgaatgaagaattcactatcagacttatcggagcaaaggaaggtgatcctatccaatataacttaccaacaacagatgaattagctatgctggttgtcggagatttcacattagacacattcaaacgtgatattattattgagactcagaacaaagagctaaagcg

SEQ ID NO: 15649 - DNA, 1317 bp, Zea Mays
ggcgaaggcggtgtggctgtcgtgggccatgtaggcggcgaggtcggtcatgcccttgagcacgtcgtccaccacgacgccgtccttgaacttggccaggcacagaggagtccgatggatcgtggcgacatggtggccaatttaagctaccgccgccgacaggggtcactggctgcagagctcatcactcgtcctagagcctgagcctgagtctgtggactggatcatttgggcacacaggagccgttttgcagagctcacagctccgctcccagaattactcctccagagtcaaaccggtaaaaatctaaattactctatgatgaaagtagagttaatctagtttctattttatactagaaagtgagagccaaaaaaatcagctttccaccgctctcaagtctcaacctactccccactaactgttcaagcacttcacatcttatttatcaaacggtttttatcaattaaatttacttttactagagaatcactttactagagaatcacttgaaattacattagtagagaatcagctatcgagtctatagagagtgaagaacttccaaacgagaccactgtaaactaaacacgacgcgcttatccttcccaggcaaaagagcgtgttcggattggattgcgtcacgagctggcttaattccgctcaccaaccaacttgtgtgtgtcagtgcacgcacgggagagcaagggagggaggtgtgggggaaaaaaaaagggagcggttccgtgcgcgctgacgcggctagatctgggacgggtgagagagtcatcattcattccattcgactgggccggcgaccgacacgagcgtacgacgctgcgtgggcagggcagcccagcaccgcatgctttgcttgttcccccctcctcgcccgcctccctctggctctgatgcagatgcaggcccctctcccccatccatccaagatcctcatctccatgtaccctgaccctggatgacaggcaggtccgtcagtcagcactgtgcaccaccgccaacagttaccagtgtcaaatggaatgttgatcgcgcgccctggcagtagcaagatcaggtaggtaatctcaggttcatcagagaccgactgggcggcgtcgtcgtcgtcgtcgcattggattcagaccacatggtactacagcctacagcagagggatacaagctgacaaggtggcgactgatcacgctgctgctgcccgagaagaaattttcacatgcgtggctggataataagacagctgctgctgcatcagccagccacgggttttttattattaattcccagcgacaaatgttac

SEQ ID NO: 15650 - DNA, 1759 bp, Zea Mays
gagaataagtgagaaaaagattcgcttcctacgcgacgcctcgacctcgattccccattcccttttcccctcccgcgcctctgcctccctctctctcgtcatcttctaccggcacggcgcagcaccggcaccgcggcacggcgcatggagatggacccgccgccgccgccacccctgcacgccgaccgccgccgccgcttccgcgactacctgctggcgctggaggaggagcgacgcaagatccagctatcgaggggatgaggagtcacatggacagcgtcgtcgtcggcagcgaggagacggtgagcgaccacggcggccccgtactggaggagttcatgccgctcaagcccacaaccctctcgtcgtcctcctcccagccccattaccaggacgagcacgacagcgcccactaccttgaacaccgccgtggttccgccgccacggccaacgacgtcgtcgatgccgacaaggacggcgaggcggtgggcgatctggagacggcagcagccagcagcagcaggccgttgccacatccggaaacgaagaaggcgatgccggactggctgcagtccgtgcagctctggagtaaccaacaacagccctccgcgtccccgccgcagcaccaggatgagctgctgctgccgtgcaggccggtggcgctcaacgcctgcaggaagcccgggggcgcgttccagccgttcgagaaggagaagaagaagaaggacaaggaggagaagcagcgcgccgagctggagctgccgctgcccgccgcggcgagctcggccgtggtcggggacagctgcgacagggccggcgccaccgacacggacaccgacacggccgagaacaataaggccagcagcaacaaaggcggcaacgacaaggaggctcagctgtcctcgcagtcgcaggcgcccagccggaaggcgcggcggtgctgggccccggagctccaccgccggttcctacaggcgctgcagcagctcggcgggtcccacgtggcgacgcccaagcagatacgggagctcatgaatgtcgacggcctcaccaacgacgaggtcaagagccatttgcagaagtatcgtctccacactcggcggccgaactcggcggcggcggcggtccagagcggcggcaccagcgtcgttgctccgccggccgcaccgcagttcgtcgtggtggggggcatctgggtgccaccgccggagtacgctgccgctgtcgctgtcgctgcggcagccgcagcgcagccgcagcaggtgcacctagccggcgacgcgtcgggaacgacgacaacagccgccgacaaggtgtacgcgccggtggcgacgacgttgacgcccgcaccgcgaccgcgaccgcgaccgcgtccggagaggcagtcgagcagctgctccggcgcgcggcgcagcggggacgcctgctctggctcgccggccgtgttgtcgtcgtcgtcgcataccgcctctgcctaatgaaacgccgtcggtcggtcggtcgccaactcggcttctaattttagctgattattacgtccggaggtacagacagtcagacgtacacacgtgaatctgggagctccttcttcgtgctagcttgaatacgataatatgatccagcattttgctctctgtttttgtgattaaagatgaaaaaagaagagtggtacgcgccctgcagaccacaattgttttgtactagttaaaaaaatacttttggtgttgtttattttttagctgatgctgcccgtgttttc

SEQ ID NO: 15651 - DNA, 1368 bp, Zea Mays
ggtccgtgccgtagtcgacagtcgccggcgcgtcggccgcggtgatccatgacacccgtaccttgtctggccctaccagtgatatgtgcacctggaattcgcgtcggcatgcactagttagttagctcactaacctaaagctaatttttcgatgcggcgcccgtgattaggcacaagcaacaggtaaccggcacgcgtgctgacacgtcgtgcgttgtcagggcaatggcccgtgattaggcaggaaactgagctgcgtctcttctctcagctagctgtgtggacccatacgtgctgagtccaggcacaataattccttcctaccttgaaactttcccagcactacatgtatcatcgtgtacggcatatatataaagcaaaagtaatatacaaagaaaagataaaaatatttattctcctaatttggaacggcatatgagacaatattaatcatataattaggtcctggattgctaacaagaaaacaacacatagaaaaaaacttctaattggagtggcggcaatgttttggtctatttggctttgtcgcaatgatgttgtttttacttttaaaccaaaaccatcaattatgcaggttcttttcagggcaacatactggctcagattctggagattgttgcagaaagaacaacctcaacacgagattcttgcggtatgtcgatccttagaagtggtggctatggagatctttgcaagccatggatggaggtccaatgctaaattaaaaggagcttgatttgttgatgttttatttcaaagaatgtttacgatggatggttgttttttcgatttgtaaggccgtatgtaagagattgcaaaaggctggaacattttgtttccataatcaaaaaaaatatgagccattaacgagagaaatgccacgctgcagatgacgaccatggatctggcagtgacgaccaggatgcatgtttgctgcccccgcaacagacagacaatctcgtgtgcgcgtccgagatggaaggccaacaaaaacttactcaagcaatcgcaggtattttcataattatccagacagagcaacgcggcgtacctgctgcggcgtctgcccgtcggcgccggcgtcgtcctcgagcagcgacgacagcgtggccctcggcggcggccgcacgtacgtagacgtcacggcgagggacgccggcagcgcgaggacgaggagcgccagcgccagcgccgccgtggccattgattggcacagcagcaacctgctctcgatccttctgctgcctgaatctagacggctctgcagcagcacacaagcggaaatggaaagaggatgtgggaaattggaatggctggccctggacggggatggtcacggcctcacgg

SEQ ID NO: 15652 - DNA, 525 bp, Zea Mays
atggccatggtcatcaaatttcaggttatgacagacccagatgttccaggaccaagtgatccatacctaagggagcaccttcattggatcgtgactgatatacctgggacaacagatgcctccttcgggcgacagatcataagctacgagagcccaagacctagcattgagatcatttcaacacccggcagttcgctgaggaaaatgaccttggcctccctgtagctgccgtctacttcaatgcacagagagaaactgctgctaggagacgctgaaaatcccagctcttattgcctacctgacgataataagggccttctgatcttctttctaggaagtcgatgaacttattctacattaaattctcctgagcactaccttataaataaaccagatgtattttgcggattgtgttagtactagaatgttttgtaagtaggaagaatgagaactatgaatgatccatgcttgtggtacaatttcatgtgtaagacctctatcactgaaagccagaaatcagggttg

SEQ ID NO: 15653 - DNA, 758 bp, Zea Mays
tttagcttgatccaaacacagaagcatgctttacatagagacagccgatcggcctggcctacttcttgagataatcaagatcatcgcggacacaaatattgatgtggagtcagctgagattgatactgaaggtttggttgcgaaggacaagttccatgtgagttacagaggtgcaaaactaaacagctcctcatctcaggtgttgatcaattgtctgcgttattacctccgaaggcctgagacagatgaagacagctattgactgttgtgttgttgaaccttgctagtactacattaaaaccagaaacttcaaagtttggcttgagttccttctctatgagcccccctgtactgctgcaaatggagtttccattgtagctgataaagtgcaggcaaggcacatgctaatgtgcataggtggcattgaaattgggctcacagtcactgaaccagtttgatattttgtagtcatatacagctgggagcaacagaagttaggtgtcgatcatcattatcccatttggttcctgttacaagggatcacattggaaggtcatcacatgattgacattgtctgtaagttggtacaatccgtttgcatgtaaaactcagctgtggagtgtggtgttctctttggatgaaataaaaagaaagagcattacgaaatcaccgacctccttggtcctgatcagatgtgcttattgtaaccgttttgatatggtcaattggaagagctaagtttatattgaatctttttc

SEQ ID NO: 15654 - DNA, 1387 bp, Zea Mays
cccgctttccgttccgtccccggccggcgccaacgccaacgccactccagtaagccgaagcgaggaggtggagacggtcacggtgggcagagtggcacgactctcgattccgccccgctccagattgctgtgctcgcccactcactcacccatggcgctcgccgcctcccaccaccgcctcctgcccgtcgcccccacccccgctgccacccgtaccccgtcgcgggggcacctgcgcttccgcgccgcgcgacctctgccccgctcccggagaatttgttgtcaatctatcaactcaactaatgttttgggagcttcttcgaagacatctgatgaggcaatcccagtcccagttgtccagatagatcaagactcagaccgtgatgcaaccattgtgcagctaagttttggagatcgtttgggggcattacttgacacgatgaaagctctcaaggaccttggccttgatgtctcaaaaggaagtgtggcaactgactcagctgtcacacaaacaaagttccacatcatgcgattcgggcgcaaggttgaggatcctgacatgttagaaaggatacggctaaccatcatcaacaacctgctccagtatcatcctgaatcaagtgagaagttggcaatgggtgaattttttgggataaaacctcctgtgaagaaggttgatatcgatattgcaacacatatagttgttgaagacgacgggccaaaaagaagcatgctttacatagagacagccgatcggcctggcctacttcttgagataatcaagatcatcgcggacacaaatattgatgtggagtcagctgagattgatactgaaggtttggttgcgaaggacaagttccatgtgagttacagaggtgcaaaactaaacagctcctcatctcaggtgttgatcaattgtctgcgttattacctccgaaggcctgagacagatgaagacagctattgactgttgtgttgttgaaccttgctagtactacattaaaaccagaaacttcaaagtttggcttgagttccttctctatgagcccccctgtactgctgcaaatggagtttccattgtagctgataaagtgcagtcatatacagctgggagcaacagaagttaggtgtcgatcatcattatcccatttggttcctgttacaagggatcacattggaaggtcatcacatgattgacattgtctgtaagttggtacaatccgtttgcatgtaaaactcagctgtggagtgtggtgttctctttggatgaaataaaaagaaagagcattacgaaatcaccgacctccttggtcctgatcagatgtgcttattgtaaccgttttgatatggtcaattggaagagctaagtttatattgaatctttttc

SEQ ID NO: 15655 - DNA, 1308 bp, Zea Mays
atggcaactttgggtcagtggcgcttaaagcactttctgacaatcagaaggcttgcgcagaaccgagaagctgcgcgcaaaagccggctgcgaaagaaggcttacatccagcagcttgagagcagcaagctgaagcttgcccaaatggaacgggacatgcagagagcacactcccagccccagggcgtctttcttggaggagctccaggtgcaaacgccagctcaggcgcggcaatgatcgacgcggagtacgcccgttggctggatgaccaaggccagcgcaaggccgagctacaaggagctctgcaagcgcacttgcccgacggtgatctccaagcgatcgtggatgacaccctgacccaccacgacgagctgttcaggctgaaggcttcagcagccaagtccgacgtgttccacgtcatcaccggggcgtggacgacccctgccgagcggtgcttcctctggatgggtggattcaggccatcggatctggtcaagacgctgctgccccagctagaccccctgaccgagcagcagcaactggtaggcatatgcaaccttaagcagtcgtcacagcaggcagaggaagctctctcccagggcctggaccagctgcatcagtcactagctgacaccatggccaacggatcgctgatcgacgacaccagcatgagcttcatgggtcaaatggcccttgcccttggcaagctgtccagccttgaagtttttgtgatacaggctgataacttgaggcagcagactcttcatcagatgcgccggattctgacagttcggcaggcagctcgctgtttccttgccatcgccgggtaccagaaccgcctgcgcgccctaagctccctctgggtttctcggcctcgagagatactggttgcagatgaaggcgactgtggggagatgagcgctgcagcataggagcaagggagaaacgactgggaagtggaaagagaggttttggatgccatcagatatatctgagaggcactgaagagatctggggaatggaccaagctttagaacagggaaatgatccgtctgaaaacgtgcggaacctgtaggagcagtttccaggacgtgaaaaattgttctgttcactggagccgtgcccagtacactgcacgttcttctggttctgtctggtctcaattctcaaaagtagctctgcctagctagtgggtgcagtcggcaactcatacagataattgctggttgattacggcatatctactagcaatctctatgaccatgtcactttctagtcacccatgaggattgccaatgcactatctt

SEQ ID NO: 15656 - DNA, 2976 bp, Zea Mays
gtgaatgagctttgtaggagggggaatgagaaagacacgtgatagccgggaatggaaatgtgaatgagctttgcagggagggggaatgagaaagacatttgatagtcgggaatggaaatgtgaatgagctttgcagggagggggaatgagaaagacagacaactgagtctaccccttaccgtcttaataggtagtacagattatttttgataatatagagtgtcatgaaaatcaactagtttctataaattagagtcgcatatttctattcaacttttttttaccacaatcgggtgaggggcgtccattgcgagttgcgactgcgtcgccgattcccctgccggcatgtccagtccgcgccctcccctcggccggatcctccgcctcgccgtcgccgtcgcggcctgcgcctgctttcctagccccgtctccggcatccggaagggcattgactttattcaaccaattgtgtgcagaagcactgttcaggggcggcatctgatctctgatgataatggttatgtatgttctgcactttcaatcaatccatggtctcactgctgcccaacaacaggggaccgcttttcctgccagggctgcgaacttgatttacagtgctgcaattcatatgaatattgtgtttcttgctgtttgaatccttctaagatcaagaaagaagacgtgctgaagctgaaggtagctaagccagttactgctggaacatacacaaatgttttcgatttctgcatgggacgatgccgccatagctctgcaagtgtggttcatgaaaatgcctatgccagtgatttccatcactgtttttcagtgcaacaaaattcatcaggatcaactgagtctagttctgtatcaaagttgttgggcattaacgttgtagtaggaaggcccagggaatcttgcagcttggtgtgcaaagtaagaggacagtcctgtgttccaagcaggctctctgtgttgaacaaatgtgagattttgcagaaatatatgagatgcaagagtggctgctttcccagccttggaccagatcaacctgctgaagttgttgacgaagctccaaccagcttggagcatgcttatacatgcagatggatgagcggctcacatgtgatggttcgcaccatcatacccggcggctctgtccatgcgcctgagaaggggaaatgaatgtgacactcataagacagcagagggcttgctcactcgacaggaaacaagtggaggcgataagctgataaccgatggttctccatcacacccccatgacgaacaacctctccacgcaccggttgcgggtttcctcaacaagaacgccctactctcctcctgtttctgggaaggattatggatgcaaaatgaaatggagtgcctgcaaagatctgctccggttcttgagaagcgtcgtggatgcagaaggagatgcaatacctttcaaatccttgcatggtatctggtaggattttgcatgctgaatgaaaatgcacgcaggcgattccacgagcctttcatgcatgttttgagacacctgaaccaattatatatattcgtaatatattgcacaagcttccatgcatgttttaagacaaaagtaacccaaacagaactacggatacatgatcttttaaatcaattacaccatgccagcatctctgcaccacaaactcccatgcccctttttttttggtttccttcgccagcctgaatcaaaaagaataatcaggcttgaaatctctcatggacctgggtctctccctccctttgttatcatctttggtgtttgcactctcttctgcagcagcagctccgtctccctggtcctcctcctggaaggccgggtgggtgaggatgttcgccaggagctgcgtgcccctgagggcgttggtgagcggcaggtgtccctcgggcgtgtcgtccgtcaactcccacaagaactcgtcggggaaggccctgtagttgtactgctccacctccgtgtccagcttcctcatccagccgacccggatgaagaagcgggtgaagtcgcgccgcgacttctcccagagccgccgctgcacgctgtacccgaacctgccgccgctgtgctccttccagagcccgtcgatggcggcgaggtcctcggccgggatgaactggacctcggagaagaagacgtaccctcggcgcctcgcgggctcgccggcgaggtcgatgatcagcgcccgcgtggtctcgtccgcctgccggtagtcgcccgcggcgagctggcggcggaggaggtcgagagaggggccttcttcttcttcttcgtcccctgccgctggtgcagatgccggggcaactggagtcggagctgacgaattggtggctgaggctgctgtcaccgagggggaggttttggtgtagagcctgaaggaaatgctgccgctggtgttggtggagagcttgtgcacggcggacgcggagccgtcacggctgccgccggcgccggcgaaagaatggtcgtgcgggagaaggaaggattgcagagaagcgtttgccatgggtggcaggaggacgcagctgagctgagagcctgagactgagaatggaggggagggagacgatgataaaggagcgagtggatggggtttagtgctgcgagagctgagctgggtggtggtcgtcgtgtggtgtggagaattgaggccgtcgtgttgcctttgtgtgtgtgtgtgttcttgtgacagtccacctttgtgggtgtcgtgtgccaagtcctggcctcgatggctgtgggagattttgggcggtggttttttagggggcccattctgggcgagaatacgaaggtggggctgtgattggtgggttctgggtgagatgaggatactggctatggcaaacaatccaaacaccaacggagatagggtctgtttcgtttagcttcttttcttgacgatttctgaaaatctgaccgttagaaaaaacctgagtatcataagg

SEQ ID NO: 15657 - DNA, 2821 bp, Zea Mays
gtgaatgagctttgtaggagggggaatgagaaagacacgtgatagccgggaatggaaatgtgaatgagctttgcagggagggggaatgagaaagacatttgatagtcgggaatggaaatgtgaatgagctttgcagggagggggaatgagaaagacagacaactgagtctaccccttaccgtcttaataggaagggcattgactttattcaaccaattgtgtgcagaagcactgttcaggggcggcatctgatctctgatgataatggttatgtatgttctgcactttcaatcaatccatggtctcactgctgcccaacaacaggggaccgcttttcctgccagggctgcgaacttgatttacagtgctgcaattcatatgaatattgtgtttcttgctgtttgaatccttctaagatcaagaaagaagacgtgctgaagctgaaggtagctaagccagttactgctggaacatacacaaatgttttcgatttctgcatgggacgatgccgccatagctctgcaagtgtggttcatgaaaatgcctatgccagtgatttccatcactgtttttcagtgcaacaaaattcatcaggatcaactgagtctagttctgtatcaaagttgttgggcattaacgttgtagtaggaagttaggcccagggaatcttgcagcttggtgtgcaaagtaagaggacagtcctgtgttccaagcaggctctctgtgttgaacaaatgtgagattttgcagaaatatatgagatgcaagagtggctgctttcccagccttggaccagatcaacctgctgaagttgttgacgaagctccaaccagcttgaatccaggagcatgcttatacatgcagatggatgagcggctcacatgtgatggttcgcaccatcatacccggcggctctgtccatgcgcctgagaaggggaaatgaatgtgacactcataagacagcagaggggtagttttctctgaaaaactttctaccatgttttaggttcatttaattgccaactgccaagatgtggacaacgttggtttgcagcttgctcactcgacaggaaacaagtggaggcgataagctgataaccgatggttctccatcacacccccatgacgaacaacctctccacgcaccggttgcgggtttcctcaacaagaacgccctactctcctcctgtttctgggaaggattatggatgcaaaatgaaatggagtgcctgcaaagatctgctccggttcttgagaagcgtcgtggatgcagaaggagatgcaatacctttcaaatccttgcatggtatctggtaggattttgcatgctgaatgaaaatgcacgcaggcgattccacgagcctttcatgcatgttttgagacacctgaaccaattatatatattcgtaatatattgcacaagcttccatgcatgttttaagacaaaagtaacccaaacagaactacggatacatgatcttttaaatcaattacaccatgccagcatctctgcaccacaaactcccatgcccctttttttttggtttccttcgccagcctgaatcaaaaagaataatcaggcttgaaatctctcatggacctgggtctctccctccctttgttatcatctttggtgtttgcactctcttctgcagcagcagctccgtctccctggtcctcctcctggaaggccgggtgggtgaggatgttcgccaggagctgcgtgcccctgagggcgttggtgagcggcaggtgtccctcgggcgtgtcgtccgtcaactcccacaagaactcgtcggggaaggccctgtagttgtactgctccacctccgtgtccagcttcctcatccagccgacccggatgaagaagcgggtgaagtcgcgccgcgacttctcccagagccgccgctgcacgctgtacccgaacctgccgccgctgtgctccttccagagcccgtcgatggcggcgaggtcctcggccgggatgaactggacctcggagaagaagacgtaccctcggcgcctcgcgggctcgccggcgaggtcgatgatcagcgcccgcgtggtctcgtccgcctgccggtagtcgcccgcggcgagctggcggcggaggaggtcgagagaggggccttcttcttcttcttcgtcccctgccgctggtgcagatgccggggcaactggagtcggagctgacgaattggtggctgaggctgctgtcaccgagggggaggttttggtgtagagcctgaaggaaatgctgccgctggtgttggtggagagcttgtgcacggcggacgcggagccgtcacggctgccgccggcgccggcgaaagaatggtcgtgcgggagaaggaaggattgcagagaagcgtttgccatgggtggcaggaggacgcagctgagctgagagcctgagactgagaatggaggggagggagacgatgataaaggagcgagtggatggggtttagtgctgcgagagctgagctgggtggtggtcgtcgtgtggtgtggagaattgaggccgtcgtgttgcctttgtgtgtgtgtgtgttcttgtgacagtccacctttgtgggtgtcgtgtgccaagtcctggcctcgatggctgtgggagattttgggcggtggttttttagggggcccattctgggcgagaatacgaaggtggggctgtgattggtgggttctgggtgagatgaggatactggctatggcaaacaatccaaacaccaacggagatagggtctgtttcgtttagcttcttttcttgacgatttctgaaaatctgaccgttagaaaaaacctgagtatcataagg

SEQ ID NO: 15658 - DNA, 2842 bp, Zea Mays
gtgaatgagctttgtaggagggggaatgagaaagacacgtgatagccgggaatggaaatgtgaatgagctttgcagggagggggaatgagaaagacatttgatagtcgggaatggaaatgtgaatgagctttgcagggagggggaatgagaaagacagacaactgagtctaccccttaccgtcttaataggtagtacagattatttttgataatatagagtgtcatgaaaatcaactagtttctataaattagagtcgcatatttctattcaacttttttttaccacaatcgggtgaggggcgtccattgcgagttgcgactgcgtcgccgattcccctgccggcatgtccagtccgcgccctcccctcggccggatcctccgcctcgccgtcgccgtcgcggcctgcgcctgctttcctagccccgtctccggcatccgcagttgaaggttccttgtacataacgccgagtacttgcaccactgaggattcacttggtcacgggttgggacctcatgcttgattctagtattgacgtgtgctgtgagggcagaaggaagggcattgactttattcaaccaattgtgtgcagaagcactgttcaggggcggcatctgatctctgatgataatggttatgtatgttctgcactttcaatcaatccatggtctcactgctgcccaacaacaggggaccgcttttcctgccagggctgcgaacttgatttacagtgctgcaattcatatgaatattgtgtttcttgctgtttgaatccttctaagatcaagaaagaagacgtgctgaagctgaaggtagctaagccagttactgctggaacatacacaaatgttttcgatttctgcatgggacgatgccgccatagctctgcaagtgtggttcatgaaaatgcctatgccagtgatttccatcactgtttttcagtgcaacaaaattcatcaggatcaactgagtctagttctgtatcaaagttgttgggcattaacgttgtagtaggaagttaggcccagggaatcttgcagcttggtgtgcaaagtaagaggacagtcctgtgttccaagcaggctctctgtgttgaacaaatgtgagattttgcagaaatatatgagatgcaagagtggctgctttcccagccttggaccagatcaacctgctgaagttgttgacgaagctccaaccagcttgaatccaggagcatgcttatacatgcagatggatgagcggctcacatgtgatggttcgcaccatcatacccggcggctctgtccatgcgcctgagaaggggaaatgaatgtgacactcataagacagcagaggggtagttttctctgaaaaactttctaccatgttttaggttcatttaattgccaactgccaagatgtggacaacgttggtttgcagcttgctcactcgacaggaaacaagtggaggcgataagctgataaccgatggttctccatcacacccccatgacgaacaacctctccacgcaccggttgcgggtttcctcaacaagaacgccctactctcctcctgtttctgggaaggattatggatgcaaaatgaaatggagtgcctgcaaagatctgctccggttcttgagaagcgtcgtggatgcagaaggagatgcaatacctttcaaatccttgcatggtatctgcagctccgtctccctggtcctcctcctggaaggccgggtgggtgaggatgttcgccaggagctgcgtgcccctgagggcgttggtgagcggcaggtgtccctcgggcgtgtcgtccgtcaactcccacaagaactcgtcggggaaggccctgtagttgtactgctccacctccgtgtccagcttcctcatccagccgacccggatgaagaagcgggtgaagtcgcgccgcgacttctcccagagccgccgctgcacgctgtacccgaacctgccgccgctgtgctccttccagagcccgtcgatggcggcgaggtcctcggccgggatgaactggacctcggagaagaagacgtaccctcggcgcctcgcgggctcgccggcgaggtcgatgatcagcgcccgcgtggtctcgtccgcctgccggtagtcgcccgcggcgagctggcggcggaggaggtcgagagaggggccttcttcttcttcttcgtcccctgccgctggtgcagatgccggggcaactggagtcggagctgacgaattggtggctgaggctgctgtcaccgagggggaggttttggtgtagagcctgaaggaaatgctgccgctggtgttggtggagagcttgtgcacggcggacgcggagccgtcacggctgccgccggcgccggcgaaagaatggtcgtgcgggagaaggaaggattgcagagaagcgtttgccatgggtggcaggaggacgcagctgagctgagagcctgagactgagaatggaggggagggagacgatgataaaggagcgagtggatggggtttagtgctgcgagagctgagctgggtggtggtcgtcgtgtggtgtggagaattgaggccgtcgtgttgcctttgtgtgtgtgtgtgttcttgtgacagtccacctttgtgggtgtcgtgtgccaagtcctggcctcgatggctgtgggagattttgggcggtggttttttagggggcccattctgggcgagaatacgaaggtggggctgtgattggtgggttctgggtgagatgaggatactggctatggcaaacaatccaaacaccaacggagatagggtctgtttcgtttagcttcttttcttgacgatttctgaaaatctgaccgttagaaaaaacctgagtatcataagg

SEQ ID NO: 15659 - DNA, 610 bp, Zea Mays
caaaatgataatgggaaaacaaaatagcttgaaggtatttcgaagaccaagtgaaatgaagtttatagccctccaaaaggtggaagcggacggttcgatcgttaagatcaggcatggagagaagcttgatgactacatgaagttctttgatggtcttcctgcttagatgtttattatctgcgactgctacggacgatgttttcttggggataattggattttctttgtcaagctcatttttgctttcttgtggttatgtaatgttactggatactggatagctagttggtgcatcctcaacttccttttcatttctgttagtttcgtcaccaagttcgtcctcaattgctatttggttgtaacccagctgtaggatgcctggctagcctgtaaccgcctgagcgtgatttggttgggaactgacggtttcacctggtgagacatgcctgcgaaccaaatctgtcccctgggctgccgtatgtgtgataccaaaatctgttgtagccttgtaggtttactattgctgcatatagtataatgatgtctttgtatttttttttcgtaaaaaatcgaataaacggtttggtcaaatttagtaaaaagtcaaaac

SEQ ID NO: 15660 - DNA, 583 bp, Zea Mays
aatggagatatgaataaaacagtaccagacaaaatgataatgggaaaacaaagtggaagcggacggttcgatcgttaagatcaggcatggagagaagcttgatgactacatgaagttctttgatggtcttcctgcttagatgtttattatctgcgactgctacggacgatgttttcttggggataattggattttctttgtcaagctcatttttgctttcttgtggttatgtaatgttactggatactggatagctagttggtgcatcctcaacttccttttcatttctgttagtttcgtcaccaagttcgtcctcaattgctatttggttgtaacccagctgtaggatgcctggctagcctgtaaccgcctgagcgtgatttggttgggaactgacggtttcacctggtgagacatgcctgcgaaccaaatctgtcccctgggctgccgtatgtgtgataccaaaatctgttgtagccttgtaggtttactattgctgcatatagtataatgatgtctttgtatttttttttcgtaaaaaatcgaataaacggtttggtcaaatttagtaaaaagtcaaaac

SEQ ID NO: 15661 - DNA, 787 bp, Zea Mays
tgaagcactatgattggagcaacttgatgaaaaatgtgtttagcatatcgaactggtctctccccccactcctggtgctgaagcagcgaccttcgatattgttggaccagtttgtgagtctgcagatttccttggaaaagatagggaacttccaacacctgatgagggagctggactggttgttcatgatgcaggtgcctactgcatgagcatggcttccacctacaacctgaagttgaggccaccggaatactgggtggaagcggacggttcgatcgttaagatcaggcatggagagaagcttgatgactacatgaagttctttgatggtcttcctgcttagatgtttattatctgcgactgctacggacgatgttttcttggggataattggattttctttgtcaagctcatttttgctttcttgtggttatgtaatgttactggatactggatagctagttggtgcatcctcaacttccttttcatttctgttagtttcgtcaccaagttcgtcctcaattgctatttggttgtaacccagctgtaggatgcctggctagcctgtaaccgcctgagcgtgatttggttgggaactgacggtttcacctggtgagacatgcctgcgaaccaaatctgtcccctgggctgccgtatgtgtgataccaaaatctgttgtagccttgtaggtttactattgctgcatatagtataatgatgtctttgtatttttttttcgtaaaaaatcgaataaacggtttggtcaaatttagtaaaaagtcaaaac

SEQ ID NO: 15662 - DNA, 2298 bp, Zea Mays
gcgccgaggtaacacacatcgacgccagtaccattggcgccactatgtgttacctcggcgccaatgatgacgacgccgaggtaagggtccattttttgaaatgaaactacaaagggcataattgtgcaaaagaaaccccaaaaggactaaaatgcaaaaaagctggggattttgacttgctatggatttccgactcaatcccacccaatccacgtggattaacgcaaaaacgaactagccctcacgtggattcagtggattcagatgaaaacaaacgtgccctgagtttgattggtgtggaatatctggtatctgaaaaataaataaaataaaataaattggagaaaaagagaacaaccgagcaagtccgtcagacataaacaattcgtgtgactgaggcccgtcacatgtggaggtcaaatccacgtgtttgcgtggaattgcgatagtcgcacagagcacttttgctaaatcgctagttcgtttcctaaaccctagcaaagtaggaatggcgtcggcgagcatgctcgcgcgctcccttctccgcaccccagaccctacccaaacgagccacccgaaccgccggagcgccgctgtcgtctccttcccccgccgccaccgccgcctgtccgtgcgcgcctccgtctccacggcctccccttccccaccgccacagcccgcggcggcggctgccggcgtgccgaagcactgcttccggcgcggggccgatggctacctgtactgcgagggagtgcgggtggaggacgcgatgacggctgccgagcgcagccccttctacctctacagcaagccacagatcctccgcaacttcgccgcctaccgcgatgctctccaggggctccgctccatcatcggatcaggtgcatatttaacggaaatgggaagacactcgaacatcttaaattagctgctgagagtggagtatttgtaaatgtggatagcgaatttgatttggagaatattgtcagagctgcaagagctactggaaagaaagtgcctgttttgcttcgaataaatccagatgtggatccgcaggtacatccttatgttgccacgggaaataaaacgtctaaatttgggatccgcaatgagaaattgcaatggtttttggactctatcaagtcatacccgaatgaaatcaaactcgttggtgttcattgccatctgggatctactattacaaaggttgatatattcagagatgctgcagttcttatgctgaattatgtcgatgaaattcgagcacaaggttttaagttggagtacctgaatatcggaggtggtttgggaatagattaccatcataccgatgcagtcttacctacacctatggatctcatcaacactgtgcgagaattagttctctctcaagatctcactcttattattgaacccggaagatccttgattgctaatacttgctgcttcgtcaatagagtaactggtgttaaatctaatggtacaaagaatttcattgttgttgatggcagcatggcagaactcatcagacctagtctgtatggagcataccagcatatcgaactggtctctccccccactcctggtgctgaagcagcgaccttcgatattgttggaccagtttgtgagtctgcagatttccttggaaaagatagggaacttccaacacctgatgagggagctggactggttgttcatgatgcaggtgcctactgcatgagcatggcttccacctacaacctgaagttgaggccaccggaatactgggtggaagcggacggttcgatcgttaagatcaggcatggagagaagcttgatgactacatgaagttctttgatggtcttcctgcttagatgtttattatctgcgactgctacggacgatgttttcttggggataattggattttctttgtcaagctcatttttgctttcttgtggttatgtaatgttactggatactggatagctagttggtgcatcctcaacttccttttcatttctgttagtttcgtcaccaagttcgtcctcaattgctatttggttgtaacccagctgtaggatgcctggctagcctgtaaccgcctgagcgtgatttggttgggaactgacggtttcacctggtgagacatgcctgcgaaccaaatctgtcccctgggctgccgtatgtgtgataccaaaatctgttgtagccttgtaggtttactattgctgcatatagtataatgatgtctttgtatttttttttcgtaaaaaatcgaataaacggtttggtcaaatttagtaaaaagtcaaaac

SEQ ID NO: 15663 - DNA, 2094 bp, Zea Mays
gcgccgaggtaacacacatcgacgccagtaccattggcgccactatgtgttacctcggcgccaatgatgacgacgccgaggtaagggtccattttttgaaatgaaactacaaagggcataattgtgcaaaagaaaccccaaaaggactaaaatgcaaaaaagctggggattttgacttgctatggatttccgactcaatcccacccaatccacgtggattaacgcaaaaacgaactagccctcacgtggattcagtggattcagatgaaaacaaacgtgccctgagtttgattggtgtggaatatctggtatctgaaaaataaataaaataaaataaattggagaaaaagagaacaaccgagcaagtccgtcagacataaacaattcgtgtgactgaggcccgtcacatgtggaggtcaaatccacgtgtttgcgtggaattgcgatagtcgcacagagcacttttgctaaatcgctagttcgtttcctaaaccctagcaaagtaggaatggcgtcggcgagcatgctcgcgcgctcccttctccgcaccccagaccctacccaaacgagccacccgaaccgccggagcgccgctgtcgtctccttcccccgccgccaccgccgcctgtccgtgcgcgcctccgtctccacggcctccccttccccaccgccacagcccgcggcggcggctgccggcgtgccgaagcactgcttccggcgcggggccgatggctacctgtactgcgagggagtgcgggtggaggacgcgatgacggctgccgagcgcagccccttctacctctacagcaagccacagatcctccgcaacttcgccgcctaccgcgatgctctccaggggctccgctccatcatcgggtatgccgtgaaggccaacaacaacctccccgtgctacgcgtcctgcgtgagcttggctgcggcgccgtcctcgtcagcggcaacgagctccgactcgccctccaggcgggattcgaccccgccaggttgatatattcagagatgctgcagttcttatgctgaattatgtcgatgaaattcgagcacaaggttttaagttggagtacctgaatatcggaggtggtttgggaatagattaccatcataccgatgcagtcttacctacacctatggatctcatcaacactgtgcgagaattagttctctctcaagatctcactcttattattgaacccggaagatccttgattgctaatacttgctgcttcgtcaatagagtaactggtgttaaatctaatggtacaaagaatttcattgttgttgatggcagcatggcagaactcatcagacctagtctgtatggagcataccagcatatcgaactggtctctccccccactcctggtgctgaagcagcgaccttcgatattgttggaccagtttgtgagtctgcagatttccttggaaaagatagggaacttccaacacctgatgagggagctggactggttgttcatgatgcaggtgcctactgcatgagcatggcttccacctacaacctgaagttgaggccaccggaatactgggtggaagcggacggttcgatcgttaagatcaggcatggagagaagcttgatgactacatgaagttctttgatggtcttcctgcttagatgtttattatctgcgactgctacggacgatgttttcttggggataattggattttctttgtcaagctcatttttgctttcttgtggttatgtaatgttactggatactggatagctagttggtgcatcctcaacttccttttcatttctgttagtttcgtcaccaagttcgtcctcaattgctatttggttgtaacccagctgtaggatgcctggctagcctgtaaccgcctgagcgtgatttggttgggaactgacggtttcacctggtgagacatgcctgcgaaccaaatctgtcccctgggctgccgtatgtgtgataccaaaatctgttgtagccttgtaggtttactattgctgcatatagtataatgatgtctttgtatttttttttcgtaaaaaatcgaataaacggtttggtcaaatttagtaaaaagtcaaaac

SEQ ID NO: 15664 - DNA, 1045 bp, Zea Mays
ctctacaagtgtctggaaagccaattaaatttgtaggacaaggagagcgtattgaagatcttgagcctttctacccagatcgtatggcacaacgtatcttgggaatgggagatgtactttcatttgttgaaaaagcacaagaagtgatgcgccaagaagatgctgatgaattacagaagaagatcttgagtgcaaaattcaactttaatgacttcctgaagcaaacacaaatgattgcaaaaatgggttcattcagtcgtttgattggcatgattccgggcatgaacaaggttactcctgcacaaatccgtgaagctgagaagaatctcaagtttatggaatcaatgatcaatgtgatgactcttgaggaaagggaacgaccagagcttcttgctgaatcacgcgagagaaggaaacgagtggccaaggactctggaaagactgaacagcaggtgagccaattggtcgcgcaactcttccaaatgcgtgcaaaaatgcagaaaatgatgggcgctatgcaaggaaaagagtcaccagacatggacgagctcatgggatcgatgaaagctgaggagcagtctgctgccggtactggacggcgtagaaggaagtatggcaacctgaggcagcggcaactggatgccatgcgtggtttccgcagacggtgagatgttcattgccgactagcactggcggtgcctgcacgaacgatggcatttagggacttgggctcggatatagaagtggaagaagatgaagtgcttttgggtgcaatggcaatcatctgggtacattgagttgagtttgcatattcatgtgcagtgtcctattttgtcatattagctgtattattatctttcttcggagcaagaactcgcaaaattgcgtcatctgaaccctgtccaccgtcgtggaaacgagtgcacttcggccatgctagcaaatacaaattcggatctggatcatacatgtggcacataactctgtggaagaattttgcgagaaaaaaaaatcaccaataagcatagctaactttgcttttagt

SEQ ID NO: 15665 - DNA, 1095 bp, Zea Mays
cttgttttctgtcgttttgtttcatcgattaccttcagaaaaccgcgaccaattcaaggtgtctggaaagccaattaaatttgtaggacaaggagagcgtattgaagatcttgagcctttctacccagatcgtatggcacaacgtatcttgggaatgggagatgtactttcatttgttgaaaaagcacaagaagtgatgcgccaagaagatgctgatgaattacagaagaagatcttgagtgcaaaattcaactttaatgacttcctgaagcaaacacaaatgattgcaaaaatgggttcattcagtcgtttgattggcatgattccgggcatgaacaaggttactcctgcacaaatccgtgaagctgagaagaatctcaagtttatggaatcaatgatcaatgtgatgactcttgaggaaagggaacgaccagagcttcttgctgaatcacgcgagagaaggaaacgagtggccaaggactctggaaagactgaacagcaggtgagccaattggtcgcgcaactcttccaaatgcgtgcaaaaatgcagaaaatgatgggcgctatgcaaggaaaagagtcaccagacatggacgagctcatgggatcgatgaaagctgaggagcagtctgctgccggtactggacggcgtagaaggaagtatggcaacctgaggcagcggcaactggatgccatgcgtggtttccgcagacggtgagatgttcattgccgactagcactggcggtgcctgcacgaacgatggcatttagggacttgggctcggatatagaagtggaagaagatgaagtgcttttgggtgcaatggcaatcatctgggtacattgagttgagtttgcatattcatgtgcagtgtcctattttgtcatattagctgtattattatctttcttcggagcaagaactcgcaaaattgcgtcatctgaaccctgtccaccgtcgtggaaacgagtgcacttcggccatgctagcaaatacaaattcggatctggatcatacatgtggcacataactctgtggaagaattttgcgagaaaaaaaaatcaccaataagcatagctaactttgcttttagt

SEQ ID NO: 15666 - DNA, 1266 bp, Zea Mays
caactatgtaatatcttggatccaggtagataaagcaatgatgaatgagttgaaagaagtaaaaaaagcagtgaatcctacagaagttcttcttgtggttgatgccatgactggccaagaagctgcagggttggtcagctccttcaatgatgagattggtataactggtgctatactgacaaaactggatggtgactcaagaggtggagcagcactgagcgttaaagaggtgtctggaaagccaattaaatttgtaggacaaggagagcgtattgaagatcttgagcctttctacccagatcgtatggcacaacgtatcttgggaatgggagatgtactttcatttgttgaaaaagcacaagaagtgatgcgccaagaagatgctgatgaattacagaagaagatcttgagtgcaaaattcaactttaatgacttcctgaagcaaacacaaatgattgcaaaaatgggttcattcagtcgtttgattggcatgattccgggcatgaacaaggttactcctgcacaaatccgtgaagctgagaagaatctcaagtttatggaatcaatgatcaatgtgatgactcttgaggaaagggaacgaccagagcttcttgctgaatcacgcgagagaaggaaacgagtggccaaggactctggaaagactgaacagcaggtgagccaattggtcgcgcaactcttccaaatgcgtgcaaaaatgcagaaaatgatgggcgctatgcaaggaaaagagtcaccagacatggacgagctcatgggatcgatgaaagctgaggagcagtctgctgccggtactggacggcgtagaaggaagtatggcaacctgaggcagcggcaactggatgccatgcgtggtttccgcagacggtgagatgttcattgccgactagcactggcggtgcctgcacgaacgatggcatttagggacttgggctcggatatagaagtggaagaagatgaagtgcttttgggtgcaatggcaatcatctgggtacattgagttgagtttgcatattcatgtgcagtgtcctattttgtcatattagctgtattattatctttcttcggagcaagaactcgcaaaattgcgtcatctgaaccctgtccaccgtcgtggaaacgagtgcacttcggccatgctagcaaatacaaattcggatctggatcatacatgtggcacataactctgtggaagaattttgcgagaaaaaaaaatcaccaataagcatagctaactttgcttttagt

SEQ ID NO: 15667 - DNA, 2123 bp, Zea Mays
tctcctccgcagaacacactgctcccgtacctcgtctcctgcccaaacccaatggaggccacgacagcgctcgcgctctcctcctcgtcccttgccaccgcacgtcgctcgccggagaaggcgaccgctgcgtccctcagcctccgccgtttctcagctaccacctcgctccacctccgcgctgcccggagcccagcgcttcgctcgcaccagtcacccttccagggatggaggcggcgggggagggcgggcgggctggtggttcgggcggagatgtttggccagctcaccaccggcctcgagtccgcctggaacaagctgaggggagtcgatgtattgacaaaggaaaacatagctgaaccaatgcgggatatcagaagagcacttttggaggccgatgtaagtttgccagtagtaagaagatttattgagtctgtaagtgaaaaggctgtaggcaccgatgtgatccgaggtgtccgacctgaccagcagttggtgaaggttgtgagtgatgaactggtacaactgatgggcggggaggtatcagatttggtgtttgcaaaatctgggccaactattatattattggcaggtctgcaaggtgttggaaaaactactgtttgtgcgaagcttgccttctatctcaaaaaactgggcaagagctgtatgctagttgctgcagatgtttacaggcctgctgctattgatcaactcactattctgggtaaaaagtagaaaacatttgaatgttgataggttggtgtaccagtttactcagaaggaactgaagcaaaaccttcacaaatagccaaaaacggtttgaaggaggcaaaagtcaataaggctgatgtaattatagtggacacggctggaagactgcaggtagataaagcaatgatgaatgagttgaaagaagtaaaaaaagcagtgaatcctacagaagttcttcttgtggttgatgccatgactggccaagaagctgcagggttggtcagctccttcaatgatgagattggtataactggtgctatactgacaaaactggatggtgactcaagaggtggagcagcactgagcgttaaagaggtgtctggaaagccaattaaatttgtaggacaaggagagcgtattgaagatcttgagcctttctacccagatcgtatggcacaacgtatcttgggaatgggagatgtactttcatttgttgaaaaagcacaagaagtgatgcgccaagaagatgctgatgaattacagaagaagatcttgagtgcaaaattcaactttaatgacttcctgaagcaaacacaaatgattgcaaaaatgggttcattcagtcgtttgattggcatgattccgggcatgaacaaggttactcctgcacaaatccgtgaagctgagaagaatctcaagtttatggaatcaatgatcaatgtgatgactcttgaggaaagggaacgaccagagcttcttgctgaatcacgcgagagaaggaaacgagtggccaaggactctggaaagactgaacagcaggtgagccaattggtcgcgcaactcttccaaatgcgtgcaaaaatgcagaaaatgatgggcgctatgcaaggaaaagagtcaccagacatggacgagctcatgggatcgatgaaagctgaggagcagtctgctgccggtactggacggcgtagaaggaagtatggcaacctgaggcagcggcaactggatgccatgcgtggtttccgcagacggtgagatgttcattgccgactagcactggcggtgcctgcacgaacgatggcatttagggacttgggctcggatatagaagtggaagaagatgaagtgcttttgggtgcaatggcaatcatctgggtacattgagttgagtttgcatattcatgtgcagtgtcctattttgtcatattagctgtattattatctttcttcggagcaagaactcgcaaaattgcgtcatctgaaccctgtccaccgtcgtggaaacgagtgcacttcggccatgctagcaaatacaaattcggatctggatcatacatgtggcacataactctgtggaagaattttgcgagaaaaaaaaatcaccaataagcatagctaactttgcttttagt

SEQ ID NO: 15668 - DNA, 1906 bp, Zea Mays
tctcctccgcagaacacactgctcccgtacctcgtctcctgcccaaacccaatggaggccacgacagcgctcgcgctctcctcctcgtcccttgccaccgcacgtcgctcgccggagaaggcgaccgctgcgtccctcagcctccgccgtttctcagctaccacctcgctccacctccgcgctgcccggagcccagcgcttcgctcgcaccagtcacccttccagggatggaggcggcgggggagggcgggcgggctggtggttcgggcggagatgtttggccagctcaccaccggcctcgagtccgcctggaacaagctgaggggagtcgatgtattgacaaaggaaaacatagctgaaccaatgcgggatatcagaagagcacttttggaggccgatgtctgcaaggtgttggaaaaactactgtttgtgcgaagcttgccttctatctcaaaaaactgggcaagagctgtatgctagttgctgcagatgtttacaggcctgctgctattgatcaactcactattctgggtaaaaaggttggtgtaccagtttactcagaaggaactgaagcaaaaccttcacaaatagccaaaaacggtttgaaggaggcaaaagtcaataaggctgatgtaattatagtggacacggctggaagactgcaggtagataaagcaatgatgaatgagttgaaagaagtaaaaaaagcagtgaatcctacagaagttcttcttgtggttgatgccatgactggccaagaagctgcagggttggtcagctccttcaatgatgagattggtataactggtgctatactgacaaaactggatggtgactcaagaggtggagcagcactgagcgttaaagaggtgtctggaaagccaattaaatttgtaggacaaggagagcgtattgaagatcttgagcctttctacccagatcgtatggcacaacgtatcttgggaatgggagatgtactttcatttgttgaaaaagcacaagaagtgatgcgccaagaagatgctgatgaattacagaagaagatcttgagtgcaaaattcaactttaatgacttcctgaagcaaacacaaatgattgcaaaaatgggttcattcagtcgtttgattggcatgattccgggcatgaacaaggttactcctgcacaaatccgtgaagctgagaagaatctcaagtttatggaatcaatgatcaatgtgatgactcttgaggaaagggaacgaccagagcttcttgctgaatcacgcgagagaaggaaacgagtggccaaggactctggaaagactgaacagcaggtgagccaattggtcgcgcaactcttccaaatgcgtgcaaaaatgcagaaaatgatgggcgctatgcaaggaaaagagtcaccagacatggacgagctcatgggatcgatgaaagctgaggagcagtctgctgccggtactggacggcgtagaaggaagtatggcaacctgaggcagcggcaactggatgccatgcgtggtttccgcagacggtgagatgttcattgccgactagcactggcggtgcctgcacgaacgatggcatttagggacttgggctcggatatagaagtggaagaagatgaagtgcttttgggtgcaatggcaatcatctgggtacattgagttgagtttgcatattcatgtgcagtgtcctattttgtcatattagctgtattattatctttcttcggagcaagaactcgcaaaattgcgtcatctgaaccctgtccaccgtcgtggaaacgagtgcacttcggccatgctagcaaatacaaattcggatctggatcatacatgtggcacataactctgtggaagaattttgcgagaaaaaaaaatcaccaataagcatagctaactttgcttttagt

SEQ ID NO: 15669 - DNA, 2031 bp, Zea Mays
gtcgcttccctctcctccgcagaacacactgctcccgtacctcgtctcctgcccaaacccaatggaggccacgacagcgctcgcgctctcctcctcgtcccttgccaccgcacgtcgctcgccggagaaggcgaccgctgcgtccctcagcctccgccgtttctcagctaccacctcgctccacctccgcgctgcccggagcccagcgcttcgctcgcaccagtcacccttccagggatggaggcggcgggggagggcgggcgggctggtggttcgggcggagatgtttggccagctcaccaccggcctcgagtccgcctggaacaagctgaggggagtcgatgtattgacaaaggaaaacatagctgaaccaatgcgggatatcagaagagcacttttggaggccgatgtaagtttgccagtagtaagaagatttattgagtctgtaagtgaaaaggctgtaggcaccgatgtgatccgaggtgtccgacctgaccagcagttggtgaaggttgtgagtgatgaactggtacaactgatgggcggggaggtatcagatttggtgtttgcaaaatctgggccaactattatattattggcaggtctgcaaggtgttggaaaaactactgtttgtgcgaagcttgccttctatctcaaaaaactggttggtgtaccagtttactcagaaggaactgaagcaaaaccttcacaaatagccaaaaacggtttgaaggaggcaaaagtcaataaggctgatgtaattatagtggacacggctggaagactgcaggtagataaagcaatgatgaatgagttgaaagaagtaaaaaaagcagtgaatcctacagaagttcttcttgtggttgatgccatgactggccaagaagctgcagggttggtcagctccttcaatgatgagattggtataactggtgctatactgacaaaactggatggtgactcaagaggtggagcagcactgagcgttaaagaggtgtctggaaagccaattaaatttgtaggacaaggagagcgtattgaagatcttgagcctttctacccagatcgtatggcacaacgtatcttgggaatgggagatgtactttcatttgttgaaaaagcacaagaagtgatgcgccaagaagatgctgatgaattacagaagaagatcttgagtgcaaaattcaactttaatgacttcctgaagcaaacacaaatgattgcaaaaatgggttcattcagtcgtttgattggcatgattccgggcatgaacaaggttactcctgcacaaatccgtgaagctgagaagaatctcaagtttatggaatcaatgatcaatgtgatgactcttgaggaaagggaacgaccagagcttcttgctgaatcacgcgagagaaggaaacgagtggccaaggactctggaaagactgaacagcaggtgagccaattggtcgcgcaactcttccaaatgcgtgcaaaaatgcagaaaatgatgggcgctatgcaaggaaaagagtcaccagacatggacgagctcatgggatcgatgaaagctgaggagcagtctgctgccggtactggacggcgtagaaggaagtatggcaacctgaggcagcggcaactggatgccatgcgtggtttccgcagacggtgagatgttcattgccgactagcactggcggtgcctgcacgaacgatggcatttagggacttgggctcggatatagaagtggaagaagatgaagtgcttttgggtgcaatggcaatcatctgggtacattgagttgagtttgcatattcatgtgcagtgtcctattttgtcatattagctgtattattatctttcttcggagcaagaactcgcaaaattgcgtcatctgaaccctgtccaccgtcgtggaaacgagtgcacttcggccatgctagcaaatacaaattcggatctggatcatacatgtggcacataactctgtggaagaattttgcgagaaaaaaaaatcaccaataagcatagctaactttgcttttagt

SEQ ID NO: 15670 - DNA, 2143 bp, Zea Mays
cgcctcgtcgcttccctctcctccgcagaacacactgctcccgtacctcgtctcctgcccaaacccaatggaggccacgacagcgctcgcgctctcctcctcgtcccttgccaccgcacgtcgctcgccggagaaggcgaccgctgcgtccctcagcctccgccgtttctcagctaccacctcgctccacctccgcgctgcccggagcccagcgcttcgctcgcaccagtcacccttccagggatggaggcggcgggggagggcgggcgggctggtggttcgggcggagatgtttggccagctcaccaccggcctcgagtccgcctggaacaagctgaggggagtcgatgtattgacaaaggaaaacatagctgaaccaatgcgggatatcagaagagcacttttggaggccgatgtaagtttgccagtagtaagaagatttattgagtctgtaagtgaaaaggctgtaggcaccgatgtgatccgaggtgtccgacctgaccagcagttggtgaaggttgtgagtgatgaactggtacaactgatgggcggggaggtatcagatttggtgtttgcaaaatctgggccaactattatattattggcaggtctgcaaggtgttggaaaaactactgtttgtgcgaagcttgccttctatctcaaaaaactgattacagggcaagagctgtatgctagttgctgcagatgtttacaggcctgctgctattgatcaactcactattctgggtaaaaagaaaacatttgaatgttgataggttggtgtaccagtttactcagaaggaactgaagcaaaaccttcacaaatagccaaaaacggtttgaaggaggcaaaagtcaataaggctgatgtaattatagtggacacggctggaagactgcaggtagataaagcaatgatgaatgagttgaaagaagtaaaaaaagcagtgaatcctacagaagttcttcttgtggttgatgccatgactggccaagaagctgcagggttggtcagctccttcaatgatgagattggtataactggtgctatactgacaaaactggatggtgactcaagaggtggagcagcactgagcgttaaagaggtgtctggaaagccaattaaatttgtaggacaaggagagcgtattgaagatcttgagcctttctacccagatcgtatggcacaacgtatcttgggaatgggagatgtactttcatttgttgaaaaagcacaagaagtgatgcgccaagaagatgctgatgaattacagaagaagatcttgagtgcaaaattcaactttaatgacttcctgaagcaaacacaaatgattgcaaaaatgggttcattcagtcgtttgattggcatgattccgggcatgaacaaggttactcctgcacaaatccgtgaagctgagaagaatctcaagtttatggaatcaatgatcaatgtgatgactcttgaggaaagggaacgaccagagcttcttgctgaatcacgcgagagaaggaaacgagtggccaaggactctggaaagactgaacagcaggtgagccaattggtcgcgcaactcttccaaatgcgtgcaaaaatgcagaaaatgatgggcgctatgcaaggaaaagagtcaccagacatggacgagctcatgggatcgatgaaagctgaggagcagtctgctgccggtactggacggcgtagaaggaagtatggcaacctgaggcagcggcaactggatgccatgcgtggtttccgcagacggtgagatgttcattgccgactagcactggcggtgcctgcacgaacgatggcatttagggacttgggctcggatatagaagtggaagaagatgaagtgcttttgggtgcaatggcaatcatctgggtacattgagttgagtttgcatattcatgtgcagtgtcctattttgtcatattagctgtattattatctttcttcggagcaagaactcgcaaaattgcgtcatctgaaccctgtccaccgtcgtggaaacgagtgcacttcggccatgctagcaaatacaaattcggatctggatcatacatgtggcacataactctgtggaagaattttgcgagaaaaaaaaatcaccaataagcatagctaactttgcttttagt

SEQ ID NO: 15671 - DNA, 2121 bp, Zea Mays
ctcttatccgcctcgtcgcttccctctcctccgcagaacacactgctcccgtacctcgtctcctgcccaaacccaatggaggccacgacagcgctcgcgctctcctcctcgtcccttgccaccgcacgtcgctcgccggagaaggcgaccgctgcgtccctcagcctccgccgtttctcagctaccacctcgctccacctccgcgctgcccggagcccagcgcttcgctcgcaccagtcacccttccagggatggaggcggcgggggagggcgggcgggctggtggttcgggcggagatgtttggccagctcaccaccggcctcgagtccgcctggaacaagctgaggggagtcgatgtattgacaaaggaaaacatagctgaaccaatgcgggatatcagaagagcacttttggaggccgatgtaagtttgccagtagtaagaagatttattgagtctgtaagtgaaaaggctgtaggcaccgatgtgatccgaggtgtccgacctgaccagcagttggtgaaggttgtgagtgatgaactggtacaactgatgggcggggaggtatcagatttggtgtttgcaaaatctgggccaactattatattattggcaggtctgcaaggtgttggaaaaactactgtttgtgcgaagcttgccttctatctcaaaaaactgggcaagagctgtatgctagttgctgcagatgtttacaggcctgctgctattgatcaactcactattctgggtaaaaagtagaaaacatttgaatgttgataggttggtgtaccagtttactcagaaggaactgaagcaaaaccttcacaaatagccaaaaacggtttgaaggaggcaaaagtcaataaggctgatgtaattatagtggacacggctggaagactgcaggtagataaagcaatgatgaatgagttgaaagaagtaaaaaaagcagtgaatcctacagaagttcttcttgtggttgatgccatgactggccaagaagctgcagggttggtcagctccttcaatgatgagattggtataactggtgctatactgacaaaactggatggtgactcaagaggtgtctggaaagccaattaaatttgtaggacaaggagagcgtattgaagatcttgagcctttctacccagatcgtatggcacaacgtatcttgggaatgggagatgtactttcatttgttgaaaaagcacaagaagtgatgcgccaagaagatgctgatgaattacagaagaagatcttgagtgcaaaattcaactttaatgacttcctgaagcaaacacaaatgattgcaaaaatgggttcattcagtcgtttgattggcatgattccgggcatgaacaaggttactcctgcacaaatccgtgaagctgagaagaatctcaagtttatggaatcaatgatcaatgtgatgactcttgaggaaagggaacgaccagagcttcttgctgaatcacgcgagagaaggaaacgagtggccaaggactctggaaagactgaacagcaggtgagccaattggtcgcgcaactcttccaaatgcgtgcaaaaatgcagaaaatgatgggcgctatgcaaggaaaagagtcaccagacatggacgagctcatgggatcgatgaaagctgaggagcagtctgctgccggtactggacggcgtagaaggaagtatggcaacctgaggcagcggcaactggatgccatgcgtggtttccgcagacggtgagatgttcattgccgactagcactggcggtgcctgcacgaacgatggcatttagggacttgggctcggatatagaagtggaagaagatgaagtgcttttgggtgcaatggcaatcatctgggtacattgagttgagtttgcatattcatgtgcagtgtcctattttgtcatattagctgtattattatctttcttcggagcaagaactcgcaaaattgcgtcatctgaaccctgtccaccgtcgtggaaacgagtgcacttcggccatgctagcaaatacaaattcggatctggatcatacatgtggcacataactctgtggaagaattttgcgagaaaaaaaaatcaccaataagcatagctaactttgcttttagt

SEQ ID NO: 15672 - DNA, 2568 bp, Zea Mays
acgcgtgaacgagaagcgaggagagcgtgcgcacgagcatccatgtgtccataaaggagaagggagaggagtaggagcagtagacgaatgatggtgccatactgccatcgccgccagctcaagccctcccttcaatccaactccacctccacaaaaatcctatccattctccaccaaacgcccccacgacgagagctcatcatcccctgctaaaaatttgcgtcttttatttctaaagattccttaccggagttttctttaataaaaaaatcccccttctgttgtccatttctcgacgcgccaattgtttttttctttctttctgatttggattcgtggatttggaccacgcgcaccaccacaaccaatcctcctccccccttcgagtccccgtcctgccccaacaatcccaatctccggaagaaggggaagcaagcatcagaaatcctaaatagggggggcgcaccaagaactccactgagaatccccaatcatttctcggtgcatttggccccgctccaccatcaccgaaatctccaagaaaactcatcccgaatccgcccccgcccccaaatcggccctacaccgcaccagatcacagctcataattccagtgagaattcggaaaggaggggagcaatgacggaggtggcgctcctccggggcccgaccaacctcgcttccaccgcaagccgcgcccccgcctccccctccccctccccctcctcttcgctgcggtatttagccaatgccgacagcgacgtgctccaaggaagcgacagcccggagcgcactgcgggatctgcggggagccgacgactccttgaactgcgcgggcaagaggcggcggaggaggaagaggagcggtggtccttcttggcgctgctctttgagctactgcggaagtcgttgctcgggtgcaggaccgtgggcggcggcgaaggcgaacacggcggctgcgggatggagattgggttgcccacggacgtgcagcacgtggcgcacgtcacgttcgataggttccacggattcctaggcctgcccgttgaattcgagcccgaagtgccccgccgtgctcccagtgccagaatcaatgcagtgttcctatgattcccgaggaaacagtgtcccaaccatccttttgatgatgcagagacgcctttatgaacagggtggtcttcaggcagaaggtatcttccgtataaatgcagaaaatagccaggaagagtttgtgagagaccaactaaatagtggaattgttccagatggcattgatgtccactgtttggcaggtctaattaaagcctggtttagagaaatgccgaggggtgtactggaccctatcccacctgaacaggtgatgcaatgccaatctgaagaggactgtgctcgcgtagcgaaatgccttccaccagctgaagcagctttgcttgactgggctgtgaatctgatggccgacgtagtccaagaagaacacataaacaagatgaacgatcgcaatattgctatggtcttcgcaccaaatatgactcagatggcagatcctttgactgcactgatgtatgcagtccaagtgatgaattttctcaagatgctggtacaaaagaccctcaaggatagagaggagtcgaccccagaggatgctttgctgccccagaaggacccatctgatgaaaacgggcatcagaagcccaccgtgacacttgattctctcctcgaggaaggatccaggcgcccttctttcgccaaggaagagcccctcctgaacagccctggccacagcactgatgacaagtctaacgaaactaacaccgatttaggagccactgctgctttcactgcccagacaagcgaggtagcaacgggtgtggaggactccactagtagtggctcacagcctgcacctgctggcccagctgctatcgctgatgcttccggcacgacagccacaaattctctccaggcaggcaaggggagccgaagcctgaaccggaggaggactagaaagggcaagggccagtctggcacgcgcaccacgcctgcagctgagaaatcaagaggtgcgagcatcgtgagccggataaactccagagttgagcggatcgaagcgtggagatgagaccgaaagccatttccatcgctgttgtgtactagatgatgactgacccagcgtttcctgaaaatagcaccccccgaactgcttgcttgcacattttacatttttctctctctctctatgcgcttatcatttcttgctgtatcatggccatggtattttgagattcgatcttcctgtctttactaacttctgtatctttcttatggttaattctgtgagtcaatgaaagatgcttgtgctttcctttgtacgttgatctttttgatgcctaatttatcaagtccctgaaagttcaggtgtgacctctgttgtgctggccttactgattgtatttgtacctcctgcatgtttccccttcccccttcgtgaagatggattggtctgctcacattgatcttccttgttcctttttctttttgaaaattcaagccaacttccgtatcagaaca

SEQ ID NO: 15673 - DNA, 2583 bp, Zea Mays
acgcgtgaacgagaagcgaggagagcgtgcgcacgagcatccatgtgtccataaaggagaagggagaggagtaggagcagtagacgaatgatggtgccatactgccatcgccgccagctcaagccctcccttcaatccaactccacctccacaaaaatcctatccattctccaccaaacgcccccacgacgagagctcatcatcccctgctaaaaatttgcgtcttttatttctaaagattccttaccggagttttctttaataaaaaaatcccccttctgttgtccatttctcgacgcgccaattgtttttttctttctttctgatttggattcgtggatttggaccacgcgcaccaccacaaccaatcctcctccccccttcgagtccccgtcctgccccaacaatcccaatctccggaagaaggggaagcaagcatcagaaatcctaaatagggggggcgcaccaagaactccactgagaatccccaatcatttctcggtgcatttggccccgctccaccatcaccgaaatctccaagaaaactcatcccgaatccgcccccgcccccaaatcggccctacaccgcaccagatcacagctcataattccagtgagaattcggaaaggaggggagcaatgacggaggtggcgctcctccggggcccgaccaacctcgcttccaccgcaagccgcgcccccgcctccccctccccctccccctcctcttcgctgcggtatttagccaatgccgacagcgacgtgctccaaggaagcgacagcccggagcgcactgcgggatctgcggggagccgacgactccttgaactgcgcgggcaagaggcggcggaggaggaagaggagcggtggtccttcttggcgctgctctttgagctactgcggaagtcgttgctcgggtgcaggaccgtgggcggcggcgaaggcgaacacggcggctgcgggatggagattgggttgcccacggacgtgcagcacgtggcgcacgtcacgttcgataggttccacggattcctaggcctgcccgttgaattcgagcccgaagtgccccgccgtgctcccagtgccagtgcaagtgtcttcggtgtttcaacagaatcaatgcagtgttcctatgattcccgaggaaacagtgtcccaaccatccttttgatgatgcagagacgcctttatgaacagggtggtcttcaggcagaaggtatcttccgtataaatgcagaaaatagccaggaagagtttgtgagagaccaactaaatagtggaattgttccagatggcattgatgtccactgtttggcaggcctggtttagagaaatgccgaggggtgtactggaccctatcccacctgaacaggtgatgcaatgccaatctgaagaggactgtgctcgcgtagcgaaatgccttccaccagctgaagcagctttgcttgactgggctgtgaatctgatggccgacgtagtccaagaagaacacataaacaagatgaacgatcgcaatattgctatggtcttcgcaccaaatatgactcagatggcagatcctttgactgcactgatgtatgcagtccaagtgatgaattttctcaagatgctggtacaaaagaccctcaaggatagagaggagtcgaccccagaggatgctttgctgccccagaaggacccatctgatgaaaacgggcatcagaagcccaccgtgacacttgattctctcctcgaggaaggatccaggcgcccttctttcgccaaggaagagcccctcctgaacagccctggccacagcactgatgacaagtctaacgaaactaacaccgatttaggagccactgctgctttcactgcccagacaagcgaggtagcaacgggtgtggaggactccactagtagtggctcacagcctgcacctgctggcccagctgctatcgctgatgcttccggcacgacagccacaaattctctccaggcaggcaaggggagccgaagcctgaaccggaggaggactagaaagggcaagggccagtctggcacgcgcaccacgcctgcagctgagaaatcaagaggtgcgagcatcgtgagccggataaactccagagttgagcggatcgaagcgtggagatgagaccgaaagccatttccatcgctgttgtgtactagatgatgactgacccagcgtttcctgaaaatagcaccccccgaactgcttgcttgcacattttacatttttctctctctctctatgcgcttatcatttcttgctgtatcatggccatggtattttgagattcgatcttcctgtctttactaacttctgtatctttcttatggttaattctgtgagtcaatgaaagatgcttgtgctttcctttgtacgttgatctttttgatgcctaatttatcaagtccctgaaagttcaggtgtgacctctgttgtgctggccttactgattgtatttgtacctcctgcatgtttccccttcccccttcgtgaagatggattggtctgctcacattgatcttccttgttcctttttctttttgaaaattcaagccaacttccgtatcagaaca

SEQ ID NO: 15674 - DNA, 2599 bp, Zea Mays
cacgcccgcacgcgtgaacgagaagcgaggagagcgtgcgcacgagcatccatgtgtccataaaggagaagggagaggagtaggagcagtagacgaatgatggtgccatactgccatcgccgccagctcaagccctcccttcaatccaactccacctccacaaaaatcctatccattctccaccaaacgcccccacgacgagagctcatcatcccctgctaaaaatttgcgtcttttatttctaaagattccttaccggagttttctttaataaaaaaatcccccttctgttgtccatttctcgacgcgccaattgtttttttctttctttctgatttggattcgtggatttggaccacgcgcaccaccacaaccaatcctcctccccccttcgagtccccgtcctgccccaacaatcccaatctccggaagaaggggaagcaagcatcagaaatcctaaatagggggggcgcaccaagaactccactgagaatccccaatcatttctcggtgcatttggccccgctccaccatcaccgaaatctccaagaaaactcatcccgaatccgcccccgcccccaaatcggccctacaccgcaccagatcacagctcataattccagtgagaattcggaaaggaggggagcaatgacggaggtggcgctcctccggggcccgaccaacctcgcttccaccgcaagccgcgcccccgcctccccctccccctccccctcctcttcgctgcggtatttagccaatgccgacagcgacgtgctccaaggaagcgacagcccggagcgcactgcgggatctgcggggagccgacgactccttgaactgcgcgggcaagaggcggcggaggaggaagaggagcggtggtccttcttggcgctgctctttgagctactgcggaagtcgttgctcgggtgcaggaccgtgggcggcggcgaaggcgaacacggcggctgcgggatggagattgggttgcccacggacgtgcagcacgtggcgcacgtcacgttcgataggttccacggattcctaggcctgcccgttgaattcgagcccgaagtgccccgccgtgctcccagtgccagtgcaagtgtcttcggtgtttcaacagaatcaatgcagtgttcctatgattcccgaggaaacagtgtcccaaccatccttttgatgatgcagagacgcctttatgaacagggtggtcttcagaaggtatcttccgtataaatgcagaaaatagccaggaagagtttgtgagagaccaactaaatagtggaattgttccagatggcattgatgtccactgtttggcaggtctaattaaagcctggtttagagaaatgccgaggggtgtactggaccctatcccacctgaacaggtgatgcaatgccaatctgaagaggactgtgctcgcgtagcgaaatgccttccaccagctgaagcagctttgcttgactgggctgtgaatctgatggccgacgtagtccaagaagaacacataaacaagatgaacgatcgcaatattgctatggtcttcgcaccaaatatgactcagatggcagatcctttgactgcactgatgtatgcagtccaagtgatgaattttctcaagatgctggtacaaaagaccctcaaggatagagaggagtcgaccccagaggatgctttgctgccccagaaggacccatctgatgaaaacgggcatcagaagcccaccgtgacacttgattctctcctcgaggaaggatccaggcgcccttctttcgccaaggaagagcccctcctgaacagccctggccacagcactgatgacaagtctaacgaaactaacaccgatttaggagccactgctgctttcactgcccagacaagcgaggtagcaacgggtgtggaggactccactagtagtggctcacagcctgcacctgctggcccagctgctatcgctgatgcttccggcacgacagccacaaattctctccaggcaggcaaggggagccgaagcctgaaccggaggaggactagaaagggcaagggccagtctggcacgcgcaccacgcctgcagctgagaaatcaagaggtgcgagcatcgtgagccggataaactccagagttgagcggatcgaagcgtggagatgagaccgaaagccatttccatcgctgttgtgtactagatgatgactgacccagcgtttcctgaaaatagcaccccccgaactgcttgcttgcacattttacatttttctctctctctctatgcgcttatcatttcttgctgtatcatggccatggtattttgagattcgatcttcctgtctttactaacttctgtatctttcttatggttaattctgtgagtcaatgaaagatgcttgtgctttcctttgtacgttgatctttttgatgcctaatttatcaagtccctgaaagttcaggtgtgacctctgttgtgctggccttactgattgtatttgtacctcctgcatgtttccccttcccccttcgtgaagatggattggtctgctcacattgatcttccttgttcctttttctttttgaaaattcaagccaacttccgtatcagaaca

SEQ ID NO: 15675 - DNA, 333 bp, Zea Mays
acctgggcagtgcagatgttgctggtggccttgtcgcgacggatgtgctgttcccgggtctgcatcgccatgcggagcgcgggcctgccggtggagtcgacgctaactccgatgatacggccgggcatgaggcgcttgtactcctgcgacgtggcgaggaacgcggcgtgcgggccgccgtatcccatgggcacgccgaagcgctgcgcggagccgacggcgatgtcggcgccgatctcgccgggcgggcgcagcgcggtgagcgcgagcaggtcggtggccatgacgaccttgacgccgtgggcgtgcgcgtcccggacgaactcggcgtag

SEQ ID NO: 15676 - DNA, 960 bp, Zea Mays
gcagggctgtctgtgctgggcgtgggatatggcaagtcacgagtggagacagtcaatatcttgttgatctcaacaatcagaaatgtggatgctataggtgggatgttactggagtgccatgcttacatgccgtggctgctatccacgagttcaaacataagccagaaaattatatgtcattattcttcactagggagaaatatgtagccacatatgagggtatgattatgcctgtgccagacaaaaggcaatggttaagcacagacttgccagatgtggatcctccattgtatcatgcccagcctggaagaccaaagaaaaagcgagttagagcgaaaggagaacctcatgttgaggcaagagcctcaaaaagggctgcagtgaaatgctccaactgccacacttatggtcacaatgttaagggatgtggagtgccacttagagctgattgggagcctaggaagggagctaagtacacgagggcctcaattggtgttcctacttcatctcagccagacccgccgacatttgaaggaggatcaagaattaggccacaaaagttgtcaccgatcaggaaaaggaatgcttgaagtattatgtgtcgtgttgttagctgaattttaggcctcaattggtgttcctatttcatctcactactggaatgcttgctgttttggtggtttcagtaattaggccacaaggtccgatttgtacatgtgaccagttttattggtttggagccgggagcagggtttttggctgggagacccgactagtttttttttcagagccgcccagtctttttggtttggagccgctcaaatcagccaagcccaaagtctctgaattgagccattaattacagattgaggacctccctaatttgtaggggggagtttgacagaataaaagttgtaagtgggtatttgaaaacatcccaaacttgcaagtgggtttttg

SEQ ID NO: 15677 - DNA, 744 bp, Zea Mays
  misc_feature (1)..(2): n is a, c, g, or t
nntgcagggctgtctgtgctgggcgtgggatatggcaagtcacgagtggagacagtcaatatcttgttgatctcaacaatcagaaatgtggatgctataggtgggatgttactggagtgccatgcttacatgccgtggctgctatccacgagttcaaacataagccagaaaattatatgtcattattcttcactagggagaaatatgtagccacatatgagggtatgattatgcctgtgccagacaaaaggcaatggttaagcacagacttgccagatgtggatcctccattgtatcatgcccagcctggaagaccaaagaaaaagcgagttagagcgaaaggagaacctcatgttgaggcaagagcctcaaaaagggctgcagtgaaatgctccaactgccacacttatggtcacaatgttaagggatgtggagtgccacttagagctgattgggagcctaggaagggagctaagtacacgagggtccgatttgtacatgtgaccagttttattggtttggagccgggagcagggtttttggctgggagacccgactagtttttttttcagagccgcccagtctttttggtttggagccgctcaaatcagccaagcccaaagtctctgaattgagccattaattacagattgaggacctccctaatttgtaggggggagtttgacagaataaaagttgtaagtgggtatttgaaaacatcccaaacttgcaagtgggtttttg

SEQ ID NO: 15678 - DNA, 309 bp, Zea Mays
atggctgctgctggctctgaggacgacgacaatctgtcctctcctagaccacagatcctttgtatggaatttcaagtgcatgttggagtgaaatttgatggaaaatcttgtgtatcatggttacgaaggaaataccaccttgtactatttgaaacctggtcatacggcaccaaaaggccttgttttgatggatagtgcagaacatgtacaacaactgatgaaggatcatgagggcctaaaggtgtgcaaattgttcattttgaaacctcctagaatgtcaaagacagatggtaggaaaaatatcattct

SEQ ID NO: 15679 - DNA, 384 bp, Zea Mays
ccgcccagcggtcctcggcgctggctccccggcggcgacatcggatcgggccctgggatccccgttgcacaggcgagcccccgacgctggcgcgagcggtcctcagatcgggccccgggatctcgccgatgtccttgtaatggagccgcagcccatcggctcgaacaggcagaaggaaaatcttgtgtatcatggttacgaaggaaataccaccttgtactatttgaaacctggtcatacggcaccaaaaggccttgttttgatggatagtgcagaacatgtacaacaactgatgaaggatcatgagggcctaaaggtgtgcaaattgttcattttgaaacctcctagaatgtcaaagacagatggtaggaaaaatatcattct

SEQ ID NO: 15680 - DNA, 713 bp, Zea Mays
ctgggttctgggcctggaaaggtacaaatctaaatggagcagcgacggttttggcctgtccgaggaggagcgaggactcgagcgacagtcgagccttactcagattgtctcccgcaaaagacctcacagccaccgaggatgaatgcgtgacaaatgccgaggaggagtccgcgcgcgccagactgtccagaggagagacgtcgaggctgtagaagaaccggtggatcttgttctcgacggcgtgctcatcctttcggcggcatgctcgtcatcccagtggcgtgatcatcctcccggcggccggtgtgctatgcttgtcttcctggcggcgtgctcctccctcctcccggtggcgtggtctcctgacggcgtgctcgttcagaaaatttcttcggggccaacaagctgcgagggaacgagtttttgttgtccagctcattcagaaaatttctacggggtcaaatgttgcatgctacgagcttgttgcacgacactcggaaggtgtttgatgaaacgctcaagccaacaccattccgattttccaatttttttgtaatttctaatccatgcccggtatactgagactcagtgaagcaaatcatttatttaatttctaatttgtgtggtacgttactttaccttataaatatacgttattttttcatgatatttatacgttgctttacctaatatgtatatgttattttttcaat

SEQ ID NO: 15681 - DNA, 684 bp, Zea Mays
cttatgtggacttctggtaattgagaactaaatgaggaatagcaagcatttatccgtgactctccaacgctcttacacactcatcatatattaaattgttgccatgtggtagtggcagtgtggcacgctgcacaggagaaatgtactgcgcgcgtacaaaaagctggcatctagaaccactagcaggtacagaggaaaaggcaaataatagacactagagatcattgactattcatcagcattttgtaggcccgaccagtttcatgggccaggcctcaggtacctcaattatgctgggaggctgggactcgtccactcatgtgcgtgatgcttcatgcacattcatatcggtctctcggattctcggttagtagtggtcatcattgtctgctttcatcagacattgtcagagtaattcttgattctccttgctcttgctgatcacccgtagccgtagccatacataatttattttatcctggagtgacattgaaatcgaaccttttaaggtgattattagagaaagggtttcttactttgttcgcagacaagaaaagagctagtacatatttacctggaccgtacctttacttggatgacgtggttagtttaatttgtactttggaatagttagtagaatatatgttttgacaactcttcttttggatgaaagaaacactccct

SEQ ID NO: 15682 - DNA, 615 bp, Zea Mays
cttatgtggacttctggtaattgagaactaaatgaggaatagcaagcatttatccgtgactctccaacgctcttacacactcatcatatattaaattgttgccatgtggtagtggcagtgtggcacgctgcacaggaggtaaatgtcagcacttctactgttaacattgtcagtgaagtcaatagtattaatgtcatgctcctggccccatctagtgtaatatcaacactatcatttgaatgttaattataagagtaggtagtgtcaagggcggacctaggtagagactaatgagggacaggccaccgctcaattctctgttgtaagtagtagagcataaattttcaccataaagttccttgctcaatccaacttaaatgtccatgctctatcattttggtgctcgtccttacaagtatgccctcagttctattttgtcctaggggtggtattttgtcctaggtccgcccctgggtactatgacctacaaaagcatgccttgtacagtgcttttgtcattatacatcataagccactgtttccgagcactagcaatgaaccatttatgtagtacattaccatcttgtggctttgatgtcttgcacccattccagt

SEQ ID NO: 15683 - DNA, 862 bp, Zea Mays
atggcggccgttgctgcaggggagctggcggcgttcctgacgggggcgaacctgatcatggagtacgtgttctccaacgccgccgtggcgcgcagcttcacggcgtacctgggcacggcggtgggcgtggacgcgccccgcgagtggcggatcgccgtgcgcggcctgcccgagggcttcaaccaggtggacctcgtcgccgtcgccgtcatcctcctcgtctccgtctgcatctgctacagcaccaaggagagctcggcggtgaacctggcgctgacggcggtgcacgtggcgttcatcctgttcgtgatcgggatggggttccggcacggcgacgcgcgcaacctgacgcggccggcggacccggcgcgcagccccggcgggttcttcccgcacggcgccgcgggcgtgttcaacggcgcggccatggtgtacctcagctacatcgggtacgacgccgtgtccaccatggcggaggaggtgcagcggccggcgcgcgacatccccgccggcgtgtccggctccgtcgtcgtcgtcaccgtgctctactgcctcatggccgcctccatgtccatgctcctcccctacgacgcgattgacccagaggcgccgttctcgggggcgttcaaggggcgggagcggtgcgcgtgggtgtccaacgtggtcggcgccggcgccagcctcggcatcctcacctcgctcatggtggccatgctggggcaggcgcggtacctgtgcgtcatcggccgctccggcgtcatgccggcgtggctcgcccgggtcaacccccgcaccgccacccccgtcaacgcctccgccttcctcggcctcttcacggcggcgctggcgcatgttcacggag

SEQ ID NO: 15684 - DNA, 1073 bp, Zea Mays
atggcggccgttgctgcaggggagctggcggcgttcctgacgggggcgaacctgatcatggagtacgtgttctccaacgccgccgtggcgcgcagcttcacggcgtacctgggcacggcggtgggcgtggacgcgccccgcgagtggcggatcgccgtgcgcggcctgcccgagggcttcaaccaggtggacctcgtcgccgtcgccgtcatcctcctcgtctccgtctgcatctgctacagcaccaaggagagctcggcggtgaacctggcgctgacggcggtgcacgtggcgttcatcctgttcgtgatcgggatggggttccggcacggcgacgcgcgcaacctgacgcggccggcggacccggcgcgcagccccggcgggttcttcccgcacggcgccgcgggcgtgttcaacggcgcggccatggtgtacctcagctacatcgggtacgacgccgtgtccaccatggcggaggaggtgcagcggccggcgcgcgacatccccgccggcgtgtccggctccgtcgtcgtcgtcaccgtgctctactgcctcatggccgcctccatgtccatgctcctcccctacgacgcggtcggtactccttctctctgctctgttatgctctctgaaacttgactttgaagagatgccgagatcctgccgaatagggctgctatatttagagctcatctttggttgcgtaggttgccaccgcagctagctgcatctgattccggcacccgcttctgtttgtccgcctcagcttcttcttcttttctgggattgtatgggatgttgatttgggtggggggatgaaatgaatctgccgtacgtcccgatcccaaactctcctggaccgacggccgcgaatccacttttgtacttactgtcagtaaatattagtcctagcagaagataataagaaagaaaaaggcgatcgtgacatggataacagtgacagttctttctttttcagtatttaattttcaccacctggtctgctctccgatcgttgtctgaacgtttctttcttctggtctggtgatgctgtgcatgtgcgctgactgcag

SEQ ID NO: 15685 - DNA, 2016 bp, Zea Mays
gacaaaagggaaaagaataactgaaaaagtaaatcgctcaaaaaaaaaggaaaataaaaaaaaaatcgtagagagttcgattggcagttgctgagcccgagcgcgccctccggcgccgacaagccgggaccccacctccgccggcggcgatgggcaactcgcaggcttcgccggcgtccgcctccagctcccgcttcgtcatggcctcgagggccttcccgaagcaggagctggacggcctccgcgagctattcgcctccctcgcagcgcagtcgcggaccggcggccgcgccatctcacgccccgtcttcctcgaatactaccaggtccgggggcgattaggcgacaggctgttccagctggtggcgaaggagagtggcgggagcgatggggtcacgttcgaggatttgatcatctccaaagcaacatatggaaggggaactcgtgatgaggtcgatgaattcatttatcaactatgtgatgtcacaggagatggcgccttaacaaggtctgatttggaatcagtcttggcgtctgttcatgaaactgtatttgcaataaagaaggaagctgtcgaagtttccaacaatagaccattcgaagaattcctcaactctgcagtgttttcaaaggatgttgaaggggtctcagggaagtctatgtcattatcagactttaggaactggtgcactctcttgccatcattgaggaaattccttggaaatttgttgatgcctcctgattcagagtatgcctggcatattggaggaggtttctcccaacatgaggtgcaagagtggaagcttttatatcatagttctcttcatggacaaagcttcaacactttcttgggcaaagtaacgaatggggatgctcagactgttctgattgttaaagatacagaaggatcaatttatggtggatatgcttcacagccttgggaaaggcacagtgatttttatggtgacatgaagacattccttttcaaatgctatcctcaagcatccattttccgccctactggagcaaacaagaatttgcaatggtgtgctgtaaacttcagctctgagaacataccaaatggtattggatttggagggcagccacatcatttcggactctttttatcagcaaattttgaccaagggcactcatttacgtgtagcacatttaccagccctcccctttccaagacaaataggttcaggccagaagttattgaatgttggggtatacaaatgagaggagcacaagatgaaaaactggagttagtcaaggggacagtcctcgagagattcaaggaggaccggaacatgctgaagatggttggtttggcaaatgcaagtgattaagtgatagaggatcacaatgatgtacatgatggagagtctgtacatcacatgttcataaaaataatcaaatctgagaccatgtttctatattctactgttcatattttgtcactcaaaatattcatctggtccacactttgtaacaattgaccagtcgtgaaggacagccgagccaatgttgcgtttgatctcaagaatgacgtcatccaagataagatggtctcatatgagttcatcccattaactttaatgggatgactttatcctttctgttgtactaatgtgcttgtaagatgagaaagtatctagatctttagtggttttggtgattaatgccaacacaagattattgtaactaacatgtgtgtttacaaagataaattaatgttaggtcacaatgatgaaaatgatttgggcagtcttttgtcttgatgcctctgattatgatttcctaaaattttcaaatgatgaaagataaagttaaagatggactaattctaagtatcgtttagagttgagaaacacttagaataatttagaactttgtttttatttaaccgcactataaatgaggtatgaattaacagtctgatctagataagtcaaataagtttagtatgatacacactaattatctttagctttaagtggcttaggagaggcc

SEQ ID NO: 15686 - DNA, 2130 bp, Zea Mays
gacaaaagggaaaagaataactgaaaaagtaaatcgctcaaaaaaaaaggaaaataaaaaaaaaatcgtagagagttcgattggcagttgctgagcccgagcgcgccctccggcgccgacaagccgggaccccacctccgccggcggcgatgggcaactcgcaggcttcgccggcgtccgcctccagctcccgcttcgtcatggcctcgaggtaccgcctccccactaacagctgtctgccacctccttcgctgccgcgattcgcaagccctgtctggtgctctcaccgctgacacgcttcctcgcagggccttcccgaagcaggagctggacggcctccgcgagctattcgcctccctcgcagcgcagtcgcggaccggcggccgcgccatctcacgccccgtcttcctcgaatactaccaggtccgggggcgattaggcgacaggctgttccagctggtggcgaaggagagtggcgggagcgatggggtcacgttcgaggatttgatcatctccaaagcaacatatggaaggggaactcgtgatgaggtcgatgaattcatttatcaactatgtgatgtcacaggagatggcgccttaacaaggaagctgtcgaagtttccaacaatagaccattcgaagaattcctcaactctgcagtgttttcaaaggatgttgaaggggtctcagggaagtctatgtcattatcagactttaggaactggtgcactctcttgccatcattgaggaaattccttggaaatttgttgatgcctcctgattcaggtagaccaggatttgaagtaccactgcttcattatcctgaaaacatctgtactgatacgctgcttctaaataaagagtatgcctggcatattggaggaggtttctcccaacatgaggtgcaagagtggaagcttttatatcatagttctcttcatggacaaagcttcaacactttcttgggcaaagtaacgaatggggatgctcagactgttctgattgttaaagatacagaaggatcaatttatggtggatatgcttcacagccttgggaaaggcacagtgatttttatggtgacatgaagacattccttttcaaatgctatcctcaagcatccattttccgccctactggagcaaacaagaatttgcaatggtgtgctgtaaacttcagctctgagaacataccaaatggtattggatttggagggcagccacatcatttcggactctttttatcagcaaattttgaccaagggcactcatttacgtgtagcacatttaccagccctcccctttccaagacaaataggttcaggccagaagttattgaatgttggggtatacaaatgagaggagcacaagatgaaaaactggagttagtcaaggggacagtcctcgagagattcaaggaggaccggaacatgctgaagatggttggtttggcaaatgcaagtgattaagtgatagaggatcacaatgatgtacatgatggagagtctgtacatcacatgttcataaaaataatcaaatctgagaccatgtttctatattctactgttcatattttgtcactcaaaatattcatctggtccacactttgtaacaattgaccagtcgtgaaggacagccgagccaatgttgcgtttgatctcaagaatgacgtcatccaagataagatggtctcatatgagttcatcccattaactttaatgggatgactttatcctttctgttgtactaatgtgcttgtaagatgagaaagtatctagatctttagtggttttggtgattaatgccaacacaagattattgtaactaacatgtgtgtttacaaagataaattaatgttaggtcacaatgatgaaaatgatttgggcagtcttttgtcttgatgcctctgattatgatttcctaaaattttcaaatgatgaaagataaagttaaagatggactaattctaagtatcgtttagagttgagaaacacttagaataatttagaactttgtttttatttaaccgcactataaatgaggtatgaattaacagtctgatctagataagtcaaataagtttagtatgatacacactaattatctttagctttaagtggcttaggagaggcc

SEQ ID NO: 15687 - DNA, 2263 bp, Zea Mays
cgaaaagcccatcaaacgaaggcgtcaggcgtccccttggtggcgcgaggggccgcccagtgacgactgacgacaatcgacaaaagggaaaagaataactgaaaaagtaaatcgctcaaaaaaaaaggaaaataaaaaaaaaatcgtagagagttcgattggcagttgctgagcccgagcgcgccctccggcgccgacaagccgggaccccacctccgccggcggcgatgggcaactcgcaggcttcgccggcgtccgcctccagctcccgcttcgtcatggcctcgagggccttcccgaagcaggagctggacggcctccgcgagctattcgcctccctcgcagcgcagtcgcggaccggcggccgcgccatctcacgccccgtcttcctcgaatactaccaggtccgggggcgattaggcgacaggctgttccagctggtggcgaaggagagtggcgggagcgatggggtcacgttcgaggatttgatcatctccaaagttagtgctcgactcaattcgatccactctgttgttcgtttagttgtcgcgagcaaggtcattgatgtgttggtgcctggtggaatttgtccaagcaacatatggaaggggaactcgtgatgaggtcgatgaattcatttatcaactatgtgatgtcacaggagatggcgccttaacaaggtctgatttggaatcagtcttggcgtctgttcatgaaactgtatttgcaataaagaaggaagctgtcgaagtttccaacaatagaccattcgaagaattcctcaactctgcagtgttttcaaaggatgttgaaggggtctcagggaagtctatgtcattatcagactttaggaactggtgcactctcttgccatcattgaggaaattccttggaaatttgttgatgcctcctgattcaggtagaccaggatttgaagtaccactgcttcattatcctgaaaacatctgtactgatacgctgcttctaaataaagagtatgcctggcatattggaggaggtttctcccaacatgaggtgcaagagtggaagcttttatatcatagttctcttcatggacaaagcttcaacactttcttgggcaaagtaacgaatggggatgctcagactgttctgattgttaaagatacagaaggatcaatttatggtggatatgcttcacagccttgggaaaggcacagtgatttttatggtgacatgaagacattccttttcaaatgctatcctcaagcatccattttccgccctactggagcaaacaagaatttgcaatggtgtgctgtaaacttcagctctgagaacataccaaatggtattggatttggagggcagccacatcatttcggactctttttatcagcaaattttgaccaagggcactcatttacgtgtagcacatttaccagccctcccctttccaagacaaataggttcaggccagaagttattgaatgttggggtatacaaatgagaggagcacaagatgaaaaactggagttagtcaaggggacagtcctcgagagattcaaggaggaccggaacatgctgaagatggttggtttggcaaatgcaagtgattaagtgatagaggatcacaatgatgtacatgatggagagtctgtacatcacatgttcataaaaataatcaaatctgagaccatgtttctatattctactgttcatattttgtcactcaaaatattcatctggtccacactttgtaacaattgaccagtcgtgaaggacagccgagccaatgttgcgtttgatctcaagaatgacgtcatccaagataagatggtctcatatgagttcatcccattaactttaatgggatgactttatcctttctgttgtactaatgtgcttgtaagatgagaaagtatctagatctttagtggttttggtgattaatgccaacacaagattattgtaactaacatgtgtgtttacaaagataaattaatgttaggtcacaatgatgaaaatgatttgggcagtcttttgtcttgatgcctctgattatgatttcctaaaattttcaaatgatgaaagataaagttaaagatggactaattctaagtatcgtttagagttgagaaacacttagaataatttagaactttgtttttatttaaccgcactataaatgaggtatgaattaacagtctgatctagataagtcaaataagtttagtatgatacacactaattatctttagctttaagtggcttaggagaggcc

SEQ ID NO: 15688 - DNA, 1929 bp, Zea Mays
gttccttctgtctcacatgcctcgattatcgtggccatggtgatagctgttgagagcgtgatctcttggatgccaatgtattcagaaatgaagctagctttctttgtgtacctgtggtaccccaaaactaagggaagtgacgttgtatatgacacctttcttcgccccatagttatgcaatatgaaccgaacatcgagcagagattgttccatctaagggcaaaatctgggcagttaatttccttctacatgaagaattttgcggataaaggaacagccttcttcatggatgtcctccgttatgtcgtatctgagaaacctgaaggatccaatgcagaggtaggcaatgacaacttttccatgacctactcagtatagcatgcactgtattaaatgtttgctcgtgtcccacatgacatgttccattcttgactaaatttatgcatgcagttgaatttcatcactaaattggttcgcctgatatttcactatacttctattggttattgttttcctgaaaaccatcgatcataaatttcttatgcatacaaatttgtattttcttggtaaaagttcaaattcaatgcatgtgcaattaaaaaacgttgttcattagcttttccatctatgttcgttagggtttcccatgtatattcattagggtttctaacttatcaaattctgtacaattaagaaatgttccatcaaatttatataggcgaaatgtcagtcagaaactggcattttttttctgaaccaaggcattcctcatttgcattaatgattgattatataacggaaatacaaccgtttaaagatacaccctatgttccaaattataaggcattccaactttcttgtagagtcaaaacatctcaagtttaagaaattgagatgctttgactctccaaaaaagttgaaatgactcatgattgaggacggaggaagtagttcagacaaccataactagaactctagaagagaacatgaatctaagacctgaacctgctagacccctgtatttaatggccatcagattcagaagacataacaggttagtcaaagtgtagaataatgaaaggcttgatatattgataggggatggcaatatatagactcacaaccctgaccctaataggccggcagcccaacagtggtgtcggcccacacacacagtctaacattcccccgcagtcgcaacacgggcaccacacacgatgagactggagtagaagatgaaggtaggagccgacgagttgaaatcccccgcagtcgcagcgtcgtgagggtgcgaatgttgcggctggagcagagaccagtgtgtgtgccaagataacgatagcccctagatgctgaggtagccgaagtcgaggtggtcgcggtcgggagacacgcagcagaagcctgttcttcgggaggggtcgacgttcgagcgtcaacggtcggcagaccgacacaacaaaagaacagcagcaaccttagggccttcttgcttcgttcggtgatcggtcgtcgaggagcctcgccagggaggccggtgacagcgcactcatctacgccggtcaaggtggtcgtgctcgcggcagaaaagaaggggtatcggcggatccggtcgggaaagccacgacaacgacggatccagccataaagacagcgatctagccaaaggggtggcggacctagccgggatggccgcaccaacgtagatccggtcgggaaggtcgcggcagcaacggaaccaacgaagtctacgagggagggaggcgtgcggcaaggcaggtgcagccgggcaggggcctatgccggacctggcatgggagtttgacgccggcagcgagagaagcttgaagataataggcactgctgggcatcgacgtagtcagggacgaggtggacaacgcgacgatggggctgcatagaacaggagcg

SEQ ID NO: 15689 - DNA, 2522 bp, Zea Mays
gtcaattcatgactctgagggcgagtaatcgccgccaggattctgtttgaaccatcccgcgtgcctacccgatttgctcttgttgctcccgtatcgtctgctcaccagcctgcgcggccggtgtgttaccattaccaactgtgtgatgcgtgcggcgtgccgtgctttttttccccctttatttactattttttcggacgtagcgtgagattcagggcttgcttaatactgtactacttgatgcagactttagctcacccaccttaaccttttccatccctaacataacataacataacatgacctggaactgttttttttcgaaaaaagaaaaggtttctctacaggcaaaaagatcatgcgaaatgattgtgcccgctttatttctgcctccctttagttcttcagttgcaagcttggtcgtggtgcgttaatagttggatgttaggtggacgactggatcatgacacctcaatcctgcattccaccaataagcagtgttaatcagagggtccttacccattcctcagccttttgcccttattgtcaatgatgagtgccggctctaatttattttaggattggtaaaatcgggcaagctctgttctagtttcaggattatcgtggccatggtgatagctgttgagagcgtgatctcttggatgccaatgtattcagaaatgaagctagctttctttgtgtacctgtggtaccccaaaactaagggaagtgacgttgtatatgacacctttcttcgccccatagttatgcaatatgaaccgaacatcgagcagagattgttccatctaagggcaaaatctgggcagttaatttccttctacatgaagaattttgcggataaaggaacagccttcttcatggatgtcctccgttatgtcgtatctgagaaacctgaaggatccaatgcagaggtaggcaatgacaacttttccatgacctactcagtatagcatgcactgtattaaatgtttgctcgtgtcccacatgacatgttccattcttgactaaatttatgcatgcagttgaatttcatcactaaattggttcgcctgatatttcactatacttctattggttattgttttcctgaaaaccatcgatcataaatttcttatgcatacaaatttgtattttcttggtaaaagttcaaattcaatgcatgtgcaattaaaaaacgttgttcattagcttttccatctatgttcgttagggtttcccatgtatattcattagggtttctaacttatcaaattctgtacaattaagaaatgttccatcaaatttatataggcgaaatgtcagtcagaaactggcattttttttctgaaccaaggcattcctcatttgcattaatgattgattatataacggaaatacaaccgtttaaagatacaccctatgttccaaattataaggcattccaactttcttgtagagtcaaaacatctcaagtttaagaaattgagatgctttgactctccaaaaaagttgaaatgactcatgattgaggacggaggaagtagttcagacaaccataactagaactctagaagagaacatgaatctaagacctgaacctgctagacccctgtatttaatggccatcagattcagaagacataacaggttagtcaaagtgtagaataatgaaaggcttgatatattgataggggatggcaatatatagactcacaaccctgaccctaataggccggcagcccaacagtggtgtcggcccacacacacagtctaacattcccccgcagtcgcaacacgggcaccacacacgatgagactggagtagaagatgaaggtaggagccgacgagttgaaatcccccgcagtcgcagcgtcgtgagggtgcgaatgttgcggctggagcagagaccagtgtgtgtgccaagataacgatagcccctagatgctgaggtagccgaagtcgaggtggtcgcggtcgggagacacgcagcagaagcctgttcttcgggaggggtcgacgttcgagcgtcaacggtcggcagaccgacacaacaaaagaacagcagcaaccttagggccttcttgcttcgttcggtgatcggtcgtcgaggagcctcgccagggaggccggtgacagcgcactcatctacgccggtcaaggtggtcgtgctcgcggcagaaaagaaggggtatcggcggatccggtcgggaaagccacgacaacgacggatccagccataaagacagcgatctagccaaaggggtggcggacctagccgggatggccgcaccaacgtagatccggtcgggaaggtcgcggcagcaacggaaccaacgaagtctacgagggagggaggcgtgcggcaaggcaggtgcagccgggcaggggcctatgccggacctggcatgggagtttgacgccggcagcgagagaagcttgaagataataggcactgctgggcatcgacgtagtcagggacgaggtggacaacgcgacgatggggctgcatagaacaggagcg

SEQ ID NO: 15690 - DNA, 2482 bp, Zea Mays
gcagaacagaccgccgcgaggctgacgggagataccgctccggaccccaccgcgcagccgccgtgtcggtcgcttcgtcgccgtggaccgcggtggtcgaactagtcgcctactccccctccccacgaggccacgacccaacctgggccgaaaaaaatcctgtgcgcgcggtgcgcacagagagcggcgtgcgcacccccgcacatcgacgtccgtccgggatcggacgatcgcaccgcgcgcgctcgcgatgcacttctgctgcgcacggctcggctcccgtccggttcccggaatcggctcctggacggactccatagggcttcctggacagcttcgtcacggacgggaaaggcggcatggcagctgttctgtcgccgtcaccgtcgatcctcagattaaatgctccttcttgggatcgtgaagaagaggaacaacaaataccgcatgttgggtcagtggagattgaagtaccagctgagaatgtggttgataaatatgcactgctggcacctaaagttggaatgacttttgatggtgaggaaaaggcttataagatgtacaatacctatgctggatgtgttgggttcagtgttagaaagtacaggacaacgcgccgcaaattagatgatagtttatgtcagaaatattttgtttgcagtggcgaaggacaacggaaaaatgaggcatcacaaaaggacattacaaggaccggttgtgatgctcatgtccagtttagtatcagcaaggagaatgtatggactgtgcaaaaggtcatactagatcacaaccattatcttgccagtccaaataagacacataagttgaggtcccaacgagagattatagaggcagatagaaaattaattgggcaggcacgacgatctggaatgaagccatcccaagttttcagtttcatgaaggagcattatggaggggaagacaaagtaccatttactaagatggattgctataatgaaattggtcgcgagcgcacaccgtacttagaagccaatgatgcacaaacattatctgaatatctgagaaataaacaagtcgaggacccaacatttttttatgcagttcaagtggacaaggaaactggtcatatagcaaatttcttttgggcagatggtcagtctatcatggattacaaatgctttggtgatgctgtgtcctttgacaccacatttcaaacaaataagtttgaaatgccttttgctccaattcttggcaccaatcatcacaagcaaacaataatttttgggtgtgcacttatgttcaatgagactattccatcatttgtttggctatttcagacctttctaacagcaatgtccgggaagcacccaagcacaattttcacagatcaagacgcagcaatggcagcagcaattgctcatgtattcccaaacacagctcaccgcctatgtttgtggcatattggccaaaatgctgtcaaacatcttggtcctataattaaagcgacagaggacgaggtagaggacaagtcaggtaacaagttttgggcagatttcaaaagttgtatctacgaagaccgagaagagatttacttcacacagaaatggcatgaattgttggctaaatacaaccttgaggataacaaatggatgtcaaacctatatgatttgagggcaaagtgggctgcggtacaccgtgactcatttacagcagacattcactcgacccaaaggagcgaaggaaccgaggagggagatttgaaaacacaggcagcacttatatctcgacaggccacaactcttgcattgaagtgttcgtcatcaaaagaacttcttgataagttgcagaaagccatgtatgacttgaacttggaagcagatacttatctaagtgagatgcatgaaaaatccaatgagattccccctactccaaatgaatgtgtccgacaaccactaaatggtgtaatatcattcaaaatccctccagtcataaaaggtccaaagcaaacacgttttaaaaatgttcttgaaaagaacccagggaagaagaagaagggtgcccggaagaaaggtgacggtttggaacatgttgatatcgaaacaagagacgaacatgctgatgcaaacctaattgattttaatgttggtgcatcttcaaccatgaatgctcctttcgtccaaggtggatatgctaatgtcacaatgccccagttcaatttatttgcaaatccttctgcaatggctcctccatacataccaggagggtacacaagtctcttaatgggagttgatcaagatgatacaacgcaagctgctgttaggaagttacattttgatgaatctatgtagacatgttctcatgaaatgaaccataatgttttgtaaacatgaatttattttgctgtcatgaaagtaatcattttggatatttggtttcccaacattaatttatcttggctgtgatttcgtcagcactggacagcctggacgccagacttagg

SEQ ID NO: 15691 - DNA, 2625 bp, Zea Mays
gcgaactcgacgtagcgagcagaacagaccgccgcgaggctgacgggagataccgctccggaccccaccgcgcagccgccgtgtcggtcgcttcgtcgccgtggaccgcggtggtcgaactagtcgcctactccccctccccacgaggccacgacccaacctgggccgaaaaaaatcctgtgcgcgcggtgcgcacagagagcggcgtgcgcacccccgcacatcgacgtccgtccgggatcggacgatcgcaccgcgcgcgctcgcgatgcacttctgctgcgcacggctcggctcccgtccggttcccggaatcggctcctggacggactccatagggcttcctggacagcttcgtcacggacgggaaaggcggcatggcagctgttctgtcgccgtcaccgtcgatcctcagattaaatgctccttcttgggatcgtgaagaagaggaacaacaaataccgcatgttgggtcagtggagattgaagtaccagctgagaatgtggttgataaatatgcactgctggcacctaaagttggaatgacttttgatgtggcgaaggacaacggaaaaatgaggcatcacaaaaggacattacaaggaccggttgtgatgctcatgtccagtttagtatcagcaaggagaatgtatggactgtgcaaaaggtcatactagatcacaaccattatcttgccagtccaaataagacacataagttgaggtcccaacgagagattatagaggcagatagaaaattaattgggcaggcacgacgatctggaatgaagccatcccaagttttcagtttcatgaaggagcattatggaggggaagacaaagtaccatttactaagatggattgctataatgaaattggtcgcgagcgcacaccgtacttagaagccaatgatgcacaaacattatctgaatatctgagaaataaacaagtcgaggacccaacatttttttatgcagttcaagtggacaaggaaactggtcatatagcaaatttcttttgggcagatggtcagtctatcatggattacaaatgctttggtgatgctgtgtcctttgacaccacatttcaaacaaataagtttgaaatgccttttgctccaattcttggcaccaatcatcacaagcaaacaataatttttgggtgtgcacttatgttcaatgagactattccatcatttgtttggctatttcagacctttctaacagcaatgtccgggaagcacccaagcacaattttcacagatcaagacgcagcaatggcagcagcaattgctcatgtattcccaaacacagctcaccgcctatgtttgtggcatattggccaaaatgctgtcaaacatcttggtcctataattaaagcgacagaggacgaggtagaggacaagtcaggtaacaagttttgggcagatttcaaaagttgtatctacgaagaccgagaagagatttacttcacacagaaatggcatgaattgttggctaaatacaaccttgaggataacaaatggatgtcaaacctatatgatttgagggcaaagtgggctgcggtacaccgtgactcatttacagcagacattcactcgacccaaaggagcgaaggtatgaacaatgtcttcaagaaaagatttcgtaggaaactcggtctttcagaactccttgtagaatgtgaaaaagttgtagttgatctaagatcaaatgagacggatcctttcagaaatccacttttattatgcaaacatgctcttagagtctacaatatgaatggagtatataatttgccatcccaatatatactgcctagatggacaaagtatgctaaaagtggattttatattgaaaaaaaacaaggaaccgaggagggagatttgaaaacacaggcagcacttatatctcgacaggccacaactcttgcattgaagtgttcgtcatcaaaagaacttcttgataagttgcagaaagccatgtatgacttgaacttggaagcagatacttatctaagtgagatgcatgaaaaatccaatgagattccccctactccaaatgaatgtgtccgacaaccactaaatggtgtaatatcattcaaaatccctccagtcataaaaggtccaaagcaaacacgttttaaaaatgttcttgaaaagaacccagggaagaagaagaagggtgcccggaagaaaggtgacggtttggaacatgttgatatcgaaacaagagacgaacatgctgatgcaaacctaattgattttaatgttggtgcatcttcaaccatgaatgctcctttcgtccaaggtggatatgctaatgtcacaatgccccagttcaatttatttgcaaatccttctgcaatggctcctccatacataccaggagggtacacaagtctcttaatgggagttgatcaagatgatacaacgcaagctgctgttaggaagttacattttgatgaatctatgtagacatgttctcatgaaatgaaccataatgttttgtaaacatgaatttattttgctgtcatgaaagtaatcattttggatatttggtttcccaacattaatttatcttggctgtgatttcgtcagcactggacagcctggacgccagacttagg

SEQ ID NO: 15692 - DNA, 1988 bp, Zea Mays
gtgaatctatcaagaccaaacaagaaataaatggatcgtcctattaatatccgtacatcaccaaggacgcccttgtcgttgtccgagcaacaaacgataaaagaattttggaggaagaaacaagaagaaattgaggcaattgaggactttggagagcacacaatccccgtgacctgtctcaaaaaggttatttgtgctaagaagggtaaaatgatgatgacgtctgacaccccaacattcatgacaaagttgaaacggaaacataacgacagaacagaaaatgaagctgccgaatcaaatgactggatgagccctggatatgctaatgctggcagcagcccagttcctacacccccttcagggaaaggtttaaaagcatccaccaagcctaaggctacgaagggccagaaatctggtcctcagacccctttgggttttggttctccgggcaatccttctactcctgttggtggctgccgctatgatagctccctcgggctcttgacaaagaagttcctgaacttgctaaaaggtgcacctggtggcattgttgatctgaataatgctgcagaaactctagaggtacagaaaaggcgtatatatgacatcactaatgttcttgaagggataggactgatagaaaaaaagcttaagaacaacatccgttggaaaggagttgatgactctcgacccggagaagttagtgatgatatgtcaattttacaggcagatattgatgctcttacactgcaagagcgcaatttggatgaacgaataagtgaaatgcgggacagattaagagggcttactgaagatgaaaataatcaaaagtggctttatgtcacggaagaagatatcaaatctttgccatgcttccagaatcagactctaattgctataaaagcaccgcatggcacaactttggaagtcccagatcctgatgaggttaatgattatcctcaaaggagatataggattgtcctaagaagtaccatgggtccgatagatgtgtacctagttagtcaatttgaggagatgagtggcatggagactcctccaaggcctacacagacaataagcatggattctctagagaatcctaggacgcctttggctgcggattgcaacaaagtcacagggatggaatcaaatattcacggaggactgatcctaccttctgatgcacctagtagttcacaggacatttcagggatgatgaagattgtcccttcggagcttgatgctgatacagactactggctcttatcggacaacacaggagttagcatgacgaacatgtgggagacaggacatgagtgggatgggattgagaaattcaacgcggaggatttcttggaagtgggcactccccagcagcaggataaaccagccgatgtcgtggatgacgacccctcctgtataatctgaagcccgccgaatcacggtggcgaaacctttcatagttcagcgcccgctccgatcaacctggagcagtagatggctgtgactgatgtacagatgccagatcagtattaataacttactaactgtctagaccatggcatcatccagaaatgtcgatcataaccgagagttgatggtgcaggcagtccttgtcaggttcaggctcaaacattgcagatgcaggctgaggctgcattagctgtgcctggtagttggtgcatgctgtgtatcttaagggtcacagcactagtagtgtacaactaggaatatgtgtgtcgaatccatttgtaaaatagcagccgttattgtttgtgtggtactgatccagcttttttttagaagaaaacatgtgttgccatcccgagatggctggacaggtgttgctactattcgcgccgttgccgggcaatatcgtgtgctatctgcatcgttatttctgccactacgtgacgttgtctgtaatagaggatttgtactacattgtttatatagtgaagtattgtttatataatgaagttcaaaat

SEQ ID NO: 15693 - DNA, 1817 bp, Zea Mays
ctcctcccctccagctttattacgcaccttcacataacactgcaaaagcactcctctcttcgtcctccccctccctcctccatcccattccataccattccgccaaagaagaaccacagacgctcgctcccaactcccaagccaagccggatcccaaaatcggcacagcgcacccactccgctcagtcccttcgttcacccccatccatccagccagccatgggcggcaaggactgcggcaaccacggcgaggacgacctgcggcggtcgtgccggcgcctgctagcgatcctcctagtcctggccctgatcgtgggcgtgatcgcgctgatcatctacctggtggtccgccccacgcacccgcgcttctacctacaggacgcgtcgctccagcagctagacctctccaactccaccaccccgtcctcctccctcctctccacgacgctgcaggtgacgctggcctcgcgcaacccgaacgagcgcgtgggggtgtactacgaccggctggacgtgtacgcgtcgtacaagtaccagcaggtgacggtggccgcggcgctgccggccgtgtaccagggccacggcgacgtggacgtgtggtcgcccgtgctgtcgggccccggcgtccccttcgcgccctacctcgccgacgcgctccgccaggactgccaggcgggctacctcgtcctccaggtcaaggtcgacggccgcgtgcggtggaaggtcggcagctggatctccggccactaccacctcttcgtcacctgccccgcgttcctcgtcaccgccggcggcaacggcgcgcccggcgcttccgggttcaggttccagaccaccacctactgccacgtcgaggtttaaattaggagcgagaggaggggaaggaagcagagagccagagaccatggtggctacctctctagctgctgctccacctcctgccgttgcctggtgcggtaataactctctctctttctatctgtccgctgctggcgttactgctgctgcagtgatgcgggatgtaaaggaggggtaaaaaaaattcctttcgttctagccccttgtttttttcatcttctccttcacctttccatatactactagtatgctctgtcgactgttgttcaaaggaagcttccaattgtcaataaacattttggatcggaggatcaatcgcaattaacggcgcagccagcgaagtggtcacacgttgatctcggagccagatcgaccgtctttggcgaatgggtggggtatccctcgttcgtttgaccctaaagctagacgcaacaagcgcgtgatctaggtagagtttggagttttgcttgggggcaaggagccagcagatcagatttggtgtgggggaagccgggaaccccaagtagaagtacacacacagcaagcacatggggactctccttctcctgtggtgatcgtcctctactgcccatgccaaagcggtggttggtcgcccagcagcactcatcattcttcttctctctctctgtctgtgtgtgtctctgatcctcactcaacagcagcacacagctgtagcttcacttagccagcaaggaacaccatattgggcgtgcatggtcatatactcaccatgtggtgtgtcagctggtttccttctgttttgtagtactacactagtaggagttgtgccagtttgccgatgcatccgcatgtgcaagtctgcaggtggtagaagcatctatattctcttctgaaaatgaagaagaaaaaaaaaatcacgactagagtacacggcttagtagtagtagtattatttagaaatttgacgtgggaatctg

SEQ ID NO: 15694 - DNA, 2057 bp, Zea Mays
caaaagctcagcccactcggccactccgatgtgtattcatataatttaataggttaataggccaccaccagttatgtagcccaagtattcagtatttcagccggaggtgaccgcaccctttcgcagtctcgctcctctccagttttcgcttcaacttcttggttccggttcatcgtcgaccgccgctttttttcttccttccgccgccgactgttgccacttgccagtaccatctagctgcttctgatttcctaaaatcaggaatgctcctgaaaattgtcaatggatttgtggagatattcaaaaggaaatcaccagttattttgcaaagataactttaaattctattattaaggaaattggaggcgatgtgtttagtttattaattgatgaggctgcagatgtgtctgataaagagcaaatggcaattgtgttaagatatctcaacaaacaagggcttatcattgaaagtttagttggagttgtacatgtgaaagaaacatcagcaatatgtctcatggaagctcttcaaaaattattcactgatattgggttaagcataaaacaagtcaggggtcaatgttatgatggggcaagcaacatgcgtggtgagtttaatggcttgaaagctaagattttgcaagcaaataagtcagcatattatgtgcattgttttgctcaccagctccagttggttattgtggcagtagcaaagaagcatggagatgttgcagattttttttatatgatctctattttattcaatgtggttggaggttcttgcaaaagaaaagatatgatcagagagaaacatcgtgatgatgtaacaaaggccattggaagtggacaacttagcactggcaaagggttaaatcaagatcaaactcttcagagagctggtgacacacgctggggttcacactatagaaccctctcaagtatagtgaaattgttcccatctattatttctgttctaaaatatgttgagaaagaggggaaaagtgataagaaatctcaagcacgtggtcttatagcatattttgagacatttgattttgtgttttatttgcacatgatgctccatatattgggaagtgcaaatactttgtcacaatcattacaaaggaaggatcaagatatcctcaatgcgatgtcatgtgtgaggggaacaagaaatgagctgcaaaacctaagagagaatggatggaactcactcatggagaaggtacatttattctgcgatgaacatcacattgaaagggaaaacatgcatgacgaatatgtcaataggcatgcaccacgaaagaaatccaataagacaaacttgcagcattaccaaatagaagttcttaattatgttattgattggcaacttcaagagttcgatgaccgttttagtgaggtaaattctgcattgttgggtcacatggctgcttttaacccaaagaactcatttctcgcatttgacagagaaaccttagtaaggcttgctgagttttatccagatgattttgattcaaataaattggatgatctaagccttgaacttgttatatacattgacaatgtgagagcagatagaaggtttgacaatttggatgggattgttgatctagctaaattaatggtgcaaacaaataagcatattactttttcattggtctatcaacttctaaagctagtactaatattgccggttgccacagcatcagtggaaaggtgtttttcagctatgaatgttgtaaagaaaaagttgagaaacaagatgggtgatcagttcatgagtgattgcctaatatgctatgtggagaaagatatgttttcaaccattagtaatgatgaggtgattgatctttttaagaagatgaaatttcgaagtgggaagctttaacatgaatgaggaaactacatatacattgcacaacatcaaagcgcttttttgaaacatgcaaacatatgattgcaggattctattcagttggaattctttaagaagctcacgaaagaggcacgtgagtatatgacttacaagcttcatccaagaaggtagcctaaag

SEQ ID NO: 15695 - DNA, 2659 bp, Zea Mays
ggttccggttcatcgtcgaccgccgctttttttcttccttccgccgccgactgttgccacttgccagtaccatctagctgcttctgatttcctaaaatcagttagatacttgcttcatcaaggcttagcttttcgaggtcatgatgaatcaaaagagtcaaaaaataagggaaactttcgagagctggtgaatactttggctgatcaaaatgatgctatacgtgaatctattaggaatgctcctgaaaattgtcaatggatttgtggagatattcaaaaggaaatcaccagttattttgcaaagataactttaaattctattattaaggaaattggaggcgatgtgtttagtttattaattgatgaggctgcagatgtgtctgataaagagcaaatggcaattgtgttaagatatctcaacaaacaagggcttatcattgaaagtttagttggagttgtacatgtgaaagaaacatcagcaatatgtctcatggaagctcttcaaaaattattcactgatattgggttaagcataaaacaagtcaggggtcaatgttatgatggggcaagcaacatgcgtgcaaagaagcatggagatgttgcagattttttttatatgatctctattttattcaatgtggttggaggttcttgcaaaagaaaagatatgatcagagagaaacatcgtgatgatgtaacaaaggccattggaagtggacaacttagcactggcaaagggttaaatcaagatcaaactcttcagagagctggtgacacacgctggggttcacactatagaaccctctcaagtatagtgaaattgttcccatctattatttctgttctaaaatatgttgagaaagaggggaaaagtgataagaaatctcaagcacgtggtcttatagcatattttgagacatttgattttgtgttttatttgcacatgatgctccatatattgggaagtgcaaatactttgtcacaatcattacaaaggaaggatcaagatatcctcaatgcgatgtcatgtgtgaggggaacaagaaatgagctgcaaaacctaagagagaatggatggaactcactcatggagaaggtacatttattctgcgatgaacatcacattgaaagggaaaacatgcatgacgaatatgtcaataggcatgcaccacgaaagaaatccaataagacaaacttgcagcattaccaaatagaagttcttaattatgttattgattggcaacttcaagagttcgatgaccgttttagtgaggtaaattctgcattgttgggtcacatggctgcttttaacccaaagaactcatttctcgcatttgacagagaaaccttagtaaggcttgctgagttttatccagatgattttgattcaaataaattggatgatctaagccttgaacttgttatatacattgacaatgtgagagcagatagaaggtttgacaatttggatgggattgttgatctagctaaattaatggtgcaaacaaataagcatattactttttcattggtctatcaacttctaaagctagtactaatattgccggttgccacagcatcagtggaaaggtgtttttcagctatgaatgttgtaaagaaaaagttgagaaacaagatgggtgatcagttcatgagtgattgcctaatatgctatgtggagaaagatatgttttcaaccattagtaatgatgaggtgattgatctttttaagaagatgaaatttcgaagtgggaagctttaacatgaatgaggaaactacatatacattgcacaacatcaaagcgcttttttgaaacatgcaaacatatgattgcaggattctattcagttgctccgcccctggggccacggagctggccttggcgctgctggcggagctgtgcgcgtgcgcggacgggcgcgcggccgtggcggcgcacccggcgggcgtggccgtggtggcgcggcggctgcttcgcgtgtccgcggccgccgacgcgtgcgccgtgcgcgtgctggcggccgtcggcggccgggccgcgtcccccgaggtgctgcgcgagatggcgcgcgtaggcgccgtcgggaagctctgctgcgtgctgcaggcggactgcgacgccgccgtcaaggacgcggcccgcgccgtgctcaggctgcaccacggcgtgtggagcgggtcgccctgcgtcagcgcgtacctgctctccaggtacctctagtcgttgccgccagtaagggcacgccatgcatgcatgctgcgaggcagcgacttcctgtcggcattgcagaccgacgacatggttaagtcttctctactagtaactagctcatttagttttcttgttcgtcgatcggtcaagattatgctgccagcaaataatggtagtcaacccatctatcaccagcaaatgtatgtagaggaatttaatgttattttccttatatatctttattagacgaggcttttcctttctttttccttgtccaaatttaaggctagtttgggaacccattttacaaagggaaattagttaatttttctttgaaaaaattgaaatctcttgagaaaatgatgttcccaaactagactttaatgttatccagtgcctcttaatatgttcgaaggcttaacaactatatatatactgccctaaat

SEQ ID NO: 15696 - DNA, 1769 bp, Zea Mays
ccgcgagcgcccgcaactagctgccagccgcgcgcccgccgctacctgctcgcatccagcgccccgccgccacccctcgcggtgatctatgtgggcgacgtccacggctacatcacgaagctggagagcctctgttccaacctctaggccgcactccccgccgacgccttggccaccgcgctggtcatcttcctcggcgactacaacgaccgcggcccgcacacccgcagggttctcaactttctcctcgcgctcccgacgcgctacccagcgcagcgccatgtcttcctctgcggcaaccacgacctcgccttcgtggcgttcgttggggcgctgccgctgccgcccaacggctccctgttctttggccacctgcgcagcgccatctctctgtcctccctctctcgctcatcctcccccaccgccctgcttatttacgcccatttcttaagagaggatttgatagcctgtcagaataaaagagctcgaggaaattgcggcggccggaaattctggtcatggtgccacacaaacacgataatctgcttcatcctcgacggaattgccgtcggggtcgggcgattcttcggaggacaagcgcctctgtttcgttgagctagctaggtccatggggattagtcaggacactcatgagtcgatggcaacagatgcagccaattacctttgccaccagcttcagcatcttcttgggcctatctcttctgcgacgagccaaagtggcccctgggaggagaggtcggcgatggttaggttgactcagaagctgcagaaatctaagagaaataagcggtggcggcagaggagaaggaagcatgttgaagagctttttcagaaggagcgtgcggattatgatagagttgaccaggaagctgatgaatggagggctaagcaaatagccaaggacattgcaaaacagagggtggaaagcatgcagcagattgctagaaagaaaacaaatgtggaaagaaagcgcctagaatctgagctggagcttgccctaatggtcgagaaacttcaggagcttcggtctataagagttcaaaaaatgaagaaacaagatccatacttgaacacagatgcaagtacaatgtccccctttgagcatgcctcgatggtatctacctagcatgtggtatttgtaggttgacttggatttagagaattatgagtgtttcatagatgttactctgacgagggataacaatattaccactagaaatatatactagtctgtcattgagaaggagagaaggggtgattatattggaaagactttatagacacattcagtgaagatttgttctcaggttgatctgtgcaattttgatggcactcatggtgtcaagtgaggactggttgatctgtgcaatcactggacagcgttgaatgtacacaaatgacaaatttgacatgctcatattgggtccagtgtcccagtgggtcaaggctatgatttgactgaaacttgtgctggagcagctttcactgaatgggatgacaccacttccttgctgctatgtgaagcttgtttcatgggaagaaggtggttacaagatttctgattatccgatgctgagaggagaggtagtggttggcggacacagtacaacaaaaggctataggactaactgtattgtatgtgatattctgtgaacttatatatttggacttgtgtgaatttgtgatatgaacatatatcaatgtgtttgaaatctgtattgtatgtgatattctgtgttgcatgtgat

SEQ ID NO: 15697 - DNA, 1612 bp, Zea Mays
ccgcgagcgcccgcaactagctgccagccgcgcgcccgccgctacctgctcgcatccagcgccccgccgccacccctcgcggtgatctatgtgggcgacgtccacggctacatcacgaagctggagagcctctgttccaacctctaggccgcactccccgccgacgccttggccaccgcgctggtcatcttcctcggcgactacaacgaccgcggcccgcacacccgcagggttctcaactttctcctcgcgctcccgacgcgctacccagcgcagcgccatgtcttcctctgcggcaaccacgacctcgccttcgtggcgttcgttggggcgctgccgctgccgcccaacggctccctgttctttggccacctgcgcagcgccatctctctgtcctccctctctcgctcatcctcccccaccgccctgcttatttacgcccatttcttaagagaggatttgatagcctgtcagaataaaagagctcgaggaaattgcggcggccggaaattctggtcatggtgccacacaaacacgataatctgcttcatcctcgacggaattgccgtcggggtcgggcgattcttcggaggacaagcgcctctgtttcgttgagctagctaggtccatggggattagtcaggacactcatgagtcgatggcaacagatgcagccaattacctttgccaccagcttcagcatcttcttgggcctatctcttctgcgacgagccaaagtggcccctgggaggagaggtcggcgatggttaggttgactcagaagctgcagaaatctaagagaaataagcggtggcggcagaggagaaggaagcatgttgaagagctttttcagaaggagcgtgcggattatgatagagttgaccaggaagctgatgaatggagggctaagcaaatagccaaggacattgcaaaacagagggtggaaagcatgcagcagattgctagaaagaaaacaaatgtggaaagaaagcgcctagaatctgaggttgacttggatttagagaattatgagtgtttcatagatgttactctgacgagggataacaatattaccactagaaatatatactagtctgtcattgagaaggagagaaggggtgattatattggaaagactttatagacacattcagtgaagatttgttctcaggttgatctgtgcaattttgatggcactcatggtgtcaagtgaggactggttgatctgtgcaatcactggacagcgttgaatgtacacaaatgacaaatttgacatgctcatattgggtccagtgtcccagtgggtcaaggctatgatttgactgaaacttgtgctggagcagctttcactgaatgggatgacaccacttccttgctgctatgtgaagcttgtttcatgggaagaaggtggttacaagatttctgattatccgatgctgagaggagaggtagtggttggcggacacagtacaacaaaaggctataggactaactgtattgtatgtgatattctgtgaacttatatatttggacttgtgtgaatttgtgatatgaacatatatcaatgtgtttgaaatctgtattgtatgtgatattctgtgttgcatgtgat

SEQ ID NO: 15698 - DNA, 1847 bp, Zea Mays
ccgcgagcgcccgcaactagctgccagccgcgcgcccgccgctacctgctcgcatccagcgccccgccgccacccctcgcggtgatctatgtgggcgacgtccacggctacatcacgaagctggagagcctctgttccaacctctaggccgcactccccgccgacgccttggccaccgcgctggtcatcttcctcggcgactacaacgaccgcggcccgcacacccgcagggttctcaactttctcctcgcgctcccgacgcgctacccagcgcagcgccatgtcttcctctgcggcaaccacgacctcgccttcgtggcgttcgttggggcgctgccgctgccgcccaacggctccctgttctttggccacctgcgcagcgccatctctctgtcctccctctctcgctcatcctcccccaccgccctgcttatttacgcccatttcttaagagaggatttgatagcctgtcagaataaaagagctcgaggaaattgcggcggccggaaattctggtcatggtgccacacaaacacgataatctgcttcatcctcgacggaattgccgtcggggtcgggcgattcttcggaggacaagcgcctctgtttcgttgagctagctaggtccatggggattagtcaggacactcatgagtcgatggcaacagatgcagccaattacctttgccaccagcttcagcatcttcttgggcctatctcttctgcgacgagccaaagtggcccctgggaggagaggtcggcgatggttaggttgactcagaagctgcagaaatctaagagaaataagcggtggcggcagaggagaaggaagcatgttgaagagctttttcagaaggagcgtgcggattatgatagagttgaccaggaagctgatgaatggagggctaagcaaatagccaaggacattgcaaaacagagggtggaaagcatgcagcagattgctagaaagaaaacaaatgtggaaagaaagcgcctagaatctgaggttgacttggatttagagaattatgagtgtttcatagatgttactctgacgagggataacaatattaccactagaaatatatactagtctgtcattgagaaggagagaaggggtgattatattggaaagactttatagacacattcagtgaagatttgttctcaggttgatctgtgcaattttgatggcactcatggtgtcaagtgaggactggttgatctgtgcaatcactggacagcgttgaatgtacacaaatgacaaatttgacatgctcatattgggtccaggtccgtgttatcctaaatctcagtcattctcagttggattagttcatccttaaatatctagagttatcattattctgaatttccttaccaattcaaagacgataaactgaagattactaatgagtggaactttctatattcaatcgcatatgtagcctatgaactttcctgacaaggtaaggtgtttcctttgcttcttgtttttatatgatacttgattgttgtgttgatgcagtgtcccagtgggtcaaggctatgatttgactgaaacttgtgctggagcagctttcactgaatgggatgacaccacttccttgctgctatgtgaagcttgtttcatgggaagaaggtggttacaagatttctgattatccgatgctgagaggagaggtagtggttggcggacacagtacaacaaaaggctataggactaactgtattgtatgtgatattctgtgaacttatatatttggacttgtgtgaatttgtgatatgaacatatatcaatgtgtttgaaatctgtattgtatgtgatattctgtgttgcatgtgat

SEQ ID NO: 15699 - DNA, 1532 bp, Zea Mays
ctgtataccgcgagcgcccgcaactagctgccagccgcgcgcccgccgctacctgctcgcatccagcgccccgccgccacccctcgcggtgatctatgtgggcgacgtccacggctacatcacgaagctggagagcctctgttccaacctctaggccgcactccccgccgacgccttggccaccgcgctggtcatcttcctcggcgactacaacgaccgcggcccgcacacccgcagggttctcaactttctcctcgcgctcccgacgcgctacccagcgcagcgccatgtcttcctctgcggcaaccacgacctcgccttcgtggcgttcgttggggcgctgccgctgccgcccaacggctccctgttctttggccacctgcgcagcgccatctctctgtcctccctctctcgctcatcctcccccaccgccctgcttatttacgcccatttcttaagagaggatttgatagcctgtcagaataaaagagctcgaggaaattgcggcggccggaaattctggtcatggtgccacacaaacacgataatctgcttcatcctcgacggaattgccgtcggggtcgggcgattcttcggaggacaagcgcctctgtttcgttgagctagctaggtccatggggattagtcaggacactcatgagtcgatggcaacagatgcagccaattacctttgccaccagcttcagcatcttcttgggcctatctcttctgcgacgagccaaagtggcccctgggaggagaggtcggcgatggttaggttgactcagaagctgcagaaatctaagagaaataagcggtggcggcagaggagaaggaagcatgttgaagagctttttcagaaggagcgtgcggattatgatagagttgaccaggaagctgatgaatggagggctaagcaaatagccaaggacattgcaaaacagagggtggaaagcatgcagcagattgctagaaagaaaacaaatgtggaaagaaagcgcctagaatctgagtctgtcattgagaaggagagaaggggtgattatattggaaagactttatagacacattcagtgaagatttgttctcaggttgatctgtgcaattttgatggcactcatggtgtcaagtgaggactggttgatctgtgcaatcactggacagcgttgaatgtacacaaatgacaaatttgacatgctcatattgggtccagtgtcccagtgggtcaaggctatgatttgactgaaacttgtgctggagcagctttcactgaatgggatgacaccacttccttgctgctatgtgaagcttgtttcatgggaagaaggtggttacaagatttctgattatccgatgctgagaggagaggtagtggttggcggacacagtacaacaaaaggctataggactaactgtattgtatgtgatattctgtgaacttatatatttggacttgtgtgaatttgtgatatgaacatatatcaatgtgtttgaaatctgtattgtatgtgatattctgtgttgcatgtgat

SEQ ID NO: 15700 - DNA, 4012 bp, Zea Mays
  misc_feature (1)..(2): n is a, c, g, or t
nngcagatggccttagcgatccatagtgtggcgatgaataatttagtttgtgtggcttgaaacgattcaattcatcatgtttattttttcgtgggttgtataacttatttagctgggtggattcgattgcacgaaagcagcatacttgtttgtagcctatcacgtagcatttgcttatcctttctccatttcagtttatgtggctaattgcatttgttagattgtttataaaattgtttgcaactagtgcagtgacttgggattagcacacatatataatataagataggtttggagtgtctactatgtttgtgttctttgtagggcttgatgattttatacaaaatcacatttgtattttggtaattacttacagtcattagcttagagttaacatgaattacgattcaaatatttaccatttgtaagaccttttcaggattctggtacacagatgcccatgagtagtttctcttgtacacttgctttagctttaatcatagtgttagcattgtatgcataacctaaaattacttctccaaactataagggtaaaaatactgagtgatatgtacacatgcctatactaatttatatatagtatagataataagctgttcaaataaacttacacggtacaaagaagttagcaaggatagcccatgtaccgttgcaacgcacgggtattatactagtataatttaacatgtgacgagaagctggtctcctcaaggtaggagcaactggagttcacagttcacacaattgtttcgctgcctctagtccatggacctcatggtcatgtgaatgctagtccctccatgttttttgttgcttctttgtagttgagaattttaggggtgtgggttcattcagcatttatccaatcaacattttatgagagctgattacaattatatttttctagattagaatttacaatcacatgcaacatgttggtgtaaaagatcacaaatcatgcaaacataaccttaggttgttcggtgaaatttcgctaaagtggcttaggcaaacaaagtgcactattggggttagtaaaacagaaattttgtagaatttttttataaagtttactaccatataaatatgattgcatttgagcaaagtcatggcaaaaaagtggagaccttagaagtcttcaagcaaagggccatcaaagatggcacatggaaggaagaagatgacacaaacatgcgagagaagatggtaacttgtatttggaaggtggtcttggaggtgtgtggagcaacaaaagggagtgtatgcgaagctaaagatatttgttagtggaaaagaggaagtccaaatggctatggaggcgaagaatgataagcgtttgtaccaagacatgactgtggacaacatagagatagggtattcccagatgcaagcacctcacctcaatgatgttgaggaatggaagagattctaccaagtccataatggtcaagattccacacagaagggtcatgccgtgaagcatcttattcctgtggttctacagcagtaggagaagattggtttgtatttctcgcatctttttgataacttgttttgtgagtctctgaccacgaaaaaagttactactttactgaactgacctcgggcgtgttaataccagttgaaacacgctttggtccctcatccgtgaatcaatccctagcaggttttgtcttgtatccaagtagattataatcaatatcggtatctatggaccttagaaattcattcttcaccttgcttacttttaagtatggttaattcatcccgactagtatctttggacaccgaataaaccttctccctcttctaggtacctaacctaatccctagtacaccatctatctctacatccagggtcgcctccaatctcgttccgggttaaaaaagctgagtgacttaagcggtatatataggttctcggccttaaaagaagataaagcccagtcctattacaaaaggcgggaaaagtcactctatgtaagtattctaataaattgggcacacatttcactatatagtgagtttgagtctaggttactgtacctaagatggattatatagcctaagtcggggaataattaagtagatattagctttaaccatagcatacttgtgcatcaaaggacaatataggatgactattgttcgtgagaggaagacgaggaacttcaaccaagtttagtgcattaaggatgaaacgttgcacctcttggtggaggaagagatcagatatagatggcgagagtattttgactaattgttcaacggggacaaaggggacacaacctttcagttggatgagtcttttgatgacatcaatagacgctttatgcataggatccaagaatatgatgttagagtggtactgaaaaggatgaaatagggtaatagggtaaggcgatgagccctgatggtggcatggagatgcctcagggacataactatagtatggctaaccaagttgttcaaccatatcttttggtcgaacaaaatacctaacaagtggagaagtatattagtagatgaacaagaataagggagatatttaaagtggtaccatttatcgaagaattaagttgatggggcatgctatgaggctattggagttatcgagcatcgtctgagaggaataacgaggatctgtatgaaccaatttggtttgatgcccggaaggtcaaccgtggaagccattttattaataggatatgggaagaggcagtaaaaggggacttaaaaggatggagtacacctaaagatttaaccttgaacaggagtgcatggaaacaattatctatgtgcatgaactttgacttgcattttctgttgggtttcaactctaacttacccaacttgattaggactaaaaggcttcattgtcgttatacatagatgatagcattaggtttttaacttctatgcacgttaggaacctgtatggggttttgtgttttggaattgcatgaactttgatggagttgaatgttatgaataattccttttgtggacattggcatgagacttgatcctaggaacatattacttttggtcttgcattgacatactgttcacttattgtcatttatgttttgtttgtagcatcctgtcatggaccttcggtccatggggatagctgtcttctccggcgaggttatacccctctgccgcaggcttggttctagggtagcagccctaggcgcttgagaaggtcattgcaagagagagagagattggtttgataatgattttgcttgatttattccctgctgccatgcggcttataaatagccctatggctaaccaacttctcctacaaactctcaactaactcctactttcttggacttatctgatgctaaccaactctccacaattctctcatctcaatcttattatctagccttatcgcagctcatctcaatcttattctctagccttatcccagcctggctgttgcctctcgctccctacgatacccatgacttcggtccatggggatagctgtcttctccggcgaggttatacccctctgccgcaggcttggttctagggtagcagccctaggcgcttgagaaggtcattgcaagagagagagagagattggtttgataatgattttgcttgatttattccctgctgccatgcggcttataaatagccctatggctaaccaacttctcctacaaactctcaactaactcgtactttcttggacttatctgatgctaaccaactctccacaattctctcatctcaatcttattatctagccttatcccagctcatctcaatcttattctctagccttatcccagcctggctgttgcctctcgctccctacgatacccatgacatctccccctcccttgaggaccagctcgtcctcgagctgccatagacttacctgacacgacttaaggttaagccttttacatctcggcttacctttattatttaagatgaaaatacaaaataattgtggaactaaaat

SEQ ID NO: 15701 - DNA, 1387 bp, Zea Mays
atctacctatcggcccaggaatgtgcccgggatgtgggacggggtttcacgaggagaacataccaacgacatcctcaggaaccgttgacgtggcgctcctcctccgacgattcgctccctccctcgagtttcaccactccctcctctcgcggccacgcactcccccgcctccgcaacctctcaccgccggtccccgccctccgaccctccacgcgcaaacagcccgcctccatccaccaggatccccgatgagctaggagaagtgttgatttggatattcgtggagtgtgcaatggtggactttgttcgacggctcgcctctgccctgctcaagtgctgcgaccttgacatacccaatcggccaaagggcctcgaggaccccgaacgcctggctagagaaactgtttttaatgtgaatgaaatcgaggctctgtatgagctgttcaagaagattagcagtgctgtggttgatgatggcttgattaacaaggtttgtaggttctaagctcttagtgtgaagtggcagtgaatgacaactttgtttccatgaagtcattgtgtctgatctctccttggagctttgatgtattatctgcaggatgaattccaattagccttgtttaagaccaacagaaaggatagcatgtttgctgaccgggtatttgacttgtttgacacgaaacacaatggaattctcgagtttgaggaatttgctcgagccctttctgtgttccatccgagtgcaccaatcgatgacaaaattgattttgctttcaaattgtatgatctcaagcaacaaggtttcattgaaaagcaggaggtaccttgcacttgcttatattcttaagtcaagcaaatggtggtcgcaacacttgctgaatcaggaatgaatctttcagatgatattattgaaggcattattgataaaacatttgaggaagcagatacaaagcacgacggcaaaattgataaggaggaatggcgcagccttgtcttgaggcatccatctctgttaaaaaatatgaccctcccatatctccgggatatcaccacaacatttccaagctttgtgttcaactctcaagtagaggatgcgtgaggtcccagcgtctacggcaccattgaagcccctggggcacagcagatcaggttctgtgggggcacttagttgtttttgtttccttgaaaatgtaaattttatgtggtggcatgtcctcctgtatagtgagtattgctattgtgcacagaattggggcatgaagcgtttcttgtcgctgtttataaaatattcttcaaacatattgctcataaaaaactactcaaagtaagaatcaaattgagtacaaaactactcaaagtaagaattgaattgagtacatgtgatgcc

SEQ ID NO: 15702 - DNA, 1154 bp, Zea Mays
atctacctatcggcccaggaatgtgcccgggatgtgggacggggtttcacgaggagaacataccaacgacatcctcaggaaccgttgacgtggcgctcctcctccgacgattcgctccctccctcgagtttcaccactccctcctctcgcggccacgcactcccccgcctccgcaacctctcaccgccggtccccgccctccgaccctccacgcgcaaacagcccgcctccatccaccaggatccccgatgagctaggagaagtgttgatttggatattcgtggagtgtgcaatggtggactttgttcgacggctcgcctctgccctgctcaagtgctgcgaccttgacatacccaatcggccaaagggcctcgaggaccccgaacgcctggctagagaaactgtttttaatgtgaatgaaatcgaggctctgtatgagctgttcaagaagattagcagtgctgtggttgatgatggcttgattaacaaggatgaattccaattagccttgtttaagaccaacagaaaggatagcatgtttgctgaccgggtatttgacttgtttgacacgaaacacaatggaattctcgagtttgaggaatttgctcgagccctttctgtgttccatccgagtgcaccaatcgatgacaaaattgattttgctttcaaattgtatgatctcaagcaacaaggtttcattgaaaagcaggaggtcaagcaaatggtggtcgcaacacttgctgaatcaggaatgaatctttcagatgatattattgaaggcattattgataaaacatttgaggaagcagatacaaagcacgacggcaaaattgataaggaggaatggcgcagccttgtcttgaggcatccatctctgttaaaaaatatgaccctcccatatctccgggatatcaccacaacatttccaagctttgtgttcaactctcaagtagaggatgcgtgaggtcccagcgtctacggcaccattgaagcccctggggcacagcagatcagaattggggcatgaagcgtttcttgtcgctgtttataaaatattcttcaaacatattgctcataaaaaactactcaaagtaagaatcaaattgagtacaaaactactcaaagtaagaattgaattgagtacatgtgatgcc

SEQ ID NO: 15703 - DNA, 967 bp, Zea Mays
gaagttttctatgatgaactatttagaacgattgctttcaaattgtatgatctcaagcaacaaggtttcattgaaaagcaggaggtcaagcaaatggtggtcgcaacacttgctgaatcaggaatgaatctttcagatgatattattgaaggcattattgataagacatttgaggaagcagatacaaagcacgatggcaaaattgataaggaggaatggcgcagccttgtcttgaggcatccatctctgttaaaaaatatgaccctcccatatctccgggatatcaccacaacatttccaagctttgtgttcaactctcaagtagaggatgcgtgaggtcccagcgtctacggcaccattgaagcccctggggcacagcagatcaggttctgtgggggcacttagttgtttttgtttccttgaaaatgtaaattttatgtggtggcatgtcctcctgtatagtgagtattgctattgtgcacagaattagggcatgaagcgtttcttgtctgtgtttataaaatattcttcaaacatattgctcataaaaactactcaaagtaagaatcaaattgagtacaaaactactcaaagtaagaattgaattgagtacatgtgatgccacaaaagatggagatgctctttgcctcctttggcgggatgagctcaatagccaaacctttgtcggagcataaacacaaccttatttgttgtgtttggtaggtagtgtttggttgtggagttagatagaccgagccgctctgtatagaattgagctgctctaaaagtgaaatattcttctaatattctaatatgctgtatctctgatctctctaacttgtttttgttagttgtcttctcttttgttctgcgtcacttcgaaagaatggagccgctctgttccgcttcactttggaaccaaacaaaaaacagaggctccgttctaattaccaaacacaaaacaaaa

SEQ ID NO: 15704 - DNA, 964 bp, Zea Mays
ctttaccatgcacatacaaaatctttagttgctttcaaattgtatgatctcaagcaacaaggtttcattgaaaagcaggaggtcaagcaaatggtggtcgcaacacttgctgaatcaggaatgaatctttcagatgatattattgaaggcattattgataagacatttgaggaagcagatacaaagcacgatggcaaaattgataaggaggaatggcgcagccttgtcttgaggcatccatctctgttaaaaaatatgaccctcccatatctccgggatatcaccacaacatttccaagctttgtgttcaactctcaagtagaggatgcgtgaggtcccagcgtctacggcaccattgaagcccctggggcacagcagatcaggttctgtgggggcacttagttgtttttgtttccttgaaaatgtaaattttatgtggtggcatgtcctcctgtatagtgagtattgctattgtgcacagaattagggcatgaagcgtttcttgtctgtgtttataaaatattcttcaaacatattgctcataaaaactactcaaagtaagaatcaaattgagtacaaaactactcaaagtaagaattgaattgagtacatgtgatgccacaaaagatggagatgctctttgcctcctttggcgggatgagctcaatagccaaacctttgtcggagcataaacacaaccttatttgttgtgtttggtaggtagtgtttggttgtggagttagatagaccgagccgctctgtatagaattgagctgctctaaaagtgaaatattcttctaatattctaatatgctgtatctctgatctctctaacttgtttttgttagttgtcttctcttttgttctgcgtcacttcgaaagaatggagccgctctgttccgcttcactttggaaccaaacaaaaaacagaggctccgttctaattaccaaacacaaaacaaaa

SEQ ID NO: 15705 - DNA, 1383 bp, Zea Mays
gcgggatccgtttctagcttggtttcgtgtccgtgtccgagctaggagaagtgttgatttggatattcgtggagtgtgcaatggtggactttgttcgacggctcgcctctgccctgctcaagtgctgcgaccttgacatacccaatcggccaaagggcctcgaggaccccgaacgcctggctagagaaactgtttttaatgtgaatgaaattgaggctctgtatgagctgttcaagaagattagcagtgctgtggttgatgatggcttgattaacaaggaagaattccaattagccttgtttaagaccaacagaaaggatagcatgtttgctgaccgggtatttgacttgtttgacacgaaacacaatggaattctcgagtttgaggaatttgctcgagccctttctgtgttccatccgagtgcaccaatcgatttcaaaattgattttgctttcaaattgtatgatctcaagcaacaaggtttcattgaaaagcaggaggtcaagcaaatggtggtcgcaacacttgctgaatcaggaatgaatctttcagatgatattattgaaggcattattgataagacatttgaggaagcagatacaaagcacgatggcaaaattgataaggaggaatggcgcagccttgtcttgaggcatccatctctgttaaaaaatatgaccctcccatatctccgggatatcaccacaacatttccaagctttgtgttcaactctcaagtagaggatgcgtgaggtcccagcgtctacggcaccattgaagcccctggggcacagcagatcaggttctgtgggggcacttagttgtttttgtttccttgaaaatgtaaattttatgtggtggcatgtcctcctgtatagtgagtattgctattgtgcacagaattagggcatgaagcgtttcttgtctgtgtttataaaatattcttcaaacatattgctcataaaaactactcaaagtaagaatcaaattgagtacaaaactactcaaagtaagaattgaattgagtacatgtgatgccacaaaagatggagatgctctttgcctcctttggcgggatgagctcaatagccaaacctttgtcggagcataaacacaaccttatttgttgtgtttggtaggtagtgtttggttgtggagttagatagaccgagccgctctgtatagaattgagctgctctaaaagtgaaatattcttctaatattctaatatgctgtatctctgatctctctaacttgtttttgttagttgtcttctcttttgttctgcgtcacttcgaaagaatggagccgctctgttccgcttcactttggaaccaaacaaaaaacagaggctccgttctaattaccaaacacaaaacaaaa

SEQ ID NO: 15706 - DNA, 1784 bp, Zea Mays
atttccacctctctcacgcccgtctccggccgcctcacctccccccttcgcgctcggcctcacgctgacccatctgggctagggcacgcggtgacatctcactcatcggttcagggacccccggtctcgaaacaccgacacaaatagattataaaatattttttcagtaacagtataacaaatattttatatataatttatcgtggtattatatcttctgtcacacggacactcactcacctagtagctaaacaaggctgacgtgctcctcctccggcgattcgctcccttcctcttcccccggccacgcacttccccgccccccgaccccgcaacctctcaccgccggtccccgccctccgaccctccacgcgcaaatagcccgcctccatccactaggaggatccccgatgagctaggagaagtgttgatttggatattcgtggagtgtgcaatggtggactttgttcgacggctcgcctctgccctgctcaagtgctgcgaccttgacatacccaatcggccaaagggcctcgaggaccccgaacgcctggctagagaaactgtttttaatgtgaatgaaattgaggctctgtatgagctgttcaagaagattagcagtgctgtggttgatgatggcttgattaacaaggaagaattccaattagccttgtttaagaccaacagaaaggatagcatgtttgctgaccgggtatttgacttgtttgacacgaaacacaatggaattctcgagtttgaggaatttgctcgagccctttctgtgttccatccgagtgcaccaatcgatttcaaaattgattttgctttcaaattgtatgatctcaagcaacaaggtttcattgaaaagcaggaggtaccttgcacttgcttatattcttaagtcaagcaaatggtggtcgcaacacttgctgaatcaggaatgaatctttcagatgatattattgaaggcattattgataagacatttgaggaagcagatacaaagcacgatggcaaaattgataaggaggaatggcgcagccttgtcttgaggcatccatctctgttaaaaaatatgaccctcccatatctccgggatatcaccacaacatttccaagctttgtgttcaactctcaagtagaggatgcgtgaggtcccagcgtctacggcaccattgaagcccctggggcacagcagatcaggttctgtgggggcacttagttgtttttgtttccttgaaaatgtaaattttatgtggtggcatgtcctcctgtatagtgagtattgctattgtgcacagaattagggcatgaagcgtttcttgtctgtgtttataaaatattcttcaaacatattgctcataaaaactactcaaagtaagaatcaaattgagtacaaaactactcaaagtaagaattgaattgagtacatgtgatgccacaaaagatggagatgctctttgcctcctttggcgggatgagctcaatagccaaacctttgtcggagcataaacacaaccttatttgttgtgtttggtaggtagtgtttggttgtggagttagatagaccgagccgctctgtatagaattgagctgctctaaaagtgaaatattcttctaatattctaatatgctgtatctctgatctctctaacttgtttttgttagttgtcttctcttttgttctgcgtcacttcgaaagaatggagccgctctgttccgcttcactttggaaccaaacaaaaaacagaggctccgttctaattaccaaacacaaaacaaaa

SEQ ID NO: 15707 - DNA, 598 bp, Zea Mays
agcctgcaagcattaatgaagttatctgttttgcaataactatgtggagcagtttgatcatcactgtccatgggtcggccggtgcataggactgacatggtatgcagtccctagggaccgagcctcagagctagaggaagttattcgtgtacatggatatggaggaaaccctgaccgccttgcatcgctggcagtgcttggggagaagacaacattgatgtctccagatgttcttgtagcccgtggtgtgccctgctgtaggttagtactgtatcctggagagtttgtggtgacattcccaagggcataccacattgggtttagtcatggatgtaaggagggcgtccacaggctacgccatgcctccacctccgcagatcacgcctaccttgccccgcccgcgacagcctgcaagcattaatgaagttatctgttttgcaataactatgtggagcagtttgatcatcactgtccatgggtcggccggtgcataggactgtgcacaagaatccgctgaacagggtggcgttgagctgtatgcagaggtgaacaaccatgggctctgcgctattgcccaggctgagtcgtctgctataag

SEQ ID NO: 15708 - DNA, 1246 bp, Zea Mays
cttagcccgagtccgagccctgggtcaggcggagcggagttcgccgtcttccggggcttagcccgagtccgagccctgggtcgggcggagcggagttcgccgtcttccggggttagcctgagtccaagccctgggtcgggcggagcggagttcgccgtcttccggggcttagcccgagtccgagccctgggtcgggcggagcttcctatggtgcctttggcagggcctggcttcctttacgttaaatgctcctgcgacttggccggtcggtgcggcgattcagtcagggttgcttcttagcgaaggcaaggcctcgggcaagccggagatgtgtccgccgttgaaggggggcctcgggcgagacggaaaccccttcggggtcggctgcccttgcccgaggctaggctcgggtgaggcgtgatcgagtcgctcgtatggactgatccctgacttaatcgcacccatcaggcctctgtagctttatgttgatgggggttaccagctgagaattaggcgtcttgagggtacccctaattatggtccccgacagttttataagcaaaacacaatgttcaaactcgcataatggacatgctatttttgtccatcgaggaatctgacagccaaacattgtgcatttagctcaaaaggaattataagtcaatgatcttgtcttcctttgttagcactatacaaattatgttttaattaatagtcagttgaagttagagcttaaactattttggtctgtccatttagctcaaccttcttttggctaggaatatacaaatgtcttgtaagccggactcctccatgggtcggtatatagtcccgtaaggacttctgtgcttaaatctatagttttagcatggtttcttgtattgtgtacacgagactgacacaaaactattaatcgttttatactatttgggatttctttggaaaggttatttgagaaatcgtgtatgcttgttttgtaaaattagaaggaaaagagaacaactacgaagtgtatggggttgctatttactttgcatgcaatttagacagtgtttgactgccctgcatgatgatgttgctatttactttacgtgcattttgactaacgatttgttgctatgttcctgaggatctatggatatctgctttcctgttggtactaaggaaaccaacaagaaattttggactgctacctggattaatgctcgagaaaaaggtgcatgacatcaatattactattctattt

SEQ ID NO: 15709 - DNA, 544 bp, Zea Mays
agaatccagtcggcctggctcatgcaaccgggctacgcggagaagtcaaccaaaaagacgtagaagccacggtgaccatgaacagcctcctcctgctcgccgtcgccgccgccgccgccgtctgcgccttcgtccccacgccggctaccgccgaccccttcctctgcccatggaggacggtggctcaccccgaggaccccttcatccagaacctcggcagctgggcggtggaccagcagcatagcgtcctccacttcgacaaggtggagagcgccaaggcgcagggcgtcggcgactgcaccagcatgacccgcaactacgagctcgtcatcgacgcgtccatccgcgccggctcaggcgactacaagtatagggcggtggtgtacgtgactaacttcacccagccgcagaaggtcatctccttcgcagccatcccaccgagccgccgcccgccggcggccaactgatcgattttaatctacttatatgatgaagctcccaatttttgaaattacatataaaaggagtataatgaacgtgtcca

SEQ ID NO: 15710 - DNA, 1641 bp, Zea Mays
acccataggaaattttggtccccatattgcagctttcccaaccaaccatgaactcacccgcaccacgccgttaacgggtccagaacctcgcttccaatctgccctcccgtgtccccctccctgtccgattccccacagtagcgcctcgccctcgtcctcctcctccagtccggatcgccatttcccaccgatccgtcccggcatcggcatggctgcgcccaagccaaaggcgccggcgcccagtgcttcggcagcctagcgtttgtttgcctccgaggatttccgcctatcgcgttaccggatcttcggtgggccggcgaccctctacgccactatgagctccgacgggcgcctccgccgcgcgctggccgcgttcggcggcgacgtgtgggacctcgtggacgcggcgctcgccgccgccgcgcgggacagccccggcgacctgcgcgcgcgccgcgacggcatcgtccagcgcctctacgcaggggcagcccgctgccgcaactgcgacgccgacgcaaccccggcgcctgctcagccgaggaaggcgaatgacgccgtcgctgctgctgcttctcctgcggcggcggcgtcggcgtttccggcctcgcctgaacaggaggtcgacgcggacggcctcgacgacgtcgacgacgcggccgacgctggcatggagagcaagattctggcgatcagggatttcctggaggacccggaccaggacacggacatcggccgccatgtgaatggcctgcgtaagcacccatccagcgaggtccggcaactggtgaagctgctcgttaggaaatggaaggaaatagtggatgattgggtgaggctgcacaactcatgtggtgatggtagtggctccatcataagcgatggtgactcacctgacaaagttcaatccaagtaccatcaaaatactcatgcttcagacttcaagtatccccccagcccacagaggcataatgttttgagctcagagagatctagcaaccacaatttggtggagtcaacaatggagaagcgtagaacgagccctgctcctgcatacaataacaccaagcagaacaacagcaacaactattccagtatttcatcgtcagcaccagctagagcaatacgggagcaaaagaacactcttttggattctgagaagctagactcagctaggaagaggcttcaggaaaactaccaggaagcgcaaaacgcgaaaaagcagaggacgatacaagtgatggatatccacgacataccgaagccgaagaacaggaacaccttcgtgcgcaagagcggcagcagcgccggattcccggcaaagcaccggtgatctctgcctgaccaccatcggatctgtagcggactcagcgtatttatttctgtactagcaaaaagaaaaaaaagaaagaaattttaagaagcaaactcttgttttcccagtttgatttgtagccctgcagtccagctcactgatattatagggatatatatactgcctagtccatgaggctacgcttttgtacctctctttaagattggagaacagaaggaaagcaaattgtgttattattcaatgacattcacattcctgcctgataaagatatggccggtagatcatgcatatggctggattacgt

SEQ ID NO: 15711 - DNA, 1326 bp, Zea Mays
acccataggaaattttggtccccatattgcagctttcccaaccaaccatgaactcacccgcaccacgccgttaacgggtccagaacctcgcttccaatctgccctcccgtgtccccctccctgtccgattccccacagtagcgcctcgccctcgtcctcctcctccagtccggatcgccatttcccaccgatccgtcccggcatcggcatggctgcgcccaagccaaaggcgccggcgcccagtgcttcggcagcctagcgtttgtttgcctccgaggatttccgcctatcgcgttaccggatcttcggtgggccggcgaccctctacgccactatgagctccgacgggcgcctccgccgcgcgctggccgcgttcggcggcgacgtgtgggacctcgtggacgcggcgctcgccgccgccgcgcgggacagccccggcgacctgcgcgcgcgccgcgacggcatcgtccagcgcctctacgcaggggcagcccgctgccgcaactgcgacgccgacgcaaccccggcgcctgctcagccgaggaaggcgaatgacgccgtcgctgctgctgcttctcctgcggcggcggcgtcggcgtttccggcctcgcctgaacaggaggtcgacgcggacggcctcgacgacgtcgacgacgcggccgacgctggcatggagagcaagattctggcgatcagggatttcctggaggacccggaccagtctgaggacgacatagtgagcctactgcagaacctagcagacatggatatcacttacaaggctctccaggacacggacatcggccgccatgtgaatggcctgcgtaagcacccatccagcgaggtccggcaactggtgaagctgctcgttaggaaatggaaggaaatagtggatgattgggtgaggctgcacaactcatgtggtgatggtagtggctccatcataagcgatggtgactcacctgacaaagttcaatccaagtaccatcaaaatactcatgcttcagacttcaagtatccccccagcccacagaggcataatgttttgagctcagagagatctagcaaccacaatttggtggagtcaacaatggagaagcgtagaacgagccctgctcctgcatacaataacaccaagcagaacaacagcaacaactattccagtatttcatcgtcagcaccagctagagcaatacgggagcaaaagaacactcttttggattctgagaagctagactcagctaggaagaggcttcaggaaaactaccaggaagcgcaaaacgtgaacttgtcaaaatgacgtgctaaattcaggccaatgctatg

SEQ ID NO: 15712 - DNA, 722 bp, Zea Mays
gttctgcgtacgccattattatccacaacactcatcgatctacacacatacatagtttcttctactacacgacgacaaacatggggaagcctgcgaagatcggagagtggggtggatacgccggcgatcgtcgggatctgagggctactccggaccggctgatcgaggtgaaggtcacggcggacaacagcagctgcatccgctccatctccttcatctacatcggagccgatggcaaaccgtacgaggaggggccatggggtttcggccatgctggcacggagtacaagattgatctgtgcaggttcgacgagagcttgacggagatctccgggaccacgggcccagcctacaacattgacaatctggtcaagtctctcaaattcgtcaccaacaaacgcgcttacggaccgtacggcagggacgagggcaccccgttccgtgtcaaggtgatgaacaacggccacgtcgctggcttctttggccgctctggagattgcctggacgcgatcgggctctacgtgaaccccaactaataactaaaacgatggatcggatcatctgcatgcatgcatatgcagtatgcatgctgcttgcctgcctgtaacgaatatgaatgcataaaataacgcccctgctgctcccatgcatcagcagtgtgtaccactatgttatatatatatattgtatttcgctaccgaataaaaacataaataaaagat

SEQ ID NO: 15713 - DNA, 720 bp, Zea Mays
gttctgcgtacgccattattatccacaacactcatcgatctacacacatacatagtttcttctactacacgacgacaaacatggggaagcctgcgaagatcggagagtggggtggatacgccggcgatcgtcgggatctgagggctactccggaccggctgatcgaggtgaaggtcacggcggacaacagcagctgcatccgctccatctccttcatctacatcggagccgatggcaaaccgtacgaggaggggccatggggtttcggccatgctggcacggagtacaagattgatctgtgcaggttcgacgagagcttgacggagatctccgggaccacgggcccagcctacaacattgacaatctggtcaagtctctcaaattcgtcaccaacaaacgcgcttacggaccgtacggcagggacgagggcaccccgttccgtgtcaaggtgatgaacaacggccacgtcgctggcttctttggccgctctggagattgcctggacgcgatcgggctctacgtgaaccccaactaataactaaaacgatggatcggatcatctgcatgcatgcatatgcagtatgcatgctgcttgcctgcctgtaacgaatatgaatgcataaaataacgcccctgctgctcccatgcatcagcagtgtgtaccactatgttatatatatattgtatttcgctaccgaataaaaacataaataaaagat

SEQ ID NO: 15714 - DNA, 1689 bp, Zea Mays
cccctgatctcgcgggctcgtataaaatcggcccatcacgaacccctcgcatcgccctcgcgcacccgacagagtccgcgaagcccgcccgcccgcccgcccgctcgcgcaaacgagagagaggcgagatccggccccgggccggcggcgagagagagagggatcggtgacggtctgacggactaccagggaccatcctcctcgcccttctccttcggccgctcgctgctctcgctgcgtaggcaccccgccgccatgccgtcaggcgaggaggccgacctcgaggcgttccaacgccacgtggcgtcggctctcgcggagctgctgcccgcggctgaggccggggccggtggcgacgccgcggcggagggggcgggcgaggagttcctctgcgccgcgtggacccgccgcctgctcgaggcgttcgtgctgtgccaggaggagttccgcgtcgtggtcgcccaggcgcggcgccgcgccggggccctgccgcccgccgccgagaggctggtcgccgagttccacgagcgcgccgtcaaggtcctcgacgtctgcaacgcggcgcgcgacggcgtggaccaggtgcgccgctgggagcgtctcgccgacgtcgccgcgtccgcgctgcgcgcgcccggggaggtccacgagggccagctccgccgcgcgcgccgggcgctcaccgacctctccgcgctcctcgtcgacgacgacgccgccgccgccgccgccgcgtccggcgccggcggcgtcgcctccttcctctcctcccaccgcaaccgctccttcggccgcgcgcgcgcctccccgtcgcgcacggccggcgccggcgccggcaccctcgcctccgcctccgcgtcccacttccgctccctctcctggagcgtgtcccgcacctggtccgcctcgcggcagctgctggccatcggggccggcctcgcggcgccgcgcgcccacgaggcgggcctcgccgcccccgtctacgccatgggctgcgtgctccacctcaccgcgtgggcgctcgtggccgccgtcccgtgcccggaccgcggcaacgcgctgcaggcgcaccacctgccggccgcgccgccgcgcgccgcgttcccgtgggcgccgcccctcctcgccttacaagaacgcctcgccgaggagggcaagcgcaaggacaggcgccactcgtgcggcctgctcaaggagatccactcgctcgagaagtccacgcagaagctcgccgaggcgatcgacgcggcccccatcccgctcttcggcgaccgggaggccgacgtgcgggatgctgccgcggagcttgccgccgtgtgtgaagccatgagggacggcctggagccgctggaaaggatggtgcgcgaggtgttccaccgcatcgtgcgcagccgcgtcgatggcctagattcatccatgcacaatgccgactgactcgccgatccgagttctgccttcaattgcgcgatgcggcgaccgtaggtatcttcttgtaaagaagggatttggatgtggccatcgcgatgtaagatggctgcttagctcccatgtttttgatgctgcattttgtcatcacatttttgtgttctatagttctgcaagatcgttcagaaatgtgacatttgatacagatgagatggagacgataatagaatatactccaggagttacggaaatggcaaatgcgac

SEQ ID NO: 15715 - DNA, 2058 bp, Zea Mays
attatttgggatttcggtgtcgactgtcgagaggtgcctccttccgagcatcctaatcctgaataaaaggctcatctttgcacagagtcattggaggaagtttgatgtttcagcagtactgtgacctttattagatgtctttccgcagcattgtgcgtgatgtaagagatggctttgggagcttgtctcgaagagggtttgaggtgaagtttctgggccaccgccgaggcagatctcacggtgctgtccatgagctgcgtgatccagccccagtgatccagagcagttgctgggctaatttgccccctgaattgcttcgagatgtgattgagaggttggaggccagtgaagccacatggcctaacaggaagagtgtagtctcttgtgcagctgtttgtcggacctggagagaaatctgcaaagagatcgttaagaatccagagttctctggaaaaatcacttttcctgtgtccttaaagcagcctgggcctcgagatgtaaccatccaatgcttcatcaaaagggataaatctactcaaacctactacttgtatctgtgccttagcacagctgtgcttgttgaaagtggcaagttcctcctatgtgcgaaacggacctcccgcccaacctgtacagaatatacaatatttatgaattctgaaaatttatctaggtcaagcaaaatgtacattggaaagctgaggtcgaatctcctcggcacaaagtttgcaatatatgatacccagcccccatgcaatgcagcagaacccgggaaaacaagccgtcggttctactcccggaaggtgtcgccaaaggtctcctccagcacctacaacatagcgcaggtttcatatgagctgaatgtcttgggtactcggggccctaggcggatgaactgtgttatgcactccatccctacctcgtgccttgaggctggtggcactgttcccagccagctggacagcatccttgctcgctctactgatgagtcatttggcagcatttccttctccaagtcatctgttgtggaccggtctatgcgtttcagcagctcaagattctccgacatctcaatgagcagcagccgcaggattggagacacggcatcgggagacaatgatgagtgcaaggagaggccattgattctccggaacaaggccccaaggtggcacgagcagctgcagtgctggtgcctcaatttcaggggcagggtgacagtcgcatctgtgaagaacttccagctcgttgctgccacgcagcccgctgctggagcaccaaccccatcacaggctaccccagtgccgcccgagcacgagaaggtgatcctgcaatttgggaaggtggctaaggacatgttcaccatggactaccgttacccactgtcagccttccaggccttcgcgatctgcctgagcagcttcgacaccaagctggcctgcgaatgaagccaccagtcatggctcaaagtcaaggacgatctgtctgtttcacgaagacggtggccccaaattttgctgggccaccattctgttgtatgttgttgatgccttcttaacttacctaggaagctgcgtttagacattttgcacctgatctacagctgctgctgtgtttctgtcctgatcgcattgttttccatagctttgctctgtggagcggcaacttgatctgccctgcccttaactagccggcaggtttattaatttggttttccatactatggttgtattaactgagaagagactccgacactttcgttgtgcctacctaagttctgtctgcctttgccctctgggatatgcaaatgtgcatcttgtaaaatttctgaattgcttttgtggcaagtcatagtaataaaagaactagcttccattcgattgcctgtttgggtacgtgttcctccaagtgaccactggccactgcaagcggcaacgccggcgaggtttttttcttgtttaaagtgcatgttttttttttgaattattatgtgcatgcttgtgctcgtaaaggcaagtgcttgcgaccttgcgtgtttgtgttctacaaaagaaaaaaaaa

SEQ ID NO: 15716 - DNA, 2093 bp, Zea Mays
ccaccaccaccacttgttctttcccttcccttccttcgcctccgcttcctcctcctcctcctgcccctcccccacccccacccgtcgggacgcctccccactttcccctcccccggatccgcatggcgcctctgcagcccgcgccgctcggcctcccgtagccgacgcccggccccgtcccagcattgtgcgtgatgtaagagatggctttgggagcttgtctcgaagagggtttgaggtgaagtttctgggccaccgccgaggcagatctcacggtgctgtccatgagctgcgtgatccagccccagtgatccagagcagttgctgggctaatttgccccctgaattgcttcgagatgtgattgagaggttggaggccagtgaagccacatggcctaacaggaagagtgtagtctcttgtgcagctgtttgtcggacctggagagaaatctgcaaagagatcgttaagaatccagagttctctggaaaaatcacttttcctgtgtccttaaagcagcctgggcctcgagatgtaaccatccaatgcttcatcaaaagggataaatctactcaaacctactacttgtatctgtgccttagcacagctgtgcttgttgaaagtggcaagttcctcctatgtgcgaaacggacctcccgcccaacctgtacagaatatacaatatttatgaattctgaaaatttatctaggtcaagcaaaatgtacattggaaagctgaggtcgaatctcctcggcacaaagtttgcaatatatgatacccagcccccatgcaatgcagcagaacccgggaaaacaagccgtcggttctactcccggaaggtgtcgccaaaggtctcctccagcacctacaacatagcgcaggtttcatatgagctgaatgtcttgggtactcggggccctaggcggatgaactgtgttatgcactccatccctacctcgtgccttgaggctggtggcactgttcccagccagctggacagcatccttgctcgctctactgatgagtcatttggcagcatttccttctccaagtcatctgttgtggaccggtctatgcgtttcagcagctcaagattctccgacatctcaatgagcagcagccgcaggattggagacacggcatcgggagacaatgatgagtgcaaggagaggccattgattctccggaacaaggccccaaggtggcacgagcagctgcagtgctggtgcctcaatttcaggggcagggtgacagtcgcatctgtgaagaacttccagctcgttgctgccacgcagcccgctgctggagcaccaaccccatcacaggctaccccagtgccgcccgagcacgagaaggtgatcctgcaatttgggaaggtggctaaggacatgttcaccatggactaccgttacccactgtcagccttccaggccttcgcgatctgcctgagcagcttcgacaccaagctggcctgcgaatgaagccaccagtcatggctcaaagtcaaggacgatctgtctgtttcacgaagacggtggccccaaattttgctgggccaccattctgttgtatgttgttgatgccttcttaacttacctaggaagctgcgtttagacattttgcacctgatctacagctgctgctgtgtttctgtcctgatcgcattgttttccatagctttgctctgtggagcggcaacttgatctgccctgcccttaactagccggcaggtttattaatttggttttccatactatggttgtattaactgagaagagactccgacactttcgttgtgcctacctaagttctgtctgcctttgccctctgggatatgcaaatgtgcatcttgtaaaatttctgaattgcttttgtggcaagtcatagtaataaaagaactagcttccattcgattgcctgtttgggtacgtgttcctccaagtgaccactggccactgcaagcggcaacgccggcgaggtttttttcttgtttaaagtgcatgttttttttttgaattattatgtgcatgcttgtgctcgtaaaggcaagtgcttgcgaccttgcgtgtttgtgttctacaaaagaaaaaaaaa

SEQ ID NO: 15717 - DNA, 1939 bp, Zea Mays
ccaccaccaccacttgttctttcccttcccttccttcgcctccgcttcctcctcctcctcctgcccctcccccacccccacccgtcgggacgcctccccactttcccctcccccggatccgcatggcgcctctgcagcccgcgccgctcggcctcccgtagccgacgcccggccccgtcccaggctcatctttgcacagagtcattggaggaagtttgatgtttcagcagtactgtgacctttattagatgtctttccgcagcattgtgcgtgatgtaagagatggctttgggagcttgtctcgaagagggtttgaggtgaagtttctgggccaccgccgaggcagatctcacggtgctgtccatgagctgcgtgatccagccccagtgatccagagcagttgctgggctaatttgccccctgaattgcttcgagatgtgattgagaggttggaggccagtgaagccacatggcctaacaggaagagtgtagtctcttgtgcagctgtttgtcggacctggagagaaatctgcaaagagatcgttaagaatccagagttctctggaaaaatcacttttcctgtgtccttaaagcagcctgggcctcgagatgtaaccatccaatgcttcatcaaaagggataaatctactcaaacctactacttgtatctgtgccttagcacagctgtgcttgttgaaagtggcaagttcctcctatgtgcgaaacggacctcccgcccaacctgtacagaatatacaatatttatgaattctgaaaatttatctaggtcaagcaaaatgtacattggaaagctgaggtcgaatctcctcggcacaaagtttgcaatatatgatacccagcccccatgcaatgcagcagaacccgggaaaacaagccgtcggttctactcccggaaggtgtcgccaaagcagctcaagattctccgacatctcaatgagcagcagccgcaggattggagacacggcatcgggagacaatgatgagtgcaaggagaggccattgattctccggaacaaggccccaaggtggcacgagcagctgcagtgctggtgcctcaatttcaggggcagggtgacagtcgcatctgtgaagaacttccagctcgttgctgccacgcagcccgctgctggagcaccaaccccatcacaggctaccccagtgccgcccgagcacgagaaggtgatcctgcaatttgggaaggtggctaaggacatgttcaccatggactaccgttacccactgtcagccttccaggccttcgcgatctgcctgagcagcttcgacaccaagctggcctgcgaatgaagccaccagtcatggctcaaagtcaaggacgatctgtctgtttcacgaagacggtggccccaaattttgctgggccaccattctgttgtatgttgttgatgccttcttaacttacctaggaagctgcgtttagacattttgcacctgatctacagctgctgctgtgtttctgtcctgatcgcattgttttccatagctttgctctgtggagcggcaacttgatctgccctgcccttaactagccggcaggtttattaatttggttttccatactatggttgtattaactgagaagagactccgacactttcgttgtgcctacctaagttctgtctgcctttgccctctgggatatgcaaatgtgcatcttgtaaaatttctgaattgcttttgtggcaagtcatagtaataaaagaactagcttccattcgattgcctgtttgggtacgtgttcctccaagtgaccactggccactgcaagcggcaacgccggcgaggtttttttcttgtttaaagtgcatgttttttttttgaattattatgtgcatgcttgtgctcgtaaaggcaagtgcttgcgaccttgcgtgtttgtgttctacaaaagaaaaaaaaa

SEQ ID NO: 15718 - DNA, 955 bp, Zea Mays
ccaccaccaccacttgttctttcccttcccttccttcgcctccgcttcctcctcctcctcctgcccctcccccacccccacccgtcgggacgcctccccactttcccctcccccggatccgcatggcgcctctgcagcccgcgccgctcggcctcccgtagccgacgcccggccccgtcccaggcaggctcatctttgcacagagtcattggaggaagtttgatgtttcagcagtactgtgacctttattagatgtctttccgcagcattgtgcgtgatgtaagagatggctttgggagcttgtctcgaagagggtttgaggtgaagtttctgggccaccgccgaggcagatctcacggtgctgtccatgagctgcgtgatccagccccagtgatccagagcagttgctgggctaatttgccccctgaattgcttcgagatgtgattgagaggttggaggccagtgaagccacatggcctaacaggaagagtgtagtctcttgtgcagctgtttgtcggacctggagagaaatctgcaaagagatcgttaagaatccagagttctctggaaaaatcacttttcctgtgtccttaaagcagcctgggcctcgagatgtaaccatccaatgcttcatcaaaagggataaatctactcaaacctactacttgtatctgtgccttagcacagctgtgcttgttgaaagtggcaagttcctcctatgtgcgaaacggacctcccgcccaacctgtacagaatatacaatatttatgaattctgaaaatttatctaggtcaagcaaaatgtacattggaaagctgagtggtgagaactatctcactgagtcaccaggtcgtgagttcgaagcaacctcttcgcatttgcggggagaaggcttgccttggtttattccttccccagactccactcatgtgggagcttccggcactgggtctg

SEQ ID NO: 15719 - DNA, 2351 bp, Zea Mays
ttctttagtgcctctccagcttcagcttcacgtgaagctgacccaaacgccttgttgaaaaacaactcctccttgggaccagtcacctttgggagctggttttgacctggccggccggtggcacgctccccgtacgagcacgcaactacgcaaggccaccccgccggtctctccttccgccgccagatcctccgctccttcgcccacagccgccgcggccgcggccctcctccctggttgttgcactgtagtactggagtggaggtccggtcccacgtttgggcgtggactcgacaagcgccaaaccgagcacccccaaatcctgattctgctcaacactgcgcctgaaatattttctccggtggggctgcaaaggcaaattaggagcgcttccaagttccaatccccgtttgcttgtacagggtataattaaagaggcaacggagtcatgacccttttgagggagtattagtaaccgcatgatcttttcgagggaggcacgatggaaggaaataacctaccctctggaagcttgatgcaaggaacaccttacagtaatgtggacttgcagcatcataaacatatgcaaatgcctgcaccaagctctggaaaccaggctttcaaccactctcaggtgcctggcaatttccccatttgtctgaaccaggttacagattccgaccagctacctgaattccaatttggagagcacggcaaggtcaatcaccaccatcatcctcaccatcacaagcagcatgcaacgaatagcatgagcgatgatgaggagcatggtgtgcatgaggatgccactgatagccagatcggcaagggaaagaagggttccacatggcatcggatgaagtggactgattcgatggttaggcttttgattactgcagcatcctacactggggaagacccaggagctgatttaggaggtggtaggagaagctgtgcaatgatgcagaagaaaggcaagtggaaggccatatcaaaagtcatgggcgagcgaggctgcctcgtgtcgccgcagcagtgtgaggataagttcaatgacctaaataagaggtataaaaggcttacagatatccttggtcggggtactacttgcagagttgtggcgaacccggaacttctggatggcatggctaatctctcagataagatgaaagatgccgcgaggaagatattgagctctaagcacttgttctatgaagagatgtgctcctaccacaacaataattggttcagtttacctgaagatcctgcacttcagcgatcgttgcagcttgctcttaagtgtaaggatgagcatgatgcaaggaagcgagcaagtggagatgctgatgaagatgatcaaagtgcagacactgattatgaagaagagaatgatgatgagcatcccatcacgcatgccaataaggggaccctactcacgcgtaaaagattgcggtacatgccggcggatatggaggatgtaggtttcggcaactcttccagctcacatgactgtagctggagatctgatccccatagcattgcagtggacatcaacaaagcttctccagatggaactaacttggcttcggttcaaaaagacttggctacacagtctgcggagattgagaaacagcgtatggaaattgaagttgaggcattggagcttgcaaaacaacgtctcaagtgggaggcatttagtaagaagaaggacagagagctagagaagatgaggttggaaaatgaacaaatgaagattgagaataaacgtttggagctagaggtaagatataaggagttggagcttgaacacaaaccacaaggccatggcagtcatgcaacatgataatatctttaaaatcgcgaagactgaaatgcaagatagtgtagacattttatagcactgttcatgcagaagtaacaccaagcgtcagaagcatttcacatgtagtactgctgtcttcgctcaatttgctgcttgaggcagccaggctgctccatgtgtgctgatacttgatgcggtgttacgaaatagtaccttgcttccacatccaggattaccgaaacgaagcctgaagaccgcaaagaatatgctatggtgcatgcagaccttacttgcctatcgtcatgaagctatactgttgtctgataccatataaaatttcggaaatgctagcatcacaccatttattttccttggttttttttcccagctattcttccctgttggccccttacaggttgctgttggcactgataatagaacatagcacagcaatacgattgacaagcgcaacgtttgttcgttacgattttaatacgtctggctgcggtattttgtctcaggcttgctt

SEQ ID NO: 15720 - DNA, 964 bp, Zea Mays
tcgaattataatggttgagaagtttcaaaaaaaaatgataacggttgagaatgattttgttcgtacattgatttaactgtttatatctcctatcttagaatggactataactgtaatcagactgacttgctgcaagatagcagtagttccaaaatttctctctttacttctttagtgcctctccagcttcagcttcacgtgaagctgacccaaacgccttgttgaaaaacaactcctccttgggaccagtcacctttgggagctggttttgacctggccggccggtggcacgctccccgtacgagcacgcaactacgcaaggccaccccgccggtctctccttccgccgccagatcctccgctccttcgcccacagccgccgcggccgcggccctcctccctggttgttgcactgtagtactggagtggaggtccggtcccacgtttgggcgtggactcgacaagcgccaaaccgagcacccccaaatcctgatgtgtagacattttatagcactgttcatgcagaagtaacaccaagcgtcagaagcatttcacatgtagtactgctgtcttcgctcaatttgctgcttgaggcagccaggctgctccatgtgtgctgatacttgatgcggtgttacgaaatagtaccttgcttccacatccaggattaccgaaacgaagcctgaagaccgcaaagaatatgctatggtgcatgcagaccttacttgcctatcgtcatgaagctatactgttgtctgataccatataaaatttcggaaatgctagcatcacaccatttattttccttggttttttttcccagctattcttccctgttggccccttacaggttgctgttggcactgataatagaacatagcacagcaatacgattgacaagcgcaacgtttgttcgttacgattttaatacgtctggctgcggtattttgtctcaggcttgctt

SEQ ID NO: 15721 - DNA, 2136 bp, Zea Mays
ttctttagtgcctctccagcttcagcttcacgtgaagctgacccaaacgccttgttgaaaaacaactcctccttgggaccagtcacctttgggagctggttttgacctggccggccggtggcacgctccccgtacgagcacgcaactacgcaaggccaccccgccggtctctccttccgccgccagatcctccgctccttcgcccacagccgccgcggccgcggccctcctccctggttgttgcactgtagtactggagtggaggtccggtcccacgtttgggcgtggactcgacaagcgccaaaccgagcacccccaaatcctgattctgctcaacactgcgcctgaaatattttctccggtggggctgcaaaggcaaattaggagcgcttccaagttccaatccccgtttgcttgtacagggtataattaaagaggcaacggagtcatgacccttttgagggagtattagtaaccgcatgatcttttcgagggaggcacgatggaaggaaataacctaccctctggaagcttgatgcaaggaacaccttacagtaatgtggacttgcagcatcataaacatatgcaaatgcctgcaccaagctctggaaaccaggctttcaaccactctcaggtgcctggcaatttccccatttgtctgaaccaggttacagattccgaccagctacctgaattccaatttggagagcacggcaaggtcaatcaccaccatcatcctcaccatcacaagcagcatgcaacgaatagcatgagcgatgatgaggagcatggtgtgcatgaggatgccactgatagccagatcggcaagggaaagaagggttccacatggcatcggatgaagtggactgattcgatggttaggcttttgattactgcagcatcctacactggggaagacccaggagctgatttaggaggtggtaggagaagctgtgcaatgatgcagaagaaaggcaagtggaaggccatatcaaaagtcatgggcgagcgaggctgcctcgtgtcgccgcagcagtgtgaggataagttcaatgacctaaataagaggtataaaaggcttacagatatccttggtcggggtactacttgcagagttgtggcgaacccggaacttctggatggcatggctaatctctcagataagatgaaagatgccgcgaggaagatattgagctctaagcacttgttctatgaagagatgtgctcctaccacaacaataattggttcagtttacctgaagatcctgcacttcagcgatcgttgcagcttgctcttaagtgtaaggatgagcatgatgcaaggaagcgagcaagtggagatgctgatgaagatgatcaaagtgcagacactgattatgaagaagagaatgatgatgagcatcccatcacgcatgccaataaggggaccctactcacgcgtaaaagattgcggtacatgccggcggatatggaggatgtaggtttcggcaactcttccagctcacatgactgtagctggagatctgatccccatagcattgcagtggacatcaacaaagcttctccagatggaactaacttggcttcggttcaaaaagacttggctacacagtctgcggagattgagaaacagcgtatggaaattgaagttgaggcattggagcttgcaaaacaacgtctcaagtgggaggcatttagtaagaagaaggacagagagctagagaagatgaggttggaaaatgaacaaatgaagattgagaataaacgtttggagctagaggtaagatataaggagttggagcttgaacacaaaccacaaggccatggcagtcatgcaacatgataatatctttaaaatcgcgaagactgaaatgcaagatagagctggggattcataattattctcgccaatcatctatgtgctgcctataattgcatgaaagcaaaataaaagtttgctcaagtaactaagggtgaagtcttagtactcagctgacaatgatatacatactgcacaaggagattatatcggccacctgagaaacgaccttttctcctgttgttgtgtttgaaaacctgtactgaagaacgtcagcaaccaggaggaaaaggttgtgggtgatagcccctgcccag

SEQ ID NO: 15722 - DNA, 2035 bp, Zea Mays
ttctttagtgcctctccagcttcagcttcacgtgaagctgacccaaacgccttgttgaaaaacaactcctccttgggaccagtcacctttgggagctggttttgacctggccggccggtggcacgctccccgtacgagcacgcaactacgcaaggccaccccgccggtctctccttccgccgccagatcctccgctccttcgcccacagccgccgcggccgcggccctcctccctggttgttgcactgtagtactggagtggaggtccggtcccacgtttgggcgtggactcgacaagcgccaaaccgagcacccccaaatcctgattctgctcaacactgcgcctgaaatattttctccggtggggctgcaaaggcaaattaggagcgcttccaagttccaatccccgtttgcttgtacagggtataattaaagaggcaacggagtcatgacccttttgagggagtattagtaaccgcatgatcttttcgagggaggcacgatggaaggaaataacctaccctctggaagcttgatgcaaggaacaccttacagtaatgtggacttgcagcatcataaacatatgcaaatgcctgcaccaagctctggaaaccaggctttcaaccactctcaggtgcctggcaatttccccatttgtctgaaccaggttacagattccgaccagctacctgaattccaatttggagagcacggcaaggtcaatcaccaccatcatcctcaccatcacaagcagcatgcaacgaatagcatgagcgatgatgaggagcatggtgtgcatgaggatgccactgatagccagatcggcaagggaaagaagggttccacatggcatcggatgaagtggactgattcgatggttaggcttttgattactgcagcatcctacactggggaagacccaggagctgatttaggaggtggtaggagaagctgtgcaatgatgcagaagaaaggcaagtggaaggccatatcaaaagtcatgggcgagcgaggctgcctcgtgtcgccgcagcagtgtgaggataagttcaatgacctaaataagaggtataaaaggcttacagatatccttggtcggggtactacttgcagagttgtggcgaacccggaacttctggatggcatggctaatctctcagataagatgaaagatgccgcgaggaagatattgagctctaagcacttgttctatgaagagatgtgctcctaccacaacaataattggttcagtttacctgaagatcctgcacttcagcgatcgttgcagcttgctcttaagtgtaaggatgagcatgatgcaaggaagcgagcaagtggagatgctgatgaagatgatcaaagtgcagacactgattatgaagaagagaatgatgatgagcatcccatcacgcatgccaataaggggaccctactcacgcgtaaaagattgcggtacatgccggcggatatggaggatgtaggtttcggcaactcttccagctcacatgactgtagctggagatctgatccccatagcattgcagtggacatcaacaaagcttctccagatggaactaacttggcttcggttcaaaaagacttggctacacagtctgcggagattgagaaacagcgtatggaaattgaagttgaggcattggagcttgcaaaacaacgtctcaagtgggaggcatttagtaagaagaaggacagagagctagagaagatgaggttggaaaatgaacaaatgaagattgagaataaacgtttggagctagaggagctggggattcataattattctcgccaatcatctatgtgctgcctataattgcatgaaagcaaaataaaagtttgctcaagtaactaagggtgaagtcttagtactcagctgacaatgatatacatactgcacaaggagattatatcggccacctgagaaacgaccttttctcctgttgttgtgtttgaaaacctgtactgaagaacgtcagcaaccaggaggaaaaggttgtgggtgatagcccctgcccag

SEQ ID NO: 15723 - DNA, 4962 bp, Zea Mays
tctcctaatagatactccctctgtttttttatacatgtcgtttcctagttcaaagatgaactattgggcgtcaagtatttagaaacggaggtagtattatataaaatgtttatgccaaaaaatgtaaaatgtccgtccgccgacatcgccctcaaccatctgccgatatgcgaacctggagagtcgttcggacggacgaggaagaaagacggaagtgaggatcctctcctcggcaacgataggtggggcagctgtctcacggtctcaccctgccgtatggggagctcctcctctttcaacgcgtccccggctccacatggcaccgccctcgtccctagcagccgcgctcaagccggtgctaatccacctcctgcgcggcggctccgacctcgcgtccgtcgccgccacgcacgctaagcttgtcaaggccggcatcgcgacccccctctcctcctccaatcatctcctcgccgcctactgtcgctgcggcgcgattggtcgcgcccgcgacctgttcgacggaatgcgggaccgggacgtcgtctcctggacgacgctcatgtccgggtacgccgctgccgcccggccccgggacgccgtgtccctcctccgcgccatggggtgcagcggcgtgcggcctaacgcggtcaccttctcgacggccgcctgcacgtgcgcgcgcctcgcggacgcagaactcggccggcaggtgcacgcccaagcggagatcgctgggtgcgcacgcgacacagtcgtcgccactgcgctcgtcgacatgtacggcaagtccggcagcgtcgaggacgcgcgcgcggtgttcgacgccatggctgcgccagcgaggaacgctgtgtcgtggggcgctatgctggccgtgtacgtgcagaacgcgctcgggaacgaggcggtcgagctcttcgcggagctcaggacgtgtggcggtggcatggcgcccaaccacttcatgctggcgagcgtggtgagcgcgtgcgcaggcatggcacgtctgggcatcggtaggtgcgtccatggcgctgtccttcggcttgggtatggaaacaatgacgtgatttcggtggctttggtcgacatgtactccaagtgcgggcgctacgagtactcaagaaaggtgtttgacaggatcgagcaaccatccgtcgtcacttacacctccatcattgtcgctgcagcaaagtacggccgctggacgtgcgcgcttactttgttcaacgagatggtagatcaaggtgtgcagccaaatgatgtcactttgctcggtgtcatgcatgcttgcagccattctggccttgttgacactggccttcagctcctccgctccatgcagagcagatacggcgttgctccgtgccccagccactacacatctgcggttgacatgctgggccgggcagggcggctcgaggaggcattcgagctggccaaggaggcgcagcttgaaggcaacgatgccctcttgctgtggaactccttgctgtcagcttgccggacacataagcgcctagacctagcaaccatggctggccagagggtttatgagttcaataaccagcaggatgtagcagctgggctggtagtgatgtcaaatgcatatatttcagccggtcagatcgataatgctgccgctgtgcgatcaagcatgaggctgcgtggcatacggaaggatcccgggtgcagctggattgaagtaaaggataccccccatgtgttctatgctggtgcagtatcatgcgctggtgcgtgggcagataaagttctgatgttgctagatgaattggagagtaagatgagggagagaggttacagggggagattagggagtgctagagtatccgatgcacatgaagatgaggaggaagggaaaggtgtgatggttggtgtgcacagtgagattcttgctttagcgtttggtttgctagttgtcccgaatgggatgaccatcagggtgatgaagaacctgaggatgtgcagtgattgccatgaggtgttcaagctcatcagcgccattgttgagagcgagttcgtggtcagggatctgaacaggttccaccatttcaagctggggtcatgttcttgcaatgactactggtgatccgaaattgtaatctcagtggttctgctgttcatagtagaaaagaacaactttagcagattatcagttattaaaaaaatgttaagaaattatcttgctggagatgttcgagtgacttatttttgggtacaactacggaactaccagacattggtgtagtttcacaatcacaaactccgctctaggaagaaaaagtagagttgtgagaacacaggtcatccttcttggactcctctccctgcacgcgccgtccaactcagccaccgccacggacacggtgtcccctggcaatggcctcgccggcagcagcaggctcgtctccaacaacagcaagttcgcgctgggcttcttcaggatggacagcaagtccttcaactacgccaccaacccatacacttacctcggcatctggttcaacaaggtccccaagctaactccgctctggagcgccaacggcgagagcccggtcatggaccccgcctcaccggagctcgccatcgccggcgacgggaacttggtcatcctggaccaggccaccaggtccgtcatctggtctacccatgccaacaccaccaccaacgacaccgtcgccgtgctccagaacaacggcaacctcgtcctccggagctcctccaactcgtccaccgtcttctggcagagcttcgactacccgaccgacaccttcttcgccggagcaaagattggctgggacaaggtaaccggtctgaaccgccgccttgtttcgaggaagaacctgatagatcaggcccctggcctgtacactggggagatacaaaagaatggggttggtcatctcgtgtggaactcgacagtagaaatcgagtccaccgggctgtggaacggccagtacttcagctcggcgccggagatgataggcaacaccgtcagtatcacaactttcgagtatgtcaacaacgataaagaggtgtacttcacatggaatctgcaggatgagacggcgatcgtgctctcgcagctaggtgtcgatggccaaggcatggtgagtctgtggattgacaaggactgggtggtaatgtacaagcagcctgtactccagtgcgatgcctacgcaacgtgcggaccattcacagtctgtgatgagggtgagaacgagggcccaatctgcaactgcatgaagggtttctccgtaagctcacccagggactgggagctgggagaccggagagacgggtgcacgaggaatactccattgcactgtggaaggagccgcaacacagataagttctacgctccgcaaaatgtcatgttgccccaggacgcaatgaaaatgcaggctgcaacaagtgatgaggatgactgctcacgggcttgcttgggtaactgctcgtgcactggatattcctatggggaaggaggctgctctgtctggcatggcaaattgaccaatgtgaagaagcaacaacctgatggaaatggggaaacactttacctacgccttgctgctaaagaggtgccaggggtgccgaggaagaatagtagaatttttcgctttggtgctgccattattggcgcaagcgctgcagctgttgctgccctgatgatccttggtctgatgatgacttggaggagaaaagggaagctgtttacccgcaccgtgggagatgctcaagttggcattgggatcactacgttcagatatgtcgatttgcagcatgcaaccaagaacttctctgaaaagttagggggaggcagtttcggttccgtattcaaggggtacctaagtgactcacttgccctggcagtgaaaaggctcgatggcgccaatcaaggtgagaagcaattcagagcagaagtgagctcggttggaatcatccagcacatcaatttagtcaaactgatcgggttctgttgccaaggtgatcagaggttactggtttatgaatacatgccaaaccactccctagacgcgcatttattcaaggtcggcagtgatacggtcttggaatggaatctcaggtaccaaatagcgattggagttgccagaggcctggcctacttgcacactggttgtcgggattgcattatacactgcgacatcaagccagagaacatactccttgatgcgtcttttgtaccaaaaattgcagattttggaatggcaaaggtgttggggagagaatttagtgacgcgataactacgatgagaggaactattggatatcttgcgcctgaatggatcagcggagaagctgtcacatctaaagtggacgtttacagctatggatcggtcttatttgaaatagtatcagggaggaggaattcgagccaagaatactccaaggatggtgattattcagcatttttcccagtgcaagttgcacgcaagcttctgagcggagacattggcagcctggtggacgcaagtttgcatggtaatgtaaatcttgaggaagttgaaagagtttgcaaagttgcatgctggtgcattcaagatagcgagtttgatcgaccgaccatgaccgaggtggtgcagtttcttgagggtgtttctgagctccacatgcctccggtgccaagactactcgatgctatcacaggaggagccaccaacaccaaaatctactcaatgctatcagtggaggggtcacctacatcagtgtgacatctgtttagctgtccctcaaactaaaatataactcttcagaaaacttttagctatcccatgagaatatagtagtttatatcatatcatatatatatgtaaggacttgggcatttgtgacctggaggtggtagaaaaacaaatatgtacacgtatgatgcttgaaacttttgatgcccaaggaagggaaataaacttgggatatttc

SEQ ID NO: 15724 - DNA, 2199 bp, Zea Mays
gttcatctgagccaatggtttagtacttccattttcaattttattggaaggtgacctcgaaaaaccttcactatgttcattagcacaaaagtgtaaacatcaatgtggtttgcttgaggaaatagtattgccctcaaggaacatgggatctttaccaaatgcagaagaatcaccatttggcctagagtctttgttctggcaggaaagcatacatgaatctgtggaatatggtgcacctgcttctgcaacaactcatactgaaaatggatttggtgaatcaaaaggttgccatgtcaagtctgcactcgaaaatactcatgtgtcagaacctttttcccaccatgatactgaagaaaatatttccaaaattggtggttgcatgcatacatcccagcaagataatggaatggaagatgctatcgagaatcctttaattagtttatcaactcctggttgcaagcatgaaggtgctttgtctgaggaagcagtgcacacaatgaaggattatgctggaacatgctcatcaaatcccagggtacccatgcagttgcatgacgaccttgcattcccaggtcctgaaaaatcaggagatgaatcagtcaatattgaggttaaagtacaccatggttctaatctgtctcagttaggatcaactgatctcttggatgatactgaattgcttcaccagggccataactataaagatcgatccaatgaggatatgctagagcaggctgcttctgaaccctgcacaaatggggatgatatcgtggaggctgcggctgctaccaaatgcttagaaagtggagcgatgctggttccatccgaagagagatcaaatttgaacgataggcagcttacccccaagctggaaagcccagacatcatggaatctggccttaactgtgataaagatgctcgcaatactttggacaatggatctgttgtggctgttgctggtaagagaactccatctggttctggtcactatgaacacaatgtctaccaagtttcaggcatttgtgctacgtctgaagctgcaccagtcggagtggtagaaactggaatagctgtggaaacgtcatccctggtagatgaccaacctaatcctgtgctggatggtgatgaagttgagaagcacagcttaaactgtgaggcagacactggtcggattcttggtactggatctgttacgagcaacacaacccttgtgcccaaggacggtcacaccatttgttgccaggaactggagctaccaaatggcttatcctcgtttctatttcccgaagaatctggaatttgtcagtatgcgagtgtctcaggatcagggccttgcctgcagcacgtaaatgaaagcaccagtacgcaagcgacttacaatattgaaacgctcaatcagcagcatcacgaggagtacgaccaaaccgctcgtggtatcctggctagcagttttcctgaagctgtagggattgaacagtcaggtctggcccctgctgcagaagcaccagtgttggcagtgccagatgggcagcctaacagcaagctggagggcaacgaagtggatgagcacagctgtagctatgatgccgagttcctgaacagagaagcgtctaaccttcacaaagatctgtttagtgaagatagtcatcgaagtcatctaccttctctgagatctcctcaacgatctgcctattttcacaacggaaatgattcgggttcagtagacggactccgcgctaagcggcagagtttcaaagtttccagcagcataaaaggaagctacgtcgccaagactagcgtccctcgtccgaagccaggggacagcctgagccagtctgcgatagcgctgcgcggggtcaggaagaacacgaccgctgttgaagttggtggccatcctgtgagtttgaagccaaacgctgttcgctcggtcgccaaggacccatcatccagcagaggaccacccagggatagcctgagccagtctgcgatagcgctgcctaaacacagaaaggacgccactgctgttaagagcaagactaataataaaccttggctataataaggcagcaggcttacatacatcactactccgatttcatactccactgtacaaacattgtaatttgatggttgtgtggttccggatttattttcagcacggaaagaaggaaaaaaaagaaggaaatcagaaaatagtcc

SEQ ID NO: 15725 - DNA, 3731 bp, Zea Mays
agaaccaggagaatgataagggtgttgttctcagcgctcaggttggagcttcgtccagagttacaagaagatcaagcttggcggtggctgctgctgtgttgcctcctcttgttgaaccgaagagagggaggggagaagcagctggcgttcagacttctactcaggtggaagtaccggctaggattacaagatctcgctcaatagcaccggttgtaatgtcacctactgtggttgagaacaagaggaggaagaatggagatgcacaaacaaatgtagagctgcctacggtttcagatgtgcctagaaatgatgctcctgtcaccaggtctttgagaaatagagttgtccaggttaacaacagtgtggtggacgcgaacaaaccggcaactaaagaacctgttaggggattgagacgaagatctgttgtctcagaattgcacgagaaagagaaagatgtggagaaacaattaattgtgaagcaacctgttaggcgctcatcacgtaaatctgttctacctgatatgcttgagaacaatatccaaagcggtaaatctcaagataatgagaaggaacagaaactaaaggaaccaattaggcgatcaaggagatctgttgccacagtgttgcttgaggaacaaaacagtggtcttcatgaggaaaaattgtcaaaacttactatgaggagatcaacacgtaaatctgttgcacttaatggtgttgaaaagacgagcatggatcacactgaaatagttgtgcagtccgaaactttaaagggaaggtcttcaaagaggagacggacaattgatccagtagaaatgatgcctgtcaaggaggcaaatgatgacatgattatcagggaagcaacaatagacacacacaaagctactcatgagtacaataagtctactagcagaattcaagaaagttgtcagagtatacatgaagtggtacctgggtcagaatctggtgacaatgcaaaggaaaatttagataagagtaaacagcctcaggaacatcatgacattcaagctgttgatagccatttatctgaaacaagaagtggggaattagatcaatcatcatgcattgcaggactagtaccacacaattgtgttgcctcagatgacaaagctttgatcagtggagatcgtgtagagcaaagccctgtatctggagaagggagagttggcttggaagcaaatgccattgagtctggagaaaagaacctaactggcatcatgtccactgctctctacaccaaaagtctgcaacatgatattgacatagtagctgaagagactgccaaaggtgacctcgaaaaaccttcactatgttcattagcacaaaagtgtaaacatcaatgtggtttgcttgaggaaatagtattgccctcaaggaacatgggatctttaccaaatgcagaagaatcaccatttggcctagagtctttgttctggcaggaaagcatacatgaatctgtggaatatggtgcacctgcttctgcaacaactcatactgaaaatggatttggtgaatcaaaaggttgccatgtcaagtctgcactcgaaaatactcatgtgtcagaacctttttcccaccatgatactgaagaaaatatttccaaaattggtggttgcatgcatacatcccagcaagataatggaatggaaggtatagacatttcattttttcccctcttctatagttttttttcttgatttccatgcattcttgcaaacccgtatcctgccatttaaatggtacccataagaactgttccttttttttaggattaccagaagctaaccttgatgaagaatgggttctgttagtattatttacaaacacttaaataacctactttatactattgcttttgaattaatgtttatttattcaaatgatgtgccagatgctatcgagaatcctttaattagtttatcaactcctggttgcaagcatgaaggtgctttgtctgaggaagcagtgcacacaatgaaggattatgctggaacatgctcatcaaatcccagggtacccatgcagttgcatgacgaccttgcattcccaggtcctgaaaaatcaggagatgaatcagtcaatattgaggttaaagtacaccatggttctaatctgtctcagttaggatcaactgatctcttggatgatactgaattgcttcaccagggccataactataaagatcgatccaatgaggatatgctagagcaggctgcttctgaaccctgcacaaatggggatgatatcgtggaggctgcggctgctaccaaatgcttagaaagtggagcgatgctggttccatccgaagagagatcaaatttgaacgataggcagcttacccccaagctggaaagcccagacatcatggaatctggccttaactgtgataaagatgctcgcaatactttggacaatggatctgttgtggctgttgctggtaagagaactccatctggttctggtcactatgaacacaatgtctaccaagtttcaggcatttgtgctacgtctgaagctgcaccagtcggagtggtagaaactggaatagctgtggaaacgtcatccctggtagatgaccaacctaatcctgtgctggatggtgatgaagttgagaagcacagcttaaactgtgaggcagacactggtcggattcttggtactggatctgttacgagcaacacaacccttgtgcccaaggacggtcacaccatttgttgccaggaactggagctaccaaatggcttatcctcgtttctatttcccgaagaatctggaatttgtcagtatgcgagtgtctcaggatcagggccttgcctgcagcacgtaaatgaaagcaccagtacgcaagcgacttacaatattgaaacgctcaatcagcagcatcacgaggagtacgaccaaaccgctcgtggtatcctggctagcagttttcctgaagctgtagggattgaacagtcaggtctggcccctgctgcagaagcaccagtgttggcagtgccagatgggcagcctaacagcaagctggagggcaacgaagtggatgagcacagctgtagctatgatgccgagttcctgaacagagaagcgtctaaccttcacaaagatctgtttagtgaagatagtcatcgaagtcatctaccttctctgagatctcctcaacgatctgcctattttcacaacggaaatgattcgggttcagtaggagtctgtcaaagcagcaggcgaggaggtgtagacggactccgcgctaagcggcagagtttcaaagtttccagcagcataaaaggaagctacgtcgccaagactagcgtccctcgtccgaagccaggggacagcctgagccagtctgcgatagcgctgcgcggggtcaggaagaacacgaccgctgttgaagttggtggccatcctgtgagtttgaagccaaacgctgttcgctcggtcgccaaggacccatcatccagcagaggaccacccagggatagcctgagccagtctgcgatagcgctgcctaaacacagaaaggacgccactgctgttaagagcaagactaataataaaccttggctataataaggcagcaggcttacatacatcactactccgatttcatactccactgtacaaacattgtaatttgatggttgtgtggttccggatttattttcagcacggaaagaaggaaaaaaaagaaggaaatcagaaaatagtcc

SEQ ID NO: 15726 - DNA, 3457 bp, Zea Mays
agaaccaggagaatgataagggtgttgttctcagcgctcaggttggagcttcgtccagagttacaagaagatcaagcttggcggtggctgctgctgtgttgcctcctcttgttgaaccgaagagagggaggggagaagcagctggcgttcagacttctactcaggtggaagtaccggctaggattacaagatctcgctcaatagcaccggttgtaatgtcacctactgtggttgagaacaagaggaggaagaatggagatgcacaaacaaatgtagagctgcctacggtttcagatgtgcctagaaatgatgctcctgtcaccaggtctttgagaaatagagttgtccaggttaacaacagtgtggtggacgcgaacaaaccggcaactaaagaacctgttaggggattgagacgaagatctgttgtctcagaattgcacgagaaagagaaagatgtggagaaacaattaattgtgaagcaacctgttaggcgctcatcacgtaaatctgttctacctgatatgcttgagaacaatatccaaagcggtaaatctcaagataatgagaaggaacagaaactaaaggaaccaattaggcgatcaaggagatctgttgccacagtgttgcttgaggaacaaaacagtggtcttcatgaggaaaaattgtcaaaacttactatgaggagatcaacacgtaaatctgttgcacttaatggtgttgaaaagacgagcatggatcacactgaaatagttgtgcagtccgaaactttaaagggaaggtcttcaaagaggagacggacaattgatccagtagaaatgatgcctgtcaaggaggcaaatgatgacatgattatcagggaagcaacaatagacacacacaaagctactcatgagtacaataagtctactagcagaattcaagaaagttgtcagagtatacatgaagtggtacctgggtcagaatctggtgacaatgcaaaggaaaatttagataagagtaaacagcctcaggaacatcatgacattcaagctgttgatagccatttatctgaaacaagaagtggggaattagatcaatcatcatgcattgcaggactagtaccacacaattgtgttgcctcagatgacaaagctttgatcagtggagatcgtgtagagcaaagccctgtatctggagaagggagagttggcttggaagcaaatgccattgagtctggagaaaagaacctaactggcatcatgtccactgctctctacaccaaaagtctgcaacatgatattgacatagtagctgaagagactgccaaaggtgacctcgaaaaaccttcactatgttcattagcacaaaagtgtaaacatcaatgtggtttgcttgaggaaatagtattgccctcaaggaacatgggatctttaccaaatgcagaagaatcaccatttggcctagagtctttgttctggcaggaaagcatacatgaatctgtggaatatggtgcacctgcttctgcaacaactcatactgaaaatggatttggtgaatcaaaaggttgccatgtcaagtctgcactcgaaaatactcatgtgtcagaacctttttcccaccatgatactgaagaaaatatttccaaaattggtggttgcatgcatacatcccagcaagataatggaatggaagatgctatcgagaatcctttaattagtttatcaactcctggttgcaagcatgaaggtgctttgtctgaggaagcagtgcacacaatgaaggattatgctggaacatgctcatcaaatcccagggtacccatgcagttgcatgacgaccttgcattcccaggtcctgaaaaatcaggagatgaatcagtcaatattgaggttaaagtacaccatggttctaatctgtctcagttaggatcaactgatctcttggatgatactgaattgcttcaccagggccataactataaagatcgatccaatgaggatatgctagagcaggctgcttctgaaccctgcacaaatggggatgatatcgtggaggctgcggctgctaccaaatgcttagaaagtggagcgatgctggttccatccgaagagagatcaaatttgaacgataggcagcttacccccaagctggaaagcccagacatcatggaatctggccttaactgtgataaagatgctcgcaatactttggacaatggatctgttgtggctgttgctggtaagagaactccatctggttctggtcactatgaacacaatgtctaccaagtttcaggcatttgtgctacgtctgaagctgcaccagtcggagtggtagaaactggaatagctgtggaaacgtcatccctggtagatgaccaacctaatcctgtgctggatggtgatgaagttgagaagcacagcttaaactgtgaggcagacactggtcggattcttggtactggatctgttacgagcaacacaacccttgtgcccaaggacggtcacaccatttgttgccaggaactggagctaccaaatggcttatcctcgtttctatttcccgaagaatctggaatttgtcagtatgcgagtgtctcaggatcagggccttgcctgcagcacgtaaatgaaagcaccagtacgcaagcgacttacaatattgaaacgctcaatcagcagcatcacgaggagtacgaccaaaccgctcgtggtatcctggctagcagttttcctgaagctgtagggattgaacagtcaggtctggcccctgctgcagaagcaccagtgttggcagtgccagatgggcagcctaacagcaagctggagggcaacgaagtggatgagcacagctgtagctatgatgccgagttcctgaacagagaagcgtctaaccttcacaaagatctgtttagtgaagatagtcatcgaagtcatctaccttctctgagatctcctcaacgatctgcctattttcacaacggaaatgattcgggttcagtagacggactccgcgctaagcggcagagtttcaaagtttccagcagcataaaaggaagctacgtcgccaagactagcgtccctcgtccgaagccaggggacagcctgagccagtctgcgatagcgctgcgcggggtcaggaagaacacgaccgctgttgaagttggtggccatcctgtgagtttgaagccaaacgctgttcgctcggtcgccaaggacccatcatccagcagaggaccacccagggatagcctgagccagtctgcgatagcgctgcctaaacacagaaaggacgccactgctgttaagagcaagactaataataaaccttggctataataaggcagcaggcttacatacatcactactccgatttcatactccactgtacaaacattgtaatttgatggttgtgtggttccggatttattttcagcacggaaagaaggaaaaaaaagaaggaaatcagaaaatagtcc

SEQ ID NO: 15727 - DNA, 3174 bp, Zea Mays
agaaccaggagaatgataagggtgttgttctcagcgctcaggttggagcttcgtccagagttacaagaagatcaagcttggcggtggctgctgctgtgttgcctcctcttgttgaaccgaagagagggaggggagaagcagctggcgttcagacttctactcaggtggaagtaccggctaggattacaagatctcgctcaatagcaccggttgtaatgtcacctactgtggttgagaacaagaggaggaagaatggagatgcacaaacaaatgtagagctgcctacggtttcagatgtgcctagaaatgatgctcctgtcaccaggtctttgagaaatagagttgtccaggttaacaacagtgtggtggacgcgaacaaaccggcaactaaagaacctgttaggggattgagacgaagatctgttgtctcagaattgcacgagaaagagaaagatgtggagaaacaattaattgtgaagcaacctgttaggcgctcatcacgtaaatctgttctacctgatatgcttgagaacaatatccaaagcggtaaatctcaagataatgagaaggaacagaaactaaaggaaccaattaggcgatcaaggagatctgttgccacagtgttgcttgaggaacaaaacagtggtcttcatgaggaaaaattgtcaaaacttactatgaggagatcaacacgtaaatctgttgcacttaatggtgttgaaaagacgagcatggatcacactgaaatagttgtgcagtccgaaactttaaagggaaggtcttcaaagaggagacggacaattgatccagtagaaatgatgcctgtcaaggaggcaaatgatgacatgattatcagggaagcaacaatagacacacacaaagctactcatgagtacaataagtctactagcagaattcaagaaagttgtcagagtatacatgaagtggtacctgggtcagaatctggtgacaatgcaaaggaaaatttagataagagtaaacagcctcaggaacatcatgacattcaagctgttgatagccatttatctgaaacaagaagtggggaattagatcaatcatcatgcattgcaggactagtaccacacaattgtgttgcctcagatgacaaagctttgatcagtggagatcgtgtagagcaaagccctgtatctggagaagggagagttggcttggaagcaaatgccattgagtctggagaaaagaacctaactggcatcatgtccactgctctctacaccaaaagtctgcaacatgatattgacatagtagctgaagagactgccaaaggtgacctcgaaaaaccttcactatgttcattagcacaaaagtgtaaacatcaatgtggtttgcttgaggaaatagtattgccctcaaggaacatgggatctttaccaaatgcagaagaatcaccatttggcctagagtctttgttctggcaggaaagcatacaatgaaggattatgctggaacatgctcatcaaatcccagggtacccatgcagttgcatgacgaccttgcattcccaggtcctgaaaaatcaggagatgaatcagtcaatattgaggttaaagtacaccatggttctaatctgtctcagttaggatcaactgatctcttggatgatactgaattgcttcaccagggccataactataaagatcgatccaatgaggatatgctagagcaggctgcttctgaaccctgcacaaatggggatgatatcgtggaggctgcggctgctaccaaatgcttagaaagtggagcgatgctggttccatccgaagagagatcaaatttgaacgataggcagcttacccccaagctggaaagcccagacatcatggaatctggccttaactgtgataaagatgctcgcaatactttggacaatggatctgttgtggctgttgctggtaagagaactccatctggttctggtcactatgaacacaatgtctaccaagtttcaggcatttgtgctacgtctgaagctgcaccagtcggagtggtagaaactggaatagctgtggaaacgtcatccctggtagatgaccaacctaatcctgtgctggatggtgatgaagttgagaagcacagcttaaactgtgaggcagacactggtcggattcttggtactggatctgttacgagcaacacaacccttgtgcccaaggacggtcacaccatttgttgccaggaactggagctaccaaatggcttatcctcgtttctatttcccgaagaatctggaatttgtcagtatgcgagtgtctcaggatcagggccttgcctgcagcacgtaaatgaaagcaccagtacgcaagcgacttacaatattgaaacgctcaatcagcagcatcacgaggagtacgaccaaaccgctcgtggtatcctggctagcagttttcctgaagctgtagggattgaacagtcaggtctggcccctgctgcagaagcaccagtgttggcagtgccagatgggcagcctaacagcaagctggagggcaacgaagtggatgagcacagctgtagctatgatgccgagttcctgaacagagaagcgtctaaccttcacaaagatctgtttagtgaagatagtcatcgaagtcatctaccttctctgagatctcctcaacgatctgcctattttcacaacggaaatgattcgggttcagtagacggactccgcgctaagcggcagagtttcaaagtttccagcagcataaaaggaagctacgtcgccaagactagcgtccctcgtccgaagccaggggacagcctgagccagtctgcgatagcgctgcgcggggtcaggaagaacacgaccgctgttgaagttggtggccatcctgtgagtttgaagccaaacgctgttcgctcggtcgccaaggacccatcatccagcagaggaccacccagggatagcctgagccagtctgcgatagcgctgcctaaacacagaaaggacgccactgctgttaagagcaagactaataataaaccttggctataataaggcagcaggcttacatacatcactactccgatttcatactccactgtacaaacattgtaatttgatggttgtgtggttccggatttattttcagcacggaaagaaggaaaaaaaagaaggaaatcagaaaatagtcc

SEQ ID NO: 15728 - DNA, 3491 bp, Zea Mays
agaaccaggagaatgataagggtgttgttctcagcgctcaggttggagcttcgtccagagttacaagaagatcaagcttggcggtggctgctgctgtgttgcctcctcttgttgaaccgaagagagggaggggagaagcagctggcgttcagacttctactcaggtggaagtaccggctaggattacaagatctcgctcaatagcaccggttgtaatgtcacctactgtggttgagaacaagaggaggaagaatggagatgcacaaacaaatgtagagctgcctacggtttcagatgtgcctagaaatgatgctcctgtcaccaggtctttgagaaatagagttgtccaggttaacaacagtgtggtggacgcgaacaaaccggcaactaaagaacctgttaggggattgagacgaagatctgttgtctcagaattgcacgagaaagagaaagatgtggagaaacaattaattgtgaagcaacctgttaggcgctcatcacgtaaatctgttctacctgatatgcttgagaacaatatccaaagcggtaaatctcaagataatgagaaggaacagaaactaaaggaaccaattaggcgatcaaggagatctgttgccacagtgttgcttgaggaacaaaacagtggtcttcatgaggaaaaattgtcaaaacttactatgaggagatcaacacgtaaatctgttgcacttaatggtgttgaaaagacgagcatggatcacactgaaatagttgtgcagtccgaaactttaaagggaaggtcttcaaagaggagacggacaattgatccagtagaaatgatgcctgtcaaggaggcaaatgatgacatgattatcagggaagcaacaatagacacacacaaagctactcatgagtacaataagtctactagcagaattcaagaaagttgtcagagtatacatgaagtggtacctgggtcagaatctggtgacaatgcaaaggaaaatttagataagagtaaacagcctcaggaacatcatgacattcaagctgttgatagccatttatctgaaacaagaagtggggaattagatcaatcatcatgcattgcaggactagtaccacacaattgtgttgcctcagatgacaaagctttgatcagtggagatcgtgtagagcaaagccctgtatctggagaagggagagttggcttggaagcaaatgccattgagtctggagaaaagaacctaactggcatcatgtccactgctctctacaccaaaagtctgcaacatgatattgacatagtagctgaagagactgccaaagggtgacctcgaaaaaccttcactatgttcattagcacaaaagtgtaaacatcaatgtggtttgcttgaggaaatagtattgccctcaaggaacatgggatctttaccaaatgcagaagaatcaccatttggcctagagtctttgttctggcaggaaagcatacatgaatctgtggaatatggtgcacctgcttctgcaacaactcatactgaaaatggatttggtgaatcaaaaggttgccatgtcaagtctgcactcgaaaatactcatgtgtcagaacctttttcccaccatgatactgaagaaaatatttccaaaattggtggttgcatgcatacatcccagcaagataatggaatggaagatgctatcgagaatcctttaattagtttatcaactcctggttgcaagcatgaaggtgctttgtctgaggaagcagtgcacacaatgaaggattatgctggaacatgctcatcaaatcccagggtacccatgcagttgcatgacgaccttgcattcccaggtcctgaaaaatcaggagatgaatcagtcaatattgaggttaaagtacaccatggttctaatctgtctcagttaggatcaactgatctcttggatgatactgaattgcttcaccagggccataactataaagatcgatccaatgaggatatgctagagcaggctgcttctgaaccctgcacaaatggggatgatatcgtggaggctgcggctgctaccaaatgcttagaaagtggagcgatgctggttccatccgaagagagatcaaatttgaacgataggcagcttacccccaagctggaaagcccagacatcatggaatctggccttaactgtgataaagatgctcgcaatactttggacaatggatctgttgtggctgttgctggtaagagaactccatctggttctggtcactatgaacacaatgtctaccaagtttcaggcatttgtgctacgtctgaagctgcaccagtcggagtggtagaaactggaatagctgtggaaacgtcatccctggtagatgaccaacctaatcctgtgctggatggtgatgaagttgagaagcacagcttaaactgtgaggcagacactggtcggattcttggtactggatctgttacgagcaacacaacccttgtgcccaaggacggtcacaccatttgttgccaggaactggagctaccaaatggcttatcctcgtttctatttcccgaagaatctggaatttgtcagtatgcgagtgtctcaggatcagggccttgcctgcagcacgtaaatgaaagcaccagtacgcaagcgacttacaatattgaaacgctcaatcagcagcatcacgaggagtacgaccaaaccgctcgtggtatcctggctagcagttttcctgaagctgtagggattgaacagtcaggtctggcccctgctgcagaagcaccagtgttggcagtgccagatgggcagcctaacagcaagctggagggcaacgaagtggatgagcacagctgtagctatgatgccgagttcctgaacagagaagcgtctaaccttcacaaagatctgtttagtgaagatagtcatcgaagtcatctaccttctctgagatctcctcaacgatctgcctattttcacaacggaaatgattcgggttcagtaggagtctgtcaaagcagcaggcgaggaggtgtagacggactccgcgctaagcggcagagtttcaaagtttccagcagcataaaaggaagctacgtcgccaagactagcgtccctcgtccgaagccaggggacagcctgagccagtctgcgatagcgctgcgcggggtcaggaagaacacgaccgctgttgaagttggtggccatcctgtgagtttgaagccaaacgctgttcgctcggtcgccaaggacccatcatccagcagaggaccacccagggatagcctgagccagtctgcgatagcgctgcctaaacacagaaaggacgccactgctgttaagagcaagactaataataaaccttggctataataaggcagcaggcttacatacatcactactccgatttcatactccactgtacaaacattgtaatttgatggttgtgtggttccggatttattttcagcacggaaagaaggaaaaaaaagaaggaaatcagaaaatagtcc

SEQ ID NO: 15729 - DNA, 3490 bp, Zea Mays
agaaccaggagaatgataagggtgttgttctcagcgctcaggttggagcttcgtccagagttacaagaagatcaagcttggcggtggctgctgctgtgttgcctcctcttgttgaaccgaagagagggaggggagaagcagctggcgttcagacttctactcaggtggaagtaccggctaggattacaagatctcgctcaatagcaccggttgtaatgtcacctactgtggttgagaacaagaggaggaagaatggagatgcacaaacaaatgtagagctgcctacggtttcagatgtgcctagaaatgatgctcctgtcaccaggtctttgagaaatagagttgtccaggttaacaacagtgtggtggacgcgaacaaaccggcaactaaagaacctgttaggggattgagacgaagatctgttgtctcagaattgcacgagaaagagaaagatgtggagaaacaattaattgtgaagcaacctgttaggcgctcatcacgtaaatctgttctacctgatatgcttgagaacaatatccaaagcggtaaatctcaagataatgagaaggaacagaaactaaaggaaccaattaggcgatcaaggagatctgttgccacagtgttgcttgaggaacaaaacagtggtcttcatgaggaaaaattgtcaaaacttactatgaggagatcaacacgtaaatctgttgcacttaatggtgttgaaaagacgagcatggatcacactgaaatagttgtgcagtccgaaactttaaagggaaggtcttcaaagaggagacggacaattgatccagtagaaatgatgcctgtcaaggaggcaaatgatgacatgattatcagggaagcaacaatagacacacacaaagctactcatgagtacaataagtctactagcagaattcaagaaagttgtcagagtatacatgaagtggtacctgggtcagaatctggtgacaatgcaaaggaaaatttagataagagtaaacagcctcaggaacatcatgacattcaagctgttgatagccatttatctgaaacaagaagtggggaattagatcaatcatcatgcattgcaggactagtaccacacaattgtgttgcctcagatgacaaagctttgatcagtggagatcgtgtagagcaaagccctgtatctggagaagggagagttggcttggaagcaaatgccattgagtctggagaaaagaacctaactggcatcatgtccactgctctctacaccaaaagtctgcaacatgatattgacatagtagctgaagagactgccaaaggtgacctcgaaaaaccttcactatgttcattagcacaaaagtgtaaacatcaatgtggtttgcttgaggaaatagtattgccctcaaggaacatgggatctttaccaaatgcagaagaatcaccatttggcctagagtctttgttctggcaggaaagcatacatgaatctgtggaatatggtgcacctgcttctgcaacaactcatactgaaaatggatttggtgaatcaaaaggttgccatgtcaagtctgcactcgaaaatactcatgtgtcagaacctttttcccaccatgatactgaagaaaatatttccaaaattggtggttgcatgcatacatcccagcaagataatggaatggaagatgctatcgagaatcctttaattagtttatcaactcctggttgcaagcatgaaggtgctttgtctgaggaagcagtgcacacaatgaaggattatgctggaacatgctcatcaaatcccagggtacccatgcagttgcatgacgaccttgcattcccaggtcctgaaaaatcaggagatgaatcagtcaatattgaggttaaagtacaccatggttctaatctgtctcagttaggatcaactgatctcttggatgatactgaattgcttcaccagggccataactataaagatcgatccaatgaggatatgctagagcaggctgcttctgaaccctgcacaaatggggatgatatcgtggaggctgcggctgctaccaaatgcttagaaagtggagcgatgctggttccatccgaagagagatcaaatttgaacgataggcagcttacccccaagctggaaagcccagacatcatggaatctggccttaactgtgataaagatgctcgcaatactttggacaatggatctgttgtggctgttgctggtaagagaactccatctggttctggtcactatgaacacaatgtctaccaagtttcaggcatttgtgctacgtctgaagctgcaccagtcggagtggtagaaactggaatagctgtggaaacgtcatccctggtagatgaccaacctaatcctgtgctggatggtgatgaagttgagaagcacagcttaaactgtgaggcagacactggtcggattcttggtactggatctgttacgagcaacacaacccttgtgcccaaggacggtcacaccatttgttgccaggaactggagctaccaaatggcttatcctcgtttctatttcccgaagaatctggaatttgtcagtatgcgagtgtctcaggatcagggccttgcctgcagcacgtaaatgaaagcaccagtacgcaagcgacttacaatattgaaacgctcaatcagcagcatcacgaggagtacgaccaaaccgctcgtggtatcctggctagcagttttcctgaagctgtagggattgaacagtcaggtctggcccctgctgcagaagcaccagtgttggcagtgccagatgggcagcctaacagcaagctggagggcaacgaagtggatgagcacagctgtagctatgatgccgagttcctgaacagagaagcgtctaaccttcacaaagatctgtttagtgaagatagtcatcgaagtcatctaccttctctgagatctcctcaacgatctgcctattttcacaacggaaatgattcgggttcagtaggagtctgtcaaagcagcaggcgaggaggtgtagacggactccgcgctaagcggcagagtttcaaagtttccagcagcataaaaggaagctacgtcgccaagactagcgtccctcgtccgaagccaggggacagcctgagccagtctgcgatagcgctgcgcggggtcaggaagaacacgaccgctgttgaagttggtggccatcctgtgagtttgaagccaaacgctgttcgctcggtcgccaaggacccatcatccagcagaggaccacccagggatagcctgagccagtctgcgatagcgctgcctaaacacagaaaggacgccactgctgttaagagcaagactaataataaaccttggctataataaggcagcaggcttacatacatcactactccgatttcatactccactgtacaaacattgtaatttgatggttgtgtggttccggatttattttcagcacggaaagaaggaaaaaaaagaaggaaatcagaaaatagtcc

SEQ ID NO: 15730 - DNA, 3518 bp, Zea Mays
agaaccaggagaatgataagggtgttgttctcagcgctcaggttggagcttcgtccagagttacaagaagatcaagcttggcggtggctgctgctgtgttgcctcctcttgttgaaccgaagagagggaggggagaagcagctggcgttcagacttctactcaggtggaagtaccggctaggattacaagatctcgctcaatagcaccggttgtaatgtcacctactgtggttgagaacaagaggaggaagaatggagatgcacaaacaaatgtagagctgcctacggtttcagatgtgcctagaaatgatgctcctgtcaccaggtctttgagaaatagagttgtccaggttaacaacagtgtggtggacgcgaacaaaccggcaactaaagaacctgttaggggattgagacgaagatctgttgtctcagaattgcacgagaaagagaaagatgtggagaaacaattaattgtgaagcaacctgttaggcgctcatcacgtaaatctgttctacctgatatgcttgagaacaatatccaaagcggtaaatctcaagataatgagaaggaacagaaactaaaggaaccaattaggcgatcaaggagatctgttgccacagtgttgcttgaggaacaaaacagtggtcttcatgaggaaaaattgtcaaaacttactatgaggagatcaacacgtaaatctgttgcacttaatggtgttgaaaagacgagcatggatcacactgaaatagttgtgcagtccgaaactttaaagggaaggtcttcaaagaggagacggacaattgatccagtagaaatgatgcctgtcaaggaggcaaatgatgacatgattatcagggaagcaacaatagacacacacaaagctactcatgagtacaataagtctactagcagaattcaagaaagttgtcagagtatacatgaagtggtacctgggtcagaatctggtgacaatgcaaaggaaaatttagataagagtaaacagcctcaggaacatcatgacattcaagctgttgatagccatttatctgaaacaagaagtggggaattagatcaatcatcatgcattgcaggactagtaccacacaattgtgttgcctcagatgacaaagctttgatcagtggaggtgaggctagcatgtgtgctaatggcatgacagttgttagtttaatatctctgcattgccaaatctgtaggatttagctttgttcaatttatctcctgtagacaagcatcatcacaattataatttattgatctagtttggatgttcaaaagctggtatatgacaaccttattgattttatgatgttgtaattagttttatccattaatgtcttgttatatactgaaagacagtttttgtccttgcaaaatcaccagatggcttatcaattaacttcactgttgtagatcgtgtagagcaaagccctgtatctggagaagggagagttggcttggaagcaaatgccattgagtctggagaaaagaacctaactggcatcatgtccactgctctctacaccaaaagtctgcaacatgatattgacatagtagctgaagagactgccaaaggtacaacctctgtttttaaggcgtcgcctaggcgtccgggcggtggtctaacgcctaggcgccttacccgcctacctcgcctaggcgccgcctaggcgtccaggcggtcctccaacgccttggaccgccttaccgctttaaaaaccatgggtacaaccgaatttatcctgtatccataactacatactgatttggaagataatgtctgttaaacatccaaataacgagttcatctgagccaatggtttagtacttccattttcaattttattggaaggtaaaaaacttccatataatttcttcagtgtgatttctaaagttttatacttaactgattttgatgcatgaatttctaaagtggatagtgagtttagttacagttttactattgggtttaagtgttatttgagaataacacatcaatgtgtctcaggtgacctcgaaaaaccttcactatgttcattagcacaaaagtgtaaacatcaatgtggtttgcttgaggaaatagtattgccctcaaggaacatgggatctttaccaaatgcagaagaatcaccatttggcctagagtctttgttctggcaggaaagcatacatgaatctgtggaatatggtgcacctgcttctgcaacaactcatactgaaaatggatttggtgaatcaaaaggttgccatgtcaagtctgcactcgaaaatactcatgtgtcagaacctttttcccaccatgatactgaagaaaatatttccaaaattggtggttgcatgcatacatcccagcaagataatggaatggaaggtatagacatttcattttttcccctcttctatagttttttttcttgatttccatgcattcttgcaaacccgtatcctgccatttaaatggtacccataagaactgttccttttttttaggattaccagaagctaaccttgatgaagaatgggttctgttagtattatttacaaacacttaaataacctactttatactattgcttttgaattaatgtttatttattcaaatgatgtgccagatgctatcgagaatcctttaattagtttatcaactcctggttgcaagcatgaaggtgctttgtctgaggaagcagtgcacacaatgaaggattatgctggaacatgctcatcaaatcccagggtacccatgcagttgcatgacgaccttgcattcccaggtcctgaaaaatcaggagatgaatcagtcaatattgaggttaaagtacaccatggttctaatctgtctcagttaggatcaactgatctcttggatgatactgaattgcttcaccagggccataactataaagatcgatccaatgaggatatgctagagcaggctgcttctgaaccctgcacaaatggggatgatatcgtggaggctgcggctgctaccaaatgcttagaaagtggagcgatgctggttccatccgaagagagatcaaatttgaacgataggcagcttacccccaagctggaaagcccagacatcatggaatctggccttaactgtgataaagatgctcgcaatactttggacaatggatctgttgtggctgttgctggtaagagaactccatctggttctggtcactatgaacacaatgtctaccaagtttcaggcatttgtgctacgtctgaagctgcaccagtcggagtggtagaaactggaatagctgtggaaacgtcatccctggtagatgaccaacctaatcctgtgctggatggtgatgaagttgagaagcacagcttaaactgtgaggcagacactggtcggattcttggtactggatctgttacgagcaacacaacccttgtgcccaaggacggtcacaccatttgttgccaggaactggagctaccaaatggcttatcctcgtttctatttcccgaagaatctgtaaa

SEQ ID NO: 15731 - DNA, 977 bp, Zea Mays
agtaaatgatactatatttgtttttttgctccatatgcctccattcaaacatacgtgtgcgcggggaactcccaaattcaaaacctcaacgcccccacccaagctcgtggccccaccgcgcttagctcccagcagttcgagcctggagcatcctccacggctccgccgggtttctccttcgcgccgccgctaggcctcttctctcttgcgctggtacctggtagccacgtgcttgaggaaggctgcttgaggcagaggaagaggcggcagtgagggagacaaggagcgcggtgaccctggattcaccggatgcagcggcctcgaattcgagcagcgcgcatcactcacgacggagaagacgaagacgcggggtcgctttccacgattgccaaacgggccgctgttacggaggaggattaggagcacacgcggacacgccctcggctccctacccgaggaactgccactctctccgccgcgtccccagttcaattccccccaggctcccgaaaggcagggcaacccaaacggcatcggccgcccgacagaacgcggccggagcagttcgtcgcgccgcgcggcctatcaaaagttttcggacggagacgagactgggttctgaacccgacccgccgcagatagcctggccgcagtgatctctagcggggatcgagctgtgccggatggatcgagtggggctccaggcgttctgcaagcggcacggcctctctgccaggggctccaacgccgatctcattgcccgtcttgacgccgcgctcgggagggctgctggtgcggaggaggcggcggctggagtggcagcgaggaaggcttgtgtgaggcaaactggcggcgatgctgacgagacgaagaaggttacttttgtagaggtgggcggagatgtccctgtgaagctgtctaggaggaattcgctgggcgcacatgtccctgtgaggcggtccaggaggaattcgctg

SEQ ID NO: 15732 - DNA, 357 bp, Zea Mays
cgactgtagccgtcggcatctgtacgccctgctcaacaccgccgcccttgctccatgcccccttctccaacaccgccgcctttctctcatgtcgccctattgtgcgtccctctgctccagcctgcagtcgcggccatcctcctctgttcaaacttcagatggagatgaacatctctttggacgataatccctctgttcttttggttgttcactcattcactagttttgtgcccaccttagcctcctcttcctagagttgaaatcagtgggtcactgtaatccaaggttggatgcttcgctgttctggaacccagtaccagagaagctggaaaagtctttatcactacaaagattttg

SEQ ID NO: 15733 - DNA, 869 bp, Zea Mays
cggccgcacatcacagggggagtggttgaagaggtggttgacatttcaaattgggagaaaaaaggtcttcaactttttagtaaattacgctaagtttgtggcaagaaacggaagttacaaagctttagagatgaggagtactacataagttcagtacctcaaaaccatcatttggaagctgggctgtcggtgagggacaatgaaggatttgttgaaaataggttggatgctgctgttcttgatttagttgatgatgaagcttctggtatgcaagcgcagaaaactcgatatcactggatgaaggtgatcagtcaagccatgtttggtagtgaagggcgacgtccagagagtaagaacaaggtgacacagtatggactcgatatgactgagcaacaatatcttgagcattcgattccatggatagctgccaatgatgctgcttggcgtgcgttatgtcattattgggcttcacctccacctatacctacatctccatctaccgaacatcagacccctccagctaccttgccgacgcatgaacaagaggacgggttagactttgtcgaaaccctcttcaatagtggaggtattgaccatcactcttcactgtaacccgatggtgatcggcgaccatgagcttccatgttattgcgttctgatacttgatacttttattatgactatgtatgagatattgtcttttattagtactggatgatgatatgtgtcttattatgactatggatgagacttttgtgatgtaattgatgagactatggatgagacttttgtgatgtaattgatgagactatggatttaaatattgttatgtgattgtgtgtgagatgttttatgtgaaaatatgttgt

SEQ ID NO: 15734 - DNA, 888 bp, Zea Mays
gcgctctgctcccctgtgcacatcatgcgcgcgcctggtgtatgtgcggccgcacatcacagggggagtggttgaagaggtggttgacatttcaaattgggagaaaaaagaagtttgtggcaagaaacggaagttacaaagctttagagatgaggagtactacataagttcagtacctcaaaaccatcatttggaagctgggctgtcggtgagggacaatgaaggatttgttgaaaataggttggatgctgctgttcttgatttagttgatgatgaagcttctggtatgcaagcgcagaaaactcgatatcactggatgaaggtgatcagtcaagccatgtttggtagtgaagggcgacgtccagagagtaagaacaaggtgacacagtatggactcgatatgactgagcaacaatatcttgagcattcgattccatggatagctgccaatgatgctgcttggcgtgcgttatgtcattattgggcttcacctccacctatacctacatctccatctaccgaacatcagacccctccagctaccttgccgacgcatgaacaagaggacgggttagactttgtcgaaaccctcttcaatagtggaggtattgaccatcactcttcactgtaacccgatggtgatcggcgaccatgagcttccatgttattgcgttctgatacttgatacttttattatgactatgtatgagatattgtcttttattagtactggatgatgatatgtgtcttattatgactatggatgagacttttgtgatgtaattgatgagactatggatgagacttttgtgatgtaattgatgagactatggatttaaatattgttatgtgattgtgtgtgagatgttttatgtgaaaatatgttgt

SEQ ID NO: 15735 - DNA, 932 bp, Zea Mays
ctactttccttctagccacttgccttcccttcctgtgtcctggctgcgcgctctgctcccctgtgcacatcatgcgcgcgcctggtgtatgtgcggccgcacatcacagggggagtggttgaagaggtggttgacatttcaaattgggagaaaaaagtttgtggcaagaaacggaagttacaaagctttagagatgaggagtactacataagttcagtacctcaaaaccatcatttggaagctgggctgtcggtgagggacaatgaaggatttgttgaaaataggttggatgctgctgttcttgatttagttgatgatgaagcttctggtatgcaagcgcagaaaactcgatatcactggatgaaggtgatcagtcaagccatgtttggtagtgaagggcgacgtccagagagtaagaacaaggtgacacagtatggactcgatatgactgagcaacaatatcttgagcattcgattccatggatagctgccaatgatgctgcttggcgtgcgttatgtcattattgggcttcacctccacctatacctacatctccatctaccgaacatcagacccctccagctaccttgccgacgcatgaacaagaggacgggttagactttgtcgaaaccctcttcaatagtggaggtattgaccatcactcttcactgtaacccgatggtgatcggcgaccatgagcttccatgttattgcgttctgatacttgatacttttattatgactatgtatgagatattgtcttttattagtactggatgatgatatgtgtcttattatgactatggatgagacttttgtgatgtaattgatgagactatggatgagacttttgtgatgtaattgatgagactatggatttaaatattgttatgtgattgtgtgtgagatgttttatgtgaaaatatgttgt

SEQ ID NO: 15736 - DNA, 870 bp, Zea Mays
acctgccatcctctcactctctgtggttgaagaggtggttgacatttcaaattgggagaaaaaaggtcttcaactttttagtaaattacgctaagtttgtggcaagaaacggaagttacaaagctttagagatgaggagtactacataagttcagtacctcaaaaccatcatttggaagctgggctgtcggtgagggacaatgaaggatttgttgaaaataggttggatgctgctgttcttgatttagttgatgatgaagcttctggtatgcaagcgcagaaaactcgatatcactggatgaaggtgatcagtcaagccatgtttggtagtgaagggcgacgtccagagagtaagaacaaggtgacacagtatggactcgatatgactgagcaacaatatcttgagcattcgattccatggatagctgccaatgatgctgcttggcgtgcgttatgtcattattgggcttcacctccacctatacctacatctccatctaccgaacatcagacccctccagctaccttgccgacgcatgaacaagaggacgggttagactttgtcgaaaccctcttcaatagtggaggtattgaccatcactcttcactgtaacccgatggtgatcggcgaccatgagcttccatgttattgcgttctgatacttgatacttttattatgactatgtatgagatattgtcttttattagtactggatgatgatatgtgtcttattatgactatggatgagacttttgtgatgtaattgatgagactatggatgagacttttgtgatgtaattgatgagactatggatttaaatattgttatgtgattgtgtgtgagatgttttatgtgaaaatatgttgt

SEQ ID NO: 15737 - DNA, 1031 bp, Zea Mays
ggccgcctctcccgcccccgaccgcgccccgccctgcccccgtggagcccgccccggccgccaccgcgatcgcctctctcgcccccggtagcacctgcccccgaggagcccgccccggccgctgccatgaactaacaaatacctatgcttgcgctcagaagtacaagaaggaggagacagccacgtttgcgctctatggttgaagaggtggttgacatttcaaattgggagaaaaaaggtcttcaactttttaaagtttgtggcaagaaacggaagttacaaagctttagagatgaggagtactacataagttcagtacctcaaaaccatcatttggaagctgggctgtcggtgagggacaatgaaggatttgttgaaaataggttggatgctgctgttcttgatttagttgatgatgaagcttctggtatgcaagcgcagaaaactcgatatcactggatgaaggtgatcagtcaagccatgtttggtagtgaagggcgacgtccagagagtaagaacaaggtgacacagtatggactcgatatgactgagcaacaatatcttgagcattcgattccatggatagctgccaatgatgctgcttggcgtgcgttatgtcattattgggcttcacctccacctatacctacatctccatctaccgaacatcagacccctccagctaccttgccgacgcatgaacaagaggacgggttagactttgtcgaaaccctcttcaatagtggaggtattgaccatcactcttcactgtaacccgatggtgatcggcgaccatgagcttccatgttattgcgttctgatacttgatacttttattatgactatgtatgagatattgtcttttattagtactggatgatgatatgtgtcttattatgactatggatgagacttttgtgatgtaattgatgagactatggatgagacttttgtgatgtaattgatgagactatggatttaaatattgttatgtgattgtgtgtgagatgttttatgtgaaaatatgttgt

SEQ ID NO: 15738 - DNA, 899 bp, Zea Mays
ggccgcctctcccgcccccgaccgcgccccgccctgcccccgtggagcccgccccggccgccaccgcgatcgcctctctcgcccccggtagcacctgcccccgaggagcccgccccggccgctgccatgaactaacaaatacctatgcttgcgctcagaagtacaagaaggaggagacagccacgtttgcgctctatgcatttggaagctgggctgtcggtgagggacaatgaaggatttgttgaaaataggttggatgctgctgttcttgatttagttgatgatgaagcttctggtatgcaagcgcagaaaactcgatatcactggatgaaggtgatcagtcaagccatgtttggtagtgaagggcgacgtccagagagtaagaacaaggtgacacagtatggactcgatatgactgagcaacaatatcttgagcattcgattccatggatagctgccaatgatgctgcttggcgtgcgttatgtcattattgggcttcacctccacctatacctacatctccatctaccgaacatcagacccctccagctaccttgccgacgcatgaacaagaggacgggttagactttgtcgaaaccctcttcaatagtggaggtattgaccatcactcttcactgtaacccgatggtgatcggcgaccatgagcttccatgttattgcgttctgatacttgatacttttattatgactatgtatgagatattgtcttttattagtactggatgatgatatgtgtcttattatgactatggatgagacttttgtgatgtaattgatgagactatggatgagacttttgtgatgtaattgatgagactatggatttaaatattgttatgtgattgtgtgtgagatgttttatgtgaaaatatgttgt

SEQ ID NO: 15739 - DNA, 996 bp, Zea Mays
ggccgcctctcccgcccccgaccgcgccccgccctgcccccgtggagcccgccccggccgccaccgcgatcgcctctctcgcccccggtagcacctgcccccgaggagcccgccccggccgctgccatgaactaacaaatacctatgcttgcgctcagaagtacaagaaggaggagacagccacgtttgcgctctatggttgaagaggtggttgacatttcaaattgggagaaaaaagaagtttgtggcaagaaacggaagttacaaagctttagagatgaggagtactacataacatttggaagctgggctgtcggtgagggacaatgaaggatttgttgaaaataggttggatgctgctgttcttgatttagttgatgatgaagcttctggtatgcaagcgcagaaaactcgatatcactggatgaaggtgatcagtcaagccatgtttggtagtgaagggcgacgtccagagagtaagaacaaggtgacacagtatggactcgatatgactgagcaacaatatcttgagcattcgattccatggatagctgccaatgatgctgcttggcgtgcgttatgtcattattgggcttcacctccacctatacctacatctccatctaccgaacatcagacccctccagctaccttgccgacgcatgaacaagaggacgggttagactttgtcgaaaccctcttcaatagtggaggtattgaccatcactcttcactgtaacccgatggtgatcggcgaccatgagcttccatgttattgcgttctgatacttgatacttttattatgactatgtatgagatattgtcttttattagtactggatgatgatatgtgtcttattatgactatggatgagacttttgtgatgtaattgatgagactatggatgagacttttgtgatgtaattgatgagactatggatttaaatattgttatgtgattgtgtgtgagatgttttatgtgaaaatatgttgt

SEQ ID NO: 15740 - DNA, 945 bp, Zea Mays
ggccgcctctcccgcccccgaccgcgccccgccctgcccccgtggagcccgccccggccgccaccgcgatcgcctctctcgcccccgaagtacaagaaggaggagacagccacgtttgcgctctatggttgaagaggtggttgacatttcaaattgggagaaaaaagaagtttgtggcaagaaacggaagttacaaagctttagagatgaggagtactacataagttcagtacctcaaaaccatcatttggaagctgggctgtcggtgagggacaatgaaggatttgttgaaaataggttggatgctgctgttcttgatttagttgatgatgaagcttctggtatgcaagcgcagaaaactcgatatcactggatgaaggtgatcagtcaagccatgtttggtagtgaagggcgacgtccagagagtaagaacaaggtgacacagtatggactcgatatgactgagcaacaatatcttgagcattcgattccatggatagctgccaatgatgctgcttggcgtgcgttatgtcattattgggcttcacctccacctatacctacatctccatctaccgaacatcagacccctccagctaccttgccgacgcatgaacaagaggacgggttagactttgtcgaaaccctcttcaatagtggaggtattgaccatcactcttcactgtaacccgatggtgatcggcgaccatgagcttccatgttattgcgttctgatacttgatacttttattatgactatgtatgagatattgtcttttattagtactggatgatgatatgtgtcttattatgactatggatgagacttttgtgatgtaattgatgagactatggatgagacttttgtgatgtaattgatgagactatggatttaaatattgttatgtgattgtgtgtgagatgttttatgtgaaaatatgttgt

SEQ ID NO: 15741 - DNA, 873 bp, Zea Mays
aaaaaaaaaaaaaaaaaaaagtacaagaaggaggagacagccacgtttgcgctctatggttgaagaggtggttgacatttcaaattgggagaaaaaagtttgtggcaagaaacggaagttacaaagctttagagatgaggagtactacataagttcagtacctcaaaaccatcatttggaagctgggctgtcggtgagggacaatgaaggatttgttgaaaataggttggatgctgctgttcttgatttagttgatgatgaagcttctggtatgcaagcgcagaaaactcgatatcactggatgaaggtgatcagtcaagccatgtttggtagtgaagggcgacgtccagagagtaagaacaaggtgacacagtatggactcgatatgactgagcaacaatatcttgagcattcgattccatggatagctgccaatgatgctgcttggcgtgcgttatgtcattattgggcttcacctccacctatacctacatctccatctaccgaacatcagacccctccagctaccttgccgacgcatgaacaagaggacgggttagactttgtcgaaaccctcttcaatagtggaggtattgaccatcactcttcactgtaacccgatggtgatcggcgaccatgagcttccatgttattgcgttctgatacttgatacttttattatgactatgtatgagatattgtcttttattagtactggatgatgatatgtgtcttattatgactatggatgagacttttgtgatgtaattgatgagactatggatgagacttttgtgatgtaattgatgagactatggatttaaatattgttatgtgattgtgtgtgagatgttttatgtgaaaatatgttgt

SEQ ID NO: 15742 - DNA, 1692 bp, Zea Mays
actagatagatgctgtcatgctgaggacgaaggcaagcatgttgggcacagcgccatagtatcaaactatcattttgagccgtttcgcgtaccctaaaatcagtggcaacagcgccatagcatcgtcaactccatcaagccgttaccatcaacaacgattgcttgctgccgactgccaagcggggccggtcaatccagaagttggcagcctccaatcgcagcatccctccgagatcgctgccccgtccccctcccccggcttatcccctatcccctcctcccccgctccttccacacaaacctccatgccccttcttcctctcctccccgtcatggcttccaccttctcccccacttccgccgcgagggccctcctcccgggctccacctcccgcccactcttcctcgccgcttcagcttcctcagggcgcattcaaccatccaggaagggactggacttccgccgcggccgattcaccgtctgcaatgtcgccgctcccaccgccgccgaacaggaggcgacggcgtcggccgcgaaggagacccagcgccccgtgtacccgttcgcggccatcgtggggcaggacgagatgaagctctgcctgctgctcaacgtcatcgaccccaagatcggcggcgtcatgatcatgggcgacaggggcacggggaagtccaccaccgtccgctccctcgtcgacctgctcccggacatccgcgtcgtcgtcggcgaccccttcaactccgacccggacgaccccgaggtcatgggccccgaggtccgccagcgggtcctgcagggggacaccggcctccccgtcaccaccgccaagatcaccatggtcgacctgcccctcggcgccaccgaggaccgcgtctgcggcaccattgacatcgagaaggcgctcaccgagggcgtcaaggcgttcgagcccggcctgctcgccaaggccaacaggggcatactgtacgtcgacgaggtcaacctgctggacgaccacctcgtcgacgtgctgctggattccgctgcgtcggggtggaacacggtggagagggagggtatctccatatcccaccctgctcgcttcatcctcatcggctctggtaacccggaggaaggggagctcaggccccagctgctggaccggttcgggatgcacgcgcaggttggtaccgtcagggacgccgagctcagggtgaagatcgtggaggagagggctcgtttcgacagggatccgaagacgttccgtgagtcgtatcatgacgagcaggagaagctccagcagcagatatcatctgcacggagtaaccttggcgctgtgcagattgaccatgacctccgtgtcaagatatccaaggtgtgctctgagttgaacgttgatggactcagaggtgacattgtgactaacagggctgccaaggcgctggctgcgttgaaaggaagggacagcgtcaccgtggaggacattgctactgtcattccaaactgcttgaggcatcggctccgcaaggatccgcttgaatccattgactcgggtttacttgtcattgagaagttttatgaagtctttagctagattgttcttgaggtaaatgttccttagtcacaatttttggcgggaaccctcttgttctgttactttcataatgttctgctgtttaataatatctggagcttgaattggtatctaaaaa

SEQ ID NO: 15743 - DNA, 2220 bp, Zea Mays
actagatagatgctgtcatgctgaggacgaaggcaagcatgttgggcacagcgccatagtatcaaactatcattttgagccgtttcgcgtaccctaaaatcagtggcaacagcgccatagcatcgtcaactccatcaagccgttaccatcaacaacgattgcttgctgccgactgccaagcggggccggtcaatccagaagttggcagcctccaatcgcagcatccctccgagatcgctgccccgtccccctcccccggcttatcccctatcccctcctcccccgctccttccacacaaacctccatgccccttcttcctctcctccccgtcatggcttccaccttctcccccacttccgccgcgagggccctcctcccgggctccacctcccgcccactcttcctcgccgcttcagcttcctcagggcgcattcaaccatccaggaagggactggacttccgccgcggccgattcaccgtctgcaatgtcgccgctcccaccgccgccgaacaggaggcgacggcgtcggccgcgaaggagacccagcgccccgtgtacccgttcgcggccatcgtggggcaggacgagatgaagctctgcctgctgctcaacgtcatcgaccccaagatcggcggcgtcatgatcatgggcgacaggggcacggggaagtccaccaccgtccgctccctcgtcgacctgctcccggacatccgcgtcgtcgtcggcgaccccttcaactccgacccggacgaccccgaggtcatgggccccgaggtccgccagcgggtcctgcagggggacaccggcctccccgtcaccaccgccaagatcaccatggtcgacctgcccctcggcgccaccgaggaccgcgtctgcggcaccattgacatcgagaaggcgctcaccgagggcgtcaaggcgttcgagcccggcctgctcgccaaggccaacaggggcatactgtacgtcgacgaggtcaacctgctggacgaccacctcgtcgacgtgctgctggattccgctgcgtcggggtggaacacggtggagagggagggtatctccatatcccaccctgctcgcttcatcctcatcggctctggtaacccggaggaaggggagctcaggccccagctgctggaccggttcgggatgcacgcgcaggttggtaccgtcagggacgccgagctcagggtgaagatcgtggaggagagggctcgtttcgacagggatccgaagacgttccgtgagtcgtatcatgacgagcaggagaagctccagcagcagatatcatctgcacggagtaaccttggcgctgtgcagattgaccatgacctccgtgtcaagatatccaaggtgtgctctgagttgaacgttgatggactcagaggtgacattgtgactaacagggctgccaaggcgctggctgcgttgaaaggaagggacagcgtcaccgtggaggacattgctactgtcattccaaactgcttgaggcatcggctccgcaaggatccgcttgaatccattgactcgggtttacttgtcattgagaagttttatgaagtctttagctagattgttcttgaggtttatcaatttcagagccttcagtatcttcacacatgtttcagttagctagttttatcttccaactttttttttctaatgcctattcatcgaaggcattgaatcttaaagtttcctgtgctcatttcttcatggtctgtcaatggagaatgatacgttgtgagccccgatatgacaacatgttgatttcttaacacttttttctaatagattcgccagcaaattatgcgacttatctgtttcctactctcaatttcgatagggactataactggttgttttgtgggttttgaaacttgttcagtttgctggattaattaatgctgattaatcatgaagattttcgttcttagatcaaagtttgtcatgcccgtttagcatgattttctcaatcgagaatggtagttttcagctgtgatgtctctacatttgcctaccatgtttgattagaactaatatgtttcctgtaattgcgactaattgtttactcagctactttcatcaatcttaatgattttctgtgcatggattaaagtttttgttgcacgcatttatcatgacttccccaattgaaaagtgtaggtttgcagtcaacctgtatttttttttgaagtcaatctaatttattcttggg

SEQ ID NO: 15744 - DNA, 1586 bp, Zea Mays
actagatagatgctgtcatgctgaggacgaaggcaagcatgttgggcacagcgccatagtatcaaactatcattttgagccgtttcgcgtaccctaaaatcagtggcaacagcgccatagcatcgtcaactccatcaagccgttaccatcaacaacgattgcttgctgccgactgccaagcggggccggtcaatccagaagttggcagcctccaatcgcagcatccctccgagatcgctgccccgtccccctcccccggcttatcccctatcccctcctcccccgctccttccacacaaacctccatgccccttcttcctctcctccccgtcatggcttccaccttctcccccacttccgccgcgagggccctcctcccgggctccacctcccgcccactcttcctcgccgcttcagcttcctcagggcgcattcaaccatccaggaagggactggacttccgccgcggccgattcaccgtctgcaatgtcgccgctcccaccgccgccgaacaggagacccagcgccccgtgtacccgttcgcggccatcgtggggcaggacgagatgaagctctgcctgctgctcaacgtcatcgaccccaagatcggcggcgtcatgatcatgggcgacaggggcacggggaagtccaccaccgtccgctccctcgtcgacctgctcccggacatccgcgtcgtcgtcggcgaccccttcaactccgacccggacgaccccgaggtcatgggccccgaggtccgccagcgggtcctgcagggggacaccggcctccccgtcaccaccgccaagatcaccatggtcgacctgcccctcggcgccaccgaggaccgcgtctgcggcaccattgacatcgagaaggcgctcaccgagggcgtcaaggcgttcgagcccggcctgctcgccaaggccaacaggggcatactgtacgtcgacgaggtcaacctgctggacgaccacctcgtcgacgtgctgctggattccgctgcgtcggggtggaacacggtggagagggagggtatctccatatcccaccctgctcgcttcatcctcatcggctctggtaacccggaggaaggggagctcaggccccagctgctggaccggttcgggatgcacgcgcaggttggtaccgtcagggacgccgagctcagggtgaagatcgtggaggagagggctcgtttcgacagggatccgaagacgttccgtgagtcgtatcatgacgagcaggagaagctccagcagcagatatcatctgcacggagtaaccttggcgctgtgcagattgaccatgacctccgtgtcaagatatccaaggtgtgctctgagttgaacgttgatggactcagaggtgacattgtgactaacagggctgccaaggcgctggctgcgttgaaaggaagggacagcgtcaccgtggaggacattgctactgtcattccaaactgcttgaggcatcggctccgcaaggatccgcttgaatccattgactcgggtttacttgtcattgagaagttttatgaagtctttagctagattgttcttgagattaaagctgccatgccatgctcc

SEQ ID NO: 15745 - DNA, 1221 bp, Zea Mays
atgaagagcgagtacggctatgttcgcaaggttcatgcctcctcccccctcccacccctcccgctcgtattgcttgcgcctacatcccgctgctcagtttcgcacaatcgctggttgtcaccgaatgatagcctcgacaacgccaaggttacagaggccatcggcatcaggctgccggacatcggaagggccataaggggagatattgcgttacctatttttggctttgtgattgggttgacaggaggcattagtggcagggatctgaaggagcatcttggaaggttgcagcagtcgtctgattccaggagggctgctatgaatgaaatgatgagggcggcggaggttgccgcagatgagaacatgtccactatgcatttaatcaatcatcggtggggattttttttgtgatcaatttcttctgtggaagaagtttttttggaaacggcccaatcatcagtggggattgtattgtgatcaatttcttcaccttggtaagtaattaagtaatgtctttattcatgtactgattggaacttctctgacattttgttcaattatttttcttcaaaatatcataatgattggaagcaagcattatgatcaacctaaggtaaggagtcggactactcgtttcattgggcagcttgtattgctctgcttggtttgtgatagtaagatttatttttgcctatgttgaacaatgttttttcagttgggtgcgagaagttcagaagcagcaactaggtggatcatctgtgtaatggagtctgcattaaaggccagagttttgcttattttattgctccactttgctatcaatatgttcaataaaacattcatatgttttccattctactagcagttgcctagaaggatgagcacattgttgcttgttcacgtagcagatagcaggcttacaggtacctgtagatcacactttgttttgtaatttattttgctgcataagaattaaagcatgatgtaaactcatcgctgcatgcatttctaaagcctaatgtatttcttaatagccatacgctcaaatctatatacagaagccaacagtttttacaagctctgtctgatagggcgccttatgttctagtggtagttaaatcttacctcagaacaggatacctccatcacaaactatgtgatcatacaaaagaatgcaggattgctaaaaatgtgctgctagtaagatgaaaatgtgtgttt

SEQ ID NO: 15746 - DNA, 1285 bp, Zea Mays
atgaagagcgagtacggctatgttcgcaaggttcatgcctcctcccccctcccacccctcccgctcgtattgcttgcgcctacatcccgctgctcagtttcgcacaatcgctggtgcccgtgggctgcacggaatcgtgtttgagtcgtcggcgtatggcgtgctcggatcgagctgaattgctgccagatttggttaccagtgggttcttggtttgggatttgggtggttttggccgttactgtattggatttcttaggcgtggctggccttctccaggtggtgctgtgatctagccagcattgtgggggtggcttggtgcagtggttttggagatttgtggagtggtatttggattgcaatgttgtgatttcaaatagattggtagatctgctgaagataatctggaaagaatttacgatcatatgaatatgtgaattcagaattacaaaggttccattactgaaacactataccaaacacaccaatttcttttgtaggttgtcaccgaatgatagcctcgacaacgccaaggttacagaggccatcggcatcaggctgccggacatcggaagggccataaggggagatattgcgttacctatttttggctttgtgattgggttgacaggaggcattagtggcagggatctgaaggagcatcttggaaggttgcagcagtcgtctgattccaggagggctgctatgaatgaaatgatgagggcggcggaggttgccgcagatgagaacatgtccactatgcatttaatcaatcatcgttgggtgcgagaagttcagaagcagcaactaggtggatcatctgtgtaatggagtctgcattaaaggccagagttttgcttattttattgctccactttgctatcaatatgttcaataaaacattcatatgttttccattctactagcagttgcctagaaggatgagcacattgttgcttgttcacgtagcagatagcaggcttacaggtacctgtagatcacactttgttttgtaatttattttgctgcataagaattaaagcatgatgtaaactcatcgctgcatgcatttctaaagcctaatgtatttcttaatagccatacgctcaaatctatatacagaagccaacagtttttacaagctctgtctgatagggcgccttatgttctagtggtagttaaatcttacctcagaacaggatacctccatcacaaactatgtgatcatacaaaagaatgcaggattgctaaaaatgtgctgctagtaagatgaaaatgtgtgttt

SEQ ID NO: 15747 - DNA, 2071 bp, Zea Mays
gtcttctacccttctgtcctccgatccccaccctccggttaactcctcaccaagaaaaaggaaccggccgtcctcgttcctgtcgtcgctgttctttcctcgccattaccggcgtataaaaccagccctcggcctgatcgcacagcatccggccaagcgggagtagtccctgtcgtctgtccaccaccctctgcgactggtgtccgacgccgacatcccggagccgccgctgttcacggcatcgcacagctgggaagacaccccggagcagagcgtgcggctgaccaagcccgacctgtcggcggcggagcgggtccaggaggccgtgggctgcctcccggcgcggctggaggccgcgctggccgccgacgcgcgcggcatcaggcgctggaccgtccgcgacttctccgacgcgtacaggtccggcgaggtgacgcctgtccaggtggcggcgaggttcctcgcggcggtgagggagagctcgggccctggcgtgagcaatatggccttcttcatcagctgcgaccccgacgacgtcatgaggcaggccgaggaatccaccctcaggtaccagagaggggcgccgctgtccgcgctggacggcgtgctggtgggcgtgaaggacgagatcgactgcctgccgtacccgaccacgggcgggacgcggtggctgggcgcggcgcggcgctgcgaggccgacgccgcgtgcgtcgcgcagctgcgcgcctgcggggccgtcctcgccggcaaggccaacatgcacgagctcggcgccggcaccagcggcatcaacccgcaccatgggtcgacgaggaacccgtacaacgccagcacgatcgccgggggctcctccagcggctccgccgccatcgtgtgcgccggcctctgccccgtcgcgctcggcgtcgacggaggcggctccgtccggatgccggcggcgctgtgcggcgtcgtcgggttcaagcccaccgccgggcgcctctccaacgccggcgtcctcccgctcaactggacggtcgggatgccggggatcctggcggggacggtcgaggacgcgctcatcgcgtcagtcattctcattgatcgccacgcgcgcctcgtttctttctttctttcttcagctgttattaccgaatctcatcgtttccatctgaaattctgatccatccttctcgtcttccagctactcggcgatcgtcgaccagtcccagccgtcctacttgcggccggaactgaatcttcctcagctcggctccacactctccatcggcaacatcaagctcgccagatacggaaagtggttcaatgacagcgccgaggacatcaggagctgctgcgacaaggcgctgcaggcgctgcgcgcgaactacggctggcagaccgtggacgtgaccatcccggaggtggaggagatgcggctggcgcactacgtcaccatcggctccgagtgcacgacgtcgctcgccaagtacctcgacaagctcaagaggtccgagatcggctgggacgcgagggtggcgctcagcgtctacggctccttcagcagcagggcgtacctgaacgcgcagcggctccggaaccgtcagatgtacttccacaagcagatcttcaaggccgcggacgtcatcgtctcgccgatgaccggtgtgactgcgtacccgctgcaagacgacgcgctcagcaccggggagctcgactacataaacggagccgcgctggtccggtactccatagccagcaacttcctcggcctgccggccatcaccgtcaccgtcggctacgacaggggcggcctccccatcggcctccagttcatcggcaggccgtgggccgaggccaccctcctccacgtggccttcgccacgcagcaggcgtgcgccaaggagtacaagaagccgccggtgttctacgacctcctcggcaagcaacaggactgaggtcagcgacgcaccgccgccgccggcgagcgagcgagggtccaccatatatgtatccgtgggggtcgatcggaggagaagagacaattgttgtcatgtataccttcattctcgaatcattctcgaacatttat

SEQ ID NO: 15748 - DNA, 1794 bp, Zea Mays
cccaccctccggttaactcctcaccaagaaaaaggaaccggccgtcctcgttcctgtcgtcgctgttctttcctcgccattaccggcgtataaaaccagccctcggcctgatcgcacagcatccggccaagcgggagtagtccctgtcgtctgtccaccaccctctgcgagtacgtctcctcctcccgtctgtctctctctgtgtgtcggtctgccgttcccgccgccgccgccgcagatgggcctgttcagctcgccggccaaggtgtacaagccggccgccgacgtggacctcggcccaggcagcgacgagctctacatcagccccaatgtcaaagctcctcgggtcgccgggctcctggtgaagatcttcgtgtggatcctggagatgcccatcgtcgggcagatcgtgctctacatcctgaagaaggacaacctcatcaacaagctggtgtccgacgccgacatcccggagccgccgctgttcacggcatcgcacagctgggaagacaccccggagcagagcgtgcggctgaccaagcccgacctgtcggcggcggagcgggtccaggaggccgtgggctgcctcccggcgcggctggaggccgcgctggccgccgacgcgcgcggcatcaggcgctggaccgtccgcgacttctccgacgcgtacaggtccggcgaggtgacgcctgtccaggtggcggcgaggttcctcgcggcggtgagggagagctcgggccctggcgtgagcaatatggccttcttcatcagctgcgaccccgacgacgtcatgaggcaggccgaggaatccaccctcaggtaccagagaggggcgccgctgtccgcgctggacggcgtgctggtgggcgtgaaggacgagatcgactgcctgccgtacccgaccacgggcgggacgcggtggctgggcgcggcgcggcgctgcgaggccgacgccgcgtgcgtcgcgcagctgcgcgcctgcggggccgtcctcgccggcaaggccaacatgcacgagctcggcgccggcaccagcggcatcaacccgcaccatgggtcgacgaggaacccgtacaacgccagcacgatcgccgggggctcctccagcggctccgccgccatcgtgtgcgccggcctctgccccgtcgcgctcggcgtcgacggaggcggctccgtccggatgccggcggcgctgtgcggcgtcgtcgggttcaagcccaccgccgggcgcctctccaacgccggcgtcctcccgctcaactggacggtcgggatgccggggatcctggcggggacggtcgaggacgcgctcatcgcctactcggcgatcgtcgaccagtcccagccgtcctacttgcggccggaactgaatcttcctcagctcggctccacactctccatcggcaacatcaagctcgccagatacggaaagtggttcaatgacagcgccgaggacatcaggagctgctgcgacaaggcgctgcaggcgctgcgcgcgaactacggctggcaggtacggccggcggcggcgagagggtggctgtggctgtggttgattcaattcgatcacctgatggaatgcctgcgtgcgtgcacatgtagaccgtggacgtgaccatcccggaggtggaggagatgcggctggcgcactacgtcaccatcggctccgagtgcacgacgtcgctcgccaagtacctggacaagctgtaaggatcgagctcgatctcatacgaattggttcactactgtactgacctagctgagaggctgagacctccgagaatgacctctgct

SEQ ID NO: 15749 - DNA, 1499 bp, Zea Mays
gaattctctgaatcggcatctgagagagttgcaggggcgccgctgtccgcgctggacggcgtgctggtgggcgtgaaggacgagatcgactgcctgccgtacccgaccacgggcgggacgcggtggctgggcgcggcgcggcgctgcgaggccgacgccgcgtgcgtcgcgcagctgcgcgcctgcggggccgtcctcgccggcaaggccaacatgcacgagctcggcgccggcaccagcggcatcaacccgcaccatgggtcgacgaggaacccgtacaacgccagcacgatcgccgggggctcctccagcggctccgccgccatcgtgtgcgccggcctctgccccgtcgcgctcggcgtcgacggaggcggctccgtccggatgccggcggcgctgtgcggcgtcgtcgggttcaagcccaccgccgggcgcctctccaacgccggcgtcctcccgctcaactggacggtcgggatgccggggatcctggcggggacggtcgaggacgcgctcatcgcctactcggcgatcgtcgaccagtcccagccgtcctacttgcggccggaactgaatcttcctcagctcggctccacactctccatcggcaacatcaagctcgccagatacggaaagtggttcaatgacagcgccgaggacatcaggagctgctgcgacaaggcgctgcaggcgctgcgcgcgaactacggctggcagaccgtggacgtgaccatcccggaggtggaggagatgcggctggcgcactacgtcaccatcggctccgagtgcacgacgtcgctcgccaacaagaggtccgagatcggctgggacgcgagggtggcgctcagcgtctacggctccttcagcagcagggcgtacctgaacgcgcagcggctccggaaccgccagatgtacttccacaagcagatcttcaaggccgcggacgtcatcgtctcgccgatgaccggtgtgactgcgtacccgctgcaagacgacgcgctcagcaccggggagctcgactacataaacggagccgcgctggtccggtactccatagccggcaacttcctcggcctgccggccatcaccgtcacggtcggctacgacaggggcggcctccccatcggcctccagttcatcggcaggccgtgggccgaggccaccctcctccacgtggccttcgccacgcagcaggcgtgcgccaaggggtacaagaagccgccggtgttctacgacctcctcggcaagcaacaggactgaggtcagcgacgcgccgccgccgccggcggcgagcgagcgaggatccaccgtatatgtatccgtgggggtcgatcggaggagaagagacgtatagcagcaggacaattgttgtcatgtataccttcattctcgaatcattatcgagtatttgtcgttgactactagttcattcttgaactaaaacacggtaaataaaaaataattgaggtcgttcataatctgagaagagagaaagaaat

SEQ ID NO: 15750 - DNA, 1693 bp, Zea Mays
aaaagatggtcaggcaggcagccttttgctctgacgacgggtgggagagctttcactagtttgtctgtagctcttggctttgcaaccagccagccgccattgccggtagcaagcagtaagtaactagcagccacatatagggaggaggactgaggaggcgtacaagaaagagagtcgccgaattctctgaatcggcatctgagagagttgcaggggcgccgctgtccgcgctggacggcgtgctggtgggcgtgaaggacgagatcgactgcctgccgtacccgaccacgggcgggacgcggtggctgggcgcggcgcggcgctgcgaggccgacgccgcgtgcgtcgcgcagctgcgcgcctgcggggccgtcctcgccggcaaggccaacatgcacgagctcggcgccggcaccagcggcatcaacccgcaccatgggtcgacgaggaacccgtacaacgccagcacgatcgccgggggctcctccagcggctccgccgccatcgtgtgcgccggcctctgccccgtcgcgctcggcgtcgacggaggcggctccgtccggatgccggcggcgctgtgcggcgtcgtcgggttcaagcccaccgccgggcgcctctccaacgccggcgtcctcccgctcaactggacggtcgggatgccggggatcctggcggggacggtcgaggacgcgctcatcgcctactcggcgatcgtcgaccagtcccagccgtcctacttgcggccggaactgaatcttcctcagctcggctccacactctccatcggcaacatcaagctcgccagatacggaaagtggttcaatgacagcgccgaggacatcaggagctgctgcgacaaggcgctgcaggcgctgcgcgcgaactacggctggcagaccgtggacgtgaccatcccggaggtggaggagatgcggctggcgcactacgtcaccatcggctccgagtgcacgacgtcgctcgccaagtacctcgacaagctcaagaggtccgagatcggctgggacgcgagggtggcgctcagcgtctacggctccttcagcagcagggcgtacctgaacgcgcagcggctccggaaccgccagatgtacttccacaagcagatcttcaaggccgcggacgtcatcgtctcgccgatgaccggtgtgactgcgtacccgctgcaagacgacgcgctcagcaccggggagctcgactacataaacggagccgcgctggtccggtactccatagccggcaacttcctcggcctgccggccatcaccgtcacggtcggctacgacaggggcggcctccccatcggcctccagttcatcggcaggccgtgggccgaggccaccctcctccacgtggccttcgccacgcagcaggcgtgcgccaaggggtacaagaagccgccggtgttctacgacctcctcggcaagcaacaggactgaggtcagcgacgcgccgccgccgccggcggcgagcgagcgaggatccaccgtatatgtatccgtgggggtcgatcggaggagaagagacgtatagcagcaggacaattgttgtcatgtataccttcattctcgaatcattatcgagtatttgtcgttgactactagttcattcttgaactaaaacacggtaaataaaaaataattgaggtcgttcataatctgagaagagagaaagaaat

SEQ ID NO: 15751 - DNA, 2289 bp, Zea Mays
ctccggttaactcctcaccaagaaaaaggaaccggccgtcctcgttcctgtcgtcgctgttctttcctcgccattaccggcgtataaaaccagccctcggcctgatcgcacagcatccggccaagcgggagtagtccctgtcgtctgtccaccaccctctgcgagtacgtctcctcctcccgtctgtctctctctgtgtgtcggtctgccgttcccgccgccgccgccgcagatgggcctgttcagctcgccggccaaggtgtacaagccggccgccgacgtggacctcggcccaggcagcgacgagctctacatcagccccaatgtcaaagctcctcgggtcgccgggctcctggtgaagatcttcgtgtggatcctggagatgcccatcgtcgggcagatcgtgctctacatcctgaagaaggacaacctcatcaacaagctggtgtccgacgccgacatcccggagccgccgctgttcacggcatcgcacagctgggaagacaccccggagcagagcgtgcggctgaccaagcccgacctgtcggcggcggagcgggtccaggaggccgtgggctgcctcccggcgcggctggaggccgcgctggccgccgacgcgcgcggcatcaggcgctggaccgtccgcgacttctccgacgcgtacaggtccggcgaggtgacgcctgtccaggtggcggcgaggttcctcgcggcggtgagggagagctcgggccctggcgtgagcaatatggccttcttcatcagctgcgaccccgacgacgtcatgaggcaggccgaggaatccaccctcaggtaccagagaggggcgccgctgtccgcgctggacggcgtgctggtgggcgtgaaggacgagatcgactgcctgccgtacccgaccacgggcgggacgcggtggctgggcgcggcgcggcgctgcgaggccgacgccgcgtgcgtcgcgcagctgcgcgcctgcggggccgtcctcgccggcaaggccaacatgcacgagctcggcgccggcaccagcggcatcaacccgcaccatgggtcgacgaggaacccgtacaacgccagcacgatcgccgggggctcctccagcggctccgccgccatcgtgtgcgccggcctctgccccgtcgcgctcggcgtcgacggaggcggctccgtccggatgccggcggcgctgtgcggcgtcgtcgggttcaagcccaccgccgggcgcctctccaacgccggcgtcctcccgctcaactggacggtcgggatgccggggatcctggcggggacggtcgaggacgcgctcatcgcctactcggcgatcgtcgaccagtcccagccgtcctacttgcggccggaactgaatcttcctcagctcggctccacactctccatcggcaacatcaagctcgccagatacggaaagtggttcaatgacagcgccgaggacatcaggagctgctgcgacaaggcgctgcaggcgctgcgcgcgaactacggctggcagaccgtggacgtgaccatcccggaggtggaggagatgcggctggcgcactacgtcaccatcggctccgagtgcacgacgtcgctcgccaacaagaggtccgagatcggctgggacgcgagggtggcgctcagcgtctacggctccttcagcagcagggcgtacctgaacgcgcagcggctccggaaccgccagatgtacttccacaagcagatcttcaaggccgcggacgtcatcgtctcgccgatgaccggtgtgactgcgtacccgctgcaagacgacgcgctcagcaccggggagctcgactacataaacggagccgcgctggtccggtactccatagccggcaacttcctcggcctgccggccatcaccgtcacggtcggctacgacaggggcggcctccccatcggcctccagttcatcggcaggccgtgggccgaggccaccctcctccacgtggccttcgccacgcagcaggcgtgcgccaaggggtacaagaagccgccggtgttctacgacctcctcggcaagcaacaggactgaggtcagcgacgcgccgccgccgccggcggcgagcgagcgaggatccaccgtatatgtatccgtgggggtcgatcggaggagaagagacgtatagcagcaggacaattgttgtcatgtataccttcattctcgaatcattatcgagtatttgtcgttgactactagttcattcttgaactaaaacacggtaaataaaaaataattgaggtcgttcataatctgagaagagagaaagaaat

SEQ ID NO: 15752 - DNA, 2310 bp, Zea Mays
cccaccctccggttaactcctcaccaagaaaaaggaaccggccgtcctcgttcctgtcgtcgctgttctttcctcgccattaccggcgtataaaaccagccctcggcctgatcgcacagcatccggccaagcgggagtagtccctgtcgtctgtccaccaccctctgcgagtacgtctcctcctcccgtctgtctctctctgtgtgtcggtctgccgttcccgccgccgccgccgcagatgggcctgttcagctcgccggccaaggtgtacaagccggccgccgacgtggacctcggcccaggcagcgacgagctctacatcagccccaatgtcaaagctcctcgggtcgccgggctcctggtgaagatcttcgtgtggatcctggagatgcccatcgtcgggcagatcgtgctctacatcctgaagaaggacaacctcatcaacaagctggtgtccgacgccgacatcccggagccgccgctgttcacggcatcgcacagctgggaagacaccccggagcagagcgtgcggctgaccaagcccgacctgtcggcggcggagcgggtccaggaggccgtgggctgcctcccggcgcggctggaggccgcgctggccgccgacgcgcgcggcatcaggcgctggaccgtccgcgacttctccgacgcgtacaggtccggcgaggtgacgcctgtccaggtggcggcgaggttcctcgcggcggtgagggagagctcgggccctggcgtgagcaatatggccttcttcatcagctgcgaccccgacgacgtcatgaggcaggccgaggaatccaccctcaggtaccagagaggggcgccgctgtccgcgctggacggcgtgctggtgggcgtgaaggacgagatcgactgcctgccgtacccgaccacgggcgggacgcggtggctgggcgcggcgcggcgctgcgaggccgacgccgcgtgcgtcgcgcagctgcgcgcctgcggggccgtcctcgccggcaaggccaacatgcacgagctcggcgccggcaccagcggcatcaacccgcaccatgggtcgacgaggaacccgtacaacgccagcacgatcgccgggggctcctccagcggctccgccgccatcgtgtgcgccggcctctgccccgtcgcgctcggcgtcgacggaggcggctccgtccggatgccggcggcgctgtgcggcgtcgtcgggttcaagcccaccgccgggcgcctctccaacgccggcgtcctcccgctcaactggacggtcgggatgccggggatcctggcggggacggtcgaggacgcgctcatcgcctactcggcgatcgtcgaccagtcccagccgtcctacttgcggccggaactgaatcttcctcagctcggctccacactctccatcggcaacatcaagctcgccagatacggaaagtggttcaatgacagcgccgaggacatcaggagctgctgcgacaaggcgctgcaggcgctgcgcgcgaactacggctggcagaccgtggacgtgaccatcccggaggtggaggagatgcggctggcgcactacgtcaccatcggctccgagtgcacgacgtcgctcgccaagtacctcgacaagctcaagaggtccgagatcggctgggacgcgagggtggcgctcagcgtctacggctccttcagcagcagggcgtacctgaacgcgcagcggctccggaaccgccagatgtacttccacaagcagatcttcaaggccgcggacgtcatcgtctcgccgatgaccggtgtgactgcgtacccgctgcaagacgacgcgctcagcaccggggagctcgactacataaacggagccgcgctggtccggtactccatagccggcaacttcctcggcctgccggccatcaccgtcacggtcggctacgacaggggcggcctccccatcggcctccagttcatcggcaggccgtgggccgaggccaccctcctccacgtggccttcgccacgcagcaggcgtgcgccaaggggtacaagaagccgccggtgttctacgacctcctcggcaagcaacaggactgaggtcagcgacgcgccgccgccgccggcggcgagcgagcgaggatccaccgtatatgtatccgtgggggtcgatcggaggagaagagacgtatagcagcaggacaattgttgtcatgtataccttcattctcgaatcattatcgagtatttgtcgttgactactagttcattcttgaactaaaacacggtaaataaaaaataattgaggtcgttcataatctgagaagagagaaagaaat

SEQ ID NO: 15753 - DNA, 3532 bp, Zea Mays
ctcacacacacggagagggagcgagcgagggcgtgtccttgcgcgttcgcctcttgtgacgcgcgcggcgttctccgtgcacccgtttaattccgcccagctgtctccccattccaatgccgagtgttgatctctcagcaaggagggagaaagcagaaggaccggttttgatcttctgagcggttcatggttatggatcgcgcgggttggctctggaggcgcaagtcatcggacaagagccccgggggcagtgacagctctctgtccgtgtcgtcacattccgagcagtgctctgatgatcagggtcaatatcaatcccctgaagccttttcaagaagtaagtatgattacagccaagaaactggagtagcaagatccttgaatggcaagctagcagcaggggtcaatatgaacaattttaatccagagcatggtcaatcatttgaacaacatatatcctccaatgttggagatgaagagatcaaggagaccttggagagtttgaactacaaactttctgctgcactttcgaccatcagagcaaaagaagacttggtgaagcagcatgctaaagtcacagaagaggctgttgcaggttgggaacaagctgaagctgaagttactactctgaaggggctacttgaagcttcttgtcggaagaatgcttctctccaggatcaagtcagccacatggatgaggccctcaaggaatgcgtcaggcaactgcggctggcaagggaagaacaagaggacaaagtccgtgaagtcgtttcgaattctctggtcccgcagtctgaaaaccctgagctccaaaaccatatcgcagagctaaaaaagcggctggaaatgaccagattagaagcgtcatcttccatgatattacagcatgatctacatgaaaggcttcgggcgattgagagagagaacttggaccttaaggccaaacatcaggcaattgagaaagagaatatagatctcaaggccaaactgcttgtacagtccaaggacctgaagatactgatgttggaaagagatctgagcaatcaagtagcagagacagcaagtaaacaacacttggaaagtgttaaaaagattgccagggttgaggcagaatgccgcaggctacagcatctaacgcggaaaacaacactgatcaataattctagatccacacaaaacaattgctgcatggaatcactgactgacagccagtccgaccatggggagcatatggtgggcgttgataacgatctgcaaaattccgattcatgggcattagctttgattgctgagcttgatcagttcaagaatggcaaggatggttcaagaaatattgtgaacaatcctgttgagattgacataatggatgatttccttgagatggaaaggttagctgcattgcccgaatcagatggcacaagctctaactttgaaatggaaacagattctgacaaagctgtcacaagaaacagctccttgaaggtcaaaaatgaagaattgcaaaacaaggtcgcaaatttgcaggaaaagtttgaagcaattgcatgcgagaaaagggagcttgagctggcacttgtggaagttagagatcagcttgagatttcctgcgatgcgctagtggtggcaaagaacaggctggttgaaatgcagatgcagttggactcagcaaatgattccaaactttctgctttggatgatgtggagcgtttagactctgagaggaaggctttggaattgcagctggagtccaaatctgtagaagtcgaggagctacttattgctgtagcttcattggaggaaaatgcagagcagaaagagttggagtcgcagttagaactgatgtccgcacaagctacagaacttcgcctgactgtggcatcactggaagagagaattcaggctgagagagatctttctgtgcagcagaaacaaaacgcagaagccatgttgaatgctaaagaagaactggaagcacagctgtgttcagcaaacactgaaatggggaaactgcgtgacattatcaaagcactagagaatgaagtcaaaaaggagagagcactgtgtgaagaattaacagcacagttacagataaaggttgaagcagctgtcaatgcagttaaagaatcattggaggcacagctgtgttcagcaaatactgaagcagggaagcttagagatgttgttaaagcactccaggatgaggtagaaaaagagaaggcattacgtgaagagcttgcagcaaacctagaagtgaaaacaagagcagcaagaactgctgaggttgttaaagaatccttggaggcacagctgtcttcagcacacgctgaaatgcacaaactggaagagatcacaaaacaactacagaatgaggtagaaaaggagaaggaattctcagcacagttagagatgaaaattgaagtagagagagctcgttctattgagtctgctaaagaatcattagaggaacaactcctgttagtgaactcggaagctgcaaaactgcatgacatggtgtctgcgcttgagcacgatgtggaaaaggagaagtttttttctgcagagctccagatgcagctagaagctctagaggttgtcaaaaaggtattggagtctgaggcggagtctgcacatcaggatgccaaaattctcaagcagaaggtagagtcattggaagcaaaactcgaggagcagatgtcatcagctgacgaattcactgagactttgcagtcagagaggatggttatagagcataaacttaaaacagcagacggggaaatattaaaacttacaaacaaggtgagcttgctccatagggagatcgagcaggagaggttgctgtcagaagagtatgaacagaaatgccaaaagctggaagctcagatgtcaagagatagccgtgacgcaaagctctggcgtcttgcaaattcgaatggagatctgaaggttaagaaggagaaggagctcgctaacgcagctgggaagctcgcagaatgccagaagacaattgcttctctggatcgtcaaatcaaatcactgacagatctcgacagtgtggtgctagagcctgaaaggcttgaatccagcagggacatgccactgccactggacttcagaaatggcgatgctgaatttgctatgtttgcggatgacttgtacgactttgaccttccaaacaacgacacaagcttcttttctccacccccgtcgtcgatccagccctcgtctccaccctctgagatgtcagtatttgcaggggggctctcgactcttagcagttacaggagcaaaagagcaattagaaggtgatgaaaggaaggctgcccaaatgccatgctaacaaacagtccatggatgccgccatatgtgtagattaaaagatgtggtgtggacttggacgaaggcaacatggggatgacaaagatcaacgcctcgaaaacaacaaggcattataaggcccaaccaagattaaagaagatcatgtaaaagtgcaggacacaatggcaagaagaagcacggacgaagaaacacaaag

SEQ ID NO: 15754 - DNA, 3701 bp, Zea Mays
ctcgctccgatgcaccaccatcggtccgtgtcactccatcgcacgcatcgccgccactccgctcggcccgacgcccgagaagcattcgaggaaggaaggaaggagatccgattccaaccaagccgggagctgagagctcccccaccggccccgccgcacctgcagccgctcgcttcggcttcgctcaggctcagcagctgtgtgtgcgtctgcctgtggtgtggactccccctcacatggcgagggcggaggagagccgcaccccgcagctgtctccccattccaatgccgagtgttgatctctcagcaaggagggagaaagcagaaggaccggttttgatcttctgagcggttcatggttatggatcgcgcgggttggctctggaggcgcaagtcatcggacaagagccccgggggcagtgacagctctctgtccgtgtcgtcacattccgagcagtgctctgatgatcagggtcaatatcaatcccctgaagccttttcaagaagtaagtatgattacagccaagaaactggagtagcaagatccttgaatggcaagctagcagcaggggtcaatatgaacaattttaatccagagcatggtcaatcatttgaacaacatatatcctccaatgttggagatgaagagatcaaggagaccttggagagtttgaactacaaactttctgctgcactttcgaccatcagagcaaaagaagacttggtgaagcagcatgctaaagtcacagaagaggctgttgcaggttgggaacaagctgaagctgaagttactactctgaaggggctacttgaagcttcttgtcggaagaatgcttctctccaggatcaagtcagccacatggatgaggccctcaaggaatgcgtcaggcaactgcggctggcaagggaagaacaagaggacaaagtccgtgaagtcgtttcgaattctctggtcccgcagtctgaaaaccctgagctccaaaaccatatcgcagagctaaaaaagcggctggaaatgaccagattagaagcgtcatcttccatgatattacagcatgatctacatgaaaggcttcgggcgattgagagagagaacttggaccttaaggccaaacatcaggcaattgagaaagagaatatagatctcaaggccaaactgcttgtacagtccaaggacctgaagatactgatgttggaaagagatctgagcaatcaagtagcagagacagcaagtaaacaacacttggaaagtgttaaaaagattgccagggttgaggcagaatgccgcaggctacagcatctaacgcggaaaacaacactgatcaataattctagatccacacaaaacaattgctgcatggaatcactgactgacagccagtccgaccatggggagcatatggtgggcgttgataacgatctgcaaaattccgattcatgggcattagctttgattgctgagcttgatcagttcaagaatggcaaggatggttcaagaaatattgtgaacaatcctgttgagattgacataatggatgatttccttgagatggaaaggttagctgcattgcccgaatcagatggcacaagctctaactttgaaatggaaacagattctgacaaagctgtcacaagaaacagctccttgaaggtcaaaaatgaagaattgcaaaacaaggtcgcaaatttgcaggaaaagtttgaagcaattgcatgcgagaaaagggagcttgagctggcacttgtggaagttagagatcagcttgagatttcctgcgatgcgctagtggtggcaaagaacaggctggttgaaatgcagatgcagttggactcagcaaatgattccaaactttctgctttggatgatgtggagcgtttagactctgagaggaaggctttggaattgcagctggagtccaaatctgtagaagtcgaggagctacttattgctgtagcttcattggaggaaaatgcagagcagaaagagttggagtcgcagttagaactgatgtccgcacaagctacagaacttcgcctgactgtggcatcactggaagagagaattcaggctgagagagatctttctgtgcagcagaaacaaaacgcagaagccatgttgaatgctaaagaagaactggaagcacagctgtgttcagcaaacactgaaatggggaaactgcgtgacattatcaaagcactagagaatgaagtcaaaaaggagagagcactgtgtgaagaattaacagcacagttacagataaaggttgaagcagctgtcaatgcagttaaagaatcattggaggcacagctgtgttcagcaaatactgaagcagggaagcttagagatgttgttaaagcactccaggatgaggtagaaaaagagaaggcattacgtgaagagcttgcagcaaacctagaagtgaaaacaagagcagcaagaactgctgaggttgttaaagaatccttggaggcacagctgtcttcagcacacgctgaaatgcacaaactggaagagatcacaaaacaactacagaatgaggtagaaaaggagaaggaattctcagcacagttagagatgaaaattgaagtagagagagctcgttctattgagtctgctaaagaatcattagaggaacaactcctgttagtgaactcggaagctgcaaaactgcatgacatggtgtctgcgcttgagcacgatgtggaaaaggagaagtttttttctgcagagctccagatgcagctagaagctctagaggttgtcaaaaaggtattggagtctgaggcggagtctgcacatcaggatgccaaaattctcaagcagaaggtagagtcattggaagcaaaactcgaggagcagatgtcatcagctgacgaattcactgagactttgcagtcagagaggatggttatagagcataaacttaaaacagcagacggggaaatattaaaacttacaaacaaggtgagcttgctccatagggagatcgagcaggagaggttgctgtcagaagagtatgaacagaaatgccaaaagctggaagctcagatgtcaagagatagccgtgacgcaaagctctggcgtcttgcaaattcgaatggagatctgaaggttaagaaggagaaggagctcgctaacgcagctgggaagctcgcagaatgccagaagacaattgcttctctggatcgtcaaatcaaatcactgacagatctcgacagtgtggtgctagagcctgaaaggcttgaatccagcagggacatgccactgccactggacttcagaaatggcgatgctgaatttgctatgtttgcggatgacttgtacgactttgaccttccaaacaacgacacaagcttcttttctccacccccgtcgtcgatccagccctcgtctccaccctctgagatgtcagtatttgcaggggggctctcgactcttagcagttacaggagcaaaagagcaattagaaggtgatgaaaggaaggctgcccaaatgccatgctaacaaacagtccatggatgccgccatatgtgtagattaaaagatgtggtgtggacttggacgaaggcaacatggggatgacaaagatcaacgcctcgaaaacaacaaggcattataaggcccaaccaagattaaagaagatcatgtaaaagtgcaggacacaatggcaagaagaagcacggacgaagaaacacaaag

SEQ ID NO: 15755 - DNA, 3489 bp, Zea Mays
aatggcgccgcctagtattccgaccgtatctacgctgtctccccattccaatgccgagtgttgatctctcagcaaggagggagaaagcagaaggaccggttttgatcttctgagcggttcatggttatggatcgcgcgggttggctctggaggcgcaagtcatcggacaagagccccgggggcagtgacagctctctgtccgtgtcgtcacattccgagcagtgctctgatgatcagggtcaatatcaatcccctgaagccttttcaagaagtaagtatgattacagccaagaaactggagtagcaagatccttgaatggcaagctagcagcaggggtcaatatgaacaattttaatccagagcatggtcaatcatttgaacaacatatatcctccaatgttggagatgaagagatcaaggagaccttggagagtttgaactacaaactttctgctgcactttcgaccatcagagcaaaagaagacttggtgaagcagcatgctaaagtcacagaagaggctgttgcaggttgggaacaagctgaagctgaagttactactctgaaggggctacttgaagcttcttgtcggaagaatgcttctctccaggatcaagtcagccacatggatgaggccctcaaggaatgcgtcaggcaactgcggctggcaagggaagaacaagaggacaaagtccgtgaagtcgtttcgaattctctggtcccgcagtctgaaaaccctgagctccaaaaccatatcgcagagctaaaaaagcggctggaaatgaccagattagaagcgtcatcttccatgatattacagcatgatctacatgaaaggcttcgggcgattgagagagagaacttggaccttaaggccaaacatcaggcaattgagaaagagaatatagatctcaaggccaaactgcttgtacagtccaaggacctgaagatactgatgttggaaagagatctgagcaatcaagtagcagagacagcaagtaaacaacacttggaaagtgttaaaaagattgccagggttgaggcagaatgccgcaggctacagcatctaacgcggaaaacaacactgatcaataattctagatccacacaaaacaattgctgcatggaatcactgactgacagccagtccgaccatggggagcatatggtgggcgttgataacgatctgcaaaattccgattcatgggcattagctttgattgctgagcttgatcagttcaagaatggcaaggatggttcaagaaatattgtgaacaatcctgttgagattgacataatggatgatttccttgagatggaaaggttagctgcattgcccgaatcagatggcacaagctctaactttgaaatggaaacagattctgacaaagctgtcacaagaaacagctccttgaaggtcaaaaatgaagaattgcaaaacaaggtcgcaaatttgcaggaaaagtttgaagcaattgcatgcgagaaaagggagcttgagctggcacttgtggaagttagagatcagcttgagatttcctgcgatgcgctagtggtggcaaagaacaggctggttgaaatgcagatgcagttggactcagcaaatgattccaaactttctgctttggatgatgtggagcgtttagactctgagaggaaggctttggaattgcagctggagtccaaatctgtagaagtcgaggagctacttattgctgtagcttcattggaggaaaatgcagagcagaaagagttggagtcgcagttagaactgatgtccgcacaagctacagaacttcgcctgactgtggcatcactggaagagagaattcaggctgagagagatctttctgtgcagcagaaacaaaacgcagaagccatgttgaatgctaaagaagaactggaagcacagctgtgttcagcaaacactgaaatggggaaactgcgtgacattatcaaagcactagagaatgaagtcaaaaaggagagagcactgtgtgaagaattaacagcacagttacagataaaggttgaagcagctgtcaatgcagttaaagaatcattggaggcacagctgtgttcagcaaatactgaagcagggaagcttagagatgttgttaaagcactccaggatgaggtagaaaaagagaaggcattacgtgaagagcttgcagcaaacctagaagtgaaaacaagagcagcaagaactgctgaggttgttaaagaatccttggaggcacagctgtcttcagcacacgctgaaatgcacaaactggaagagatcacaaaacaactacagaatgaggtagaaaaggagaaggaattctcagcacagttagagatgaaaattgaagtagagagagctcgttctattgagtctgctaaagaatcattagaggaacaactcctgttagtgaactcggaagctgcaaaactgcatgacatggtgtctgcgcttgagcacgatgtggaaaaggagaagtttttttctgcagagctccagatgcagctagaagctctagaggttgtcaaaaaggtattggagtctgaggcggagtctgcacatcaggatgccaaaattctcaagcagaaggtagagtcattggaagcaaaactcgaggagcagatgtcatcagctgacgaattcactgagactttgcagtcagagaggatggttatagagcataaacttaaaacagcagacggggaaatattaaaacttacaaacaaggtgagcttgctccatagggagatcgagcaggagaggttgctgtcagaagagtatgaacagaaatgccaaaagctggaagctcagatgtcaagagatagccgtgacgcaaagctctggcgtcttgcaaattcgaatggagatctgaaggttaagaagtcgaaatgttgacattgctgtaggagaaggagctcgctaacgcagctgggaagctcgcagaatgccagaagacaattgcttctctggatcgtcaaatcaaatcactgacagatctcgacagtgtggtgctagagcctgaaaggcttgaatccagcagggacatgccactgccactggacttcagaaatggcgatgctgaatttgctatgtttgcggatgacttgtacgactttgaccttccaaacaacgacacaagcttcttttctccacccccgtcgtcgatccagccctcgtctccaccctctgagatgtcagtatttgcaggggggctctcgactcttagcagttacaggagcaaaagagcaattagaaggtgatgaaaggaaggctgcccaaatgccatgctaacaaacagtccatggatgccgccatatgtgtagattaaaagatgtggtgtggacttggacgaaggcaacatggggatgacaaagatcaacgcctcgaaaacaacaaggcattataaggcccaaccaagattaaagaagatcatgtaaaagtgcaggacacaatggcaagaagaagcacggacgaagaaacacaaag

SEQ ID NO: 15756 - DNA, 3726 bp, Zea Mays
ctctctctcacacacacggagagggagcgagcgagggcgtgtccttgcgcgttcgcctcttgtgacgcgcgcggcgttctccgtgcacccgtttaattccgcccagctgtctccccattccaatgccgagtgttgatctctcagcaaggagggagaaagcagaaggaccggttttgatcttctgagcggttcatggttatggatcgcgcgggttggctctggaggcgcaagtcatcggacaagagccccgggggcagtgacagctctctgtccgtgtcgtcacattccgagcagtgctctgatgatcagggtcaatatcaatcccctgaagccttttcaagaagtaagtatgattacagccaagaaactggagtagcaagatccttgaatggcaagctagcagcaggggtcaatatgaacaattttaatccagagcatggtcaatcatttgaacaacatatatcctccaatgttggagatgaagagatcaaggagaccttggagagtttgaactacaaactttctgctgcactttcgaccatcagagcaaaagaagacttggtgaagcagcatgctaaagtcacagaagaggctgttgcaggttgggaacaagctgaagctgaagttactactctgaaggggctacttgaagcttcttgtcggaagaatgcttctctccaggatcaagtcagccacatggatgaggccctcaaggaatgcgtcaggcaactgcggctggcaagggaagaacaagaggacaaagtccgtgaagtcgtttcgaattctctggtcccgcagtctgaaaaccctgagctccaaaaccatatcgcagagctaaaaaagcggctggaaatgaccagattagaagcgtcatcttccatgatattacagcatgatctacatgaaaggcttcgggcgattgagagagagaacttggaccttaaggccaaacatcaggcaattgagaaagagaatatagatctcaaggccaaactgcttgtacagtccaaggacctgaagatactgatgttggaaagagatctgagcaatcaagtagcagagacagcaagtaaacaacacttggaaagtgttaaaaagattgccagggttgaggcagaatgccgcaggctacagcatctaacgcggaaaacaacactgatcaataattctagatccacacaaaacaattgctgcatggaatcactgactgacagccagtccgaccatggggagcatatggtgggcgttgataacgatctgcaaaattccgattcatgggcattagctttgattgctgagcttgatcagttcaagaatggcaaggatggttcaagaaatattgtgaacaatcctgttgagattgacataatggatgatttccttgagatggaaaggttagctgcattgcccgaatcagatggcacaagctctaactttgaaatggaaacagattctgacaaagctgtcacaagaaacagctccttgaaggtcaaaaatgaagaattgcaaaacaaggtcgcaaatttgcaggaaaagtttgaagcaattgcatgcgagaaaagggagcttgagctggcacttgtggaagttagagatcagcttgagatttcctgcgatgcgctagtggtggcaaagaacaggctggttgaaatgcagatgcagttggactcagcaaatgattccaaactttctgctttggatgatgtggagcgtttagactctgagaggaaggctttggaattgcagctggagtccaaatctgtagaagtcgaggagctacttattgctgtagcttcattggaggaaaatgcagagcagaaagagttggagtcgcagttagaactgatgtccgcacaagctacagaacttcgcctgactgtggcatcactggaagagagaattcaggctgagagagatctttctgtgcagcagaaacaaaacgcagaagccatgttgaatgctaaagaagaactggaagcacagctgtgttcagcaaacactgaaatggggaaactgcgtgacattatcaaagcactagagaatgaagtcaaaaaggagagagcactgtgtgaagaattaacagcacagttacagataaaggttgaagcagctgtcaatgcagttaaagaatcattggaggcacagctgtgttcagcaaatactgaagcagggaagcttagagatgttgttaaagcactccaggatgaggtagaaaaagagaaggcattacgtgaagagcttgcagcaaacctagaagtgaaaacaagagcagcaagaactgctgaggttgttaaagaatccttggaggcacagctgtcttcagcacacgctgaaatgcacaaactggaagagatcacaaaacaactacagaatgaggtagaaaaggagaaggaattctcagcacagttagagatgaaaattgaagtagagagagctcgttctattgagtctgctaaagaatcattagaggaacaactcctgttagtgaactcggaagctgcaaaactgcatgacatggtgtctgcgcttgagcacgatgtggaaaaggagaagtttttttctgcagagctccagatgcagctagaagctctagaggttgtcaaaaaggtattggagtctgaggcggagtctgcacatcaggatgccaaaattctcaagcagaaggtagagtcattggaagcaaaactcgaggagcagatgtcatcagctgacgaattcactgagactttgcagtcagagaggatggttatagagcataaacttaaaacagcagacggggaaatattaaaacttacaaacaaggtgagcttgctccatagggagatcgagcaggagaggttgctgtcagaagagtatgaacagaaatgccaaaagctggaagctcagatgtcaagagatagccgtgacgcaaagctctggcgtcttgcaaattcgaatggagatctgaaggttaagaaggagaaggagctcgctaacgcagctgggaagctcgcagaatgccagaagacaattgcttctctggatcgtcaaatcaaatcactgacagatctcgacagtgtggtgctagagcctgaaaggcttgaatccagcagggacatgccactgccactggacttcagaaatggcgatgctgaatttgctatgtttgcggatgacttgtacgactttgaccttccaaacaacgacacaagcttcttttctccacccccgtcgtcgatccagccctcgtctccaccctctgagatgtcagtatttgcaggggggctctcgactcttagcagttacaggagcaaaagagcaattagaaggtgatgaaaggaaggctgcccaaatgccatgctaacaaacagtccatggatgccgccatatgtgtaggtaggtcgatgtacattacagagactgattgttagatttgtgtgatgaacatccattccagcaagctcggtttttgtagcctgcttgatgaggtcttactggtggtcgtttgctgtaaaatgtaaacatggttatcttgtgtgattctagttacaggaaagcaccgagcaagtgcatatttagtgtccactagttaggtaccccgtactagaatatttaatttatttaaatatgaaggaagcatgtcacttatttctctaaatttacaacaatagttaggccctgtacgttgatacgatttctatatattacataaatatatcttattttaattagatagttgtttaaaca

SEQ ID NO: 15757 - DNA, 3855 bp, Zea Mays
tgtcactccatcgcacgcatcgccgccactccgctcggcccgacgcccgagaagcattcgaggaaggaaggaaggagatccgattccaaccaagccgggagctgagagctcccccaccggccccgccgcacctgcagccgctcgcttcggcttcgctcaggctcagcagctgtgtgtgcgtctgcctgtggtgtggactccccctcacatggcgagggcggaggagagccgcaccccgcagctgtctccccattccaatgccgagtgttgatctctcagcaaggagggagaaagcagaaggaccggttttgatcttctgagcggttcatggttatggatcgcgcgggttggctctggaggcgcaagtcatcggacaagagccccgggggcagtgacagctctctgtccgtgtcgtcacattccgagcagtgctctgatgatcagggtcaatatcaatcccctgaagccttttcaagaagtaagtatgattacagccaagaaactggagtagcaagatccttgaatggcaagctagcagcaggggtcaatatgaacaattttaatccagagcatggtcaatcatttgaacaacatatatcctccaatgttggagatgaagagatcaaggagaccttggagagtttgaactacaaactttctgctgcactttcgaccatcagagcaaaagaagacttggtgaagcagcatgctaaagtcacagaagaggctgttgcaggttgggaacaagctgaagctgaagttactactctgaaggggctacttgaagcttcttgtcggaagaatgcttctctccaggatcaagtcagccacatggatgaggccctcaaggaatgcgtcaggcaactgcggctggcaagggaagaacaagaggacaaagtccgtgaagtcgtttcgaattctctggtcccgcagtctgaaaaccctgagctccaaaaccatatcgcagagctaaaaaagcggctggaaatgaccagattagaagcgtcatcttccatgatattacagcatgatctacatgaaaggcttcgggcgattgagagagagaacttggaccttaaggccaaacatcaggcaattgagaaagagaatatagatctcaaggccaaactgcttgtacagtccaaggacctgaagatactgatgttggaaagagatctgagcaatcaagtagcagagacagcaagtaaacaacacttggaaagtgttaaaaagattgccagggttgaggcagaatgccgcaggctacagcatctaacgcggaaaacaacactgatcaataattctagatccacacaaaacaattgctgcatggaatcactgactgacagccagtccgaccatggggagcatatggtgggcgttgataacgatctgcaaaattccgattcatgggcattagctttgattgctgagcttgatcagttcaagaatggcaaggatggttcaagaaatattgtgaacaatcctgttgagattgacataatggatgatttccttgagatggaaaggttagctgcattgcccgaatcagatggcacaagctctaactttgaaatggaaacagattctgacaaagctgtcacaagaaacagctccttgaaggtcaaaaatgaagaattgcaaaacaaggtcgcaaatttgcaggaaaagtttgaagcaattgcatgcgagaaaagggagcttgagctggcacttgtggaagttagagatcagcttgagatttcctgcgatgcgctagtggtggcaaagaacaggctggttgaaatgcagatgcagttggactcagcaaatgattccaaactttctgctttggatgatgtggagcgtttagactctgagaggaaggctttggaattgcagctggagtccaaatctgtagaagtcgaggagctacttattgctgtagcttcattggaggaaaatgcagagcagaaagagttggagtcgcagttagaactgatgtccgcacaagctacagaacttcgcctgactgtggcatcactggaagagagaattcaggctgagagagatctttctgtgcagcagaaacaaaacgcagaagccatgttgaatgctaaagaagaactggaagcacagctgtgttcagcaaacactgaaatggggaaactgcgtgacattatcaaagcactagagaatgaagtcaaaaaggagagagcactgtgtgaagaattaacagcacagttacagataaaggttgaagcagctgtcaatgcagttaaagaatcattggaggcacagctgtgttcagcaaatactgaagcagggaagcttagagatgttgttaaagcactccaggatgaggtagaaaaagagaaggcattacgtgaagagcttgcagcaaacctagaagtgaaaacaagagcagcaagaactgctgaggttgttaaagaatccttggaggcacagctgtcttcagcacacgctgaaatgcacaaactggaagagatcacaaaacaactacagaatgaggtagaaaaggagaaggaattctcagcacagttagagatgaaaattgaagtagagagagctcgttctattgagtctgctaaagaatcattagaggaacaactcctgttagtgaactcggaagctgcaaaactgcatgacatggtgtctgcgcttgagcacgatgtggaaaaggagaagtttttttctgcagagctccagatgcagctagaagctctagaggttgtcaaaaaggtattggagtctgaggcggagtctgcacatcaggatgccaaaattctcaagcagaaggtagagtcattggaagcaaaactcgaggagcagatgtcatcagctgacgaattcactgagactttgcagtcagagaggatggttatagagcataaacttaaaacagcagacggggaaatattaaaacttacaaacaaggtgagcttgctccatagggagatcgagcaggagaggttgctgtcagaagagtatgaacagaaatgccaaaagctggaagctcagatgtcaagagatagccgtgacgcaaagctctggcgtcttgcaaattcgaatggagatctgaaggttaagaaggagctcgctaacgcagctgggaagctcgcagaatgccagaagacaattgcttctctggatcgtcaaatcaaatcactgacagatctcgacagtgtggtgctagagcctgaaaggcttgaatccagcagggacatgccactgccactggacttcagaaatggcgatgctgaatttgctatgtttgcggatgacttgtacgactttgaccttccaaacaacgacacaagcttcttttctccacccccgtcgtcgatccagccctcgtctccaccctctgagatgtcagtatttgcaggggggctctcgactcttagcagttacaggagcaaaagagcaattagaaggtgatgaaaggaaggctgcccaaatgccatgctaacaaacagtccatggatgccgccatatgtgtaggtaggtcgatgtacattacagagactgattgttagatttgtgtgatgaacatccattccagcaagctcggtttttgtagcctgcttgatgaggtcttactggtggtcgtttgctgtaaaatgtaaacatggttatcttgtgtgattctagttacaggaaagcaccgagcaagtgcatatttagtgtccactagttaggtaccccgtactagaatatttaatttatttaaatatgaaggaagcatgtcacttatttctctaaatttacaacaatagttaggccctgtacgttgatacgatttctatatattacataaatatatcttattttaattagatagttgtttaaaca

SEQ ID NO: 15758 - DNA, 3870 bp, Zea Mays
atcggtccgtgtcactccatcgcacgcatcgccgccactccgctcggcccgacgcccgagaagcattcgaggaaggaaggaaggagatccgattccaaccaagccgggagctgagagctcccccaccggccccgccgcacctgcagccgctcgcttcggcttcgctcaggctcagcagctgtgtgtgcgtctgcctgtggtgtggactccccctcacatggcgagggcggaggagagccgcaccccgcagctgtctccccattccaatgccgagtgttgatctctcagcaaggagggagaaagcagaaggaccggttttgatcttctgagcggttcatggttatggatcgcgcgggttggctctggaggcgcaagtcatcggacaagagccccgggggcagtgacagctctctgtccgtgtcgtcacattccgagcagtgctctgatgatcagggtcaatatcaatcccctgaagccttttcaagaagtaagtatgattacagccaagaaactggagtagcaagatccttgaatggcaagctagcagcaggggtcaatatgaacaattttaatccagagcatggtcaatcatttgaacaacatatatcctccaatgttggagatgaagagatcaaggagaccttggagagtttgaactacaaactttctgctgcactttcgaccatcagagcaaaagaagacttggtgaagcagcatgctaaagtcacagaagaggctgttgcaggttgggaacaagctgaagctgaagttactactctgaaggggctacttgaagcttcttgtcggaagaatgcttctctccaggatcaagtcagccacatggatgaggccctcaaggaatgcgtcaggcaactgcggctggcaagggaagaacaagaggacaaagtccgtgaagtcgtttcgaattctctggtcccgcagtctgaaaaccctgagctccaaaaccatatcgcagagctaaaaaagcggctggaaatgaccagattagaagcgtcatcttccatgatattacagcatgatctacatgaaaggcttcgggcgattgagagagagaacttggaccttaaggccaaacatcaggcaattgagaaagagaatatagatctcaaggccaaactgcttgtacagtccaaggacctgaagatactgatgttggaaagagatctgagcaatcaagtagcagagacagcaagtaaacaacacttggaaagtgttaaaaagattgccagggttgaggcagaatgccgcaggctacagcatctaacgcggaaaacaacactgatcaataattctagatccacacaaaacaattgctgcatggaatcactgactgacagccagtccgaccatggggagcatatggtgggcgttgataacgatctgcaaaattccgattcatgggcattagctttgattgctgagcttgatcagttcaagaatggcaaggatggttcaagaaatattgtgaacaatcctgttgagattgacataatggatgatttccttgagatggaaaggttagctgcattgcccgaatcagatggcacaagctctaactttgaaatggaaacagattctgacaaagctgtcacaagaaacagctccttgaaggtcaaaaatgaagaattgcaaaacaaggtcgcaaatttgcaggaaaagtttgaagcaattgcatgcgagaaaagggagcttgagctggcacttgtggaagttagagatcagcttgagatttcctgcgatgcgctagtggtggcaaagaacaggctggttgaaatgcagatgcagttggactcagcaaatgattccaaactttctgctttggatgatgtggagcgtttagactctgagaggaaggctttggaattgcagctggagtccaaatctgtagaagtcgaggagctacttattgctgtagcttcattggaggaaaatgcagagcagaaagagttggagtcgcagttagaactgatgtccgcacaagctacagaacttcgcctgactgtggcatcactggaagagagaattcaggctgagagagatctttctgtgcagcagaaacaaaacgcagaagccatgttgaatgctaaagaagaactggaagcacagctgtgttcagcaaacactgaaatggggaaactgcgtgacattatcaaagcactagagaatgaagtcaaaaaggagagagcactgtgtgaagaattaacagcacagttacagataaaggttgaagcagctgtcaatgcagttaaagaatcattggaggcacagctgtgttcagcaaatactgaagcagggaagcttagagatgttgttaaagcactccaggatgaggtagaaaaagagaaggcattacgtgaagagcttgcagcaaacctagaagtgaaaacaagagcagcaagaactgctgaggttgttaaagaatccttggaggcacagctgtcttcagcacacgctgaaatgcacaaactggaagagatcacaaaacaactacagaatgaggtagaaaaggagaaggaattctcagcacagttagagatgaaaattgaagtagagagagctcgttctattgagtctgctaaagaatcattagaggaacaactcctgttagtgaactcggaagctgcaaaactgcatgacatggtgtctgcgcttgagcacgatgtggaaaaggagaagtttttttctgcagagctccagatgcagctagaagctctagaggttgtcaaaaaggtattggagtctgaggcggagtctgcacatcaggatgccaaaattctcaagcagaaggtagagtcattggaagcaaaactcgaggagcagatgtcatcagctgacgaattcactgagactttgcagtcagagaggatggttatagagcataaacttaaaacagcagacggggaaatattaaaacttacaaacaaggtgagcttgctccatagggagatcgagcaggagaggttgctgtcagaagagtatgaacagaaatgccaaaagctggaagctcagatgtcaagagatagccgtgacgcaaagctctggcgtcttgcaaattcgaatggagatctgaaggttaagaaggagaaggagctcgctaacgcagctgggaagctcgcagaatgccagaagacaattgcttctctggatcgtcaaatcaaatcactgacagatctcgacagtgtggtgctagagcctgaaaggcttgaatccagcagggacatgccactgccactggacttcagaaatggcgatgctgaatttgctatgtttgcggatgacttgtacgactttgaccttccaaacaacgacacaagcttcttttctccacccccgtcgtcgatccagccctcgtctccaccctctgagatgtcagtatttgcaggggggctctcgactcttagcagttacaggagcaaaagagcaattagaaggtgatgaaaggaaggctgcccaaatgccatgctaacaaacagtccatggatgccgccatatgtgtaggtaggtcgatgtacattacagagactgattgttagatttgtgtgatgaacatccattccagcaagctcggtttttgtagcctgcttgatgaggtcttactggtggtcgtttgctgtaaaatgtaaacatggttatcttgtgtgattctagttacaggaaagcaccgagcaagtgcatatttagtgtccactagttaggtaccccgtactagaatatttaatttatttaaatatgaaggaagcatgtcacttatttctctaaatttacaacaatagttaggccctgtacgttgatacgatttctatatattacataaatatatcttattttaattagatagttgtttaaaca

SEQ ID NO: 15759 - DNA, 825 bp, Zea Mays
ccgctatccgttgatctttctccgggcgcgtggtacttatttcctgtcgtcgctatctcctcgtcgcccagtcgctcgatctctcctctagcgcgcagccactcctttctctctctctggtctgcttccagccgagcagtgccatggcgttcctctctccctctgtgcacggcgctcgcttctccctggcgcccggccagaatttcttgcggcgcgaagcttgctccctgcgcccgtcccccatggcgctcggccgcccagctgtttcttcctccttgcgctcggatttcctctgctccatggcgaactcgccccagcccccagctcggatccctgcctctgctcgcgccggtgctcgcccctctgctatctccatgcccgagctcgtcctccaggttgccccatggcgctcggcctcacccccttgccccagcgccatcggctccccgtccagcttcaacctcgccgtcggtctcgtctctgttcaagccgccatcgcgccgtgccagttgtccatctttgatcctcgcctcgacgtcatcttgccgtgcaacgcttgcttggtgctcgacaaaacgcctaaatcaggaccatcgtcgttctcgcgatcatcgagttggtttaggtacgctagttggtcacgtgatgcaaaggtcaagagccaagtattccccaagaggatgcaaagagtggacatctccgcaagacgatgtcatcagtcgggccaacctgaagatggatagactgagcgagtggcagaacaaaagctcctcgccaaagggtcatcgtctaacaacactaacctagtgtttattccaggcaagc

SEQ ID NO: 15760 - DNA, 671 bp, Zea Mays
gcaggcagcaagccgaccgcgcctgcaacgaccgcgactcagctcggcgcccaggcggaccgacgccggccacccggccaggcccgcggagccgcagccacgcgcgcccagcaagtcgagcttatctgaatttgatgatcttgtgggccaccctggattcgacaagcaagggacacgcttcaagcggctcatcaaagaccagaataatcataaggacctcgaggagggaattaaccgtctagttctttgctctggaaagtttcaggtgtactacgaactggatgaagaaagaaggaagacggagcgcactgatgttgctatatgtagagttgagcagctctgcccattcccctatgacctcatccagtgtgagttgaagagatatccaaggacactgaaaggcggacgtgcggattggcttatagagaaatgaacttggagcttctagtgttacccctgtcctgacagaacaatgtcacacaatagcggaaaatcgggtggacaggctgtaatgccttgtgctggatgcagttaagcaatgtatggagtttgggtatcacctccgttcttggcctgttaaacaatgtacggagtttggggttaaatgattttgtaaagtgtttgcaaatttgttcaaaacatgataatgtgtaggttttgtgaatgatttt

SEQ ID NO: 15761 - DNA, 615 bp, Zea Mays
gcaggcagcaagccgaccgcgcctgcaacgaccgcgactcagctcggcgcccaggcggaccgacgccggccacccggccaggcccgcggagccgcagccacgcgcgcccagcaagtcgagcttatctgaatttgatgatcttgtgggccaccctggattcgacaagcaagggacacgcttcaagcggctcatcaaagaccagaataatcataaggacctcgaggagggaattaaccgtctagttctttgctctggaaagtttcaggtgtactacgaactggatgaagaaagaaggaagacggagcgcactgatgttgctatatgtagaggacactgaaaggcggacgtgcggattggcttatagagaaatgtattgaacttggagcttctagtgttacccctgtcctgacagaacaatgtcacacaatagcggaaaatcgggtggacaggctgtaatgccttgtgctggatgcagttaagcaatgtatggagtttgggtatcacctccgttcttggcctgttaaacaatgtacggagtttggggttaaatgattttgtaaagtgtttgcaaatttgttcaaaacatgataatgtgtaggttttgtgaatgatttt

SEQ ID NO: 15762 - DNA, 649 bp, Zea Mays
gcaggcagcaagccgaccgcgcctgcaacgaccgcgactcagctcggcgcccaggcggaccgacgccggccacccggccaggcccgcggagccgcagccacgcgcgcccagcaagtcgagcttatctgaatttgatgatcttgtgggccaccctggattcgacaagcaagggacacgcttcaagcggctcatcaaagaccagaataatcataaggacctcgaggagggaattaaccgtctagttctttgctctggaaaggtgtactacgaactggatgaagaaagaaggaagacggagcgcactgatgttgctatatgtagagttgagcagctctgcccattcccctatgacctcatccagtggacactgaaaggcggacgtgcggattggcttatagagaaatgtattgaacttggagcttctagtgttacccctgtcctgacagaacaatgtcacacaatagcggaaaatcgggtggacaggctgtaatgccttgtgctggatgcagttaagcaatgtatggagtttgggtatcacctccgttcttggcctgttaaacaatgtacggagtttggggttaaatgattttgtaaagtgtttgcaaatttgttcaaaacatgataatgtgtaggttttgtgaatgatttt

SEQ ID NO: 15763 - DNA, 886 bp, Zea Mays
gcaggcagcaagccgaccgcgcctgcaacgaccgcgactcagctcggcgcccaggcggaccgacgccggccacccggccaggcccgcggagccgcagccacgcgcgcccagcaagtcgagcttatctgaatttgatgatcttgtgggccaccctggattcgacaagcaagggacacgcttcaagcggctcatcaaagaccagaataatcataaggacctcgaggagggaattaaccgtctagttctttgctctggaaagtttcaggtgtactacgaactggatgaagaaagaaggaagacggagcgcactgatgttgctatatgtagagttgagcagctctgcccattcccctatgacctcatccagtgtgagttgaagagatatccaagtatgtgtttagaaaaaagtggttgctcgtttttactctgctgcatgatctctaatctgtcaagtgtatagtagaaaatgttttgctagctggaaggttagttgacatacaatctaatggatgagtcctagtaatcaacaaacaagctgatactatgtaaaccaggagaattttttattccatcctgtaatcactttattatttctaatcctcagggacactgaaaggcggacgtgcggattggcttatagagaaatgaacttggagcttctagtgttacccctgtcctgacagaacaatgtcacacaatagcggaaaatcgggtggacaggctgtaatgccttgtgctggatgcagttaagcaatgtatggagtttgggtatcacctccgttcttggcctgttaaacaatgtacggagtttggggttaaatgattttgtaaagtgtttgcaaatttgttcaaaacatgataatgtgtaggttttgtgaatgatttt

SEQ ID NO: 15764 - DNA, 891 bp, Zea Mays
gcaggcagcaagccgaccgcgcctgcaacgaccgcgactcagctcggcgcccaggcggaccgacgccggccacccggccaggcccgcggagccgcagccacgcgcgcccagcaagtcgagcttatctgaatttgatgatcttgtgggccaccctggattcgacaagcaagggacacgcttcaagcggctcatcaaagaccagaataatcataaggacctcgaggagggaattaaccgtctagttctttgctctggaaagtttcaggtgtactacgaactggatgaagaaagaaggaagacggagcgcactgatgttgctatatgtagagttgagcagctctgcccattcccctatgacctcatccagtgtgagttgaagagatatccaagtatgtgtttagaaaaaagtggttgctcgtttttactctgctgcatgatctctaatctgtcaagtgtatagtagaaaatgttttgctagctggaaggttagttgacatacaatctaatggatgagtcctagtaatcaacaaacaagctgatactatgtaaaccaggagaattttttattccatcctgtaatcactttattatttctaatcctcagggacactgaaaggcggacgtgcggattggcttatagagaaatgtattgaacttggagcttctagtgttacccctgtcctgacagaacaatgtcacacaatagcggaaaatcgggtggacaggctgtaatgccttgtgctggatgcagttaagcaatgtatggagtttgggtatcacctccgttcttggcctgttaaacaatgtacggagtttggggttaaatgattttgtaaagtgtttgcaaatttgttcaaaacatgataatgtgtaggttttgtgaatgatttt

SEQ ID NO: 15765 - DNA, 676 bp, Zea Mays
gcaggcagcaagccgaccgcgcctgcaacgaccgcgactcagctcggcgcccaggcggaccgacgccggccacccggccaggcccgcggagccgcagccacgcgcgcccagcaagtcgagcttatctgaatttgatgatcttgtgggccaccctggattcgacaagcaagggacacgcttcaagcggctcatcaaagaccagaataatcataaggacctcgaggagggaattaaccgtctagttctttgctctggaaagtttcaggtgtactacgaactggatgaagaaagaaggaagacggagcgcactgatgttgctatatgtagagttgagcagctctgcccattcccctatgacctcatccagtgtgagttgaagagatatccaaggacactgaaaggcggacgtgcggattggcttatagagaaatgtattgaacttggagcttctagtgttacccctgtcctgacagaacaatgtcacacaatagcggaaaatcgggtggacaggctgtaatgccttgtgctggatgcagttaagcaatgtatggagtttgggtatcacctccgttcttggcctgttaaacaatgtacggagtttggggttaaatgattttgtaaagtgtttgcaaatttgttcaaaacatgataatgtgtaggttttgtgaatgatttt

SEQ ID NO: 15766 - DNA, 604 bp, Zea Mays
gcaggcagcaagccgaccgcgcctgcaacgaccgcgactcagctcggcgcccaggcggaccgacgccggccacccggccaggcccgcggagccgcagccacgcgcgcccagcaagtcgagcttatctgaatttgatgatcttgtgggccaccctggattcgacaagcaagggacacgcttcaagcggctcatcaaagaccagaataatcataaggacctcgaggagggaattaaccgtctagttctttgctctggaaaggtgtactacgaactggatgaagaaagaaggaagacggagcgcactgatgttgctatatgtagaggacactgaaaggcggacgtgcggattggcttatagagaaatgaacttggagcttctagtgttacccctgtcctgacagaacaatgtcacacaatagcggaaaatcgggtggacaggctgtaatgccttgtgctggatgcagttaagcaatgtatggagtttgggtatcacctccgttcttggcctgttaaacaatgtacggagtttggggttaaatgattttgtaaagtgtttgcaaatttgttcaaaacatgataatgtgtaggttttgtgaatgatttt

SEQ ID NO: 15767 - DNA, 610 bp, Zea Mays
gcaggcagcaagccgaccgcgcctgcaacgaccgcgactcagctcggcgcccaggcggaccgacgccggccacccggccaggcccgcggagccgcagccacgcgcgcccagcaagtcgagcttatctgaatttgatgatcttgtgggccaccctggattcgacaagcaagggacacgcttcaagcggctcatcaaagaccagaataatcataaggacctcgaggagggaattaaccgtctagttctttgctctggaaagtttcaggtgtactacgaactggatgaagaaagaaggaagacggagcgcactgatgttgctatatgtagaggacactgaaaggcggacgtgcggattggcttatagagaaatgaacttggagcttctagtgttacccctgtcctgacagaacaatgtcacacaatagcggaaaatcgggtggacaggctgtaatgccttgtgctggatgcagttaagcaatgtatggagtttgggtatcacctccgttcttggcctgttaaacaatgtacggagtttggggttaaatgattttgtaaagtgtttgcaaatttgttcaaaacatgataatgtgtaggttttgtgaatgatttt

SEQ ID NO: 15768 - DNA, 650 bp, Zea Mays
gcaggcagcaagccgaccgcgcctgcaacgaccgcgactcagctcggcgcccaggcggaccgacgccggccacccggccaggcccgcggagccgcagccacgcgcgcccagcaagtcgagcttatctgaatttgatgatcttgtgggccaccctggattcgacaagcaagggacacgcttcaagcggctcatcaaagaccagaataatcataaggacctcgaggagggaattaaccgtctagttctttgctctggaaagtttcaggtgtactacgaactggatgaagaaagaaggaagacggagcgcactgatgttgctatatgtagagttgagcagctctgcccattcccctatgacctcatccagtggacactgaaaggcggacgtgcggattggcttatagagaaatgaacttggagcttctagtgttacccctgtcctgacagaacaatgtcacacaatagcggaaaatcgggtggacaggctgtaatgccttgtgctggatgcagttaagcaatgtatggagtttgggtatcacctccgttcttggcctgttaaacaatgtacggagtttggggttaaatgattttgtaaagtgtttgcaaatttgttcaaaacatgataatgtgtaggttttgtgaatgatttt

SEQ ID NO: 15769 - DNA, 627 bp, Zea Mays
cgatcgccaatccgagccgaactgcaggactaacatttatgatgccccacgccccgcccctactgctcggcccaccattaacatctaacttccatcgatcaaggatatgatgtcaagacacactgcccacgacacccaacccactccggacctatcaagccaagcatcgcagcttgagacgcagctgggtggtacccaggttgaggaaattcatgaaagacaacatcatattcggagagtattagagacttgccctgacgaagcggacattgatacagtacatcagggaggtgacatgactgcagatgacatagaacacaatgacaatggaccagtatttgaccagacaccaacttcccatgttgcatctcaggatgaaacattcaaatggacaacacattctggaactgctccactccttacagagcttgactgtgtttgttctctgtgggatctactgtgttccaaggacattgacccaagcaggtacatattacataaattatgaagaccatatttattagtttatttgacgtatgtaatatgaatatataacaatattcttcaaatcatcatacgagattgtcatagattatggtgaatacagtggaaactgtctcgatattt

SEQ ID NO: 15770 - DNA, 2047 bp, Zea Mays
gtttcatcttcttgatcacaaaaggggcacttctcaggatgactcatccctcttttagcaagtctatccgctgtccagagacgattttgtgcaaccagctagatgaagaaacgacattttggcaaggtccaagttttccaaattttcttgtgatgagggaaaattacagaccccaaaaagaagccctcgtaagcaatctttgctgaatagatgccattaggagcaatactgaaaacatgtttatcctcaacctcaggctgcagctgccaaactgaagtcatatcccacaactgaagaaaatctgttaagactcccactgtctgtggacctttaatatcagagatccattttctatctgtaattgcctcataaactgtcctgctattgataatcctcttgggtataatattatataaacttggagtaaggtctttaattcgcttaccatataaccacttatcctttcaaaactttgtatttgtgccatctcccacctcagtaatgaccacctccatgaagaaagctctagcttttccaggaacttttatgtggagatcagaccaagggcgagtaggatcagtcttctgcagccagagccaacgcattcgaagggcccaacataattctggaaaactagatatgttgccctggtctgcaaactgttcgatctctggtccggtcctaataactgtgttgtagattgcttgcctccttttccattgcaccttacttacatcctgtttggattgactaaaatagcttgctagctctagctgttgaaaaagagctctagctgatccaaaaagctcagcttatagtccaacttataaccagtttgaactattcaatggcccagcttataaaaagttatgagccggttttctccagctattgcagcttagagcaagtttgataatacggcctcctgccacctagaatgaaaggtttgcctcttcgtgtttacctggatctggaggccagtaggaagccaactggttttgaggacatttttgtcggttaccatgccagtgatgatgtgcaagtaacatatgctggaaaatcatttcacaccagccgaagttaccatatatcaactgaaaagagaaacgatgcacttatctactggtcatcttcaaggtgtcttcctcatagagataagctcgcaaaagacttcctctcgctggttcctcaccattccttcggaagatgtttgaacaatgtcggcggtcctgacatggcgctatccatgtatccagtctgctccaccaacgataacggcacgccacactggtgggatcacctacactgtgcgatgtcacattacaagttcgttcttgcaatcgagaacaccaagaccgaaagctacgtgaccgagaagctgttctacgctttggaggctgggtcggtgccgatatactttggggcgcccaatgtctgggatttcgtccctcctaattctatcatagacgcctccaaattcagttcactcagaaagctggcatcgtatgtgaagacgctggcaaatgaccccgtagcctacgctgaataccacgcgtggaggcgttgtggtgcgttgggtaacttcggcagggcacgcgagatgagccttgacacgctgccttgccgactctgcgaggtggttagcaagagaggtggtaagggtgcagatgcattgtgagatggatcggtgttttgtatggcttgtataccttgatccggacatgtgaaatagatgtaaatggtacgtcgaacgaagtgctcatgctattccgttcaggaaaaaagtgtctagtgtgttattcatgtcaagatcaagcacacattgtcgaaagaaatagtgcagctattcttttttttacaccatctctcttttatctgttgaatttggagggttgtacagttgttggagcagagagagttcgtgtttttaggtagagaagtatacagatgggatttcttgctgttgctatgatatgaaccatataaccatgtgtgagctccgcacttaaatttgtgtagatgccatggttgtctttttgttctttgc

SEQ ID NO: 15771 - DNA, 1236 bp, Zea Mays
caaaaaaatccatttctgtttggtgagagagagaatgaaaggtttgcctcttcgtgtttacctggatctggaggccagtaggaagccaactggttttgaggacatttttgtcggttaccatgccagtgatgatgtgcaagtaacatatgctggaaaatcatttcacaccagccgaagttaccatatatcaactgaaaagagaaacgatgcacttatctactggtcatcttcaaggtgtcttcctcatagagataagctcgcaaaagacttcctctcgctggttcctcaccattccttcggaagatgtttgaacaatgtcggcggtcctgacatggcgctatccatgtatccagtctgctccaccaacgataacggcacgccacactggtgggatcacctacactgtgcgatgtcacattacaagttcgttcttgcaatcgagaacaccaagaccgaaagctacgtgaccgagaagctgttctacgctttggaggctgggtcggtgccgatatactttggggcgcccaatgtctgggatttcgtccctcctaattctatcatagacgcctccaaattcagttcactcagaaagctggcatcgtatgtgaagacgctggcaaatgaccccgtagcctacgctgaataccacgcgtggaggcgttgtggtgcgttgggtaacttcggcagggcacgcgagatgagccttgacacgctgccttgccgactctgcgaggtggttagcaagagaggtggtaagggtgcagatgcattgtgagatggatcggtcagtgccctgactcctggcatagaccatcaactcgtactttactgctaacactactgtctgatatagcctttttcttttcttgattctaggtgttttgtatggcttgtataccttgatccggacatgtgaaatagatgtaaatggtacgtcgaacgaagtgctcatgctattccgttcaggaaaaaagtgtctagtgtgttattcatgtcaagatcaagcacacattgtcgaaagaaatagtgcagctattcttttttttacaccatctctcttttatctgttgaatttggagggttgtacagttgttggagcagagagagttcgtgtttttaggtagagaagtatacagatgggatttcttgctgttgctatgatatgaaccatataaccatgtgtgagctccgcacttaaatttgtgtagatgccatggttgtctttttgttctttgc

SEQ ID NO: 15772 - DNA, 1802 bp, Zea Mays
cgaaacggaagggcccggacagttttgcgcacaagccccccattcccattctaccaccgacccgtcccgtcccactgcctgccagcgtctcccccgctccctctcctcgagagatctcgcgctccggcgatcgggcgcggcgggcggagggtcgcgaagtgccctgcccacccccgatgctcttcccgaagcgcatcaactacgtggccccgatgctcgcctccgccgccatcctgctcctcctcctctcgggctacttcgagctcccctccatctccaccccggcgccgctcctcgcgggcgcagcgcgcttccccaccgcgctcgactccgtcggatcgcgcgaccgcgaccccttcacctcgctcctcgaggccttcgccgtccgtcagcggcggcgccgcgtggcgcggagccgcgaggtgcgaggacctggcagcgcgccacgtcggggtgctcgtcaagggctggacctggatccctgacgcgctcgacggcgtctacacctgccgctgcggggttagctgcgtctggagcaagtctgccgccgccgtcgaccgtcccgacgcgctgctctttgagggcgccacgcctccgccgcagattttggggtacctcaagagagatcgaattggctatgaattctgatccttgctcagtaatgcttgtgtggtggaacaagagaactgagaatgaaaggtttgcctcttcgtgtttacctggatctggaggccagtaggaagccaactggttttgaggacatttttgtcggttaccatgccagtgatgatgtgcaagtaacatatgctggaaaatcatttcacaccagccgaagttaccatatatcaactgaaaagagaaacgatgcacttatctactggtcatcttcaaggtgtcttcctcatagagataagctcgcaaaagacttcctctcgctggttcctcaccattccttcggaagatgtttgaacaatgtcggcggtcctgacatggcgctatccatgtatccagtctgctccaccaacgataacggcacgccacactggtgggatcacctacactgtgcgatgtcacattacaagttcgttcttgcaatcgagaacaccaagaccgaaagctacgtgaccgagaagctgttctacgctttggaggctgggtcggtgccgatatactttggggcgcccaatgtctgggatttcgtccctcctaattctatcatagacgcctccaaattcagttcactcagaaagctggcatcgtatgtgaagacgctggcaaatgaccccgtagcctacgctgaataccacgcgtggaggcgttgtggtgcgttgggtaacttcggcagggcacgcgagatgagccttgacacgctgccttgccgactctgcgaggtggttagcaagagaggtggtaagggtgcagatgcattgtgagatggatcggtgttttgtatggcttgtataccttgatccggacatgtgaaatagatgtaaatggtacgtcgaacgaagtgctcatgctattccgttcaggaaaaaagtgtctagtgtgttattcatgtcaagatcaagcacacattgtcgaaagaaatagtgcagctattcttttttttacaccatctctcttttatctgttgaatttggagggttgtacagttgttggagcagagagagttcgtgtttttaggtagagaagtatacagatgggatttcttgctgttgctatgatatgaaccatataaccatgtgtgagctccgcacttaaatttgtgtagatgccatggttgtctttttgttctttgc

SEQ ID NO: 15773 - DNA, 1594 bp, Zea Mays
gacgacacaagtcagtgggtaaacaacaacgcacgcatccgcccgccgaagacgaaacggaagggcccggacagttttgcgcacaagccccccattcccattctaccaccgacccgtcccgtcccactgcctgccagcgtctcccccgctccctctcctcgagagatctcgcgctccggcgatcgggcgcggcgggcggagggtcgcgaagtgccctgcccacccccgatgctcttcccgaagcgcatcaactacgtggccccgatgctcgcctccgccgccatcctgctcctcctcctctcgggctacttcgagctcccctccatctccaccccggcgccgctcctcgcgggcgcagcgcgcttccccaccgcgctcgactccgtcggatcgcgcgaccgcgaccccttcacctcgctcctcgaggccttcgccgtccgtcagcggcggcgccgcgtggcgcggagccgcgaggtgcgaggacctggcagcgcgccacgtcggggtgctcgtcaagggctggacctggatccctgacgcgctcgacggcgtctacacctgccgctgcggggttagctgcgtctggagcaagtctgccgccgccgtcgaccgtcccgacgcgctgctctttgagggcgccacgcctccgccgcaggatgcacttatctactggtcatcttcaaggtgtcttcctcatagagataagctcgcaaaagacttcctctcgctggttcctcaccattccttcggaagatgtttgaacaatgtcggcggtcctgacatggcgctatccatgtatccagtctgctccaccaacgataacggcacgccacactggtgggatcacctacactgtgcgatgtcacattacaagttcgttcttgcaatcgagaacaccaagaccgaaagctacgtgaccgagaagctgttctacgctttggaggctgggtcggtgccgatatactttggggcgcccaatgtctgggatttcgtccctcctaattctatcatagacgcctccaaattcagttcactcagaaagctggcatcgtatgtgaagacgctggcaaatgaccccgtagcctacgctgaataccacgcgtggaggcgttgtggtgcgttgggtaacttcggcagggcacgcgagatgagccttgacacgctgccttgccgactctgcgaggtggttagcaagagaggtggtaagggtgcagatgcattgtgagatggatcggtgttttgtatggcttgtataccttgatccggacatgtgaaatagatgtaaatggtacgtcgaacgaagtgctcatgctattccgttcaggaaaaaagtgtctagtgtgttattcatgtcaagatcaagcacacattgtcgaaagaaatagtgcagctattcttttttttacaccatctctcttttatctgttgaatttggagggttgtacagttgttggagcagagagagttcgtgtttttaggtagagaagtatacagatgggatttcttgctgttgctatgatatgaaccatataaccatgtgtgagctccgcacttaaatttgtgtagatgccatggttgtctttttgttctttgc

SEQ ID NO: 15774 - DNA, 1780 bp, Zea Mays
cgatacgatatcgacgacacaagtcagtgggtaaacaacaacgcacgcatccgcccgccgaagacgaaacggaagggcccggacagttttgcgcacaagccccccattcccattctaccaccgacccgtcccgtcccactgcctgccagcgtctcccccgctccctctcctcgagagatctcgcgctccggcgatcgggcgcggcgggcggagggtcgcgaagtgccctgcccacccccgatgctcttcccgaagcgcatcaactacgtggccccgatgctcgcctccgccgccatcctgctcctcctcctctcgggctacttcgagctcccctccatctccaccccggcgccgctcctcgcgggcgcagcgcgcttccccaccgcgctcgactccgtcggatcgcgcgaccgcgaccccttcacctcgctcctcgaggccttcgccgtccgtcagcggcggcgccgcgtggcgcggagccgcgaggtgcgaggacctggcagcgcgccacgtcggggtgctcgtcaagggctggacctggatccctgacgcgctcgacggcgtctacacctgccgctgcggggttagctgcgtctggagcaagtctgccgccgccgtcgaccgtcccgacgcgctgctctttgagggcgccacgcctccgccgcagagaatgaaaggtttgcctcttcgtgtttacctggatctggaggccagtaggaagccaactggttttgaggacatttttgtcggttaccatgccagtgatgatgtgcaagtaacatatgctggaaaatcatttcacaccagccgaagttaccatatatcaactgaaaagagaaacgatgcacttatctactggtcatcttcaaggtgtcttcctcatagagataagctcgcaaaagacttcctctcgctggttcctcaccattccttcggaagatgtttgaacaatgtcggcggtcctgacatggcgctatccatgtatccagtctgctccaccaacgataacggcacgccacactggtgggatcacctacactgtgcgatgtcacattacaagttcgttcttgcaatcgagaacaccaagaccgaaagctacgtgaccgagaagctgttctacgctttggaggctgggtcggtgccgatatactttggggcgcccaatgtctgggatttcgtccctcctaattctatcatagacgcctccaaattcagttcactcagaaagctggcatcgtatgtgaagacgctggcaaatgaccccgtagcctacgctgaataccacgcgtggaggcgttgtggtgcgttgggtaacttcggcagggcacgcgagatgagccttgacacgctgccttgccgactctgcgaggtggttagcaagagaggtggtaagggtgcagatgcattgtgagatggatcggtgttttgtatggcttgtataccttgatccggacatgtgaaatagatgtaaatggtacgtcgaacgaagtgctcatgctattccgttcaggaaaaaagtgtctagtgtgttattcatgtcaagatcaagcacacattgtcgaaagaaatagtgcagctattcttttttttacaccatctctcttttatctgttgaatttggagggttgtacagttgttggagcagagagagttcgtgtttttaggtagagaagtatacagatgggatttcttgctgttgctatgatatgaaccatataaccatgtgtgagctccgcacttaaatttgtgtagatgccatggttgtctttttgttctttgc

SEQ ID NO: 15775 - DNA, 1499 bp, Zea Mays
cacataaccgttgccatctccacgtgatgcctattaccgtgccaatggtagcatcacacggtcataggcatcgtctagtctctgacatggccatgtgacgaccatgtccatggtaagcgggcgacgagcatcagcagggcagcagcctccgaggatggatcaggagcgagccaataatctacgcaattattcacaggccaccgagtaaacaatagtaggacacccgtgtgactgattggttcttggattggggagctccgcctccctctcctcaagtttgaccaaccctcacccacctccctccgtcgtctagtatgcttcttgcctcccgcctgcttcctccgccgccctcctccgccgcggccggttcctcctcatcctctctgagaatgaaaggtttgcctcttcgtgtttacctggatctggaggccagtaggaagccaactggttttgaggacatttttgtcggttaccatgccagtgatgatgtgcaagtaacatatgctggaaaatcatttcacaccagccgaagttaccatatatcaactgaaaagagaaacgatgcacttatctactggtcatcttcaaggtgtcttcctcatagagataagctcgcaaaagacttcctctcgctggttcctcaccattccttcggaagatgtttgaacaatgtcggcggtcctgacatggcgctatccatgtatccagtctgctccaccaacgataacggcacgccacactggtgggatcacctacactgtgcgatgtcacattacaagttcgttcttgcaatcgagaacaccaagaccgaaagctacgtgaccgagaagctgttctacgctttggaggctgggtcggtgccgatatactttggggcgcccaatgtctgggatttcgtccctcctaattctatcatagacgcctccaaattcagttcactcagaaagctggcatcgtatgtgaagacgctggcaaatgaccccgtagcctacgctgaataccacgcgtggaggcgttgtggtgcgttgggtaacttcggcagggcacgcgagatgagccttgacacgctgccttgccgactctgcgaggtggttagcaagagaggtggtaagggtgcagatgcattgtgagatggatcggtgttttgtatggcttgtataccttgatccggacatgtgaaatagatgtaaatggtacgtcgaacgaagtgctcatgctattccgttcaggaaaaaagtgtctagtgtgttattcatgtcaagatcaagcacacattgtcgaaagaaatagtgcagctattcttttttttacaccatctctcttttatctgttgaatttggagggttgtacagttgttggagcagagagagttcgtgtttttaggtagagaagtatacagatgggatttcttgctgttgctatgatatgaaccatataaccatgtgtgagctccgcacttaaatttgtgtagatgccatggttgtctttttgttctttgc

SEQ ID NO: 15776 - DNA, 446 bp, Zea Mays
cagcacacgttgttgctgcaataacaaaacagggaggggggggcagagcagggtcagcagcgtacccattttcctatcagtggacctccggacttgacctgcatgactcccataatcgatttcccgtcgagtatcggcttcagcttccacaccccgtcaagatctggagcagagaaccagtaaaaccagaaaagttgaccaagcgtatgaatgaacaaagtaaatctcggcgcttgcagctcgtcctgctcgtcgagggtgccagcaggagttccagtttctcggtagaagagaatggatagaagcagcgccacccgccaaaactcctttatttctcggagtataagccctgaaatgttatacaatgaaagaatcagatgcgtatcatgacattgaataatcaaatgaataaacactgaatgatagagaccggtgctgaaggcttg

SEQ ID NO: 15777 - DNA, 1842 bp, Zea Mays
cttagagcagtatggctcgatgtgtgagtgctggtaaatagtacaaaactgaagagccagttaagctttgggtgaataaagttggcccttacaataatcctcaagaaacctacaactattacagccttccattttgtcaaccgtctgagaaccccacacataaatggggtggtcttggagaggtccttggtggaaatgagctgattgatagtcagcttgaaataaagttcttaaaaaacgtggagaagggcttcatttgtacacttgagcttgatgctaaaaaggtccagcagtttgctgatgccattgaaagctcatattggttcgaattttttatagatgatctgcctctttggggttttgttggggagtctgacaagaacagtgaaaacaagcattacctttacacacacaagaacatccttgttaaatacaatgataacaggataattcatgtaaatctcacccaagagtctcctaagcttcttgaagatggcaagaaactggaaatgacatattcagtgaagtgggtagcaacagatgtgtcatttgcacgccgttttgaagtgtacctggactatcctttctttgaacaccagattcactggttctccattttcaactctttcatgatggttattttcctaactggtttggtttcgatgatattgatgcggactttgagaaatgattatgccaagtatgctcgtgaagatgatgatctagagtccctggagagagatgttaatgaggaatcaggatggaagcttgtccatggcgaggggctatcatcacaaccttcattgtgtgctatgctcttacatcgtttatttctggatatgttagtggtggtctttactcaaggagcggtggcaaaaactggattaaagcgatggttcttacagcatccctctttccgttcttgtgtttttcaattggtttcgcactgaatacaattgctattttctaccgctcattagcagcaataccatttggcacaatggttgtcatgtttgtactttgggctttcatatcttttccgttggtgcttttgggaactgttgttggtagaaactggagtggtgctcctaacaacccctgccgagtaaagactattccacggcctattcctgagaagaagtggtaccttacaccttctgtcatctcattgatgggtggcctgcttccctttggcagtatcttcattgagatgtacttcgtgttcacatcattctggaactataaggtgtattatgtctatggtttcatgttgctggtcttcgtcatccttctaatagtcaccatctgcgtcaccattgtgggtacttatttcttgctgaacgccgagaactatcactggcaatggacgtcgttttcctctgcagcgtcaaccgctttgtatgtgtatctgtactccatctactactaccatgtgaagacaaagatgtcaggcttcttccagacaagtttctactttggttacacactgatgttctgccttggtctaggcatactttgtggttttgtggaagtcagtggaaccattggaatgctttgactcaagttggagaggaaagaaggctctaggagatggctggggctaaggctgtctacagcaacgtctactaaattttgtcccctaaaagaatattctctgtactttacaaaacactctaaaagattctgtactctatatcatctcagtctccaacaacgttccttaaattcggttctctaaagctacagagttaaccgactttattttgtccatttatttggtttatatttcatttcttttcattacacgctaattgaaataaaacatgcaagacaatagttttt

SEQ ID NO: 15778 - DNA, 2070 bp, Zea Mays
ctcctcgctcgtggttgttctaatgtgatgttcaattgggactgatgcgatgagagacttcccagtgttcggcagtcgaggacgcgttcagagcaggggtacggcttagagcagtatggctcgatgtgtgagtgctggtaaatagtacaaaactgaagagccagttaagctttgggtgaataaagttggcccttacaataatcctcaagaaacctacaactattacagccttccattttgtcaaccgtctgagaaccccacacataaatggggtggtcttggagaggtccttggtggaaatgagctgattgatagtcagcttgaaataaagttcttaaaaaacgtggagaagggcttcatttgtacacttgagcttgatgctaaaaaggtccagcagtttgctgatgccattgaaagctcatattggttcgaattttttatagatgatctgcctctttggggttttgttggggagtctgacaagaacagtgaaaacaagcattacctttacacacacaagaacatccttgttaaatacaatgataacaggataattcatgtaaatctcacccaagagtctcctaagcttcttgaagatggcaagaaactggaaatgacatattcagtgaagtgggtagcaacagatgtgtcatttgcacgccgttttgaagtgtacctggactatcctttctttgaacaccagattcactggttctccattttcaactctttcatgatggttattttcctaactggtttggtttcgatgatattgatgcggactttgagaaatgattatgccaagtatgctcgtgaagatgatgatctagagtccctggagagagatgttaatgaggaatcaggatggaagcttgtccatggtgacgtatttcggcctccccgaagtttgatgtttctttctgcacttgttggtatcggcacccaattggcagctcttatcctacttgtgattgttttggccattgttggcatgctatacattgggcgaggggctatcatcacaaccttcattgtgtgctatgctcttacatcgtttatttctggatatgttagtggtggtctttactcaaggagcggtggcaaaaactggattaaagcgatggttcttacagcatccctctttccgttcttgtgtttttcaattggtttcgcactgaatacaattgctattttctaccgctcattagcagcaataccatttggcacaatggttgtcatgtttgtactttgggctttcatatcttttccgttggtgcttttgggaactgttgttggtagaaactggagtggtgctcctaacaacccctgccgagtaaagactattccacggcctattcctgagaagaagtggtaccttacaccttctgtcatctcattgatgggtggcctgcttccctttggcagtatcttcattgagatgtacttcgtgttcacatcattctggaactataaggtgtattatgtctatggtttcatgttgctggtcttcgtcatccttctaatagtcaccatctgcgtcaccattgtgggtacttatttcttgctgaacgccgagaactatcactggcaatggacgtcgttttcctctgcagcgtcaaccgctttgtatgtgtatctgtactccatctactactaccatgtgaagacaaagatgtcaggcttcttccagacaagtttctactttggttacacactgatgttctgccttggtctaggcatactttgtggttttgtggaagtcagtggaaccattggaatgctttgactcaagttggagaggaaagaaggctctaggagatggctggggctaaggctgtctacagcaacgtctactaaattttgtcccctaaaagaatattctctgtactttacaaaacactctaaaagattctgtactctatatcatctcagtctccaacaacgttccttaaattcggttctctaaagctacagagttaaccgactttattttgtccatttatttggtttatatttcatttcttttcattacacgctaattgaaataaaacatgcaagacaatagttttt

SEQ ID NO: 15779 - DNA, 2162 bp, Zea Mays
aggagccagctgctggctcgtgagtgtcggcgtgtcgggccacaacccgaacgctgaaccaaggctcgggaccgcgacactcgtgtgtccttctcctcagatctcgccggcggcggcatgctcccctcgtccggcagcggctggggccgcggccgcggccgccacctattgctcagcagggccctagctctcgctgcactgctcgcgctcgcctccgcctccgagtccgaccacaagtacaaaactgaagagccagttaagctttgggtgaataaagttggcccttacaataatcctcaagaaacctacaactattacagccttccattttgtcaaccgtctgagaaccccacacataaatggggtggtcttggagaggtccttggtggaaatgagctgattgatagtcagcttgaaataaagttcttaaaaaacgtggagaagggcttcatttgtacacttgagcttgatgctaaaaaggtccagcagtttgctgatgccattgaaagctcatattggttcgaattttttatagatgatctgcctctttggggttttgttggggagtctgacaagaacagtgaaaacaagcattacctttacacacacaagaacatccttgttaaatacaatgataacaggataattcatgtaaatctcacccaagagtctcctaagcttcttgaagatggcaagaaactggaaatgacatattcagtgaagtgggtagcaacagatgtgtcatttgcacgccgttttgaagtgtacctggactatcctttctttgaacaccagattcactggttctccattttcaactctttcatgatggttattttcctaactggtttggtttcgatgatattgatgcggactttgagaaatgattatgccaagtatgctcgtgaagatgatgatctagagtccctggagagagatgttaatgaggaatcaggatggaagcttgtccatggtgacgtatttcggcctccccgaagtttgatgtttctttctgcacttgttggtatcggcacccaattggcagctcttatcctacttgtgattgttttggccattgttggcatgctatacattgggcgaggggctatcatcacaaccttcattgtgtgctatgctcttacatcgtttatttctggatatgttagtggtggtctttactcaaggagcggtggcaaaaactggattaaagcgatggttcttacagcatccctctttccgttcttgtgtttttcaattggtttcgcactgaatacaattgctattttctaccgctcattagcagcaataccatttggcacaatggttgtcatgtttgtactttgggctttcatatcttttccgttggtgcttttgggaactgttgttggtagaaactggagtggtgctcctaacaacccctgccgagtaaagactattccacggcctattcctgagaagaagtggtaccttacaccttctgtcatctcattgatgggtggcctgcttccctttggcagtatcttcattgagatgtacttcgtgttcacatcattctggaactataaggtgtattatgtctatggtttcatgttgctggtcttcgtcatccttctaatagtcaccatctgcgtcaccattgtgggtacttatttcttgctgaacgccgagaactatcactggcaatggacgtcgttttcctctgcagcgtcaaccgctttgtatgtgtatctgtactccatctactactaccatgtgaagacaaagatgtcaggcttcttccagacaagtttctactttggttacacactgatgttctgccttggtctaggcatactttgtggttttgtggaagtcagtggaaccattggaatgctttgactcaagttggagaggaaagaaggctctaggagatggctggggctaaggctgtctacagcaacgtctactaaattttgtcccctaaaagaatattctctgtactttacaaaacactctaaaagattctgtactctatatcatctcagtctccaacaacgttccttaaattcggttctctaaagctacagagttaaccgactttattttgtccatttatttggtttatatttcatttcttttcattacacgctaattgaaataaaacatgcaagacaatagttttt

SEQ ID NO: 15780 - DNA, 2324 bp, Zea Mays
aggagccagctgctggctcgtgagtgtcggcgtgtcgggccacaacccgaacgctgaaccaaggctcgggaccgcgacactcgtgtgtccttctcctcagatctcgccggcggcggcatgctcccctcgtccggcagcggctggggccgcggccgcggccgccacctattgctcagcagggccctagctctcgctgcactgctcgcgctcgcctccgcctccgagtccgaccacaagtacaaaactgaagagccagttaagctttgggtgaataaagttggcccttacaataatcctcaagaaacctacaactattacagccttccattttgtcaaccgtctgagaaccccacacataaatggggtggtcttggagaggtccttggtggaaatgagctgattgatagtcagcttgaaataaagttcttaaaaaacgtggagaagggcttcatttgtacacttgagcttgatgctaaaaaggtccagcagtttgctgatgccattgaaagctcatattggttcgaattttttatagatgatctgcctctttggggttttgttggggagtctgacaagaacagtgaaaacaagcattacctttacacacacaagaacatccttgttaaatacaatgataacaggataattcatgtaaatctcacccaagagtctcctaagcttcttgaagatggcaagaaactggaaatgacatattcagtgaagtgggtagcaacagatgtgtcatttgcacgccgttttgaagtgtacctggactatcctttctttgaacaccagattcactggttctccattttcaactctttcatgatggttattttcctaactggtttggtttcgatgatattgatgcggactttgagaaatgattatgccaagtatgctcgtgaagatgatgatctagagtccctggagagagatgttaatgaggaatcaggatggaagcttgtccatggtgacgtatttcggcctccccgaagtttgatgtttctttctgcacttgttggtatcggcacccaattggcagctcttatcctacttgtgattgttttggccattgttggcatgctatacattgggcgaggggctatcatcacaaccttcattgtgtgctatgctcttacatcgtttatttctggatatgttagtggtggtctttactcaaggagcggtggcaaaaactggattaaagcgatggttcttacagcatccctctttccgttcttgtgtttttcaattggtttcgcactgaatacaattgctattttctaccgctcattagcagcaataccatttggcacaatggttgtcatgtttgtactttgggctttcatatcttttccgttggtgcttttgggaactgttgttggtagaaactggagtggtgctcctaacaacccctgccgagtaaagactattccacggcctattcctgagaagaagtggtaccttacaccttctgtcatctcattgatgggtggcctgcttccctttggcagtatcttcattgagatgtacttcgtgttcacatcattctggaactataaggtgtattatgtctatggtttcatgttgctggtcttcgtcatccttctaatagtcaccatctgcgtcaccattgtgggtacttatttcttgctgaacgccgagaactatcactggcaatggacgtcgttttcctctgcagcgtcaaccgctttgtatgtgtatctgtactccatctactactaccatgtgaagacaaagatgtcaggcttcttccagacaagtttctactttggttacacactgatgttctgccttggtctaggcatactttgtggtgctattgggtatctagggtcaaccctttttgtaaggagaatctacagaaatatcaaatgtgattaaatccctgctacttactagcagcagaaagaccatatgtattgtcagtggaagcaaggcctgaaaaaaatggattttgatggtagaccctgaataggttttgtggaagtcagtggaaccattggaatgctttgactcaagttggagaggaaagaaggctctaggagatggctggggctaaggctgtctacagcaacgtctactaaattttgtcccctaaaagaatattctctgtactttacaaaacactctaaaagattctgtactctatatcatctcagtctccaacaacgttccttaaattcggttctctaaagctacagagttaaccgactttattttgtccatttatttggtttatatttcatttcttttcattacacgctaattgaaataaaacatgcaagacaatagttttt

SEQ ID NO: 15781 - DNA, 2309 bp, Zea Mays
aggagccagctgctggctcgtgagtgtcggcgtgtcgggccacaacccgaacgctgaaccaaggctcgggaccgcgacactcgtgtgtccttctcctcagatctcgccggcggcggcatgctcccctcgtccggcagcggctggggccgcggccgcggccgccacctattgctcagcagggccctagctctcgctgcactgctcgcgctcgcctccgcctccgagtccgaccacaagtacaaaactgaagagccagttaagctttgggtgaataaagttggcccttacaataatcctcaagaaacctacaactattacagccttccattttgtcaaccgtctgagaaccccacacataaatggggtggtcttggagaggtccttggtggaaatgagctgattgatagtcagcttgaaataaagttcttaaaaaacgtggagaagggcttcatttgtacacttgagcttgatgctaaaaaggtccagcagtttgctgatgccattgaaagctcatattggttcgaattttttatagatgatctgcctctttggggttttgttggggagtctgacaagaacagtgaaaacaagcattacctttacacacacaagaacatccttgttaaatacaatgataacaggataattcatgtaaatctcacccaagagtctcctaagcttcttgaagatggcaagaaactggaaatgacatattcagtgaagtgggtagcaacagatgtgtcatttgcacgccgttttgaagtgtacctggactatcctttctttgaacaccagattcactggttctccattttcaactctttcatgatggttattttcctaactggtttggtttcgatgatattgatgcggactttgagaaatgattatgccaagtatgctcgtgaagatgatgatctagagtccctggagagagatgttaatgaggaatcaggatggaagcttgtccatggtgacgtatttcggcctccccgaagtttgatgtttctttctgcacttgttggtatcggcacccaattggcagctcttatcctacttgtgattgttttggccattgttggcatgctatacattgggcgaggggctatcatcacaaccttcattgtgtgctatgctcttacatcgtttatttctggatatgttagtggtggtctttactcaaggagcggtggcaaaaactggattaaagcgatggttcttacagcatccctctttccgttcttgtgtttttcaattggtttcgcactgaatacaattgctattttctaccgctcattagcagcaataccatttggcacaatggttgtcatgtttgtactttgggctttcatatcttttccgttggtgcttttgggaactgttgttggtagaaactggagtggtgctcctaacaacccctgccgagtaaagactattccacggcctattcctgagaagaagtggtaccttacaccttctgtcatctcattgatgggtggcctgcttccctttggcagtatcttcattgagatgtacttcgtgttcacatcattctggaactataaggtgtattatgtctatggtttcatgttgctggtcttcgtcatccttctaatagtcaccatctgcgtcaccattgtgggtacttatttcttgctgaacgccgagaactatcactggcaatggacgtcgttttcctctgcagcgtcaaccgctttgtatgtgtatctgtactccatctactactaccatgtgaagacaaagatgtcaggcttcttccagacaagtttctactttggttacacactgatgttctgccttggtctaggcatactttgtggtgctattgggtatctagggtcaaccctttttgtaaggagaatctacagaaatatcaaatgtgattaaatccctgctacttactagcagcagaaagaccatatgtattgtcagtggaagcaaggcctgaaaaaaatggattttgatggttttgtggaagtcagtggaaccattggaatgctttgactcaagttggagaggaaagaaggctctaggagatggctggggctaaggctgtctacagcaacgtctactaaattttgtcccctaaaagaatattctctgtactttacaaaacactctaaaagattctgtactctatatcatctcagtctccaacaacgttccttaaattcggttctctaaagctacagagttaaccgactttattttgtccatttatttggtttatatttcatttcttttcattacacgctaattgaaataaaacatgcaagacaatagttttt

SEQ ID NO: 15782 - DNA, 2728 bp, Zea Mays
aggagccagctgctggctcgtgagtgtcggcgtgtcgggccacaacccgaacgctgaaccaaggctcgggaccgcgacactcgtgtgtccttctcctcagatctcgccggcggcggcatgctcccctcgtccggcagcggctggggccgcggccgcggccgccacctattgctcagcagggccctagctctcgctgcactgctcgcgctcgcctccgcctccgagtccgaccacaagtacaaaactgaagagccagttaagctttgggtgaataaagttggcccttacaataatcctcaagaaacctacaactattacagccttccattttgtcaaccgtctgagaaccccacacataaatggggtggtcttggagaggtccttggtggaaatgagctgattgatagtcagcttgaaataaagttcttaaaaaacgtggagaagggcttcatttgtacacttgagcttgatgctaaaaaggtccagcagtttgctgatgccattgaaagctcatattggttcgaattttttatagatgatctgcctctttggggttttgttggggagtctgacaagaacagtgaaaacaagcattacctttacacacacaagaacatccttgttaaatacaatgataacaggataattcatgtaaatctcacccaagagtctcctaagcttcttgaagatggcaagaaactggaaatgacatattcagtgaagtgggtagcaacagatgtgtcatttgcacgccgttttgaagtgtacctggactatcctttctttgaacaccagattcactggttctccattttcaactctttcatgatggttattttcctaactggtttggtttcgatgatattgatgcggactttgagaaatgattatgccaagtatgctcgtgaagatgatgatctagagtccctggagagagatgttaatgaggaatcaggatggaagcttgtccatggtgacgtatttcggcctccccgaagtttgatgtttctttctgcacttgttggtatcggcacccaattggcagctcttatcctacttgtgattgttttggccattgttggcatgctatacattgggcgaggggctatcatcacaaccttcattgtgtgctatgctcttacatcgtttatttctggatatgttagtggtggtctttactcaaggagcggtggcaaaaactggattaaagcgatggttcttacagcatccctctttccgttcttgtgtttttcaattggtttcgcactgaatacaattgctattttctaccgctcattagcagcaataccatttggcacaatggttgtcatgtttgtactttgggctttcatatcttttccgttggtgcttttgggaactgttgttggtagaaactggagtggtgctcctaacaacccctgccgagtaaagactattccacggcctattcctgagaagaagtggtaccttacaccttctgtcatctcattgatgggtggcctgcttccctttggcagtatcttcattgagatgtacttcgtgttcacatcattctggaactataaggtgtattatgtctatggtttcatgttgctggtcttcgtcatccttctaatagtcaccatctgcgtcaccattgtgggtacttatttcttgctgaacgccgagaactatcactggcaatggacgtcgttttcctctgcagcgtcaaccgctttgtatgtgtatctgtactccatctactactaccatgtgaagacaaagatgtcaggcttcttccagacaagtttctactttggttacacactgatgttctgccttggtctaggcatactttgtggtgctattgggtatctagggtcaaccctttttgtaaggagaatctacagaaatatcaaatgtgattaaatccctgctacttactagcagcagaaagaccatatgtattgtcagtggaagcaaggcctgaaaaaaatggattttgatggtagaccctgaataggtttttgaaactgctgatgacttgaccccgttgttcttatacgcacatttttgtttgcctgcttattcctgtgagatcgtcctcatagtgtatatctgtggtagttgaggattagcctgaaacacctgttttcatcattttttcttcattttaattacttcattcgttaggatgtaatcagtgaatattgatgcggcgcgagtcgaattaggactgttcggacaaatcactgcctatacgagtattgaggggtcacgattataacaccgaagctatgacgagcggccgcccgagcagaatgacaggataaggagaattgtataggatgtctctcgtgatgttaacgaaatattggttttggcatgtctgtcgtggctttgtcgatcttacttcgctctctatgagttttgtggaagtcagtggaaccattggaatgctttgactcaagttggagaggaaagaaggctctaggagatggctggggctaaggctgtctacagcaacgtctactaaattttgtcccctaaaagaatattctctgtactttacaaaacactctaaaagattctgtactctatatcatctcagtctccaacaacgttccttaaattcggttctctaaagctacagagttaaccgactttattttgtccatttatttggtttatatttcatttcttttcattacacgctaattgaaataaaacatgcaagacaatagttttt

SEQ ID NO: 15783 - DNA, 2292 bp, Zea Mays
aggagccagctgctggctcgtgagtgtcggcgtgtcgggccacaacccgaacgctgaaccaaggctcgggaccgcgacactcgtgtgtccttctcctcagatctcgccggcggcggcatgctcccctcgtccggcagcggctggggccgcggccgcggccgccacctattgctcagcagggccctagctctcgctgcactgctcgcgctcgcctccgcctccgagtccgaccacaagtacaaaactgaagagccagttaagctttgggtgaataaagttggcccttacaataatcctcaagaaacctacaactattacagccttccattttgtcaaccgtctgagaaccccacacataaatggggtggtcttggagaggtccttggtggaaatgagctgattgatagtcagcttgaaataaagttcttaaaaaacgtggagaagggcttcatttgtacacttgagcttgatgctaaaaaggtccagcagtttgctgatgccattgaaagctcatattggttcgaattttttatagatgatctgcctctttggggttttgttggggagtctgacaagaacagtgaaaacaagcattacctttacacacacaagaacatccttgttaaatacaatgataacaggataattcatgtaaatctcacccaagagtctcctaagcttcttgaagatggcaagaaactggaaatgacatattcagtgaagtgggtagcaacagatgtgtcatttgcacgccgttttgaagtgtacctggactatcctttctttgaacaccagattcactggttctccattttcaactctttcatgatggttattttcctaactggtttggtttcgatgatattgatgcggactttgagaaatgattatgccaagtatgctcgtgaagatgatgatctagagtccctggagagagatgttaatgaggaatcaggatggaagcttgtccatggtgacgtatttcggcctccccgaagtttgatgtttctttctgcacttgcgaggggctatcatcacaaccttcattgtgtgctatgctcttacatcgtttatttctggatatgttagtggtggtctttactcaaggagcggtggcaaaaactggattaaagcgatggttcttacagcatccctctttccgttcttgtgtttttcaattggtttcgcactgaatacaattgctattttctaccgctcattagcagcaataccatttggcacaatggttgtcatgtttgtactttgggctttcatatcttttccgttggtgcttttgggaactgttgttggtagaaactggagtggtgctcctaacaacccctgccgagtaaagactattccacggcctattcctgagaagaagtggtaccttacaccttctgtcatctcattgatgggtggcctgcttccctttggcagtatcttcattgagatgtacttcgtgttcacatcattctggaactataaggtgtattatgtctatggtttcatgttgctggtcttcgtcatccttctaatagtcaccatctgcgtcaccattgtgggtacttatttcttgctgaacgccgagaactatcactggcaatggacgtcgttttcctctgcagcgtcaaccgctttgtatgtgtatctgtactccatctactactaccatgtgaagacaaagatgtcaggcttcttccagacaagtttctactttggttacacactgatgttctgccttggtctaggcatactttgtggtgctattgggtatctagggtcaaccctttttgtaaggagaatctacagaaatatcaaatgtgattaaatccctgctacttactagcagcagaaagaccatatgtattgtcagtggaagcaaggcctgaaaaaaatggattttgatggtagaccctgaataggtttttgaaactgctgatgacttgaccccgttgttcttatacgcacatttttgtttgcctgcttattcctgtgagatcgtcctcatagtgtatatctgtggtagttgaggattagcctgaaacacctgttttcatcattttttcttcattttaattacttcattcgttaggatgtaatcagtgaatattgatgcggcgcgagtcgaattaggactgttcggacaaatcactgcctatacgagtattgaggggtcacgattataacaccgaagctatgacgagcggccgcccgagcagaatgacaggataaggagaattgtataggatgtctctcgtgatgttaacgaaatattggttttggcatgtc

SEQ ID NO: 15784 - DNA, 934 bp, Zea Mays
gtttatttttgttacgccttgcatatttggtggtacacgggggcacggggcagatctcttgggtcatcctctacgcgagcgggccgcttctcccatccagccgcgcacggcgtcgccggaaccggagaagggagggaggaagggagcgcgagatggacaaggccaataagctcagcgccggagcgggggagaaggcgaccaagagcaggagccacgggtccacggcgctgttcgtcgcggtggactacgcgttcctgctcgccttcgccggcttcctcgcctacctcgtcgggtcgcggatcctcccctccgccgccggctccgcctagaccggcccgcgttcgtggatctctcttctttcttccacgttttttttggagccgatggctgcgggagcaccgggatcttgccgggtggttctcgtctcggaatcgatctcgatctgatgccgctcccgcgatgtaatctggcgacaatttgacgagaagagaactagcggtgtgtttcttggcaactcgcctgcttgcttcgtatcagaaccgcgacgcgttcgaccgcgctgatcactgggatgttgtccatcaagcgtctctggatgctcatcctcatggtcgtcgccgagctcggacacgacccacacgctccccgcagcttcagcctcaccacgttaccgccgtcgatctcgcgcaaggcgacgtcgcctccgtctgctatcaggagcagtgcgaaacctctgcaagaaagctttgcgactggcaattgcagccggcgatgagggggatacctcaccatgcggacgccggccaatggacgtggcggtggcggcggccaatctcggagcaggactcccacgcgaccacagcgcgacacgcagctccacgccggaacatcacacccaattagcacacccaatctcggagcaggtctcttgttt

SEQ ID NO: 15785 - DNA, 2392 bp, Zea Mays
cgctcctccattccaacgtctccacccactgctcccaatggcgacgccgttcccgctggaggccgacgagggggaggcgcgggagctcctctacgaggcgtacaacgagctgcacgcgctggcgtccgagctgggcggcgcggcggcggcgccggcggtcgtggtcgtcggccaccagacggacggcaagagcgcgctggtcgaggcgctcatggggttccagttcaaccacgtcggcggtggcaccaagacgcggcgccccgtcgcgctccacctccgcttcaacccgcgctgcgacgagccccagtgccgcctcctctctgcaaccggcgatgccgaagagcatgacgaagccggggttgccgcccgccccatgccgctcgccgacatccaggcatatattgaagctgaaaacttgaggttggagaatgacccttgccaattttcagagaaggaaatcataattaaggtagaatacaagcattcccccaatctcaccattattgacactccaggcctcatccttccagctcctggccgtaaaaacagagttttgcagagccaggcttctgctgttgagagccttgttcgtgctaaaatccagcataaagagaccattatactgtgccttgaagattgtagtgattggagtaatgcaactacacggagagtagtgatgcaggtcgatcctgatcttgcaaggactgttctagtctccacaaaactggacacaaaaataccacaatttgcccgtccctctgatgttgaagtgtttcttcacccaccaaattgtgtgctagatgtttccttattgggagattctccctttttcacatcagtaccttctggtagagttggctcttgccatgaagctgtgttcaggtcaaatggagagtttaagaaggccatcttatcaagagagttggaagatattgcatctattgaagacaagttaggaaggtcacttacaaccatggagaaagatagaattggagtgggtaacttaagattatatttggaagagttgctgcagaagaggtacattaagagtgttccattaatcattccacttcttgagaagcaacatcgaaatacaacaagtaaattgcgtgaaatcagtcatgaactcagtgatctggatgaaaccaaactgaaggagaaagctcagctattccatgacacatttttgaccaagttatctttgctattgaaaggcatggtggtggcacctcctgataaatttggagaaactttagtcaacgagaggattaatggaggaacatttactggaagtgagaatttccagctcccgaacaagatgatgccaaatggtggcatgcgtctttatggtggtgcacaataccatcgggcaatggctgaatttcgtctggtagttggtagtaccaggtgccctccaataactagggatgaaattgtcaatgcttgtggtgttgaggatattcatgatggtacaaactactccaggaagcattcaagaggtttgttgaatccactgagcaatcatgtcgtcaaaggtgtatggaagatttggagagtaccactcgttatgtcacttggtcccttcacaacaagaaccgtgctggattgagacatttcctcgattcatttgttgcaccggagcaactatcagtaaatacattgaacgagcggttttctgggttgaatgataacaaacaggataaggcaaagggtgactcgaagtcaaaccattctccagacacaaattcgtccactgctatgccagagacaaggctggttgacctattggatagcacactctggaacagacgcctggttccctcatctgaaaggcttgtttatgcgctggttcaccagatttttcatggaatcaaagagcattttcttgtcaccactgaactgaagttcaattgctttctcctcatgccgattgttgacaaactaccagcacttctaagacaagaccttgagtcagctttcgaagaggaacttgatagcatctttgatgtcactcagctgcgccagtcacttgggcagaagaagcgcgagctggagatcgaactgaagcggatcaagcgcttaaaggaaaagtttggagagataaataagaagctcaattctcttcaggttaggcagtaggccaggctcaaaatttagcagtagcttggtagtctaggactccaggtagagtgtttcaatgctgtaataaaataattggtcatctagagtgacttcttgttgtatcctatcagttgtaaatatgaagtattcctatgtcttaacgtatgttgttgctacacgggttttcggagtcttttttcccttgcatgattcgttacactgcgattccttcaggttgaagtcagccaaataggtccaaagtaacagcaag

SEQ ID NO: 15786 - DNA, 2641 bp, Zea Mays
cgctcctccattccaacgtctccacccactgctcccaatggcgacgccgttcccgctggaggccgacgagggggaggcgcgggagctcctctacgaggcgtacaacgagctgcacgcgctggcgtccgagctgggcggcgcggcggcggcgccggcggtcgtggtcgtcggccaccagacggacggcaagagcgcgctggtcgaggcgctcatggggttccagttcaaccacgtcggcggtggcaccaagacgcggcgccccgtcgcgctccacctccgcttcaacccgcgctgcgacgagccccagtgccgcctcctctctgcaaccggcgatgccgaagagcatgacgaagccggggttgccgcccgccccatgccgctcgccgacatccaggcatatattgaagctgaaaacttgaggttggagaatgacccttgccaattttcagagaaggaaatcataattaaggtagaatacaagcattcccccaatctcaccattattgacactccaggcctcatccttccagctcctggccgtaaaaacagagttttgcagagccaggcttctgctgttgagagccttgttcgtgctaaaatccagcataaagagaccattatactgtgccttgaagattgtagtgattggagtaatgcaactacacggagagtagtgatgcaggtcgatcctgatcttgcaaggactgttctagtctccacaaaactggacacaaaaataccacaatttgcccgtccctctgatgttgaagtgtttcttcacccaccaaattgtgtgctagatgtttccttattgggagattctccctttttcacatcagtaccttctggtagagttggctcttgccatgaagctgtgttcaggtcaaatggagagtttaagaaggatcaagtgacatgtaccctgttcatgtatgctgccttttttaacaacacaatctacaataaagaatgttgaaggccatcttatcaagagagttggaagatattgcatctattgaagacaagttaggaaggtcacttacaaccatggagaaagatagaattggagtgggtaacttaagattatatttggaagagttgctgcagaagaggtacattaagagtgttccattaatcattccacttcttgagaagcaacatcgaaatacaacaagtaaattgcgtgaaatcagtcatgaactcagtgatctggatgaaaccaaactgaaggagaaagctcagctattccatgacacatttttgaccaagttatctttgctattgaaaggcatggtggtggcacctcctgataaatttggagaaactttagtcaacgagaggattaatggaggaacatttactggaagtgagaatttccagctcccgaacaagatgatgccaaatggtggcatgcgtctttatggtggtgcacaataccatcgggcaatggctgaatttcgtctggtagttggtagtaccaggtgccctccaataactagggatgaaattgtcaatgcttgtggtgttgaggatattcatgatggtacaaactactccaggactgcttgtgtaattgccgtggcaaaagcacgtgacacgtttgagccattccttgatcagttgggttttaggcttttgtacatactgaagaggctgatcccaatctctgtttatctgttggagaaagatggtgagcactttagtagccatgaagtgctcataaggcgtgtccaggaagcattcaagaggtttgttgaatccactgagcaatcatgtcgtcaaaggtgtatggaagatttggagagtaccactcgttatgtcacttggtcccttcacaacaagaaccgtgctggattgagacatttcctcgattcatttgttgcaccggagcaactatcagtaaatacattgaacgagcggttttctgggttgaatgataacaaacaggataaggcaaagggtgactcgaagtcaaaccattctccagacacaaattcgtccactgctatgccagagacaaggctggttgacctattggatagcacactctggaacagacgcctggttccctcatctgaaaggcttgtttatgcgctggttcaccagatttttcatggaatcaaagagcattttcttgtcaccactgaactgaagttcaattgctttctcctcatgccgattgttgacaaactaccagcacttctaagacaagaccttgagtcagctttcgaagaggaacttgatagcatctttgatgtcactcagctgcgccagtcacttgggcagaagaagcgcgagctggagatcgaactgaagcggatcaagcgcttaaaggaaaagtttggagagataaataagaagctcaattctcttcaggttaggcagtaggccaggctcaaaatttagcagtagcttggtagtctaggactccaggtagagtgtttcaatgctgtaataaaataattggtcatctagagtgacttcttgttgtatcctatcagttgtaaatatgaagtattcctatgtcttaacgtatgttgttgctacacgggttttcggagtcttttttcccttgcatgattcgttacactgcgattccttcaggttgaagtcagccaaataggtccaaagtaacagcaag

SEQ ID NO: 15787 - DNA, 2533 bp, Zea Mays
cgctcctccattccaacgtctccacccactgctcccaatggcgacgccgttcccgctggaggccgacgagggggaggcgcgggagctcctctacgaggcgtacaacgagctgcacgcgctggcgtccgagctgggcggcgcggcggcggcgccggcggtcgtggtcgtcggccaccagacggacggcaagagcgcgctggtcgaggcgctcatggggttccagttcaaccacgtcggcggtggcaccaagacgcggcgccccgtcgcgctccacctccgcttcaacccgcgctgcgacgagccccagtgccgcctcctctctgcaaccggcgatgccgaagagcatgacgaagccggggttgccgcccgccccatgccgctcgccgacatccaggcatatattgaagctgaaaacttgaggttggagaatgacccttgccaattttcagagaaggaaatcataattaaggtgcatttgattccgcactgaaactgctccaaccttggcaatcttgtgacattcagagccaggcttctgctgttgagagccttgttcgtgctaaaatccagcataaagagaccattatactgtgccttgaagattgtagtgattggagtaatgcaactacacggagagtagtgatgcaggtcgatcctgatcttgcaaggactgttctagtctccacaaaactggacacaaaaataccacaatttgcccgtccctctgatgttgaagtgtttcttcacccaccaaattgtgtgctagatgtttccttattgggagattctccctttttcacatcagtaccttctggtagagttggctcttgccatgaagctgtgttcaggtcaaatggagagtttaagaaggccatcttatcaagagagttggaagatattgcatctattgaagacaagttaggaaggtcacttacaaccatggagaaagatagaattggagtgggtaacttaagattatatttggaagagttgctgcagaagaggtacattaagagtgttccattaatcattccacttcttgagaagcaacatcgaaatacaacaagtaaattgcgtgaaatcagtcatgaactcagtgatctggatgaaaccaaactgaaggagaaagctcagctattccatgacacatttttgaccaagttatctttgctattgaaaggcatggtggtggcacctcctgataaatttggagaaactttagtcaacgagaggattaatggaggaacatttactggaagtgagaatttccagctcccgaacaagatgatgccaaatggtggcatgcgtctttatggtggtgcacaataccatcgggcaatggctgaatttcgtctggtagttggtagtaccaggtgccctccaataactagggatgaaattgtcaatgcttgtggtgttgaggatattcatgatggtacaaactactccaggactgcttgtgtaattgccgtggcaaaagcacgtgacacgtttgagccattccttgatcagttgggttttaggcttttgtacatactgaagaggctgatcccaatctctgtttatctgttggagaaagatggtgagcactttagtagccatgaagtgctcataaggcgtgtccaggaagcattcaagaggtttgttgaatccactgagcaatcatgtcgtcaaaggtgtatggaagatttggagagtaccactcgttatgtcacttggtcccttcacaacaagaaccgtgctggattgagacatttcctcgattcatttgttgcaccggagcaactatcagtaaatacattgaacgagcggttttctgggttgaatgataacaaacaggataaggcaaagggtgactcgaagtcaaaccattctccagacacaaattcgtccactgctatgccagagacaaggctggttgacctattggatagcacactctggaacagacgcctggttccctcatctgaaaggcttgtttatgcgctggttcaccagatttttcatggaatcaaagagcattttcttgtcaccactgaactgaagttcaattgctttctcctcatgccgattgttgacaaactaccagcacttctaagacaagaccttgagtcagctttcgaagaggaacttgatagcatctttgatgtcactcagctgcgccagtcacttgggcagaagaagcgcgagctggagatcgaactgaagcggatcaagcgcttaaaggaaaagtttggagagataaataagaagctcaattctcttcaggttaggcagtaggccaggctcaaaatttagcagtagcttggtagtctaggactccaggtagagtgtttcaatgctgtaataaaataattggtcatctagagtgacttcttgttgtatcctatcagttgtaaatatgaagtattcctatgtcttaacgtatgttgttgctacacgggttttcggagtcttttttcccttgcatgattcgttacactgcgattccttcaggttgaagtcagccaaataggtccaaagtaacagcaag

SEQ ID NO: 15788 - DNA, 2435 bp, Zea Mays
tctcgttcgccagcagaagcagtcaagctgaaagagagggaggaaaaaaaagagataacgcacggccgcccgcagtgcttgaaaccagcccgctcctccattccaacgtctccacccactgctcccaatggcgacgccgttcccgctggaggccgacgagggggaggcgcgggagctcctctacgaggcgtacaacgagctgcacgcgctggcgtccgagctgggcggcgcggcggcggcgccggcggtcgtggtcgtcggccaccagacggacggcaagagcgcgctggtcgaggcgctcatggggttccagttcaaccacgtcggcggtggcaccaagacgcggcgccccgtcgcgctccacctccgcttcaacccgcgctgcgacgagccccagtgccgcctcctctctgcaaccggcgatgccgaagagcatgacgaagccggggttgccgcccgccccatgccgctcgccgacatccaggcatatattgaagctgaaaacttgaggttggagaatgacccttgccaattttcagagaaggaaatcataattaaggtagaatacaagcattcccccaatctcaccattattgacactccaggcctcatccttccagctcctggccgtaaaaacagagttttgcagagccaggcttctgctgttgagagccttgttcgtgctaaaatccagcataaagagaccattatactgtgccttgaagattgtagtgattggagtaatgcaactacacggagagtagtgatgcaggccatcttatcaagagagttggaagatattgcatctattgaagacaagttaggaaggtcacttacaaccatggagaaagatagaattggagtgggtaacttaagattatatttggaagagttgctgcagaagaggtacattaagagtgttccattaatcattccacttcttgagaagcaacatcgaaatacaacaagtaaattgcgtgaaatcagtcatgaactcagtgatctggatgaaaccaaactgaaggagaaagctcagctattccatgacacatttttgaccaagttatctttgctattgaaaggcatggtggtggcacctcctgataaatttggagaaactttagtcaacgagaggattaatggaggaacatttactggaagtgagaatttccagctcccgaacaagatgatgccaaatggtggcatgcgtctttatggtggtgcacaataccatcgggcaatggctgaatttcgtctggtagttggtagtaccaggtgccctccaataactagggatgaaattgtcaatgcttgtggtgttgaggatattcatgatggtacaaactactccaggactgcttgtgtaattgccgtggcaaaagcacgtgacacgtttgagccattccttgatcagttgggttttaggcttttgtacatactgaagaggctgatcccaatctctgtttatctgttggagaaagatggtgagcactttagtagccatgaagtgctcataaggcgtgtccaggaagcattcaagaggtttgttgaatccactgagcaatcatgtcgtcaaaggtgtatggaagatttggagagtaccactcgttatgtcacttggtcccttcacaacaagaaccgtgctggattgagacatttcctcgattcatttgttgcaccggagcaactatcagtaaatacattgaacgagcggttttctgggttgaatgataacaaacaggataaggcaaagggtgactcgaagtcaaaccattctccagacacaaattcgtccactgctatgccagagacaaggctggttgacctattggatagcacactctggaacagacgcctggttccctcatctgaaaggcttgtttatgcgctggttcaccagatttttcatggaatcaaagagcattttcttgtcaccactgaactgaagttcaattgctttctcctcatgccgattgttgacaaactaccagcacttctaagacaagaccttgagtcagctttcgaagaggaacttgatagcatctttgatgtcactcagctgcgccagtcacttgggcagaagaagcgcgagctggagatcgaactgaagcggatcaagcgcttaaaggaaaagtttggagagataaataagaagctcaattctcttcaggttaggcagtaggccaggctcaaaatttagcagtagcttggtagtctaggactccaggtagagtgtttcaatgctgtaataaaataattggtcatctagagtgacttcttgttgtatcctatcagttgtaaatatgaagtattcctatgtcttaacgtatgttgttgctacacgggttttcggagtcttttttcccttgcatgattcgttacactgcgattccttcaggttgaagtcagccaaataggtccaaagtaacagcaag

SEQ ID NO: 15789 - DNA, 1305 bp, Zea Mays
atctgcagttcagtagagttatttctcagccaattgttgctgttcctgcattcctctgtgccgatgcattccagaaggtgcttcccttttgtactggtttcgcagcagggtgcatgatatggattgttatagcggaggttcttcctgacgcttttaaggaagcaactccatctcaagtagcttctgctggaacactcgctgttgctttcatggaaacattaagtacggtgcttctgggatttacagatggcaacaatgtggaagacgcatcaggcttcttagtatcacttgtgtttggactcggtccacttatcggtggaattatactcgtcacattctctcttgggttcagcatgccgcaccctcttctcaccggtgtcgcatccggcatagctttccgtctcgcggcatggagacctgtgcagctcctaatgacctcaaaaatgggtctcttcaccaccctcttcctcctcatcggaggttccctggcctaccacgccgccacatcaagcatcctccggttgttcaatcgcaaaaggtcttccgtgaacgtgatcgcgtcatcctccggcctctctctcagtgccctcacagtgcagtcccttcttgcctgtggcgccgtattccttcacgcatatgctgaagggcttgcgctcggtgtcgcggctcgcaaggcctatggcctcggccgctacatggttctcccagcctccctccacggtcttccacgtggcgctgccgcggcgagctgcgtgtatggtgccacagatagctggcgtggagcccttgccgctgccgctttgacagggctcgcagcgccgagcgccgccatcagtgcaatccttgcgaagatcgactatgatgggcttgactactggatggtcatagcgtgcggggctctgatccccagctttggccgcgtcttcaggcgctcactgcggttggacgtgcggaagagcgtcgttggcctgctggtaggtgttgccttcgcctccgtgtgcttgatgtcgactagattcatctgtctgcacactccttactgtaactcggctccagaagccgtcacataactttgttgctgccccgtgctgttgtaaaacacatgtaatactagtgtaatggcgatacaaaaggaggatgtggaagggttacgttgcgtcgaagagatctcttacggcgatacaacaaagggaaatggatgttgaacagaatttgcctttttcttgctgtcacttgtgtaaaattattcccaaacattgcctgaacgatagcccattcagccgttaacctcagtcccatttgatc

SEQ ID NO: 15790 - DNA, 1517 bp, Zea Mays
atctgatacacttcccagtgataaacaaaatcaagtttcttgagcaatatggagaagtaagcatgttagatataaaaggggcagatgcaagtaaagttattcttgttgttggaataatgactcttcattcttttggagaaggctctggtgtgggtgtttcctttgctggctcaaaagggttctctcagggtcttctagttactatagctatagcagtgcacaacataccagaaggcttagcagtaagcatggttctcgcgtctagaggggtgtccccccaaaaggcaatgatgtggagtatcattacatctttaccacagggtgcatgatatggattgttatagcggaggttcttcctgacgcttttaaggaagcaactccatctcaagtagcttctgctggaacactcgctgttgctttcatggaaacattaagtacggtgcttctgggatttacagatggcaacaatgtggaagacgcatcaggcttcttagtatcacttgtgtttggactcggtccacttatcggtggaattatactcgtcacattctctcttgggttcagcatgccgcaccctcttctcaccggtgtcgcatccggcatagctttccgtctcgcggcatggagacctgtgcagctcctaatgacctcaaaaatgggtctcttcaccaccctcttcctcctcatcggaggttccctggcctaccacgccgccacatcaagcatcctccggttgttcaatcgcaaaaggtcttccgtgaacgtgatcgcgtcatcctccggcctctctctcagtgccctcacagtgcagtcccttcttgcctgtggcgccgtattccttcacgcatatgctgaagggcttgcgctcggtgtcgcggctcgcaaggcctatggcctcggccgctacatggttctcccagcctccctccacggtcttccacgtggcgctgccgcggcgagctgcgtgtatggtgccacagatagctggcgtggagcccttgccgctgccgctttgacagggctcgcagcgccgagcgccgccatcagtgcaatccttgcgaagatcgactatgatgggcttgactactggatggtcatagcgtgcggggctctgatccccagctttggccgcgtcttcaggcgctcactgcggttggacgtgcggaagagcgtcgttggcctgctggtaggtgttgccttcgcctccgtgtgcttgatgtcgactagattcatctgtctgcacactccttactgtaactcggctccagaagccgtcacataactttgttgctgccccgtgctgttgtaaaacacatgtaatactagtgtaatggcgatacaaaaggaggatgtggaagggttacgttgcgtcgaagagatctcttacggcgatacaacaaagggaaatggatgttgaacagaatttgcctttttcttgctgtcacttgtgtaaaattattcccaaacattgcctgaacgatagcccattcagccgttaacctcagtcccatttgatc

SEQ ID NO: 15791 - DNA, 1637 bp, Zea Mays
gttcaatagtaggattttgtatggggaccaatgctataatcatctgatacacttcccagtgataaacaaaatcaagtttcttgagcaatatggagaagtaagcatgttagatataaaaggggcagatgcaagtaaagttattcttgttgttggaataatgactcttcattcttttggagaaggctctggtgtgggtgtttcctttgctggctcaaaagggttctctcagggtcttctagttactatagctatagcagtgcacaacataccagaaggcttagcagtaagcatggttctcgcgtctagaggggtgtccccccaaaaggcaatgatgtggagtatcattacatctttaccacagccaattgttgctgttcctgcattcctctgtgccgatgcattccagaaggtgcttcccttttgtactggtttcgcagcagggtgcatgatatggattgttatagcggaggttcttcctgacgcttttaaggaagcaactccatctcaagtagcttctgctggaacactcgctgttgctttcatggaaacattaagtacggtgcttctgggatttacagatggcaacaatgtggaagacgcatcaggcttcttagtatcacttgtgtttggactcggtccacttatcggtggaattatactcgtcacattctctcttgggttcagcatgccgcaccctcttctcaccggtgtcgcatccggcatagctttccgtctcgcggcatggagacctgtgcagctcctaatgacctcaaaaatgggtctcttcaccaccctcttcctcctcatcggaggttccctggcctaccacgccgccacatcaagcatcctccggttgttcaatcgcaaaaggtcttccgtgaacgtgatcgcgtcatcctccggcctctctctcagtgccctcacagtgcagtcccttcttgcctgtggcgccgtattccttcacgcatatgctgaagggcttgcgctcggtgtcgcggctcgcaaggcctatggcctcggccgctacatggttctcccagcctccctccacggtcttccacgtggcgctgccgcggcgagctgcgtgtatggtgccacagatagctggcgtggagcccttgccgctgccgctttgacagggctcgcagcgccgagcgccgccatcagtgcaatccttgcgaagatcgactatgatgggcttgactactggatggtcatagcgtgcggggctctgatccccagctttggccgcgtcttcaggcgctcactgcggttggacgtgcggaagagcgtcgttggcctgctggtaggtgttgccttcgcctccgtgtgcttgatgtcgactagattcatctgtctgcacactccttactgtaactcggctccagaagccgtcacataactttgttgctgccccgtgctgttgtaaaacacatgtaatactagtgtaatggcgatacaaaaggaggatgtggaagggttacgttgcgtcgaagagatctcttacggcgatacaacaaagggaaatggatgttgaacagaatttgcctttttcttgctgtcacttgtgtaaaattattcccaaacattgcctgaacgatagcccattcagccgttaacctcagtcccatttgatc

SEQ ID NO: 15792 - DNA, 1676 bp, Zea Mays
ctttgatactattactgaccattcatatcaaggagtttcatcatcttgcaaatatcaagccacatttcagtggatttatacccgaaggaactattcgtgaatgtcatacaagtttgttcaatagtaggattttgtatggggaccaatgctataatcatctgatacacttcccagtgataaacaaaatcaagtttcttgagcaatatggagaagtaagcatgttagatataaaaggggcagatgcaagtaaagttattcttgttgttggaataatgactcttcattcttttggagaaggctctggtgtgggtgtttcctttgctggctcaaaagggttctctcagggtcttctagttactatagctatagcagtgcacaacataccagaaggcttagcagtaagcatggttctcgcgtctagaggggtgtccccccaaaaggcaatgatgtggagtatcattacatctttaccacagcagggtgcatgatatggattgttatagcggaggttcttcctgacgcttttaaggaagcaactccatctcaagtagcttctgctggaacactcgctgttgctttcatggaaacattaagtacggtgcttctgggatttacagatggcaacaatgtggaagacgcatcaggcttcttagtatcacttgtgtttggactcggtccacttatcggtggaattatactcgtcacattctctcttgggttcagcatgccgcaccctcttctcaccggtgtcgcatccggcatagctttccgtctcgcggcatggagacctgtgcagctcctaatgacctcaaaaatgggtctcttcaccaccctcttcctcctcatcggaggttccctggcctaccacgccgccacatcaagcatcctccggttgttcaatcgcaaaaggtcttccgtgaacgtgatcgcgtcatcctccggcctctctctcagtgccctcacagtgcagtcccttcttgcctgtggcgccgtattccttcacgcatatgctgaagggcttgcgctcggtgtcgcggctcgcaaggcctatggcctcggccgctacatggttctcccagcctccctccacggtcttccacgtggcgctgccgcggcgagctgcgtgtatggtgccacagatagctggcgtggagcccttgccgctgccgctttgacagggctcgcagcgccgagcgccgccatcagtgcaatccttgcgaagatcgactatgatgggcttgactactggatggtcatagcgtgcggggctctgatccccagctttggccgcgtcttcaggcgctcactgcggttggacgtgcggaagagcgtcgttggcctgctggtaggtgttgccttcgcctccgtgtgcttgatgtcgactagattcatctgtctgcacactccttactgtaactcggctccagaagccgtcacataactttgttgctgccccgtgctgttgtaaaacacatgtaatactagtgtaatggcgatacaaaaggaggatgtggaagggttacgttgcgtcgaagagatctcttacggcgatacaacaaagggaaatggatgttgaacagaatttgcctttttcttgctgtcacttgtgtaaaattattcccaaacattgcctgaacgatagcccattcagccgttaacctcagtcccatttgatc

SEQ ID NO: 15793 - DNA, 2190 bp, Zea Mays
ctcaccaaaatcgctcggatctcatgcttactaagttgtctgggattggattggagcatcttcccagcaccacccacgcggaagccatgaccattcagttgctccgctgacgactcctctgacgacagcacggctgcgctgacctgcaggcctctcgcccacgctgccctgacagggtaaagtcagggggtggcgtgtgtgggtgggggggggggacaatcaggtgaataatcatggacagaagagctggggcgatcctagtgttcctgctcgtcgtcctggtctgggatgtggcggcggtcgccgagaccgagcctggcagcgtgcggctagtacaggaggcgccacataggaaggtggtggaggatggggccaaggcggggagggtgccggtgtcgaccgtcgcgtggtccacgcttgccatggccgcggcgacggggttgggagcggtgcccttctttttcatggagctcgaagcgcagtgggctggcctttgcaatgggctggcggccggggtgatgctggccgccagctttgaccttgtgcaggaagggcaggtgtatggcagtgggagctgggttgtgttcggaattctgagtggaggtatatttatttggctttgtaagaagtttcttgagcaatatggagaagtaagcatgttagatataaaaggggcagatgcaagtaaagttattcttgttgttggaataatgactcttcattcttttggagaaggctctggtgtgggtgtttcctttgctggctcaaaagggttctctcagggtcttctagttactatagctatagcagtgcacaacataccagaaggcttagcagtaagcatggttctcgcgtctagaggggtgtccccccaaaaggcaatgatgtggagtatcattacatctttaccacagccaattgttgctgttcctgcattcctctgtgccgatgcattccagaaggtgcttcccttttgtactggtttcgcagcagggtgcatgatatggattgttatagcggaggttcttcctgacgcttttaaggaagcaactccatctcaagtagcttctgctggaacactcgctgttgctttcatggaaacattaagtacggtgcttctgggatttacagatggcaacaatgtggaagacgcatcaggcttcttagtatcacttgtgtttggactcggtccacttatcggtggaattatactcgtcacattctctcttgggttcagcatgccgcaccctcttctcaccggtgtcgcatccggcatagctttccgtctcgcggcatggagacctgtgcagctcctaatgacctcaaaaatgggtctcttcaccaccctcttcctcctcatcggaggttccctggcctaccacgccgccacatcaagcatcctccggttgttcaatcgcaaaaggtcttccgtgaacgtgatcgcgtcatcctccggcctctctctcagtgccctcacagtgcagtcccttcttgcctgtggcgccgtattccttcacgcatatgctgaagggcttgcgctcggtgtcgcggctcgcaaggcctatggcctcggccgctacatggttctcccagcctccctccacggtcttccacgtggcgctgccgcggcgagctgcgtgtatggtgccacagatagctggcgtggagcccttgccgctgccgctttgacagggctcgcagcgccgagcgccgccatcagtgcaatccttgcgaagatcgactatgatgggcttgactactggatggtcatagcgtgcggggctctgatccccagctttggccgcgtcttcaggcgctcactgcggttggacgtgcggaagagcgtcgttggcctgctggtaggtgttgccttcgcctccgtgtgcttgatgtcgactagattcatctgtctgcacactccttactgtaactcggctccagaagccgtcacataactttgttgctgccccgtgctgttgtaaaacacatgtaatactagtgtaatggcgatacaaaaggaggatgtggaagggttacgttgcgtcgaagagatctcttacggcgatacaacaaagggaaatggatgttgaacagaatttgcctttttcttgctgtcacttgtgtaaaattattcccaaacattgcctgaacgatagcccattcagccgttaacctcagtcccatttgatc

SEQ ID NO: 15794 - DNA, 2147 bp, Zea Mays
cttcacctcgtcgcgcttcctgtcgtctgctgcgtgttgtcgcaggattggattggagcatcttcccagcaccacccacgcggaagccatgaccattcagttgctccgctgacgactcctctgacgacagcacggctgcgctgacctgcaggcctctcgcccacgctgccctgacagggtaaagtcagggggtggcgtgtgtgggtgggggggggggacaatcaggtgaataatcatggacagaagagctggggcgatcctagtgttcctgctcgtcgtcctggtctgggatgtggcggcggtcgccgagaccgagcctggcagcgtgcggctagtacaggaggcgccacataggaaggtggtggaggatggggccaaggcggggagggtgccggtgtcgaccgtcgcgtggtccacgcttgccatggccgcggcgacggggttgggagcggtgcccttctttttcatggagctcgaagcgcagtgggctggcctttgcaatgggctggcggccggggtgatgctggccgccagctttgaccttgtgcaggaagggcaggtgtatggcagtgggagctgggttgtgttcggaattctgagtggaggtatatttatttggctttgtaagaagtttcttgagcaatatggagaagtaagcatgttagatataaaaggggcagatgcaagtaaagttattcttgttgttggaataatgactcttcattcttttggagaaggctctggtgtgggtgtttcctttgctggctcaaaagggttctctcagggtcttctagttactatagctatagcagtgcacaacataccagaaggcttagcagtaagcatggttctcgcgtctagaggggtgtccccccaaaaggcaatgatgtggagtatcattacatctttaccacagaaggtgcttcccttttgtactggtttcgcagcagggtgcatgatatggattgttatagcggaggttcttcctgacgcttttaaggaagcaactccatctcaagtagcttctgctggaacactcgctgttgctttcatggaaacattaagtacggtgcttctgggatttacagatggcaacaatgtggaagacgcatcaggcttcttagtatcacttgtgtttggactcggtccacttatcggtggaattatactcgtcacattctctcttgggttcagcatgccgcaccctcttctcaccggtgtcgcatccggcatagctttccgtctcgcggcatggagacctgtgcagctcctaatgacctcaaaaatgggtctcttcaccaccctcttcctcctcatcggaggttccctggcctaccacgccgccacatcaagcatcctccggttgttcaatcgcaaaaggtcttccgtgaacgtgatcgcgtcatcctccggcctctctctcagtgccctcacagtgcagtcccttcttgcctgtggcgccgtattccttcacgcatatgctgaagggcttgcgctcggtgtcgcggctcgcaaggcctatggcctcggccgctacatggttctcccagcctccctccacggtcttccacgtggcgctgccgcggcgagctgcgtgtatggtgccacagatagctggcgtggagcccttgccgctgccgctttgacagggctcgcagcgccgagcgccgccatcagtgcaatccttgcgaagatcgactatgatgggcttgactactggatggtcatagcgtgcggggctctgatccccagctttggccgcgtcttcaggcgctcactgcggttggacgtgcggaagagcgtcgttggcctgctggtaggtgttgccttcgcctccgtgtgcttgatgtcgactagattcatctgtctgcacactccttactgtaactcggctccagaagccgtcacataactttgttgctgccccgtgctgttgtaaaacacatgtaatactagtgtaatggcgatacaaaaggaggatgtggaagggttacgttgcgtcgaagagatctcttacggcgatacaacaaagggaaatggatgttgaacagaatttgcctttttcttgctgtcacttgtgtaaaattattcccaaacattgcctgaacgatagcccattcagccgttaacctcagtcccatttgatc

SEQ ID NO: 15795 - DNA, 2264 bp, Zea Mays
gacttctctctggttgtattgctgctactacaagcactcggggtactcagatctgttttccgatcccggtcgcttcacctcgtcgcgcttcctgtcgtctgctgcgtgttgtcgcaggattggattggagcatcttcccagcaccacccacgcggaagccatgaccattcagttgctccgctgacgactcctctgacgacagcacggctgcgctgacctgcaggcctctcgcccacgctgccctgacagggtaaagtcagggggtggcgtgtgtgggtgggggggggggacaatcaggtgaataatcatggacagaagagctggggcgatcctagtgttcctgctcgtcgtcctggtctgggatgtggcggcggtcgccgagaccgagcctggcagcgtgcggctagtacaggaggcgccacataggaaggtggtggaggatggggccaaggcggggagggtgccggtgtcgaccgtcgcgtggtccacgcttgccatggccgcggcgacggggttgggagcggtgcccttctttttcatggagctcgaagcgcagtgggctggcctttgcaatgggctggcggccggggtgatgctggccgccagctttgaccttgtgcaggaagggcaggtgtatggcagtgggagctgggttgtgttcggaattctgagtggaggtatatttatttggctttgtaagaagtttcttgagcaatatggagaagtaagcatgttagatataaaaggggcagatgcaagtaaagttattcttgttgttggaataatgactcttcattcttttggagaaggctctggtgtgggtgtttcctttgctggctcaaaagggttctctcagggtcttctagttactatagctatagcagtgcacaacataccagaaggcttagcagtaagcatggttctcgcgtctagaggggtgtccccccaaaaggcaatgatgtggagtatcattacatctttaccacagccaattgttgctgttcctgcattcctctgtgccgatgcattccagaaggtgcttcccttttgtactggtttcgcagcagggtgcatgatatggattgttatagcggaggttcttcctgacgcttttaaggaagcaactccatctcaagtagcttctgctggaacactcgctgttgctttcatggaaacattaagtacggtgcttctgggatttacagatggcaacaatgtggaagacgcatcaggcttcttagtatcacttgtgtttggactcggtccacttatcggtggaattatactcgtcacattctctcttgggttcagcatgccgcaccctcttctcaccggtgtcgcatccggcatagctttccgtctcgcggcatggagacctgtgcagctcctaatgacctcaaaaatgggtctcttcaccaccctcttcctcctcatcggaggttccctggcctaccacgccgccacatcaagcatcctccggttgttcaatcgcaaaaggtcttccgtgaacgtgatcgcgtcatcctccggcctctctctcagtgccctcacagtgcagtcccttcttgcctgtggcgccgtattccttcacgcatatgctgaagggcttgcgctcggtgtcgcggctcgcaaggcctatggcctcggccgctacatggttctcccagcctccctccacggtcttccacgtggcgctgccgcggcgagctgcgtgtatggtgccacagatagctggcgtggagcccttgccgctgccgctttgacagggctcgcagcgccgagcgccgccatcagtgcaatccttgcgaagatcgactatgatgggcttgactactggatggtcatagcgtgcggggctctgatccccagctttggccgcgtcttcaggcgctcactgcggttggacgtgcggaagagcgtcgttggcctgctggtaggtgttgccttcgcctccgtgtgcttgatgtcgactagattcatctgtctgcacactccttactgtaactcggctccagaagccgtcacataactttgttgctgccccgtgctgttgtaaaacacatgtaatactagtgtaatggcgatacaaaaggaggatgtggaagggttacgttgcgtcgaagagatctcttacggcgatacaacaaagggaaatggatgttgaacagaatttgcctttttcttgctgtcacttgtgtaaaattattcccaaacattgcctgaacgatagcccattcagccgttaacctcagtcccatttgatc

SEQ ID NO: 15796 - DNA, 1843 bp, Zea Mays
ggggcccgtgcttgccgtcccgtgaggcccctgcccctgcccgtgaccgccccgcaccccccacagccgggggtcgccggtttccgcgactccaaatccgcgtgcgccgcccgccctctaaatctgcctcgccggcagccgggcgggggccaccacgtcacacccagcctctcctctccgcccgcggcccgcccgcttcttcttcctcgccatcccttcttctagcgcggaggcgcagatccatcgggcttcgggggctcggttccatccctctgccagctgtttcttgagcaatatggagaagtaagcatgttagatataaaaggggcagatgcaagtaaagttattcttgttgttggaataatgactcttcattcttttggagaaggctctggtgtgggtgtttcctttgctggctcaaaagggttctctcagggtcttctagttactatagctatagcagtgcacaacataccagaaggcttagcagtaagcatggttctcgcgtctagaggggtgtccccccaaaaggcaatgatgtggagtatcattacatctttaccacagccaattgttgctgttcctgcattcctctgtgccgatgcattccagaaggtgcttcccttttgtactggtttcgcagcagggtgcatgatatggattgttatagcggaggttcttcctgacgcttttaaggaagcaactccatctcaagtagcttctgctggaacactcgctgttgctttcatggaaacattaagtacggtgcttctgggatttacagatggcaacaatgtggaagacgcatcaggcttcttagtatcacttgtgtttggactcggtccacttatcggtggaattatactcgtcacattctctcttgggttcagcatgccgcaccctcttctcaccggtgtcgcatccggcatagctttccgtctcgcggcatggagacctgtgcagctcctaatgacctcaaaaatgggtctcttcaccaccctcttcctcctcatcggaggttccctggcctaccacgccgccacatcaagcatcctccggttgttcaatcgcaaaaggtcttccgtgaacgtgatcgcgtcatcctccggcctctctctcagtgccctcacagtgcagtcccttcttgcctgtggcgccgtattccttcacgcatatgctgaagggcttgcgctcggtgtcgcggctcgcaaggcctatggcctcggccgctacatggttctcccagcctccctccacggtcttccacgtggcgctgccgcggcgagctgcgtgtatggtgccacagatagctggcgtggagcccttgccgctgccgctttgacagggctcgcagcgccgagcgccgccatcagtgcaatccttgcgaagatcgactatgatgggcttgactactggatggtcatagcgtgcggggctctgatccccagctttggccgcgtcttcaggcgctcactgcggttggacgtgcggaagagcgtcgttggcctgctggtaggtgttgccttcgcctccgtgtgcttgatgtcgactagattcatctgtctgcacactccttactgtaactcggctccagaagccgtcacataactttgttgctgccccgtgctgttgtaaaacacatgtaatactagtgtaatggcgatacaaaaggaggatgtggaagggttacgttgcgtcgaagagatctcttacggcgatacaacaaagggaaatggatgttgaacagaatttgcctttttcttgctgtcacttgtgtaaaattattcccaaacattgcctgaacgatagcccattcagccgttaacctcagtcccatttgatc

SEQ ID NO: 15797 - DNA, 2126 bp, Zea Mays
ggccatgacgactccgccggtccgcccctgcccccgctcacggatgctcctctggacgctatatataagccacctcactcccccctctgccatcacacaccaccgccgctcaccaacaaccgagcaggagcagcctaccccatccacccaccccatcctctgcgctgcacggctgctgctggtgctggtccggccggtccggtccggtctcctctgttccagcgagctccctccgatccatcgggtaggacactccccatggcgtcgcacaacggcaccaagcacctggcgccgatggaggtgtcggtggaggccgggaacggcggcggcgccgagtggctggacgacgacgggcggccgcggcgcacgggcacgttctggacggccagcgcgcacatcatcacggccgtcatcggctcgggagtcctgtccctggcctgggccatcgcgcagctggggtgggtggccggccccgccgccatgctgctcttcgccttcgtcacctactacaccgccacgctgctcgccgagtgctaccgcacgggggacccggacacgggcaagcgcaactacacgtacatggacgccgtgcgctccaacctcggcggcgccaaggtcgccttctgcggcgccatccagtacgccaacctcgtcggcgtcgccatcggctacaccatcgcctcctccatcagcatgcaggccgtcagcagggccgggtgcttccacaagcgtgggcacgccgtcccctgcaagagctccagcaacccctacatgatcctcttcggcgccgtccagatcctcttctcccagataccggacttcgaccagatttggtggctctccatcgtcgccgcagtcatgtccttcacctactccgccatcggcttgtccctcggcatcgcacagactcaaacggtgggttcaagggaagcctcaccggcatcagcatcggcgccgacgtcacctccacgcagaaagtgtggcacagcctgcaggccttcggcgacatcgcgttcgcctactccttctccaacatcctcatcgagatccaagacacgatcaaggcgccgccgccgtcggagtcgaaggtgatgcagaaggcgacgcggctgagcgtggcgacgacgaccatcttctacatgctgtgcgggtgcatggggtacgcggcgttcggcgacaaggcgccggacaacctgctgacggggttcggcttcttcgagccattctggctgatcgacgtggccaacgtggccatcgtggtgcacctggtgggcgcgtaccaggtgttctgccagcccatcttcgccttcgtggagcgccgcgccgccgcggcctggcccgacagcgccttcgtctcgcgggagctccgcgtggggcccctcgccctcagcgtgttccgcctcacgtggcggtcggcgttcgtgtgcgtcaccaccgtcgtggccatgctgctccccttcttcggcaacgtggtggggttcctcggcgccgtctccttctggcccctcaccgtctacttccccgtcgagatgtacatcaagcagcgccgcgtgccccgcggcagcaccaagtgggtctgcctccagacgctcagcgtcgcgtgcctggtcgtctccatcgccgccgccgccggctccatcgccgacgtcatcgaggcgctcaaggtttaccacccgttcagcagttaattcttgctgctgtggatgtgctgggtggggcctggcctggcctgggtttggacgtatgtgcatgatgcattcattgcgttgcgttcaactgtggtcaacaagggagggagacagatgcagatgcagtgtgagatgtttgcatggaggcccctatagaaacaagtgaaatgtttaggcgcccttgtgcacatgctggtcgcattccttgcaagaataccaggggtggggccagaatggcatgagctgggtgttcctttctaactcttcttcttcttcttctcctcttcttctttatttacatttttcttttatgtgttttcgtctaattaaggttctggttttgtagttctaccgtgcaactcattgtaccggaaaagaatatatgaacaggaaatcccatatgatctttgccatctttatttttcgcgtctgcgggaa

SEQ ID NO: 15798 - DNA, 1672 bp, Zea Mays
cccactaccgtcctcctcctcccccctcttcatcgaagcagcctcctccagctcggactcggagctccacataataatatctgctacttgtttcctcttcccagtattgtgattccttccattcgtgaacagaattcccctccctctctagatctccccctgctaacgaagacagaccaccaccaccagtaatgccgaccgcgaggcgcacgcgcatcccggcgttcggggagtggaaccaccaccaccacagcaacggcggcggcgcgtgggcgccggcggtcatgaccccgtccttcgacttcggccacgcaataacaacgccgcacaaagcgccgcagacgcaggggaggcggcgaggcgccgccgacggtgtcgtccacgcggccaagctggctgcggctgcggcggcggcggagcctcaccaaggccacacgcagaccacgaggcggagcaaggtggccgactccggagcctacgcgcaggccgcggcggcggcgaggaggtcctgcttcgcgctggccaagcccgtcgacgacgacctgtacggagtccctcccgacatgctctacggaaagccgccgccgccgggagcgagggtacgtagtacgtacgcacttacgctcattactagccatgatttatttgctgtccattttgcatcgggaaaaaacgaaaaaaaatgcatgctaccttaatgtaaaatcccattaattaaagagtttattcagagagctttacgtgctcttagcgatcgaacgagccattcaatcccaaatatccattatttagaacacataaaacccaatcccaaatgtccattatttagaatacctaaaacccacgttaaccgcatggagtgcaaaattttgtcaccaggatttgcagtcatatatgataggtatgtacagtgaagagacactaaaacgattctctaggcactagaatacatgacgaatttgtagagcaagaagtgaaacgtctattgctagagatgttccaccaatttttttttacaaatgtactctttaaacacttcaaaagactctatagtattaaacatcaatgtgcatgcagtgttcttcattactcgtaccggggccttaacgttcacgtgatgattttaacgtccacgaccgcattgcagaaggatgatggctggcggaggatcctgcggctgctggggtgctcgtgcttgagttgagcccgtcgtaatgaccgccggacacagccgagcattattgtcacggacaacaaggctgctggctaatcagggcgcgggctttttggcttccatcctcctgtacgtactacaagatgtctcaacttttggcgcctgctgtgatcgattgatgacgggccggcaggcaagacgtgactgacgtgccggccttgcgttgcgtgggtctgtgcgtaggtgtgacgttcgtgttgtgactgtgttcgctgctgaccgcctgtcctttgtgactgcttcaagctagtagattctaggatttagaggttctttatttatgtgtgtgcgttctcgtttgtcgctcaccctcaccgcctgtaaaaccccacctaaaatggtcgtgctatccgacaaataggcttttcacatcgtactactatttagcatcggacagtactgacacaagtatatataataagaccctgttcatgtacc

SEQ ID NO: 15799 - DNA, 3329 bp, Zea Mays
aatgacgtgtcggcgcaaactcgttggagcaatcgccaaagcagcaagagcgacgagcccaaaccttttcacccctcgtcgtcctcggctaatccgccgcgcctccgatactcccaaggcagcgctctcctcgtgctgcgaaagcagcagcagcaagcgagtagtcaccaccatctcaaatcttcccctccacgctccctttcccttcctctacctcccctaccccgccgccccgcaatggccggcctcctccacctccagtccacgcttctaccctcggcatccgctctccgccatcgcgctgcttgccgagtccgaggaggagatcccggtcgcgcagtcacaggcggcctccttctcctccagctccccctcgcctccgcctccgcaagaaactgctcaagaagcatccccttcgccgccgccacctcctccctcggcgccggtggcagtctctgctcccgcgctaccttcgccagcaacacaaggcgggggacgtgttgttgcttcaccctacgccaagaagctcgccaaggacctcggcgttgatcttttctctgtcacggggtcaggccccggcgggcgaattgtagccaaggatgtcgaggctgcccttgctgcgcccaagaaggccgcaccagtgactgctgcacggccggatgtgccattggggtcgacagtaccattcacgacaatgcagggtgctgtcagcaagaacatggtggagagtcttgctgtcccgaccttcagggttgggtacaccatcacgactgatgccctcgatcagctctacaaaaaaattaagtcaaagggggttacaatgacagcactgttggctaaggcgacggcaatggctctggttcagcatcctgtggtgaactgcagctgcagggatggaaagagcttcacatacaacaaaagtataaacattgctgtggcagtggccatagatggtgggttgattacaccggttcttcaagatgctgataagcttgacatttattcattgtcaaggaaatggaaggagttggttgataaggcgcgagcaaagcagctgcagccccatgagtacaactctggcacctttactctttcgaatcttggtatgtttggagttgataggttcgatgcaatactgccacctggaactggcgcaatcatggccgtcggtgcatcagaaccgacagttgttggtacaaaagacggtagaatcgggatcaagagccaaatgcaggtaaatgttaccgctgatcatcgggttatttatggagctgaccttgccgcttttctgcaaacacttgctaagataattgaggatcccaaggatcttacattttaaaagttcctgagtgattgtttttccttgagccaatcacaattgggtgcttctcacccatagtagatttgtagtatgtcttaatgtgaattagttgatttaagctatcatcaatgtcagcatcaggtaactttacctgctggttggttatcttaccatcattggtttgtttttcaataaattcttttcttttatctttcttcttcattcagataggtgggtaaggatgtgtgtattcatcattttacctgagttttcatggacatttgattttgtttagcttaacaatgtaccatgaccttgggtacaaggaatgaaatgcaccttgtacttgtaccaccctgtggttgatttcacatgcctgtcaaacagaaatacggttgatgcccttgcaagtgtgtcaacgtgaaatcttcagggagatctgtaaaaaacgggccacacatctgtttgttttacatgtgaaggagacggaccatgattcgtcccaaccactcccatgatgccaaggctgtagagtatcggatatcctggcctgttgtacattcctgggacagctcaagatcgcgtcctccattttttccgcagaaagcattcctgtttcagctcgttgtactcttcgtcttctctacttgaaggatcctattaggtggcatgtcctgcgtcttgcttgctggaatgggccatcctgatatcctgtccgccattgtagtggaagcgaagcaagccacaataataaaacccctccagcagctcttgttcttgccgcctctgtcgtggccttcagcagcagcggcatggcgtcggaccgtggagaggtcgacacctcccgtgccttccggtccgtcaaggaggcggtcgctgtgttcggagagcgcatccttgtcagggaagcccagttgagggcaaacggtggtgcgcatggcggctgtcgtgttggcaaggagttcaactccagggtgaatgctgtcgccattgccgcctctgacgtgaagctgcctaaccggagcgacggcgtcatggaaagccacagcaactccaagccaagtgttgtcaatgtcacctgcaatgccaaggaagagcacagtagttgcagcagcaagcctgctgctccaagcctaccgccggtgcccgtgccaaggccgccggttgcagaagacgtgccgatgtacctggtcccctcctcgccgccgttcttcgcgtcgtcgccttcgctggccaacgacgacggcgacgacgacgagcaagagcgcaaggcagccgacctcgtcgtgattagcgccatcaggaggctggaggacgaggcggccaggacgaggcaggaggtggcgcggctcaagaggaggctggccgagatggagctgtccatggcgaccctgaacgcgaagctccaccgcgcgctctccaaggtggcgcacatggaggcggacaacgcggcggcggcgcgcgccagcatcggccgcgacatggcgctggcggtctcggccgagcgcccgcgccgcgcccccaccagcaggccgcagctgggccacctgctgaggctgggcgtgggcgagcaggccgacagggaggcgcaggcgcttgtgtccggctccggctccggcggcggctgggcggtggcgccagcgaggaggaaggcgcagaagcagaagcccatcgtgccgctggttgttccgctcgttaatggcgtgctcttctccaagaagaggaggacgaaggacaaggagagcgtgtacatgaaggagctttacagcttgcttaggctgagttgatcaaatttaaggctgccatgctaaatctgtggatgtacttgtgcacaatcgttcataatcatgtgcacggacgttatctacctacacactaatttttactatttgtttctatagtttctgtgactacatgtggatcgtgcagtgcgaggctgcaatttgtacattaataatgtaaatctagcattagtgcttatttttttaatgttgaaatcaacaactta

SEQ ID NO: 15800 - DNA, 4332 bp, Zea Mays
atggcggcatacctgacgacgtttgagaggaagagggcgaggaccttggcgacggagccgggtagtaggttgacaatgtacttggcgcagagactagagacggcgcgaaggagagctcgccctcccctccgtcgcgggcaccacaggcaaactgctgcagtgacgacttcctggcgatggcttcctctgtcgctcggagccgcagccgccgcgcgctcggcgcatgtcctcggccgggctggtgtgaggaggtccaggatggtggccgggttccgtcgcacgatcttgttcccaatgcccaggtccccgctgccgccaacgagaggcgcggggccgagcggcgccaacaagtatggcgcctaccgcgcgcggttggcaagcctgccgtgccggttccacctgctagtgctccagcttgacgacgatgtcgccgacctgcgggagctggtaggccgcctggcgtcgaaggcctccgcggaggccatggccgaggcttatgaagactattcttcggaaagggctgaactattgttcaaaacctgccaagttgtcctaaaattctatccttgcgggccccatggtccagcctttgatggaggtttttcaggctttcagctcccaatagcttcccttttccttttcgtcgctcactggctgtctcgctctcacacagaagcagcaggcggtgttgtacgtcatcggtcagtcaacgctggaccaacccaaacccaagagaaggggcaccagaaacacctcaacaaaatcgtgagcagccttggggtctccctgaagtctgaaccacactcaacaaaacccatggtagtttcagaacaaacaaacaaacatggaagccatgggcgagcacacccagcgctcaaaatcctagagagggggaggaacatctcttcttcttcttccttcccttcctactcgagccggtggaggtcagcggggattgaggaggaggaggggaagaggcgaggcaggaaatcaagcgggaatccaagaaccgtaaggatgaccgtggtggagaggaggtacggtccctgtaccagccatggttccttcctcctacggctgctgctgctgccgttcttcttcttcctctgcttcatcgatgtgccgccggccggcgccgccgccaccacacagtcgcctccactagacaacacgcaaaaggctatcatgaacgatgttgcgagtctggtgaactccggatccgccaacaccaggtggaacaccgcggagtcgaatccgtgcaactgggaaggaatcacctgcacaagtaacacttcttcctcggccgtgactcggatcgccttgtcaaactatggcctcgccaactcctccatctttgctcccctctgccgtcttggcactctgcggtaccttgacctttccagaaattttttagcagatttgtccgccccgttcttcgcctcttcttcttcttcttgctccatgaaggaagggctgcagtcacttaacctgagcaccaaccggctggctagcccgctcggtgagttggccggcttcccccagctacaagttcttgacctgtccttcaattcctttgccagcagaaatctgagtgcggaattgggttatttccccaagttaaggagcttcaacactagttccaatgacttgaatggtgatgttcctaccagtatggtcggctctttggaggagctggtattgtctagtaataatttgagtggtccaattcctctgcgtttgtttgaatatgaaaatcttactctgctagatctcagccagaataatctgaccggtgctattccagataacttcacgagtctctccaagcttgagactttgctcctttctggcaacaaattgattggggaaataccatcgagtctgtctaatgtgacaacactgtctaggtttgcagctaaccagaacggtttaactggacccatccatagctggattaccaagcatatagggatgttggatttgagttacaacaagctgaatgggacaatcccctcagacttcctctcgcatcaggggttgcagagtgttgatcttaccagcaacttgcttaacggagccattcctgccaccttgtctcaaagcctctaccgcttgaggcttggtgggaaccagcttggtgagaacatcccagggtcagtttgtgataccatgggcttgacttatcttgagttggatgacaaccaattgacaggagttataccttcagagcttagcaaatgcaagaacttgacactgttgaatctggcatcaaatcgtttgcatggtttagtgcccagtattaccggtgaacttgacaaactggtagttctgaagcttcaaaataacaccctcactggacaggttccaagtacattttctgaattaaagagcctaatcacattgaatctcagtaagaattcactcagtggagcgataccaagcggaattttcgagttgccaaagctttcgaacttgtatttgcagggtaaccagtttagcggttttattccgttctccatcagttcatcaaaggatctaatcgagctcaacctgggtgataatgctctgactggtgaactagagattcttgatctttctcacaatgccctgtctggtgctgtgccatcttcactatggagcctgcaaagcctgacactgctggacctttcctataataatctgtctgggtctattcctagattcggtccaagtcaaactgtagatattgtcggaaatcctggtcttgtaattgtaaatggtacaggaaacaataatgacactcctactactggtaagaaaaagaggcactatttggtcgtcatcatcttcaccattgccggtactcttgttggattatgtgtgcttgctcttattattgtgatgtcattatcaaagagagtgtatcgtgttgaagatgaaggattaccagctggagaatctgtaccacaaataatcagtggtcgcctcataactatgaacagcatccacacctctgcagttgacttcgtgaaggcaatagaagcagtctccaaccatcagaacatctttttgaagaccagattctgcacctactacaaggctgtaatgcctaatggctcaacatactctgtaaaaaaacttaattctagtgacaagattttccaaattgggagccaggagaagttttctcatgaaattgaggttctagggaaactgaccaattcgaatgtcatggttccattggcctacatcttgactgcagattgtgcctacctaatctatgagcatgcatacaatggcactgtatctgatttgctacatggtggaaaatcagaagttatagactggccgtcacgatatagcgttgctttgggggtggcccaagggctgacatttcttcatgggtgcactcagccggttttgcttcttgatctgtcaacaaggaccatccacttgaagtcaaaaaatgagcctcagattggagatatcgagctttacaagattattgacccttccaggagtacgggaagcttttcaaccattgctggaacagttggttatattccaccagaatatgcatacactatgaggctgacgatggctggcaacgtctatagctttggagtcattttgcttgagctgctgacaggaaaaaaatcggtcagtaatggcactgagttagccaagtgggctctcagtctttcaggcaggcctgatgaaagggagcagatccttgacaccagggtctcaggaacttcaattgctgttcatagccagatgctgtcggtcctgaacatcgctctctcttgtgttgcattctctccggacgctcggccaaagatgcgcaacgtcttgaggatgctcttcaatgcaaagtgaatcagaagcagcctgcaatcagatcatagataaattttgggtgcagttccagcctcgcgtagtttatggatgtcagtgataagtatacaggctgcccttatatagttccataggagatagaaccctagcttatagtagatcattatatgttttatgaattgtgtaattaggtatctgctttgcagtgagtggctatatggtttataagctgtcaaatgtagaggtgcttataagcaaagttgggtattgttctcataggtagggctaggaaaaaaaagctcgagctcgatgagccggcttgcgctcgtgggggcttggctcgtagcggctcgacgcttagaatgagctcgagccgaacctgtttttgtggctcgagaaaagagcgagctagctcggctcactgcggctcatggctcaacctaataacaatttggtacataaaatcctaactaacatatagtgttagtaccaaat

SEQ ID NO: 15801 - DNA, 3664 bp, Zea Mays
atggcggcatacctgacgacgtttgagaggaagagggcgaggaccttggcgacggagccgggtagtaggttgacaatgtacttggcgcagagactagagacggcgcgaaggagagctcgccctcccctccgtcgcgggcaccacaggcaaactgctgcagtgacgacttcctggcgatggcttcctctgtcgctcggagccgcagccgccgcgcgctcggcgcatgtcctcggccgggctggtgtgaggaggtccaggatggtggccgggttccgtcgcacgatcttgttcccaatgcccaggtccccgctgccgccaacgagaggcgcggggccgagcggcgccaacaagtatggcgcctaccgcgcgcggttggcaagcctgccgtgccggttccacctgctagtgctccagcttgacgacgatgtcgccgacctgcgggagctggtaggccgcctggcgtcgaaggcctccgcggaggccatggccgaggcttatgaagactattcttcggaaagggctgaactattgttcaaaacctgccaagttgtcctaaaattctatccttgcgggccccatggtccagcctttgatggaggtttttcaggctttcagctcccaatagcttcccttttccttttcgtcgctcactggctgtctcgctctcacacagaagcagcaggcggtgttgtacgtcatcggtcagtcaacgctggaccaacccaaacccaagagaaggggcaccagaaacacctcaacaaaatcgtgagcagccttggggtctccctgaagtctgaaccacactcaacaaaacccatggtagtttcagaacaaacaaacaaacatggaagccatgggcgagcacacccagcgctcaaaatcctagagagggggaggaacatctcttcttcttcttccttcccttcctactcgagccggtggaggtcagcggggattgaggaggaggaggggaagaggcgaggcaggaaatcaagcgggaatccaagaaccgtaaggatgaccgtggtggagaggagataacttcacgagtctctccaagcttgagactttgctcctttctggcaacaaattgattggggaaataccatcgagtctgtctaatgtgacaacactgtctaggtttgcagctaaccagaacggtttaactggacccatccatagctggattaccaagcatatagggatgttggatttgagttacaacaagctgaatgggacaatcccctcagacttcctctcgcatcaggggttgcagagtgttgatcttaccagcaacttgcttaacggagccattcctgccaccttgtctcaaagcctctaccgcttgaggcttggtgggaaccagcttggtgagaacatcccagggtcagtttgtgataccatgggcttgacttatcttgagttggatgacaaccaattgacaggagttataccttcagagcttagcaaatgcaagaacttgacactgttgaatctggcatcaaatcgtttgcatggtttagtgcccagtattaccggtgaacttgacaaactggtagttctgaagcttcaaaataacaccctcactggacaggttccaagtacattttctgaattaaagagcctaatcacattgaatctcagtaagaattcactcagtggagcgataccaagcggaattttcgagttgccaaagctttcgaacttgtatttgcagggtaaccagtttagcggttttattccgttctccatcagttcatcaaaggatctaatcgagctcaacctgggtgataatgctctgactggtaacatcccaaccatgccaaccactgtgaccacatctcttctgaatcttagtcataaccttcttgacgggtctattccttcaaacatcaactctttaggtgaactagagattcttgatctttctcacaatgccctgtctggtgctgtgccatcttcactatggagcctgcaaagcctgacactgctggacctttcctataataatctgtctgggtctattcctagattcggtccaagtcaaactgtagatattgtcggaaatcctggtcttgtaattgtaaatggtacaggaaacaataatgacactcctactactggtaagaaaaagaggcactatttggtcgtcatcatcttcaccattgccggtactcttgttggattatgtgtgcttgctcttattattgtgatgtcattatcaaagagagtgtatcgtgttgaagatgaaggattaccagctggagaatctgtaccacaaataatcagtggtcgcctcataactatgaacagcatccacacctctgcagttgacttcgtgaaggcaatagaagcagtctccaaccatcagaacatctttttgaagaccagattctgcacctactacaaggctgtaatgcctaatggctcaacatactctgtaaaaaaacttaattctagtgacaagattttccaaattgggagccaggagaagttttctcatgaaattgaggttctagggaaactgaccaattcgaatgtcatggttccattggcctacatcttgactgcagattgtgcctacctaatctatgagcatgcatacaatggcactgtatctgatttgctacatggtggaaaatcagaagttatagactggccgtcacgatatagcgttgctttgggggtggcccaagggctgacatttcttcatgggtgcactcagccggttttgcttcttgatctgtcaacaaggaccatccacttgaagtcaaaaaatgagcctcagattggagatatcgagctttacaagattattgacccttccaggagtacgggaagcttttcaaccattgctggaacagttggttatattccaccagaatatgcatacactatgaggctgacgatggctggcaacgtctatagctttggagtcattttgcttgagctgctgacaggaaaaaaatcggtcagtaatggcactgagttagccaagtgggctctcagtctttcaggcaggcctgatgaaagggagcagatccttgacaccagggtctcaggaacttcaattgctgttcatagccagatgctgtcggtcctgaacatcgctctctcttgtgttgcattctctccggacgctcggccaaagatgcgcaacgtcttgaggatgctcttcaatgcaaagtgaatcagaagcagcctgcaatcagatcatagataaattttgggtgcagttccagcctcgcgtagtttatggatgtcagtgataagtatacaggctgcccttatatagttccataggagatagaaccctagcttatagtagatcattatatgttttatgaattgtgtaattaggtatctgctttgcagtgagtggctatatggtttataagctgtcaaatgtagaggtgcttataagcaaagttgggtattgttctcataggtagggctaggaaaaaaaagctcgagctcgatgagccggcttgcgctcgtgggggcttggctcgtagcggctcgacgcttagaatgagctcgagccgaacctgtttttgtggctcgagaaaagagcgagctagctcggctcactgcggctcatggctcaacctaataacaatttggtacataaaatcctaactaacatatagtgttagtaccaaat

SEQ ID NO: 15802 - DNA, 3553 bp, Zea Mays
atggcggcatacctgacgacgtttgagaggaagagggcgaggaccttggcgacggagccgggtagtaggttgacaatgtacttggcgcagagactagagacggcgcgaaggagagctcgccctcccctccgtcgcgggcaccacaggcaaactgctgcagtgacgacttcctggcgatggcttcctctgtcgctcggagccgcagccgccgcgcgctcggcgcatgtcctcggccgggctggtgtgaggaggtccaggatggtggccgggttccgtcgcacgatcttgttcccaatgcccaggtccccgctgccgccaacgagaggcgcggggccgagcggcgccaacaagtatggcgcctaccgcgcgcggttggcaagcctgccgtgccggttccacctgctagtgctccagcttgacgacgatgtcgccgacctgcgggagctggtaggccgcctggcgtcgaaggcctccgcggaggccatggccgaggcttatgaagactattcttcggaaagggctgaactattgttcaaaacctgccaagttgtcctaaaattctatccttgcgggccccatggtccagcctttgatggaggtttttcaggctttcagctcccaatagcttcccttttccttttcgtcgctcactggctgtctcgctctcacacagaagcagcaggcggtgttgtacgtcatcggtcagtcaacgctggaccaacccaaacccaagagaaggggcaccagaaacacctcaacaaaatcgtgagcagccttggggtctccctgaagtctgaaccacactcaacaaaacccatggtagtttcagaacaaacaaacaaacatggaagccatgggcgagcacacccagcgctcaaaatcctagagagggggaggaacatctcttcttcttcttccttcccttcctactcgagccggtggaggtcagcggggattgaggaggaggaggggaagaggcgaggcaggaaatcaagcgggaatccaagaaccgtaaggatgaccgtggtggagaggagctaaccagaacggtttaactggacccatccatagctggattaccaagcatatagggatgttggatttgagttacaacaagctgaatgggacaatcccctcagacttcctctcgcatcaggggttgcagagtgttgatcttaccagcaacttgcttaacggagccattcctgccaccttgtctcaaagcctctaccgcttgaggcttggtgggaaccagcttggtgagaacatcccagggtcagtttgtgataccatgggcttgacttatcttgagttggatgacaaccaattgacaggagttataccttcagagcttagcaaatgcaagaacttgacactgttgaatctggcatcaaatcgtttgcatggtttagtgcccagtattaccggtgaacttgacaaactggtagttctgaagcttcaaaataacaccctcactggacaggttccaagtacattttctgaattaaagagcctaatcacattgaatctcagtaagaattcactcagtggagcgataccaagcggaattttcgagttgccaaagctttcgaacttgtatttgcagggtaaccagtttagcggttttattccgttctccatcagttcatcaaaggatctaatcgagctcaacctgggtgataatgctctgactggtaacatcccaaccatgccaaccactgtgaccacatctcttctgaatcttagtcataaccttcttgacgggtctattccttcaaacatcaactctttaggtgaactagagattcttgatctttctcacaatgccctgtctggtgctgtgccatcttcactatggagcctgcaaagcctgacactgctggacctttcctataataatctgtctgggtctattcctagattcggtccaagtcaaactgtagatattgtcggaaatcctggtcttgtaattgtaaatggtacaggaaacaataatgacactcctactactggtaagaaaaagaggcactatttggtcgtcatcatcttcaccattgccggtactcttgttggattatgtgtgcttgctcttattattgtgatgtcattatcaaagagagtgtatcgtgttgaagatgaaggattaccagctggagaatctgtaccacaaataatcagtggtcgcctcataactatgaacagcatccacacctctgcagttgacttcgtgaaggcaatagaagcagtctccaaccatcagaacatctttttgaagaccagattctgcacctactacaaggctgtaatgcctaatggctcaacatactctgtaaaaaaacttaattctagtgacaagattttccaaattgggagccaggagaagttttctcatgaaattgaggttctagggaaactgaccaattcgaatgtcatggttccattggcctacatcttgactgcagattgtgcctacctaatctatgagcatgcatacaatggcactgtatctgatttgctacatggtggaaaatcagaagttatagactggccgtcacgatatagcgttgctttgggggtggcccaagggctgacatttcttcatgggtgcactcagccggttttgcttcttgatctgtcaacaaggaccatccacttgaagtcaaaaaatgagcctcagattggagatatcgagctttacaagattattgacccttccaggagtacgggaagcttttcaaccattgctggaacagttggttatattccaccagaatatgcatacactatgaggctgacgatggctggcaacgtctatagctttggagtcattttgcttgagctgctgacaggaaaaaaatcggtcagtaatggcactgagttagccaagtgggctctcagtctttcaggcaggcctgatgaaagggagcagatccttgacaccagggtctcaggaacttcaattgctgttcatagccagatgctgtcggtcctgaacatcgctctctcttgtgttgcattctctccggacgctcggccaaagatgcgcaacgtcttgaggatgctcttcaatgcaaagtgaatcagaagcagcctgcaatcagatcatagataaattttgggtgcagttccagcctcgcgtagtttatggatgtcagtgataagtatacaggctgcccttatatagttccataggagatagaaccctagcttatagtagatcattatatgttttatgaattgtgtaattaggtatctgctttgcagtgagtggctatatggtttataagctgtcaaatgtagaggtgcttataagcaaagttgggtattgttctcataggtagggctaggaaaaaaaagctcgagctcgatgagccggcttgcgctcgtgggggcttggctcgtagcggctcgacgcttagaatgagctcgagccgaacctgtttttgtggctcgagaaaagagcgagctagctcggctcactgcggctcatggctcaacctaataacaatttggtacataaaatcctaactaacatatagtgttagtaccaaat

SEQ ID NO: 15803 - DNA, 3888 bp, Zea Mays
atggcggcatacctgacgacgtttgagaggaagagggcgaggaccttggcgacggagccgggtagtaggttgacaatgtacttggcgcagagactagagacggcgcgaaggagagctcgccctcccctccgtcgcgggcaccacaggcaaactgctgcagtgacgacttcctggcgatggcttcctctgtcgctcggagccgcagccgccgcgcgctcggcgcatgtcctcggccgggctggtgtgaggaggtccaggatggtggccgggttccgtcgcacgatcttgttcccaatgcccaggtccccgctgccgccaacgagaggcgcggggccgagcggcgccaacaagtatggcgcctaccgcgcgcggttggcaagcctgccgtgccggttccacctgctagtgctccagcttgacgacgatgtcgccgacctgcgggagctggtaggccgcctggcgtcgaaggcctccgcggaggccatggccgaggcttatgaagactattcttcggaaagggctgaactattgttcaaaacctgccaagttgtcctaaaattctatccttgcgggccccatggtccagcctttgatggaggtttttcaggctttcagctcccaatagcttcccttttccttttcgtcgctcactggctgtctcgctctcacacagaagcagcaggcggtgttgtacgtcatcggtcagtcaacgctggaccaacccaaacccaagagaaggggcaccagaaacacctcaacaaaatcgtgagcagccttggggtctccctgaagtctgaaccacactcaacaaaacccatggtagtttcagaacaaacaaacaaacatggaagccatgggcgagcacacccagcgctcaaaatcctagagagggggaggaacatctcttcttcttcttccttcccttcctactcgagccggtggaggtcagcggggattgaggaggaggaggggaagaggcgaggcaggaaatcaagcgggaatccaagaaccgtaaggatgaccgtggtggagaggagcagaaatctgagtgcggaattgggttatttccccaagttaaggagcttcaacactagttccaatgacttgaatggtgatgttcctaccagtatggtcggctctttggaggagctggtattgtctagtaataatttgagtggtccaattcctctgcgtttgtttgaatatgaaaatcttactctgctagatctcagccagaataatctgaccggtgctattccagataacttcacgagtctctccaagcttgagactttgctcctttctggcaacaaattgattggggaaataccatcgagtctgtctaatgtgacaacactgtctaggtttgcagctaaccagaacggtttaactggacccatccatagctggattaccaagcatatagggatgttggatttgagttacaacaagctgaatgggacaatcccctcagacttcctctcgcatcaggggttgcagagtgttgatcttaccagcaacttgcttaacggagccattcctgccaccttgtctcaaagcctctaccgcttgaggcttggtgggaaccagcttggtgagaacatcccagggtcagtttgtgataccatgggcttgacttatcttgagttggatgacaaccaattgacaggagttataccttcagagcttagcaaatgcaagaacttgacactgttgaatctggcatcaaatcgtttgcatggtttagtgcccagtattaccggtgaacttgacaaactggtagttctgaagcttcaaaataacaccctcactggacaggttccaagtacattttctgaattaaagagcctaatcacattgaatctcagtaagaattcactcagtggagcgataccaagcggaattttcgagttgccaaagctttcgaacttgtatttgcagggtaaccagtttagcggttttattccgttctccatcagttcatcaaaggatctaatcgagctcaacctgggtgataatgctctgactggtaacatcccaaccatgccaaccactgtgaccacatctcttctgaatcttagtcataaccttcttgacgggtctattccttcaaacatcaactctttaggtgaactagagattcttgatctttctcacaatgccctgtctggtgctgtgccatcttcactatggagcctgcaaagcctgacactgctggacctttcctataataatctgtctgggtctattcctagattcggtccaagtcaaactgtagatattgtcggaaatcctggtcttgtaattgtaaatggtacaggaaacaataatgacactcctactactggtaagaaaaagaggcactatttggtcgtcatcatcttcaccattgccggtactcttgttggattatgtgtgcttgctcttattattgtgatgtcattatcaaagagagtgtatcgtgttgaagatgaaggattaccagctggagaatctgtaccacaaataatcagtggtcgcctcataactatgaacagcatccacacctctgcagttgacttcgtgaaggcaatagaagcagtctccaaccatcagaacatctttttgaagaccagattctgcacctactacaaggctgtaatgcctaatggctcaacatactctgtaaaaaaacttaattctagtgacaagattttccaaattgggagccaggagaagttttctcatgaaattgaggttctagggaaactgaccaattcgaatgtcatggttccattggcctacatcttgactgcagattgtgcctacctaatctatgagcatgcatacaatggcactgtatctgatttgctacatggtggaaaatcagaagttatagactggccgtcacgatatagcgttgctttgggggtggcccaagggctgacatttcttcatgggtgcactcagccggttttgcttcttgatctgtcaacaaggaccatccacttgaagtcaaaaaatgagcctcagattggagatatcgagctttacaagattattgacccttccaggagtacgggaagcttttcaaccattgctggaacagttggttatattccaccagaatatgcatacactatgaggctgacgatggctggcaacgtctatagctttggagtcattttgcttgagctgctgacaggaaaaaaatcggtcagtaatggcactgagttagccaagtgggctctcagtctttcaggcaggcctgatgaaagggagcagatccttgacaccagggtctcaggaacttcaattgctgttcatagccagatgctgtcggtcctgaacatcgctctctcttgtgttgcattctctccggacgctcggccaaagatgcgcaacgtcttgaggatgctcttcaatgcaaagtgaatcagaagcagcctgcaatcagatcatagataaattttgggtgcagttccagcctcgcgtagtttatggatgtcagtgataagtatacaggctgcccttatatagttccataggagatagaaccctagcttatagtagatcattatatgttttatgaattgtgtaattaggtatctgctttgcagtgagtggctatatggtttataagctgtcaaatgtagaggtgcttataagcaaagttgggtattgttctcataggtagggctaggaaaaaaaagctcgagctcgatgagccggcttgcgctcgtgggggcttggctcgtagcggctcgacgcttagaatgagctcgagccgaacctgtttttgtggctcgagaaaagagcgagctagctcggctcactgcggctcatggctcaacctaataacaatttggtacataaaatcctaactaacatatagtgttagtaccaaat

SEQ ID NO: 15804 - DNA, 796 bp, Zea Mays
caagaattgacagtcctgaagaataaaacccaaggaagccattgttgaagcagagcagctacaagaattgacagtcctgaagaacaaaacccaaggaagccattgttgagcgaaccagctagctgacaatggtacacacaacctaaagggaatgaagcaccctctgcttctcttctcttgctcgcgccggtgaagatccagccgttgagtgggaggagaagaggcagagctgagcaaccaaccggaggctgggacacaagaaacaaattcgctcagatggccatggcgcacaggagagtatgcttacaccaggagggtgaacgagaaggtggatgtcttcggcttcggcgtggtgctcttggagctcacgaccgacaggaacgccaacgacggcggcgaccatggttccctggcggattgggcggggcatcagtaccggtcaggggcgagcatcgctaccgacatctgcgtcgggtacgcggggtacgctgacgagatcgagaccgtgttcaggctgggcgtgaaatgcacggcgagctcgccgtcctcgcgccctactatggcggaggcgctgcagattttgctcagatgcagcgagcagacgctaaggaaaagcaggctggagtgtggcacggagtagaagcttgctgccacagcgggtagctaggtcgtgggaagcagctttccaacggcaaatcaattgacttaaaagttcaaacgcaagagtgacttttactacattgtctgaactcaagaactgacatctggtcatcagagatgttcacaaacgtcctgc

SEQ ID NO: 15805 - DNA, 2043 bp, Zea Mays
cactcgatcatcgagcatacgatcgagagatcatcaaccagatctttagctgttctgtgtgtctttggccatcgtcattgctagctagctcaggggggctgggcatggctcctcgaccttggttgtcaccactggctttgcctcttggtcccagcgtcgccttgttggtgcttgcttgttgctgcgttgctgaagcttcgatcgtggagcacaccttcaatgtcggaaacctttccgtgagccagctttgccagccgccgcgggtcatcacggcggtgaacgggcagctcccaggcccggccatccatgcccgcgagggagacactgtggtcgtccacctcgtcaaccagtcgccctacaacatcacaatccactggcacggcatattccagcgcggcacgccgtgggcggacggcccggcgatggtgacgcagtgtccggtcaagccgggcggcaactacacgtaccgcttcaacgcgacggcgcaggaggggacgctgtggtggcacgcccacatctccttcctccgcgccaccgtgtacggcgcgctggtcctccgcccccgcgccggcgccgacgcctacccgttccccaagccgcacgccgaggagaccgtcgtcctcggcgagtggtggaacgacaacgtctacgacctccagcagatggcgttcctcaccgggctcccggcgcgcagcgccgacgcgtacaccatcaacggcaagcctggagacctgtacaactgctccgacgggaaccagacgtaccggttccaggtgcggagcaacgagacgtacctgctgcggatcatcaacgccgcgctcaacacgcccctgttcttcaaggtggcgaaccacagcttcaccgtggtgggcgccgacgcggcctacacgacgccgtacgagacggacgtggtggtggtggcgccggggcagaccgtggacgcgctcatggtggccgcgcgcgccggcggccgctactacatggcggcgtcgccctacgacagcgccatcccgcaggggccaccgttcagcgacaccacggcgacggccgtggtcgagtacctcggctcggacacggaccccaccacgccgccgacgctgccgccgcggccggaggtcaacgacacggccacggcgttccggttcctgtccaacctgacggcgctggtgcggccggggcagccgacggtgccgctgtccgtggacacgcgcatgttcgtcaccgtcgggctcggcgtctccgactgccagccgacgcagctgctctgcaaccgcagcgccaccgtcttctcctccagcatgaacaacgcctccttcgtgctccccgcccccggcaagccgtccatgctgcaggcccactacggcggcgacggcgagacggcgggggtgtacacccgcgacttccccgaccgcccgccgctcgtcttcgactacaccgccgacgccagcgacaccgccgcgctgcagtacacggccaagtccaccagggtgaggacgctccggttcaaccagacggtggagatggtgctgcagaacacgcggctgatcgccagggagagccaccccatgcacctccacggcttcaacttctacgtgctcgcgcaggggtttggcaactacgacgaggccacggccacgccccgcttcaacctcgtcaacccgcaggagcgcaacaccgtcgccgtccccaccggcggctgggctgtcatccgcttcctggcaaacaaccctgggatgtggttcatgcactgccacttcgacaaccatcttgatctgggcctggccatggtgtttgaagtaccggacgggcccacgccggaaacgtcggtgccgccgcctccagcagacctaccacagtgctagccatcgtcgatccacagccaaccgtgattgtttggattcaccatgcaattgcgtgcggaagaaccttaattagcttggcgtgctatattactatatacgatgcgatttaaatttaactattgtttgtctgttatatatataggtcgtggtcgactggtagactcgcatacttgtatttgca

SEQ ID NO: 15806 - DNA, 2045 bp, Zea Mays
gcaagtcctatttttctaacaaatgtacatacgcagtctctagatcaagcaaaccaagcatctccacgcaaactgaaactgttgttcaaacacgcagtctccacttcctcacctaccacgaaccctaaagtcaacgtggtacattttttttacctattgatctagtatttatatataaacaccacagcgcatttttagcaacaagccaaactagcacacaagcgaaacttgtgaccgaagtggccactgatcgacggcccgcatggagctgaacctcgtgtcatgggtgtcgtccctcctcctcctggcgctctccgccgcgtatgtctactacacgacgaggcgccggtcgccgcagcggctgcctccgtcgccgccgggttggcccgtcatcgggcacctccacctgttgtccgagatgccccaccacgcgatggccgagctggcgcgtaccatgaaggcgccactgcttcggctgcgcctgggcagcgtgcgggccgtggtgatctccaagccggagctggcacgcgccgcgctgaccaccaacgacccggcgctggcgtcgcggccgcacctcctgtcgggccagttcctgtcgttcgggtgctccgacgtgacgttcgcgccggcggggccctaccaccgcatggcgcggcgggtggtggtctccgagctcctctcggcgcgccgcgtggcgacctacggcgccgtccgggtgaaggagctccgccgcctcctcgcgcgcctcaccaagaacacctccccggcgcagcagcccgtggacctcagcgagtgcttcctgaacctggccaacgacgtgctctgccgcgtcgcgttcgggcggcggttcccgcacggcaagggcgacaagctcggcgacgtcctcgccgaggcgcaggacctcttcgccggcttcaccgtcggcgacttcttcccggagctcgagcctgtcgctagcaccgtcactggcctccgccgccggcttaagagttgcctggccgacctccgcgcggtctgcgacgagatcgtggacgagcacatcagcggcaagcgccagcgcatccctggtgaccgtgaagaggattttgtcgacgtcctgctccgagtccagaagtcaccagatctggaggtcccactcaccgacgacaacctcaaggccctcgtactggacatgttcgtggccggcaccgacacgacgttcgcgaccctggagtgggtgatgacggagctagtccggcatccacgcatcctgaagaaggcgcaggacgaggtgcggcgtgtggtcggtggcaagggccgcgtggaggagtcggacgtcggcgagctccactacatgcgcgccatcatcaaggagaccttccggctgcacccggccgtgccgctgctggtgccgcgggagtccgtggcggcctgcacgctcggcggctaccacatcccggccaagacccgcgtgttcatcaacaccttcgccatgggccgggacccggagatctgggacagcccgctggagtaccggccggagcggttcgagaacggcggcgagatcgacctcaaggacccggactacaagctgctgccgttcggcggcggccggcggggatgccccggctacaccttcgcgctggcgaccgtgcaggtgtcgctggccagcctgctgtaccacttcgagtgggcgctgccgcccggcgttgctgccgaggacgtcaacctcgacgagtgcttcggcctcgccaccaggaagaaggagccgctgttcgtggtcgtcacaaagagcgaggcctacgagttcaagggggaggagcttaacgaggtttaattaataagtgtgattagattatgtataataagtcttggcgtcttggttccaaataaagtttgatgattattaactttattgttattttacagagcaagtattttggctagtgttctctcttggggcgctaatagacaacattgtatttttatttctttttgtaacgtagcggtttgcggaatataaaaaggatgtacaaggagggcgtatggatgtggctacatttttt

SEQ ID NO: 15807 - DNA, 2404 bp, Zea Mays
attcctccagctccccgaaactttttgcatctcctccaccaccaccgccccctccccttcgccccgacgaacacggcaccacgagccccgcacctcacacagatttagcctacctctcccaccgcggctacattcctcaccccaccctgtcggctgcataaacttttaaaaaaatgaaggcaaatatgggcacaaaagctcgtccactatctgttgacgcagacaaaggagagattggcgaaatagatacaagggctccttttgaatctgttaaagctgcagtgagtttatttggtgaagtcaaggtttcatctgacatatcagctgcaagaaagcctaaggttcctcaagcagagagggttttagccaaggagacagagctgcacttagcccagaaagagttgaataaatacaaggaacagctgaataatgctgagacaacgaaagtgcaggctctctctgagctagagaaagctaaaaaaactgtcgaggagctaacaaccaagctggatgtggttaacaagtccaaacagttggccattcaggcaacagaggatgcaaagactcgaaccaagcagcttgaaggtggcagcacaaatgaatgtctaggaacagatggtcctctgaggcaggaactcgaaagtgcaagggagcagcatgctatcgctttggcagaacttgatgcagcaaaacaggagcttagaaagctcaagaaggattttgaaacatctttggatatgaggttgtgtgctgcccagcaggaagacgaatcactccatacaactgaagccaacaaagaaaaagctaaccaacttcttggtgagattgcggaaattcaagaatcgcttatgcatgttaaggcagctacggtgcaagcacacgaagaagaggcacaaatccttgctgagaaggatgttgctagggccacgtataaacaagctttggaagaaacacagaagaaattgttgtctttgaggaatgattttgaccctgctgcttatgatagtctgaaagaaaaactagaacaaaccaattctgaggttgcatctatgcaaaaaaagatagaagatgctcgggctcaggatttagagtctgttgctgttgtcagcacagagttggatgatgctaaggaaatgttgcaaaaagtagcagaggaggaaagttctcttcgaagtttggtggaatcactgaaagtggaattggaagctgtaaaacaggagcacaaccagctcaaagagaaagacacagaaactgaatccattgtcggagatttacatgtcaagcttcagaaatgtaaatctgtgctggaggctgctgtggctgctgaatcaaaagctacgtcagcttctgatgacctgatgctggcccttcagcaactgtccgcggagtcaaacaatgcattgcaagaagctgagataatgcagaagagtgcggcggagctaagagaggaagccaaaaaggctcgggctgaactagcagaagccgaacaaaagttgcagttgacgttaaaggaagcagaagaggctaaagcagctgaagcaatggcccttgaccggatcaagcagctctcggacagagcaagtgccgctagagcatcaacttcagagtccggagcaaatatcgcaatttcaaaagaggagttcgaatctctaagccgaaaggtcgaggagtcagagaagttgagtgagatgaaagtcgctgctgccatggctcaagtggaagccatcagagccagcgagaacgaggcgatcaagaaactagaagctgctcgcaaggagatggaggacatggagttggcaacagaagaggccctaaagagggcagagatggccgaggcagccaaaaaggccgtggaaggtgagctcaagagatggcacgagaaagaacagaagaaaaccgcagaggccgcacagccttctgcgggggcagaagaactgggaagtgctgcgtcgccccctgtacgtcagacttctgccggaaaagcttccgagaagaacgaggggcatcagaggagcagtaaagcgctgctgaagaggagcttcatgctgccaaacatcgccagcatgttccataagaagaaaagccatccttccagttctccctcgcaccttcctggggaaaaatctgtgtgatctatccgaatccgaagctcctgtttgcgaactgaaatttccaaacttgaacgcttgcttttacactatattctgtataaaaatccgtctactcccttgcgccttgtagtaaatttcggacataattttaagattgcttgtaccccatatttttctgcactttcaggacttccggatgagtgcattgtacttcagcaacaacagtatctaagtcatgttcttgcaagcttccagaatagtggaagcatcacacatgctgcgaattgcattca

SEQ ID NO: 15808 - DNA, 2017 bp, Zea Mays
tagaaggctaaaagctgtctccggttcacctggcatgcaattacctatggctgcataccttggagagcttgttctaagcaatgatgttaaggtacttgtggcacaaaaggctggctccacactagtcaatatcatgaaaaaagggaatagagaggccagagaagcagctttgaaggcattgaaccaaatttcatcttatgatgttagtgcaaagatattaattgaagccggtattcttccgcctctcatcacagacctctttactgttggcagtaatcagcttccaatgagattgaaggaggtctcagcgaccattcttgcaaatgttgtggcatcgggtgcacgttttgagtccattccacttgatcataataggcagaccttggtgtctgaagacattgtacacaatctgcttcatctcataagcaacactggacctgcaattgagtgtaagttgctccaggttttcgttggtctaactgactcttcgacatctgtacaaaatatagttgatgctatcaaaagttcaggtgctattgtcagtttaattcagtttgttgaagcacctcaaagggaagtacgcatgaattccatcaagctcttgaataacatatcaccttatatgggtcaagaacttgctgatgcttttcgtggaaacttcagtcaactaagcagcttggtcaaggtaattgtcgataacaatggtatttctgaagagcaagcagctgctgctggccttgtagctgatcttcccatgggggactcagtcctcaccagacgtcttcttcaagatggggcattcgcagcaatcatttcaaaagttttaagaatccgacaaggggagattcgtggggggcgttttgttaacccattcctcgaaggtctggttagaatagtctcccggatcacatttgtcttggatgatgatccggatatcattgctgttgctcgtgattacaatcttgcttcactcttcactgatctgcttcagatgaatgggcttgacgtagtccagattgtctctgctgtttcactagagaaactctcgcagcagtcaaaacatcttacgaagatactgcctgctcccagcccagggctgtgcttttcaatatttccatgcctcagccagaagactgtagcaactggggtctgtagagttcactgtgggatttgttccgcaagggagagcttctgtctcttggaggggaaggcagtggagaagttagttgcctgcttggataataataacgagaaagtagtcgaagctgctctagcagcgctgtccactttactggaggatggagtggacattgaacaaggtgtcatggtgctgtgtgatgcagaaggaatcaacccgatactcgcggtattgtgcgagaacagaaacgaggcactgcgccagagagcggtgtgggcagtggagagaatcctgaggacggacgaaatagcgtatgagatatctggaaaccagaatgttggtacagccttggtggaggcattcaggcatggcgactctaggacaagacaagttgcagagcgagcattgaagcatgtagataagttgcccaatttctctgggatattttctaagatgggagcacaatgaccacgttccatggaagtactcgtgttctatttgacatgaggcaggcgcagatgaacacttgtgttcccagcaggccttcattggttttgctgactcgcactccagctagatgttgtagcgatctgattggtggaagaagaattaagtattgcacgtgttgtatagtgtgtatttgtacctgtagacttgtctgtactttcgagattggtcagattcatagaataggttgctatccctgttgtgtggagacaatacataatgcataaccgccagcactgggtggaaaaaaaagggaagaaatgtgaagtcgttgcgtcagatatgacatggttttctggtgtatgtcttaatgtctacagaggcaaagtgcaaaggactgtttggttcgctgtctaacttgccacattttag

SEQ ID NO: 15809 - DNA, 2017 bp, Zea Mays
gaaccttgttcttcatgatcgaagttcacctggcatgcaattacctatggctgcataccttggagagcttgttctaagcaatgatgttaaggtacttgtggcacaaaaggctggctccacactagtcaatatcatgaaaaaagggaatagagaggccagagaagcagctttgaaggcattgaaccaaatttcatcttatgatgttagtgcaaagatattaattgaagccggtattcttccgcctctcatcacagacctctttactgttggcagtaatcagcttccaatgagattgaaggaggtctcagcgaccattcttgcaaatgttgtggcatcgggtgcacgttttgagtccattccacttgatcataataggcagaccttggtgtctgaagacattgtacacaatctgcttcatctcataagcaacactggacctgcaattgagtgtaagttgctccaggttttcgttggtctaactgactcttcgacatctgtacaaaatatagttgatgctatcaaaagttcaggtgctattgtcagtttaattcagtttgttgaagcacctcaaagggaagtacgcatgaattccatcaagctcttgaataacatatcaccttatatgggtcaagaacttgctgatgcttttcgtggaaacttcagtcaactaagcagcttggtcaaggtaattgtcgataacaatggtatttctgaagagcaagcagctgctgctggccttgtagctgatcttcccatgggggactcagtcctcaccagacgtcttcttcaagatggggcattcgcagcaatcatttcaaaagttttaagaatccgacaaggggagattcgtggggggcgttttgttaacccattcctcgaaggtctggttagaatagtctcccggatcacatttgtcttggatgatgatccggatatcattgctgttgctcgtgattacaatcttgcttcactcttcactgatctgcttcagatgaatgggcttgacgtagtccagattgtctctgctgtttcactagagaaactctcgcagcagtcaaaacatcttacgaagatactgcctgctcccagcccagggctgtgcttttcaatatttccatgcctcagccagaagactgtagcaactggggtctgtagagttcactgtgggatttgttccgcaagggagagcttctgtctcttggaggggaaggcagtggagaagttagttgcctgcttggataataataacgagaaagtagtcgaagctgctctagcagcgctgtccactttactggaggatggagtggacattgaacaaggtgtcatggtgctgtgtgatgcagaaggaatcaacccgatactcgcggtattgtgcgagaacagaaacgaggcactgcgccagagagcggtgtgggcagtggagagaatcctgaggacggacgaaatagcgtatgagatatctggaaaccagaatgttggtacagccttggtggaggcattcaggcatggcgactctaggacaagacaagttgcagagcgagcattgaagcatgtagataagttgcccaatttctctgggatattttctaagatgggagcacaatgaccacgttccatggaagtactcgtgttctatttgacatgaggcaggcgcagatgaacacttgtgttcccagcaggccttcattggttttgctgactcgcactccagctagatgttgtagcgatctgattggtggaagaagaattaagtattgcacgtgttgtatagtgtgtatttgtacctgtagacttgtctgtactttcgagattggtcagattcatagaataggttgctatccctgttgtgtggagacaatacataatgcataaccgccagcactgggtggaaaaaaaagggaagaaatgtgaagtcgttgcgtcagatatgacatggttttctggtgtatgtcttaatgtctacagaggcaaagtgcaaaggactgtttggttcgctgtctaacttgccacattttag

SEQ ID NO: 15810 - DNA, 2036 bp, Zea Mays
gggagatgcagcctatgtgatggagaagcagagtgctcccaggttcacctggcatgcaattacctatggctgcataccttggagagcttgttctaagcaatgatgttaaggtacttgtggcacaaaaggctggctccacactagtcaatatcatgaaaaaagggaatagagaggccagagaagcagctttgaaggcattgaaccaaatttcatcttatgatgttagtgcaaagatattaattgaagccggtattcttccgcctctcatcacagacctctttactgttggcagtaatcagcttccaatgagattgaaggaggtctcagcgaccattcttgcaaatgttgtggcatcgggtgcacgttttgagtccattccacttgatcataataggcagaccttggtgtctgaagacattgtacacaatctgcttcatctcataagcaacactggacctgcaattgagtgtaagttgctccaggttttcgttggtctaactgactcttcgacatctgtacaaaatatagttgatgctatcaaaagttcaggtgctattgtcagtttaattcagtttgttgaagcacctcaaagggaagtacgcatgaattccatcaagctcttgaataacatatcaccttatatgggtcaagaacttgctgatgcttttcgtggaaacttcagtcaactaagcagcttggtcaaggtaattgtcgataacaatggtatttctgaagagcaagcagctgctgctggccttgtagctgatcttcccatgggggactcagtcctcaccagacgtcttcttcaagatggggcattcgcagcaatcatttcaaaagttttaagaatccgacaaggggagattcgtggggggcgttttgttaacccattcctcgaaggtctggttagaatagtctcccggatcacatttgtcttggatgatgatccggatatcattgctgttgctcgtgattacaatcttgcttcactcttcactgatctgcttcagatgaatgggcttgacgtagtccagattgtctctgctgtttcactagagaaactctcgcagcagtcaaaacatcttacgaagatactgcctgctcccagcccagggctgtgcttttcaatatttccatgcctcagccagaagactgtagcaactggggtctgtagagttcactgtgggatttgttccgcaagggagagcttctgtctcttggaggggaaggcagtggagaagttagttgcctgcttggataataataacgagaaagtagtcgaagctgctctagcagcgctgtccactttactggaggatggagtggacattgaacaaggtgtcatggtgctgtgtgatgcagaaggaatcaacccgatactcgcggtattgtgcgagaacagaaacgaggcactgcgccagagagcggtgtgggcagtggagagaatcctgaggacggacgaaatagcgtatgagatatctggaaaccagaatgttggtacagccttggtggaggcattcaggcatggcgactctaggacaagacaagttgcagagcgagcattgaagcatgtagataagttgcccaatttctctgggatattttctaagatgggagcacaatgaccacgttccatggaagtactcgtgttctatttgacatgaggcaggcgcagatgaacacttgtgttcccagcaggccttcattggttttgctgactcgcactccagctagatgttgtagcgatctgattggtggaagaagaattaagtattgcacgtgttgtatagtgtgtatttgtacctgtagacttgtctgtactttcgagattggtcagattcatagaataggttgctatccctgttgtgtggagacaatacataatgcataaccgccagcactgggtggaaaaaaaagggaagaaatgtgaagtcgttgcgtcagatatgacatggttttctggtgtatgtcttaatgtctacagaggcaaagtgcaaaggactgtttggttcgctgtctaacttgccacattttag

SEQ ID NO: 15811 - DNA, 3348 bp, Zea Mays
gctgtctctggattccggagtcattctacgacgcctgcctctgcagactgcagtccgagtccaggggagccgcgtccggtccgcgggttgccttctcttgcttacttgctagctcctcgtcgcagtagcggcagcggacgagcagtcgagcgcaacgccgccaatcattccttcctctgccttcctctctccctccccctcccggcgccatctcgacgctcggccccccgcgggcgggatccgtcgccacagatccgctgcctgacctgaccgcccctcatgctcgggtagcgcttttcagtttcccccgttccccgtgggccactcgacccgccgacggagcggaagggcggccccggccgtgaccgcggcgcgactcgcgaccctcccagtcccagaagcggcgtgcggcgaccgggaccggctgctggtggtgaattcgcgccggcgaactgaattcaagcggcgaatcccctcctctggtcctgtctcgagccctcggcgtccgcgcctcctccgtctcgccgccgttctcgacgcccgccgatccaacaccgggtctgcccaacagcccaagtgtttcactagtgatggcagaagtccaggatggtcattatgattcaatgtcacaggccactgatagcttgcgtgttgaacctatatatgagtcgttcctatgcccgcttaccaaacagtggaaggaggcttgtctgccctgtaactaagatggagctcagcaacactgagttaaatccaagcatagctctgaggaacactattgatgaatggatgaatcgcaacgaggcggccaaacttgacgtcgctcgtaagtcattgacttctgacagcacagaaagtgatatcctacaagcactccagtatgttgatgagatatgtcagagaagtcgatctaacaggcaggttgtgagaagagatgggttgataatcatgattgctgacttgttgaagaatagcagtacgaaagtacgccaagcggcactagggactctttgctccattgcaaaagatgacaatgaaaataaggttgagattgccgctggagacaatattcgcacaattgtaaagttcttaaatcatgggcagactcaggaaaaggagcaagcggtgtcactgttgtttgaactttcagaaaataaggctctttcagaaagaattggcagtgtttctggagctattcttatacttgttggtttgtcaagcagtaaagtagaaaacttgctcattgttgacagagctgagaagacattggaaaatttagagagctgtgaaaaaaatgttagacagatggctgaaaatggacgattgcaacccctcctgaggctgcttcttgatggttcacctggcatgcaattacctatggctgcataccttggagagcttgttctaagcaatgatgttaaggtacttgtggcacaaaaggctggctccacactagtcaatatcatgaaaaaagggaatagagaggccagagaagcagctttgaaggcattgaaccaaatttcatcttatgatgttagtgcaaagatattaattgaagccggtattcttccgcctctcatcacagacctctttactgttggcagtaatcagcttccaatgagattgaaggaggtctcagcgaccattcttgcaaatgttgtggcatcgggtgcacgttttgagtccattccacttgatcataataggcagaccttggtgtctgaagacattgtacacaatctgcttcatctcataagcaacactggacctgcaattgagtgtaagttgctccaggttttcgttggtctaactgactcttcgacatctgtacaaaatatagttgatgctatcaaaagttcaggtgctattgtcagtttaattcagtttgttgaagcacctcaaagggaagtacgcatgaattccatcaagctcttgaataacatatcaccttatatgggtcaagaacttgctgatgcttttcgtggaaacttcagtcaactaagcagcttggtcaaggtaattgtcgataacaatggtatttctgaagagcaagcagctgctgctggccttgtagctgatcttcccatgggggactcagtcctcaccagacgtcttcttcaagatggggcattcgcagcaatcatttcaaaagttttaagaatccgacaaggggagattcgtggggggcgttttgttaacccattcctcgaaggtctggttagaatagtctcccggatcacatttgtcttggatgatgatccggatatcattgctgttgctcgtgattacaatcttgcttcactcttcactgatctgcttcagatgaatgggcttgacgtagtccagattgtctctgctgtttcactagagaaactctcgcagcagtcaaaacatcttacgaagatactgcctgctcccagcccagggctgtgcttttcaatatttccatgcctcagccagaagactgtagcaactggggtctgtagagttcactgtgggatttgttccgcaagggagagcttctgtctcttggaggggaaggcagtggagaagttagttgcctgcttggataataataacgagaaagtagtcgaagctgctctagcagcgctgtccactttactggaggatggagtggacattgaacaaggtgtcatggtgctgtgtgatgcagaaggaatcaacccgatactcgcggtattgtgcgagaacagaaacgaggcactgcgccagagagcggtgtgggcagtggagagaatcctgaggacggacgaaatagcgtatgagatatctggaaaccagaatgttggtacagccttggtggaggcattcaggcatggcgactctaggacaagacaagttgcagagcgagcattgaagcatgtagataagttgcccaatttctctgggatattttctaagatgggagcacaatgaccacgttccatggaagtactcgtgttctatttgacatgaggcaggcgcagatgaacacttgtgttcccagcaggccttcattggttttgctgactcgcactccagctagatgttgtagcgatctgattggtggaagaagaattaagtattgcacgtgttgtatagtgtgtatttgtacctgtagacttgtctgtactttcgagattggtcagattcatagaataggttgctatccctgttgtgtggagacaatacataatgcataaccgccagcactgggtggaaaaaaaagggaagaaatgtgaagtcgttgcgtcagatatgacatggttttctggtgtatgtcttaatgtctacagaggcaaagtgcaaaggactgtttggttcgctgtctaacttgccacattttag

SEQ ID NO: 15812 - DNA, 1445 bp, Zea Mays
cctgcctctgcagactgcagtccgagtccaggggagccgcgtccggtccgcgggttgccttctcttgcttacttgctagctcctcgtcgcagtagcggcagcggacgagcagtcgagcgcaacgccgccaatcattccttcctctgccttcctctctccctccccctcccggcgccatctcgacgctcggccccccgcgggcgggatccgtcgccacagatccgctgcctgacctgaccgcccctcatgctcgggtagcgcttttcagtttcccccgttccccgtgggccactcgacccgccgacggagcggaagggcggccccggccgtgaccgcggcgcgactcgcgaccctcccagtcccagaagcggcgtgcggcgaccgggaccggctgctggtggtgaattcgcgccggcgaactgaattcaagcggcgaatcccctcctctggtcctgtctcgagccctcggcgtccgcgcctcctccgtctcgccgccgttctcgacgcccgccgatccaacaccgggtctgcccaacagcccaagtgtttcactagtgatggcagaagtccaggatggtcattatgattcaatgtcacaggccactgatagcttgcgtgttgaacctatatatgagtcgttcctatgcccgcttaccaaacaggttatgcgggatcctgtttctattgacagtggtgttacgtttgaacgcaatgccattttgaattatttcaatgaatgtcttagcagtggaaggaggcttgtctgccctgtaactaagatggagctcagcaacactgagttaaatccaagcatagctctgaggaacactattgatgaatggatgaatcgcaacgaggcggccaaacttgacgtcgctcgtaagtcattgacttctgacagcacagaaagtgatatcctacaagcactccagtatgttgatgagatatgtcagagaagtcgatctaacaggcaggttgtgagaagagatgggttgataatcatgattgctgacttgttgaagaatagcagtacgaaagtacgccaagcggcactagggactctttgctccattgcaaaagatgacaatgaaaataaggttgagattgccgctggagacaatattcgcacaattgtaaagttcttaaatcatgggcagactcaggaaaaggagcaagcggtgtcactgttgtttgaactttcagaaaataaggctctttcagaaagaattggcagtgtttctggagctattcttatacttgttggtttgtcaagcagtaaagtagaaaacttgctcattgttgacagagctgagaagacattggaaaatttagagagctgtgaaaaaaatgttagacagatggctgaaaatggacgattgcaacccctcctgaggctgcttcttgatgatcaacagaatacacctattacagtgtagtttgacagc

SEQ ID NO: 15813 - DNA, 1468 bp, Zea Mays
gcagactgcagtccgagtccaggggagccgcgtccggtccgcgggttgccttctcttgcttacttgctagctcctcgtcgcagtagcggcagcggacgagcagtcgagcgcaacgccgccaatcattccttcctctgccttcctctctccctccccctcccggcgccatctcgacgctcggccccccgcgggcgggatccgtcgccacagatccgctgcctgacctgaccgcccctcatgctcgggtagcgcttttcagtttcccccgttccccgtgggccactcgacccgccgacggagcggaagggcggccccggccgtgaccgcggcgcgactcgcgaccctcccagtcccagaagcggcgtgcggcgaccgggaccggctgctggtggtgaattcgcgccggcgaactgaattcaagcggcgaatcccctcctctggtcctgtctcgagccctcggcgtccgcgcctcctccgtctcgccgccgttctcgacgcccgccgatccaacaccgggtctgcccaacagcccaagtgtttcactagtgatggcagaagtccaggatggtcattatgattcaatgtcacaggccactgatagcttgcgtgttgaacctatatatgagtcgttcctatgcccgcttaccaaacaggttatgcgggatcctgtttctattgacagtggtgttacgtttgaacgcaatgccattttgaattatttcaatgaatgtcttagcagtggaaggaggcttgtctgccctgtaactaagatggagctcagcaacactgagttaaatccaagcatagctctgaggaacactattgatgaatggatgaatcgcaacgaggcggccaaacttgacgtcgctcgtaagtcattgacttctgacagcacagaaagtgatatcctacaagcactccagtatgttgatgagatatgtcagagaagtcgatctaacaggcaggttgtgagaagagatgggttgataatcatgattgctgacttgttgaagaatagcagtacgaaagtacgccaagcggcactagggactctttgctccattgcaaaagatgacaatgaaaataaggttgagattgccgctggagacaatattcgcacaattgtaaagttcttaaatcatgggcagactcaggaaaaggagcaagcggtgtcactgttgtttgaactttcagaaaataaggctctttcagaaagaattggcagtgtttctggagctattcttatacttgttggtttgtcaagcagtaaagtagaaaacttgctcattgttgacagagctgagaagacattggaaaatttagagagctgtgaaaaaaatgttagacagatggctgaaaatggacgattgcaacccctcctgaggctgcttcttgatgggagtagggcgtctccaacgcctagccaaaagtagcgagagagctcccagacggcatgaaggagaagcag

SEQ ID NO: 15814 - DNA, 2937 bp, Zea Mays
gcgcgcgagattgaccaaaaattcacccatctgtagctgctccccgaacccctacccacaccgctgccgccaccgctgccgacgtaatcgcacggccgctccccgacccacacctcgcacaatgtgcgccccgccgccgccgcctcccctctagatcctcaatgcaccgctaggtcccgtccacagccgctcactgccgccacctctaacgcgcctaggaccatcgccacctccacatctagcttctggagtcgagatccatggtcgactccactggaggagcccggatctggcctaccgggcacggtctcgagctttaggcatctcagcaggcagcggtgtactccgtcatcgcccaatggagcaaccaaccaagcaagaactctatccatgctcgtgtcgaggcgttgtctctactctctactccatcccgcgtctgcgcgtcgtcctctacggatccgtccaccgctgcgccagcacgatgtgaatcgagacacgcctccgcctatgcgtccaagacacgcctctgcatctgcgtccgtgcactggctacgcggcatcgattacggagtggagtctacctactcgcaattctctacatatgaggacttgaggatttagagcaagacctaaagtaagttactctgaggtatatacattttggtcccctccgatctgcttcaccttcatccttaattacatcccaaacatttataagtctgatgttgcttattagagtctttttaaaaaaattgaaaacacaagagagttgcatgtcctattaaaaagaggatggtcatattgtggaactgttattttgaaacggagtggtcttattgtctgaacctgctattttgagctctgaaatatatgtgattgactatagaattatttcaagaacaaactgttattggcatttgttcttgcgagtgtccagcagtagcatgcttgtcactctggtttggaaatattgaaaatttcatctttgaccgactaataaagagtagaacaaaatatatttgcatttcccctagtcaatgaaccagttcaatttacaccaaacaatttctatacaaaggtatacccttgaagggacacactttatgattccatggtttgaatgaccaatcatttatgatgtccgtgctcgactgaatctcgtggagagtacttctgggagcctagaccttcagatggtaagtatatacatcacttttgttcgattccaccggcctctcaatcttcatgattcagagcctcttagttcttatgtaaatgttgatgttgactgcttgatatgcatgcttttatgtccattggttattgcatcacaatgttcatctaaaatttgggctgataaacctgtttcttccttgacttattgttcatttgatcccttaaagctaccactggctattatgattatttcagcaccaatagtttgtctgcagttttcattgaaatttttattcattcaaaagttgggaccaatgaacctgataaattcagaacatgttatggctttgaggaataaatgcagtttttataatttatcgtttatgtttatatcataatatgtcatttgtacccttgtctaagtatagaaacggttgcttgtcttatgtcaacacaaatcaaattttgtaggatttgtggttttgtataaggacgatgaaagatttaagtgtccaacatttgatctttaaactttagtcaactattgtatttttagaccaagaaatcaaacgtatccttacagattaagaaatcaccaatgcaacaactattttggattccaagcaatttcggtgttgcaaatgaggctagcatctcacctgaagttctcaaaatatattttttcctgatcatgggttgtatcattgtctgattgacattttcatgattactctaaggtatatacattttagtccactctgatctgctccaccttcatccttaattacattccaaacatttataaggcgaacgttgtttattagattctttttaaaaaaactgaaaatatagcagagttgtatgtcctattaaaaagaggatggtcatattgcatgaactgttattgcctgaactttttattttgaaacggagtggtcttattgcctgaacctgatattttgagctctgaaatatgtgattgactgtagaattatttcaagaacagactgtattgtagtaacctttttctcctggagtataattatctgtattcgaatgctcctttttatatgatgatgaattgttctacagtatctttatttgcaaatgtagcaacaatatactaatttgatgtacttttttctagggtgttctggacaatgaaagcttgtaccttaaaacaggaggatacaagaagctggagtggttgtctgaaggcttttgaactgcttgaagcattagtgtagctttggtgcttttgtgactgatcagctctggagcagctagagtgatgtagttgtgggcttttgaacaatacctagagtgatatgaaacattagtgatgtagttgtgggcttttgaactgcttcacgctggagtgatgtcgctgtggtgcttttgtgactgatcatctctggagcttttgtgaatgatctagctagctatctgtaaatgatctagttgtgaatgatattataattgtgatgcttttgtgaatatataattgtggtgtttttgtgtttatgtgatggatctatgactctagtatattgattaactgtgtatgtctttatgatttgtgtataaaaatatgtgatttgtggtgcttaattaaatgtatattattattaataacaaccataaaaagggtgactttctgttggttgcaaaatgtatagtatgacgacttacagttggttgctaaatctatagtacagcaacccacggttggtcgctaaatatacaatatcagcaacggac

SEQ ID NO: 15815 - DNA, 2943 bp, Zea Mays
gcgcgcgagattgaccaaaaattcacccatctgtagctgctccccgaacccctacccacaccgctgccgccaccgctgccgacgtaatcgcacggccgctccccgacccacacctcgcacaatgtgcgccccgccgccgccgcctcccctctagatcctcaatgcaccgctaggtcccgtccacagccgctcactgccgccacctctaacgcgcctaggaccatcgccacctccacatctagcttctggagtcgagatccatggtcgactccactggaggagcccggatctggcctaccgggcacggtctcgagctttaggcatctcagcaggcagcggtgtactccgtcatcgcccaatggagcaaccaaccaagcaagaactctatccatgctcgtgtcgaggcgttgtctctactctctactccatcccgcgtctgcgcgtcgtcctctacggatccgtccaccgctgcgccagcacgatgtgaatcgagacacgcctccgcctatgcgtccaagacacgcctctgcatctgcgtccgtgcactggctacgcggcatcgattacggagtggaggtatgggattattgtctgttgcatccaaatttttatacactttattatgttcagatttggagccttgactcctaaacctgaatgtcatctacctgagacgaattttaaggttgggagattcctggaatttttcacgcgttatggtcggcaatatttgatttttgttgatgaagataaggaagcacgcatatgtatttttatccagaaacgcactgcttattacttatattaagtacccacgcagcatagtgctgtactaataatattgcaagctttgtttgtgtcaaatcatgtatggaacttgcggtagggggaatttgtttttaagaagcgaaaatcattgtctcttgaagcttcagtcttctcatctcccaatctactgttactacttacaccttcatctaaacgcacttgttgtttctggaacgctaagaaattcatgtaacaaatcatgtggaagttgatagattagttagcttataataccaataacctagtagtgcgttggtgcagatactagctatggcatatctgcaatgagaaaaaagttggttttttaacacacgtcaaaacgtgtcatttttctattaagaagagcacgtgaagtggttcattggggcctccaattagtaattaacaccaatatttgtctcatgctaaatactgaactaaatgttaattttatgtctttgcagtttttaactgggctcaaacatgcctagtttcccatttaacaactatgaactctggggttaaatactacacaatactaggaaacatgtaattgtattggaatatatccaatttatacaggatgatttacaaaatgtaggctttatttacaacatgtaattgtatttgtgcaaatgattctctttccttgttatcgattttgagtgggcagtagtgacatcccaatctttaaacccaccacaattggtagatcttcctagcatgatagggcactaatccatgaacattcttctgtggttaaatttttggacggaacttttacattaatcaatttcagcatacattaaaatactgtgaacaaattaatagtgtttggaagacacgtacatgaggaccaatgggattatttgacggatacttgtcttaggttttctagaaattggttagtaatgtaactcaatattttctagaaaacactaatatatatgttttggctatggtggtcattgaagaaacgtatagtgacaagcatatgttcctcctgctttacaaggatgtttgatgttagttcacttttgtcagaaagcacatccagctactattttttcctcccattggatcagcatcttcaatctttttgtttaggcacattgtagtcttacaagcctccacactagagatacatgatagatactacacatatgtaatgaaccagattctacattactcttaacacaaattatattttaagtgtatgcatctgtatttctagaaaacattaatataactcaagacttctacaatactattaactgcaatttatatcaatttgcaaaatgtggcaggaacatagtttgattgatattttgtttgattatggatagtctacctactcgcaattctctacatatgaggacttgaggatttagagcaagacctaaagtatacccttgaagggacacactttatgattccatggtttgaatgaccaatcatttatgatgtccgtgctcgactgaatctcgtggagagtacttctgggagcctagaccttcagatgggtgttctggacaatgaaagcttgtaccttaaaacaggaggatacaagaagctggagtggttgtctgaaggcttttgaactgcttgaagcattagtgtagctttggtgcttttgtgactgatcagctctggagcagctagagtgatgtagttgtgggcttttgaacaatacctagagtgatatgaaacattagtgatgtagttgtgggcttttgaactgcttcacgctggagtgatgtcgctgtggtgcttttgtgactgatcatctctggagcttttgtgaatgatctagctagctatctgtaaatgatctagttgtgaatgatattataattgtgatgcttttgtgaatatataattgtggtgtttttgtgtttatgtgatggatctatgactctagtatattgattaactgtgtatgtctttatgatttgtgtataaaaatatgtgatttgtggtgcttaattaaatgtatattattattaataacaaccataaaaagggtgactttctgttggttgcaaaatgtatagtatgacgacttacagttggttgctaaatctatagtacagcaacccacggttggtcgctaaatatacaatatcagcaacggac

SEQ ID NO: 15816 - DNA, 2532 bp, Zea Mays
gcgcgcgagattgaccaaaaattcacccatctgtagctgctccccgaacccctacccacaccgctgccgccaccgctgccgacgtaatcgcacggccgctccccgacccacacctcgcacaatgtgcgccccgccgccgccgcctcccctctagatcctcaatgcaccgctaggtcccgtccacagccgctcactgccgccacctctaacgcgcctaggaccatcgccacctccacatctagcttctggagtcgagatccatggtcgactccactggaggagcccggatctggcctaccgggcacggtctcgagctttaggcatctcagcaggcagcggtgtactccgtcatcgcccaatggagcaaccaaccaagcaagaactctatccatgctcgtgtcgaggcgttgtctctactctctactccatcccgcgtctgcgcgtcgtcctctacggatccgtccaccgctgcgccagcacgatgtgaatcgagacacgcctccgcctatgcgtccaagacacgcctctgcatctgcgtccgtgcactggctacgcggcatcgattacggagtggaggaacatagtttgattgatattttgtttgattatggatagtctacctactcgcaattctctacatatgaggacttgaggatttagagcaagacctaaagtatacccttgaagggacacactttatgattccatggtttgaatgaccaatcatttatgatgtccgtgctcgactgaatctcgtggagagtacttctgggagcctagaccttcagatggtaagtatatacatcacttttgttcgattccaccggcctctcaatcttcatgattcagagcctcttagttcttatgtaaatgttgatgttgactgcttgatatgcatgcttttatgtccattggttattgcatcacaatgttcatctaaaatttgggctgataaacctgtttcttccttgacttattgttcatttgatcccttaaagctaccactggctattatgattatttcagcaccaatagtttgtctgcagttttcattgaaatttttattcattcaaaagttgggaccaatgaacctgataaattcagaacatgttatggctttgaggaataaatgcagtttttataatttatcgtttatgtttatatcataatatgtcatttgtacccttgtctaagtatagaaacggttgcttgtcttatgtcaacacaaatcaaattttgtaggatttgtggttttgtataaggacgatgaaagatttaagtgtccaacatttgatctttaaactttagtcaactattgtatttttagaccaagaaatcaaacgtatccttacagattaagaaatcaccaatgcaacaactattttggattccaagcaatttcggtgttgcaaatgaggctagcatctcacctgaagttctcaaaatatattttttcctgatcatgggttgtatcattgtctgattgacattttcatgattactctaaggtatatacattttagtccactctgatctgctccaccttcatccttaattacattccaaacatttataaggcgaacgttgtttattagattctttttaaaaaaactgaaaatatagcagagttgtatgtcctattaaaaagaggatggtcatattgcatgaactgttattgcctgaactttttattttgaaacggagtggtcttattgcctgaacctgatattttgagctctgaaatatgtgattgactgtagaattatttcaagaacagactgtattgtagtaacctttttctcctggagtataattatctgtattcgaatgctcctttttatatgatgatgaattgttctacagtatctttatttgcaaatgtagcaacaatatactaatttgatgtacttttttctagggtgttctggacaatgaaagcttgtaccttaaaacaggaggatacaagaagctggagtggttgtctgaaggcttttgaactgcttgaagcattagtgtagctttggtgcttttgtgactgatcagctctggagcagctagagtgatgtagttgtgggcttttgaacaatacctagagtgatatgaaacattagtgatgtagttgtgggcttttgaactgcttcacgctggagtgatgtcgctgtggtgcttttgtgactgatcatctctggagcttttgtgaatgatctagctagctatctgtaaatgatctagttgtgaatgatattataattgtgatgcttttgtgaatatataattgtggtgtttttgtgtttatgtgatggatctatgactctagtatattgattaactgtgtatgtctttatgatttgtgtataaaaatatgtgatttgtggtgcttaattaaatgtatattattattaataacaaccataaaaagggtgactttctgttggttgcaaaatgtatagtatgacgacttacagttggttgctaaatctatagtacagcaacccacggttggtcgctaaatatacaatatcagcaacggac

SEQ ID NO: 15817 - DNA, 1810 bp, Zea Mays
gcgcgcgagattgaccaaaaattcacccatctgtagctgctccccgaacccctacccacaccgctgccgccaccgctgccgacgtaatcgcacggccgctccccgacccacacctcgcacaatgtgcgccccgccgccgccgcctcccctctagatcctcaatgcaccgctaggtcccgtccacagccgctcactgccgccacctctaacgcgcctaggaccatcgccacctccacatctagcttctggagtcgagatccatggtcgactccactggaggagcccggatctggcctaccgggcacggtctcgagctttaggcatctcagcaggcagcggtgtactccgtcatcgcccaatggagcaaccaaccaagcaagaactctatccatgctcgtgtcgaggcgttgtctctactctctactccatcccgcgtctgcgcgtcgtcctctacggatccgtccaccgctgcgccagcacgatgtgaatcgagacacgcctccgcctatgcgtccaagacacgcctctgcatctgcgtccgtgcactggctacgcggcatcgattacggagtggagtctacctactcgcaattctctacatatgaggacttgaggatttagagcaagacctaaagtaagttactctgaggtatatacattttggtcccctccgatctgcttcaccttcatccttaattacatcccaaacatttataagtctgatgttgcttattagagtctttttaaaaaaattgaaaacacaagagagttgcatgtcctattaaaaagaggatggtcatattgtggaactgttattttgaaacggagtggtcttattgtctgaacctgctattttgagctctgaaatatatgtgattgactatagaattatttcaagaacaaactgttattggcatttgttcttgcgagtgtccagcagtagcatgcttgtcactctggtttggaaatattgaaaatttcatctttgaccgactaataaagagtagaacaaaatatatttgcatttcccctagtcaatgaaccagttcaatttacaccaaacaatttctatacaaaggtatacccttgaagggacacactttatgattccatggtttgaatgaccaatcatttatgatgtccgtgctcgactgaatctcgtggagagtacttctgggagcctagaccttcagatgggtgttctggacaatgaaagcttgtaccttaaaacaggaggatacaagaagctggagtggttgtctgaaggcttttgaactgcttgaagcattagtgtagctttggtgcttttgtgactgatcagctctggagcagctagagtgatgtagttgtgggcttttgaacaatacctagagtgatatgaaacattagtgatgtagttgtgggcttttgaactgcttcacgctggagtgatgtcgctgtggtgcttttgtgactgatcatctctggagcttttgtgaatgatctagctagctatctgtaaatgatctagttgtgaatgatattataattgtgatgcttttgtgaatatataattgtggtgtttttgtgtttatgtgatggatctatgactctagtatattgattaactgtgtatgtctttatgatttgtgtataaaaatatgtgatttgtggtgcttaattaaatgtatattattattaataacaaccataaaaagggtgactttctgttggttgcaaaatgtatagtatgacgacttacagttggttgctaaatctatagtacagcaacccacggttggtcgctaaatatacaatatcagcaacggac

SEQ ID NO: 15818 - DNA, 2493 bp, Zea Mays
gcgcgcgagattgaccaaaaattcacccatctgtagctgctccccgaacccctacccacaccgctgccgccaccgctgccgacgtaatcgcacggccgctccccgacccacacctcgcacaatgtgcgccccgccgccgccgcctcccctctagatcctcaatgcaccgctaggtcccgtccacagccgctcactgccgccacctctaacgcgcctaggaccatcgccacctccacatctagcttctggagtcgagatccatggtcgactccactggaggagcccggatctggcctaccgggcacggtctcgagctttaggcatctcagcaggcagcggtgtactccgtcatcgcccaatggagcaaccaaccaagcaagaactctatccatgctcgtgtcgaggcgttgtctctactctctactccatcccgcgtctgcgcgtcgtcctctacggatccgtccaccgctgcgccagcacgatgtgaatcgagacacgcctccgcctatgcgtccaagacacgcctctgcatctgcgtccgtgcactggctacgcggcatcgattacggagtggagtctacctactcgcaattctctacatatgaggacttgaggatttagagcaagacctaaagtatacccttgaagggacacactttatgattccatggtttgaatgaccaatcatttatgatgtccgtgctcgactgaatctcgtggagagtacttctgggagcctagaccttcagatggtaagtatatacatcacttttgttcgattccaccggcctctcaatcttcatgattcagagcctcttagttcttatgtaaatgttgatgttgactgcttgatatgcatgcttttatgtccattggttattgcatcacaatgttcatctaaaatttgggctgataaacctgtttcttccttgacttattgttcatttgatcccttaaagctaccactggctattatgattatttcagcaccaatagtttgtctgcagttttcattgaaatttttattcattcaaaagttgggaccaatgaacctgataaattcagaacatgttatggctttgaggaataaatgcagtttttataatttatcgtttatgtttatatcataatatgtcatttgtacccttgtctaagtatagaaacggttgcttgtcttatgtcaacacaaatcaaattttgtaggatttgtggttttgtataaggacgatgaaagatttaagtgtccaacatttgatctttaaactttagtcaactattgtatttttagaccaagaaatcaaacgtatccttacagattaagaaatcaccaatgcaacaactattttggattccaagcaatttcggtgttgcaaatgaggctagcatctcacctgaagttctcaaaatatattttttcctgatcatgggttgtatcattgtctgattgacattttcatgattactctaaggtatatacattttagtccactctgatctgctccaccttcatccttaattacattccaaacatttataaggcgaacgttgtttattagattctttttaaaaaaactgaaaatatagcagagttgtatgtcctattaaaaagaggatggtcatattgcatgaactgttattgcctgaactttttattttgaaacggagtggtcttattgcctgaacctgatattttgagctctgaaatatgtgattgactgtagaattatttcaagaacagactgtattgtagtaacctttttctcctggagtataattatctgtattcgaatgctcctttttatatgatgatgaattgttctacagtatctttatttgcaaatgtagcaacaatatactaatttgatgtacttttttctagggtgttctggacaatgaaagcttgtaccttaaaacaggaggatacaagaagctggagtggttgtctgaaggcttttgaactgcttgaagcattagtgtagctttggtgcttttgtgactgatcagctctggagcagctagagtgatgtagttgtgggcttttgaacaatacctagagtgatatgaaacattagtgatgtagttgtgggcttttgaactgcttcacgctggagtgatgtcgctgtggtgcttttgtgactgatcatctctggagcttttgtgaatgatctagctagctatctgtaaatgatctagttgtgaatgatattataattgtgatgcttttgtgaatatataattgtggtgtttttgtgtttatgtgatggatctatgactctagtatattgattaactgtgtatgtctttatgatttgtgtataaaaatatgtgatttgtggtgcttaattaaatgtatattattattaataacaaccataaaaagggtgactttctgttggttgcaaaatgtatagtatgacgacttacagttggttgctaaatctatagtacagcaacccacggttggtcgctaaatatacaatatcagcaacggac

SEQ ID NO: 15819 - DNA, 2976 bp, Zea Mays
gcgcgcgagattgaccaaaaattcacccatctgtagctgctccccgaacccctacccacaccgctgccgccaccgctgccgacgtaatcgcacggccgctccccgacccacacctcgcacaatgtgcgccccgccgccgccgcctcccctctagatcctcaatgcaccgctaggtcccgtccacagccgctcactgccgccacctctaacgcgcctaggaccatcgccacctccacatctagcttctggagtcgagatccatggtcgactccactggaggagcccggatctggcctaccgggcacggtctcgagctttaggcatctcagcaggcagcggtgtactccgtcatcgcccaatggagcaaccaaccaagcaagaactctatccatgctcgtgtcgaggcgttgtctctactctctactccatcccgcgtctgcgcgtcgtcctctacggatccgtccaccgctgcgccagcacgatgtgaatcgagacacgcctccgcctatgcgtccaagacacgcctctgcatctgcgtccgtgcactggctacgcggcatcgattacggagtggaggaacatagtttgattgatattttgtttgattatggatagtctacctactcgcaattctctacatatgaggacttgaggatttagagcaagacctaaagtaagttactctgaggtatatacattttggtcccctccgatctgcttcaccttcatccttaattacatcccaaacatttataagtctgatgttgcttattagagtctttttaaaaaaattgaaaacacaagagagttgcatgtcctattaaaaagaggatggtcatattgtggaactgttattttgaaacggagtggtcttattgtctgaacctgctattttgagctctgaaatatatgtgattgactatagaattatttcaagaacaaactgttattggcatttgttcttgcgagtgtccagcagtagcatgcttgtcactctggtttggaaatattgaaaatttcatctttgaccgactaataaagagtagaacaaaatatatttgcatttcccctagtcaatgaaccagttcaatttacaccaaacaatttctatacaaaggtatacccttgaagggacacactttatgattccatggtttgaatgaccaatcatttatgatgtccgtgctcgactgaatctcgtggagagtacttctgggagcctagaccttcagatggtaagtatatacatcacttttgttcgattccaccggcctctcaatcttcatgattcagagcctcttagttcttatgtaaatgttgatgttgactgcttgatatgcatgcttttatgtccattggttattgcatcacaatgttcatctaaaatttgggctgataaacctgtttcttccttgacttattgttcatttgatcccttaaagctaccactggctattatgattatttcagcaccaatagtttgtctgcagttttcattgaaatttttattcattcaaaagttgggaccaatgaacctgataaattcagaacatgttatggctttgaggaataaatgcagtttttataatttatcgtttatgtttatatcataatatgtcatttgtacccttgtctaagtatagaaacggttgcttgtcttatgtcaacacaaatcaaattttgtaggatttgtggttttgtataaggacgatgaaagatttaagtgtccaacatttgatctttaaactttagtcaactattgtatttttagaccaagaaatcaaacgtatccttacagattaagaaatcaccaatgcaacaactattttggattccaagcaatttcggtgttgcaaatgaggctagcatctcacctgaagttctcaaaatatattttttcctgatcatgggttgtatcattgtctgattgacattttcatgattactctaaggtatatacattttagtccactctgatctgctccaccttcatccttaattacattccaaacatttataaggcgaacgttgtttattagattctttttaaaaaaactgaaaatatagcagagttgtatgtcctattaaaaagaggatggtcatattgcatgaactgttattgcctgaactttttattttgaaacggagtggtcttattgcctgaacctgatattttgagctctgaaatatgtgattgactgtagaattatttcaagaacagactgtattgtagtaacctttttctcctggagtataattatctgtattcgaatgctcctttttatatgatgatgaattgttctacagtatctttatttgcaaatgtagcaacaatatactaatttgatgtacttttttctagggtgttctggacaatgaaagcttgtaccttaaaacaggaggatacaagaagctggagtggttgtctgaaggcttttgaactgcttgaagcattagtgtagctttggtgcttttgtgactgatcagctctggagcagctagagtgatgtagttgtgggcttttgaacaatacctagagtgatatgaaacattagtgatgtagttgtgggcttttgaactgcttcacgctggagtgatgtcgctgtggtgcttttgtgactgatcatctctggagcttttgtgaatgatctagctagctatctgtaaatgatctagttgtgaatgatattataattgtgatgcttttgtgaatatataattgtggtgtttttgtgtttatgtgatggatctatgactctagtatattgattaactgtgtatgtctttatgatttgtgtataaaaatatgtgatttgtggtgcttaattaaatgtatattattattaataacaaccataaaaagggtgactttctgttggttgcaaaatgtatagtatgacgacttacagttggttgctaaatctatagtacagcaacccacggttggtcgctaaatatacaatatcagcaacggac

SEQ ID NO: 15820 - DNA, 1006 bp, Zea Mays
atttcaaaacgcaaggagaagcagtgttgtgggcctgaatttcgattttctggtgttgaacttgacaaagcactcgtcctacctcatatacaatgctgctctcttcttcagcccattcatccagcaacagtatcatgacaaatatggtgataaagagatgattcctgttgctgcaaatgatgttgctttttcactgcatgctgtagcattgacagcctttaccgtttttcaagtattcatatatgagcgaggaacacagaaagtctccaaagtttgcatatcaatttctgctattgtctggatcgccgctcttgtttgcctcattattgcttggccaaaaagtgactggctttggcttattgatgtattcaattcaatacaagttggcatgacagcaatcaagtacatccctcaggcggaagagcacaattggttggagcgttggcaatatattacttgatctcacaggaggggtgctgaatttttgtcagatgggtgtgcagtctatagatcaacatactttggtgaatttctatggaaacattgggaaaacccttctttcattggagacggttttctttgatgtcctgttcattatccaacactacgtgttgtaccctgtcaagaaggacgagaatgacgatttccctgttctcccccattgaagtaaaacatgttgcggcccattaaaattccaaatgaaggaggtggaactctcttgggctgaaagaacacaccatagtggcagtgggcctagttatagcagataatatatagaagaggcgtggtgtggagactggagactaaggttcatctcaaaaaagaaaaagagaggatcctaaaaagaagatattatgtctgagaatagtttccaagattcttagcataccgttagcgtttcatggactatatgtcagattgtacagctattcattggaatatcgtaagatttatccgtgagagtaagggcaccacacaataaatgaggcaacaaccctgaaatctt

SEQ ID NO: 15821 - DNA, 1325 bp, Zea Mays
gtttggctcggcctcgcttttcctccactataaaaatccggtcgcgacggagcaaaaaatggaccccagcgtagcggagccggcagccaagcagaaaaatacgagtatcgcacgcgcaaggcgattccgtccccattctccacccaatagggagctagagctacgagacggggaaaggggggacgggaataggcgtcgtcggccatgtcgtcgtcgtggaactcggtgggtctggcgatcctgtaccaggtgctgggctgggtcgccttcgccgcgtggtccttcagcttctacccgcaggtcctcctcaactacaagcgcaagagtgttgtgggcctgaatttcgattttctggtgttgaacttgacaaagcactcgtcctacctcatatacaatgctgctctcttcttcagcccattcatccagcaacagtatcatgacaaatatggtgataaagagatgattcctgttgctgcaaatgatgttgctttttcactgcatgctgtagcattgacagcctttaccgtttttcaagtattcatatatgagcgaggaacacagaaagtctccaaagtttgcatatcaatttctgctattgtctggatcgccgctcttgtttgcctcattattgcttggccaaaaagtgactggctttggcttattgatgtattcaattcaatacaagttggcatgacagcaatcaagtacatccctcaggccatcatgaacttcaggcggaagagcacaattggttggagcgttggcaatatattacttgatctcacaggaggggtgctgaatttttgtcagatgggtgtgcagtctatagatcaacatactttggtgaatttctatggaaacattgggaaaacccttctttcattggagacggttttctttgatgtcctgttcattatccaacactacgtgttgtaccctgtcaagaaggacgagaatgacgatttccctgttctcccccattgaagtaaaacatgttgcggcccattaaaattccaaatgaaggaggtggaactctcttgggctgaaagaacacaccatagtggcagtgggcctagttatagcagataatatatagaagaggcgtggtgtggagactggagactaaggttcatctcaaaaaagaaaaagagaggatcctaaaaagaagatattatgtctgagaatagtttccaagattcttagcataccgttagcgtttcatggactatatgtcagattgtacagctattcattggaatatcgtaagatttatccgtgagagtaagggcaccacacaataaatgaggcaacaaccctgaaatctt

SEQ ID NO: 15822 - DNA, 1235 bp, Zea Mays
cgcgacggagcaaaaaatggaccccagcgtagcggagccggcagccaagcagaaaaatacgagtatcgcacgcgcaaggcgattccgtccccattctccacccaatagggagctagagctacgagacggggaaaggggggacgggaataggcgtcgtcggccatgtcgtcgtcgtggaactcggtgggtctggcgatcctgtaccaggtgctgggctgggtcgccttcgccgcgtggtccttcagcttctacccgcaggtcctcctcaactacaagcgcaagagtgttgtgggcctgaatttcgattttctggtgttgaacttgacaaagcactcgtcctacctcatatacaatgctgctctcttcttcagcccattcatccagcaacagtatcatgacaaatatggtgataaagagatgattcctgttgctgcaaatgatgttgctttttcactgcatgctgtagcattgacagcctttaccgtttttcaagtattcatatatgagcgaggaacacagaaagtctccaaagtttgcatatcaatttctgctattgtctggatcgccgctcttgtttgcctcattattgcttggccaaaaagtgactggctttggcttattgatgtattcaattcaatacaagttggcatgacagcaatcaagtacatccctcaggcggaagagcacaattggttggagcgttggcaatatattacttgatctcacaggaggggtgctgaatttttgtcagatgggtgtgcagtctatagatcaacatactttggtgaatttctatggaaacattgggaaaacccttctttcattggagacggttttctttgatgtcctgttcattatccaacactacgtgttgtaccctgtcaagaaggacgagaatggccacacacgcatgcgaattatttgttcaaaaggaattgctggcgcgtcttgattatattactgcttataacttttactacttggtgcactggtgagagatgtctcatataccaggttgcggtttcaagtggccccgtttttactatcgtgatttgtgaaggttattagatatcatctcggccaacatttacgatcaatgctcatgtaaatatttggttgcattacatttctatggtttcatatttgcttttttttcttatattttttgtttgatcttcgtcacttacgatcagcataggacatatttctagaagtttgaggtgtgcgaaaccaac

SEQ ID NO: 15823 - DNA, 2451 bp, Zea Mays
ctcatccctacaatctacgccgcctccctggctcctaaagaagaatacgaaggtcttgttccggacatttcggattccatgggctttgatgacaaggggagcttatctagttcagaaaatcataggaatatgtcatatgaagttattgatatgaaaagggggaaactagagccaaaggaaaaggtttgtgaagaacctgaaaaggcaattcattttacgaagttagacgagacaaatatcgcaacccaaaaggtttgggatcatgtattcaaccccttcagcaatttcttggctttgtacaggccagtgtgacacagggtgcatacagttagttcttaagaatttctagtgtattgtgacatcctgcattcccaggaaacatgttaactcatgttctctcagtgcggataaattgaagcatgtacaatggaggtgcttgaaaacaccttttttttttcttcaccaaccattagcacctgattcttaaaaggcggattcgatgctttttttcgaacaacgcaagagagttgcatgtcatttcattaagaaaagagaaccaaatacacagagaggaaagagacctcctgaacacacaacacactaacacaactcctctagagctaaaacaacaacatgaccatgaccacacactagttagcacccagctgagaggggtctgcacacttcttaagaggagctcttgctgaccggcggccccggctatgagttggatacgatgcttacgttagcatcaatgcttaatgtgtgttaacatattggtttaagcttatctaagaacctatttgcaactttgcattgtaggaatgaacttctctatcaatgcctagtgatatgacaacgttctctctccctaagcacctgtgtttaagcatcttgcattgtacatgcccttagagcaactccatccttgattccttggcagtgcctttgctttaaacttacagctagtgaaccaacttttgttatactatactggcatgatgatatgtatacacattcattcctaatcaaaaccctgttaatggaaggttcataaattgatttttttatttatttatctaaaacctctgttcgactgtcacctgattgctccctactaacttttgaggttctgaagggttctaaagataaaagaaaggaaacctttgcagaaggcaacactcaggaggaatgcaagtattattcaacacctggaggatgcaaattcggtaaaacttgcaaatacctccaccgtgagggaaatggagggaaaacagaggttgaaaaagctgagctaaactttctaggtcttccactgcgaccaggtgaaaaggagtgcccatactatatgcgcactgggagctgcaaatttgcgactaactgcaagtttcaccacccagatcctactaatgcatcttcaaaagaaccagggttggaacatgagaatggcgatgtaccactgcaaaatgtccaaggatcctctcagcctagccttcagatgtggcctgaccagagagcattgaatgaacagcatgttccttttcttgctccagcaccgtcatacagtggagggatggttccacctcaaggaatgtatccatcttctgattggagtgggtatcatcaggtacctttgaatccatattaccctcccggtgttcctttcccgcattttccagctgcccatatgaatcacccgatgtacaaggctgcagatataccaggacatcaaccaccaccatctgatgagtatcccgagagacctggccaacctgaatgccagcatttcgttaagagcggtttctgtaaatacaggatgaaatgcagatatcaccatccaaggtcgcgccagtctgcaccaccaccagcaggtcttagccccatcggcttgcctatcaaacctgatcaacctgtgtgcacttactatggacgctatggcttctgcaagtatgggccagcctgcatgttcaaccaccccttcaacttcgggcctcccgtgccggcagcaggaccacccctccctgggcagtaccctacgcatggaaacttcgcctagcaggcacgtgacgagcgattttctgagtcgccacgattgcttgtaataacctcctccacctgtaaagtagcgtagacaaaagctgtacgtggttggcagtagacatccagcatgtaggcgcaacgaagttgcatggagatgggtacgttacagttggtattgcaaactttacgctgtacaagttacagtccatacataagctgccatcgcatttaaaatcctggttgctgagtactccctcggtctgtctacatgatttagtcgttttagatttatcaactttgacagattatattgtatgtgttttatagtattttacaacataaacataaagacttgacttagggcaaacctagaacgaattaaatcatgtggatggagggagtatgtgcttt

SEQ ID NO: 15824 - DNA, 2794 bp, Zea Mays
aaaccatacccagccacgccctacaacgtctcatccctacaatctacgccgcctccctggctcctaaagaagaatacgaaggtcttgttccggacatttcggattccatgggctttgatgacaaggggagcttatctagttcagaaaatcataggaatatgtcatatgaagtcagtattttcttttatgttataatgattaggttcttgatctctgtgagccgttctttaccagcattattgcactgtacatgctaatgaaccagtgaaatgcctattgctttgctttcattactaactttaaaagatcatacttcttccacatttgttgaactccactttttacgtttacctatatgtttttacccattgcaggttattgatatgaaaagggggaaactagagccaaaggaaaaggtttgtgaagaacctgaaaaggcaattcattttacgaagttagacgagacaaatatcgcaacccaaaaggtttgggatcatgtattcaaccccttcagcaatttcttggctttgtacaggccagtgtgacacagggtgcatacagttagttcttaagaatttctagtgtattgtgacatcctgcattcccaggaaacatgttaactcatgttctctcagtgcggataaattgaagcatgtacaatggaggtgcttgaaaacaccttttttttttcttcaccaaccattagcacctgattcttaaaaggcggattcgatgctttttttcgaacaacgcaagagagttgcatgtcatttcattaagaaaagagaaccaaatacacagagaggaaagagacctcctgaacacacaacacactaacacaactcctctagagctaaaacaacaacatgaccatgaccacacactagttagcacccagctgagaggggtctgcacacttcttaagaggagctcttgctgaccggcggccccggctatgagttggatacgatgcttacgttagcatcaatgcttaatgtgtgttaacatattggtttaagcttatctaagaacctatttgcaactttgcattgtaggaatgaacttctctatcaatgcctagtgatatgacaacgttctctctccctaagcacctgtgtttaagcatcttgcattgtacatgcccttagagcaactccatccttgattccttggcagtgcctttgctttaaacttacagctagtgaaccaacttttgttatactatactggcatgatgatatgtatacacattcattcctaatcaaaaccctgttaatggaaggttcataaattgatttttttatttatttatctaaaacctctgttcgactgtcacctgattgctccctactaacttttgaggttctgaagggttctaaagataaaagaaaggaaacctttgcagaaggcaacactcaggaggaatgcaagtattattcaacacctggaggatgcaaattcggtaaaacttgcaaatacctccaccgtgagggaaatggagggaaaacagaggttgaaaaagctgagctaaactttctaggtcttccactgcgaccaggtgaaaaggagtgcccatactatatgcgcactgggagctgcaaatttgcgactaactgcaagtttcaccacccagatcctactaatgcatcttcaaaagaaccagggttggaacatgagaatggcgatgtaccactgcaaaatgtccaaggatcctctcagcctagccttcagatgtggcctgaccagagagcattgaatgaacagcatgttccttttcttgctccagcaccgtcatacagtggagggatggttccacctcaaggaatgtatccatcttctgattggagtgggtatcatcaggtacctttgaatccatattaccctcccggtgttcctttcccgcattttccagctgcccatatgaatcacccgatgtacaaggctgcagatataccaggacatcaaccaccaccatctgatgagtatcccgagagacctggccaacctgaatgccagcatttcgttaagagcggtttctgtaaatacaggatgaaatgcagatatcaccatccaaggtcgcgccagtctgcaccaccaccagcaggtcttagccccatcggcttgcctatcaaacctgtgagttcatatcccatcgttttacattcccggttaaggcctggcgaaccgtttcaaaaatatgattctggccaagtttattgtatttttgctctgttgttttgttgcaggatcaacctgtgtgcacttactatggacgctatggcttctgcaagtatgggccagcctgcatgttcaaccaccccttcaacttcgggcctcccgtgccggcagcaggaccacccctccctgggcagtaccctacgcatggaaacttcgcctagcaggcacgtgacgagcgattttctgagtcgccacgattgcttgtaataacctcctccacctgtaaagtagcgtagacaaaagctgtacgtggttggcagtagacatccagcatgtaggcgcaacgaagttgcatggagatgggtacgttacagttggtattgcaaactttacgctgtacaagttacagtccatacataagctgccatcgcatttaaaatcctggttgctgagtactccctcggtctgtctacatgatttagtcgttttagatttatcaactttgacagattatattgtatgtgttttatagtattttacaacataaacataaagacttgacttagggcaaacctagaacgaattaaatcatgtggatggagggagtatgtgcttt

SEQ ID NO: 15825 - DNA, 1601 bp, Zea Mays
catcttcaaaccatacccagccacgccctacaacgtctcatccctacaatctacgccgcctccctggctcctaaagaagaatacgaaggtcttgttccggacatttcggattccatgggctttgatgacaaggggagcttatctagttcagaaaatcataggaatatgtcatatgaagttattgatatgaaaagggggaaactagagccaaaggaaaaggtttgtgaagaacctgaaaaggcaattcattttacgaagttagacgagacaaatatcgcaacccaaaagggttctaaagataaaagaaaggaaacctttgcagaaggcaacactcaggaggaatgcaagtattattcaacacctggaggatgcaaattcggtaaaacttgcaaatacctccaccgtgagggaaatggagggaaaacagaggttgaaaaagctgagctaaactttctaggtcttccactgcgaccaggtgaaaaggagtgcccatactatatgcgcactgggagctgcaaatttgcgactaactgcaagtttcaccacccagatcctactaatgcatcttcaaaagaaccagggttggaacatgagaatggcgatgtaccactgcaaaatgtccaaggatcctctcagcctagccttcagatgtggcctgaccagagagcattgaatgaacagcatgttccttttcttgctccagcaccgtcatacagtggagggatggttccacctcaaggaatgtatccatcttctgattggagtgggtatcatcaggtacctttgaatccatattaccctcccggtgttcctttcccgcattttccagctgcccatatgaatcacccgatgtacaaggctgcagatataccaggacatcaaccaccaccatctgatgagtatcccgagagacctggccaacctgaatgccagcatttcgttaagagcggtttctgtaaatacaggatgaaatgcagatatcaccatccaaggtcgcgccagtctgcaccaccaccagcaggtcttagccccatcggcttgcctatcaaacctgatcaacctgtgtgcacttactatggacgctatggcttctgcaagtatgggccagcctgcatgttcaaccaccccttcaacttcgggcctcccgtgccggcagcaggaccacccctccctgggcagtaccctacgcatggaaacttcgcctagcaggcacgtgacgagcgattttctgagtcgccacgattgcttgtaataacctcctccacctgtaaagtagcgtagacaaaagctgtacgtggttggcagtagacatccagcatgtaggcgcaacgaagttgcatggagatgggtacgttacagttggtattgcaaactttacgctgtacaagttacagtccatacataagctgccatcgcatttaaaatcctggttgctgagtactccctcggtctgtctacatgatttagtcgttttagatttatcaactttgacagattatattgtatgtgttttatagtattttacaacataaacataaagacttgacttagggcaaacctagaacgaattaaatcatgtggatggagggagtatgtgcttt

SEQ ID NO: 15826 - DNA, 1556 bp, Zea Mays
ccatgacatcttcaaaccatacccagccacgccctacaacgtctcatccctacaatctacgccgcctccctggctcctaaagaagaatacgaaggtcttgttccggacatttcggattccatggttattgatatgaaaagggggaaactagagccaaaggaaaaggtttgtgaagaacctgaaaaggcaattcattttacgaagttagacgagacaaatatcgcaacccaaaaggttctgaagggttctaaagataaaagaaaggaaacctttgcagaaggcaacactcaggaggaatgcaagtattattcaacacctggaggatgcaaattcggtaaaacttgcaaatacctccaccgtgagggaaatggagggaaaacagaggttgaaaaagctgagctaaactttctaggtcttccactgcgaccaggtgaaaaggagtgcccatactatatgcgcactgggagctgcaaatttgcgactaactgcaagtttcaccacccagatcctactaatgcatcttcaaaagaaccagggttggaacatgagaatggcgatgtaccactgcaaaatgtccaaggatcctctcagcctagccttcagatgtggcctgaccagagagcattgaatgaacagcatgttccttttcttgctccagcaccgtcatacagtggagggatggttccacctcaaggaatgtatccatcttctgattggagtgggtatcatcaggtacctttgaatccatattaccctcccggtgttcctttcccgcattttccagctgcccatatgaatcacccgatgtacaaggctgcagatataccaggacatcaaccaccaccatctgatgagtatcccgagagacctggccaacctgaatgccagcatttcgttaagagcggtttctgtaaatacaggatgaaatgcagatatcaccatccaaggtcgcgccagtctgcaccaccaccagcaggtcttagccccatcggcttgcctatcaaacctgatcaacctgtgtgcacttactatggacgctatggcttctgcaagtatgggccagcctgcatgttcaaccaccccttcaacttcgggcctcccgtgccggcagcaggaccacccctccctgggcagtaccctacgcatggaaacttcgcctagcaggcacgtgacgagcgattttctgagtcgccacgattgcttgtaataacctcctccacctgtaaagtagcgtagacaaaagctgtacgtggttggcagtagacatccagcatgtaggcgcaacgaagttgcatggagatgggtacgttacagttggtattgcaaactttacgctgtacaagttacagtccatacataagctgccatcgcatttaaaatcctggttgctgagtactccctcggtctgtctacatgatttagtcgttttagatttatcaactttgacagattatattgtatgtgttttatagtattttacaacataaacataaagacttgacttagggcaaacctagaacgaattaaatcatgtggatggagggagtatgtgcttt

SEQ ID NO: 15827 - DNA, 1741 bp, Zea Mays
cttccgttcaccttcacagtgcaggactacgccgaccgcttcaacgcagtgatgtgctactcccgcaacctcggcatcccagaaggccgagttgttcgtgggcgggctctgtctctcgccagcagccatgacatcttcaaaccatacccagccacgccctacaacgtctcatccctacaatctacgccgcctccctggctcctaaagaagaatacgaaggtcttgttccggacatttcggattccatgggctttgatgacaaggggagcttatctagttcagaaaatcataggaatatgtcatatgaagttattgatatgaaaagggggaaactagagccaaaggaaaaggtttgtgaagaacctgaaaaggcaattcattttacgaagttagacgagacaaatatcgcaacccaaaaggttctgaagggttctaaagataaaagaaaggaaacctttgcagaaggcaacactcaggaggaatgcaagtattattcaacacctggaggatgcaaattcggtaaaacttgcaaatacctccaccgtgagggaaatggagggaaaacagaggttgaaaaagctgagctaaactttctaggtcttccactgcgaccaggtgaaaaggagtgcccatactatatgcgcactgggagctgcaaatttgcgactaactgcaagtttcaccacccagatcctactaatgcatcttcaaaagaaccagggttggaacatgagaatggcgatgtaccactgcaaaatgtccaaggatcctctcagcctagccttcagatgtggcctgaccagagagcattgaatgaacagcatgttccttttcttgctccagcaccgtcatacagtggagggatggttccacctcaaggaatgtatccatcttctgattggagtgggtatcatcaggtacctttgaatccatattaccctcccggtgttcctttcccgcattttccagctgcccatatgaatcacccgatgtacaaggctgcagatataccaggacatcaaccaccaccatctgatgagtatcccgagagacctggccaacctgaatgccagcatttcgttaagagcggtttctgtaaatacaggatgaaatgcagatatcaccatccaaggtcgcgccagtctgcaccaccaccagcaggtcttagccccatcggcttgcctatcaaacctgatcaacctgtgtgcacttactatggacgctatggcttctgcaagtatgggccagcctgcatgttcaaccaccccttcaacttcgggcctcccgtgccggcagcaggaccacccctccctgggcagtaccctacgcatggaaacttcgcctagcaggcacgtgacgagcgattttctgagtcgccacgattgcttgtaataacctcctccacctgtaaagtagcgtagacaaaagctgtacgtggttggcagtagacatccagcatgtaggcgcaacgaagttgcatggagatgggtacgttacagttggtattgcaaactttacgctgtacaagttacagtccatacataagctgccatcgcatttaaaatcctggttgctgagtactccctcggtctgtctacatgatttagtcgttttagatttatcaactttgacagattatattgtatgtgttttatagtattttacaacataaacataaagacttgacttagggcaaacctagaacgaattaaatcatgtggatggagggagtatgtgcttt

SEQ ID NO: 15828 - DNA, 1672 bp, Zea Mays
cttccgttcaccttcacagtgcaggactacgccgaccgcttcaacgcagtgatgtgctactcccgcaacctcggcatcccagaaggccgagttgttcgtgggcgggctctgtctctcgccagcagccatgacatcttcaaaccatacccagccacgccctacaacgtctcatccctacaatctacgccgcctccctggctcctaaagaagaatacgaaggtcttgttccggacatttcggattccatggttattgatatgaaaagggggaaactagagccaaaggaaaaggtttgtgaagaacctgaaaaggcaattcattttacgaagttagacgagacaaatatcgcaacccaaaagggttctaaagataaaagaaaggaaacctttgcagaaggcaacactcaggaggaatgcaagtattattcaacacctggaggatgcaaattcggtaaaacttgcaaatacctccaccgtgagggaaatggagggaaaacagaggttgaaaaagctgagctaaactttctaggtcttccactgcgaccaggtgaaaaggagtgcccatactatatgcgcactgggagctgcaaatttgcgactaactgcaagtttcaccacccagatcctactaatgcatcttcaaaagaaccagggttggaacatgagaatggcgatgtaccactgcaaaatgtccaaggatcctctcagcctagccttcagatgtggcctgaccagagagcattgaatgaacagcatgttccttttcttgctccagcaccgtcatacagtggagggatggttccacctcaaggaatgtatccatcttctgattggagtgggtatcatcaggtacctttgaatccatattaccctcccggtgttcctttcccgcattttccagctgcccatatgaatcacccgatgtacaaggctgcagatataccaggacatcaaccaccaccatctgatgagtatcccgagagacctggccaacctgaatgccagcatttcgttaagagcggtttctgtaaatacaggatgaaatgcagatatcaccatccaaggtcgcgccagtctgcaccaccaccagcaggtcttagccccatcggcttgcctatcaaacctgatcaacctgtgtgcacttactatggacgctatggcttctgcaagtatgggccagcctgcatgttcaaccaccccttcaacttcgggcctcccgtgccggcagcaggaccacccctccctgggcagtaccctacgcatggaaacttcgcctagcaggcacgtgacgagcgattttctgagtcgccacgattgcttgtaataacctcctccacctgtaaagtagcgtagacaaaagctgtacgtggttggcagtagacatccagcatgtaggcgcaacgaagttgcatggagatgggtacgttacagttggtattgcaaactttacgctgtacaagttacagtccatacataagctgccatcgcatttaaaatcctggttgctgagtactccctcggtctgtctacatgatttagtcgttttagatttatcaactttgacagattatattgtatgtgttttatagtattttacaacataaacataaagacttgacttagggcaaacctagaacgaattaaatcatgtggatggagggagtatgtgcttt

SEQ ID NO: 15829 - DNA, 1987 bp, Zea Mays
ctccgctttgtgccgaccgtgcggggtacacgcctctccgagctggcgcgccttccgttcaccttcacagtgcaggactacgccgaccgcttcaacgcagtgatgtgctactcccgcaacctcggcatcccagaaggccgagttgttcgtgggcgggctctgtctctcgccagcagccatgacatcttcaaaccatacccagccacgccctacaacgtctcatccctacaatctacgccgcctccctggctcctaaagaagaatacgaaggtcttgttccggacatttcggattccatgggctttgatgacaaggggagcttatctagttcagaaaatcataggaatatgtcatatgaagtcagtattttcttttatgttataatgattaggttcttgatctctgtgagccgttctttaccagcattattgcactgtacatgctaatgaaccagtgaaatgcctattgctttgctttcattactaactttaaaagatcatacttcttccacatttgttgaactccactttttacgtttacctatatgtttttacccattgcaggttattgatatgaaaagggggaaactagagccaaaggaaaaggtttgtgaagaacctgaaaaggcaattcattttacgaagttagacgagacaaatatcgcaacccaaaagggttctaaagataaaagaaaggaaacctttgcagaaggcaacactcaggaggaatgcaagtattattcaacacctggaggatgcaaattcggtaaaacttgcaaatacctccaccgtgagggaaatggagggaaaacagaggttgaaaaagctgagctaaactttctaggtcttccactgcgaccaggtgaaaaggagtgcccatactatatgcgcactgggagctgcaaatttgcgactaactgcaagtttcaccacccagatcctactaatgcatcttcaaaagaaccagggttggaacatgagaatggcgatgtaccactgcaaaatgtccaaggatcctctcagcctagccttcagatgtggcctgaccagagagcattgaatgaacagcatgttccttttcttgctccagcaccgtcatacagtggagggatggttccacctcaaggaatgtatccatcttctgattggagtgggtatcatcaggtacctttgaatccatattaccctcccggtgttcctttcccgcattttccagctgcccatatgaatcacccgatgtacaaggctgcagatataccaggacatcaaccaccaccatctgatgagtatcccgagagacctggccaacctgaatgccagcatttcgttaagagcggtttctgtaaatacaggatgaaatgcagatatcaccatccaaggtcgcgccagtctgcaccaccaccagcaggtcttagccccatcggcttgcctatcaaacctgatcaacctgtgtgcacttactatggacgctatggcttctgcaagtatgggccagcctgcatgttcaaccaccccttcaacttcgggcctcccgtgccggcagcaggaccacccctccctgggcagtaccctacgcatggaaacttcgcctagcaggcacgtgacgagcgattttctgagtcgccacgattgcttgtaataacctcctccacctgtaaagtagcgtagacaaaagctgtacgtggttggcagtagacatccagcatgtaggcgcaacgaagttgcatggagatgggtacgttacagttggtattgcaaactttacgctgtacaagttacagtccatacataagctgccatcgcatttaaaatcctggttgctgagtactccctcggtctgtctacatgatttagtcgttttagatttatcaactttgacagattatattgtatgtgttttatagtattttacaacataaacataaagacttgacttagggcaaacctagaacgaattaaatcatgtggatggagggagtatgtgcttt

SEQ ID NO: 15830 - DNA, 2345 bp, Zea Mays
ctctttctgtaggttttctccccacttcgctttgcttccccacctgctctctctcactcgtccccatcaccgtcgccatcactacccctctcctctctctcatcggctccaatggcggacgccgacgccaagtcccagccgcccgacgccgcggcatccccggatgcctcgatctcctccccctcctccctaggcggcggcggcggcgacgcggccgacgcggacgcgatcgagaagcagctcgccggcctgggcatcgccgtcgccggtgggttccccgagccatcgggatgggacgatggccccgtaccagtccccatcccggccgatgtccttgtcggcggtgatgagggtgccggcgagaagccgcgggcgccggcgccggcgccgactggggcggtggatgtgaaggtgcggttcccgcgccggcccggggagccggactgcagctactacctcaagttcggcacctgccgcttcgggatgaagtgcaagttcaaccaccctgcgaggaagaagaagactagtagggtgagaggcgtcgggagcaacggcagcgggagcaacagcagcagcaataaagcatcttctcctgatgatgatcaggctcctaaagaagaatacgaaggtcttgttccggacatttcggattccatgggctttgatgacaaggggagcttatctagttcagaaaatcataggaatatgtcatatgaagtcagtattttcttttatgttataatgattaggttcttgatctctgtgagccgttctttaccagcattattgcactgtacatgctaatgaaccagtgaaatgcctattgctttgctttcattactaactttaaaagatcatacttcttccacatttgttgaactccactttttacgtttacctatatgtttttacccattgcaggttattgatatgaaaagggggaaactagagccaaaggaaaaggtttgtgaagaacctgaaaaggcaattcattttacgaagttagacgagacaaatatcgcaacccaaaagggttctaaagataaaagaaaggaaacctttgcagaaggcaacactcaggaggaatgcaagtattattcaacacctggaggatgcaaattcggtaaaacttgcaaatacctccaccgtgagggaaatggagggaaaacagaggttgaaaaagctgagctaaactttctaggtcttccactgcgaccaggtgaaaaggagtgcccatactatatgcgcactgggagctgcaaatttgcgactaactgcaagtttcaccacccagatcctactaatgcatcttcaaaagaaccagggttggaacatgagaatggcgatgtaccactgcaaaatgtccaaggatcctctcagcctagccttcagatgtggcctgaccagagagcattgaatgaacagcatgttccttttcttgctccagcaccgtcatacagtggagggatggttccacctcaaggaatgtatccatcttctgattggagtgggtatcatcaggtacctttgaatccatattaccctcccggtgttcctttcccgcattttccagctgcccatatgaatcacccgatgtacaaggctgcagatataccaggacatcaaccaccaccatctgatgagtatcccgagagacctggccaacctgaatgccagcatttcgttaagagcggtttctgtaaatacaggatgaaatgcagatatcaccatccaaggtcgcgccagtctgcaccaccaccagcaggtcttagccccatcggcttgcctatcaaacctgatcaacctgtgtgcacttactatggacgctatggcttctgcaagtatgggccagcctgcatgttcaaccaccccttcaacttcgggcctcccgtgccggcagcaggaccacccctccctgggcagtaccctacgcatggaaacttcgcctagcaggcacgtgacgagcgattttctgagtcgccacgattgcttgtaataacctcctccacctgtaaagtagcgtagacaaaagctgtacgtggttggcagtagacatccagcatgtaggcgcaacgaagttgcatggagatgggtacgttacagttggtattgcaaactttacgctgtacaagttacagtccatacataagctgccatcgcatttaaaatcctggttgctgagtactccctcggtctgtctacatgatttagtcgttttagatttatcaactttgacagattatattgtatgtgttttatagtattttacaacataaacataaagacttgacttagggcaaacctagaacgaattaaatcatgtggatggagggagtatgtgcttt

SEQ ID NO: 15831 - DNA, 2012 bp, Zea Mays
ctctttctgtaggttttctccccacttcgctttgcttccccacctgctctctctcactcgtccccatcaccgtcgccatcactacccctctcctctctctcatcggctccaatggcggacgccgacgccaagtcccagccgcccgacgccgcggcatccccggatgcctcgatctcctccccctcctccctaggcggcggcggcggcgacgcggccgacgcggacgcgatcgagaagcagctcgccggcctgggcatcgccgtcgccggtgggttccccgagccatcgggatgggacgatggccccgtaccagtccccatcccggccgatgtccttgtcggcggtgatgagggtgccggcgagaagccgcgggcgccggcgccggcgccgactggggcggtggatgtgaaggtgcggttcccgcgccggcccggggagccggactgcagctactacctcaagttcggcacctgccgcttcgggatgaagtgcaagttcaaccaccctgcgaggaagaagaagactagtagggtgagaggcgtcgggagcaacggcagcgggagcaacagcagcagcaataaagcatcttctcctgatgatgatcaggctcctaaagaagaatacgaaggtcttgttccggacatttcggattccatggttattgatatgaaaagggggaaactagagccaaaggaaaagggttctaaagataaaagaaaggaaacctttgcagaaggcaacactcaggaggaatgcaagtattattcaacacctggaggatgcaaattcggtaaaacttgcaaatacctccaccgtgagggaaatggagggaaaacagaggttgaaaaagctgagctaaactttctaggtcttccactgcgaccaggtgaaaaggagtgcccatactatatgcgcactgggagctgcaaatttgcgactaactgcaagtttcaccacccagatcctactaatgcatcttcaaaagaaccagggttggaacatgagaatggcgatgtaccactgcaaaatgtccaaggatcctctcagcctagccttcagatgtggcctgaccagagagcattgaatgaacagcatgttccttttcttgctccagcaccgtcatacagtggagggatggttccacctcaaggaatgtatccatcttctgattggagtgggtatcatcaggtacctttgaatccatattaccctcccggtgttcctttcccgcattttccagctgcccatatgaatcacccgatgtacaaggctgcagatataccaggacatcaaccaccaccatctgatgagtatcccgagagacctggccaacctgaatgccagcatttcgttaagagcggtttctgtaaatacaggatgaaatgcagatatcaccatccaaggtcgcgccagtctgcaccaccaccagcaggtcttagccccatcggcttgcctatcaaacctgatcaacctgtgtgcacttactatggacgctatggcttctgcaagtatgggccagcctgcatgttcaaccaccccttcaacttcgggcctcccgtgccggcagcaggaccacccctccctgggcagtaccctacgcatggaaacttcgcctagcaggcacgtgacgagcgattttctgagtcgccacgattgcttgtaataacctcctccacctgtaaagtagcgtagacaaaagctgtacgtggttggcagtagacatccagcatgtaggcgcaacgaagttgcatggagatgggtacgttacagttggtattgcaaactttacgctgtacaagttacagtccatacataagctgccatcgcatttaaaatcctggttgctgagtactccctcggtctgtctacatgatttagtcgttttagatttatcaactttgacagattatattgtatgtgttttatagtattttacaacataaacataaagacttgacttagggcaaacctagaacgaattaaatcatgtggatggagggagtatgtgcttt

SEQ ID NO: 15832 - DNA, 3027 bp, Zea Mays
ctctttctgtaggttttctccccacttcgctttgcttccccacctgctctctctcactcgtccccatcaccgtcgccatcactacccctctcctctctctcatcggctccaatggcggacgccgacgccaagtcccagccgcccgacgccgcggcatccccggatgcctcgatctcctccccctcctccctaggcggcggcggcggcgacgcggccgacgcggacgcgatcgagaagcagctcgccggcctgggcatcgccgtcgccggtgggttccccgagccatcgggatgggacgatggccccgtaccagtccccatcccggccgatgtccttgtcggcggtgatgagggtgccggcgagaagccgcgggcgccggcgccggcgccgactggggcggtggatgtgaaggtgcggttcccgcgccggcccggggagccggactgcagctactacctcaagttcggcacctgccgcttcgggatgaagtgcaagttcaaccaccctgcgaggaagaagaagactagtagggtgagaggcgtcgggagcaacggcagcgggagcaacagcagcagcaataaagcatcttctcctgatgatgatcaggctcctaaagaagaatacgaaggtcttgttccggacatttcggattccatgggctttgatgacaaggggagcttatctagttcagaaaatcataggaatatgtcatatgaagttattgatatgaaaagggggaaactagagccaaaggaaaaggtttgtgaagaacctgaaaaggcaattcattttacgaagttagacgagacaaatatcgcaacccaaaaggtttgggatcatgtattcaaccccttcagcaatttcttggctttgtacaggccagtgtgacacagggtgcatacagttagttcttaagaatttctagtgtattgtgacatcctgcattcccaggaaacatgttaactcatgttctctcagtgcggataaattgaagcatgtacaatggaggtgcttgaaaacaccttttttttttcttcaccaaccattagcacctgattcttaaaaggcggattcgatgctttttttcgaacaacgcaagagagttgcatgtcatttcattaagaaaagagaaccaaatacacagagaggaaagagacctcctgaacacacaacacactaacacaactcctctagagctaaaacaacaacatgaccatgaccacacactagttagcacccagctgagaggggtctgcacacttcttaagaggagctcttgctgaccggcggccccggctatgagttggatacgatgcttacgttagcatcaatgcttaatgtgtgttaacatattggtttaagcttatctaagaacctatttgcaactttgcattgtaggaatgaacttctctatcaatgcctagtgatatgacaacgttctctctccctaagcacctgtgtttaagcatcttgcattgtacatgcccttagagcaactccatccttgattccttggcagtgcctttgctttaaacttacagctagtgaaccaacttttgttatactatactggcatgatgatatgtatacacattcattcctaatcaaaaccctgttaatggaaggttcataaattgatttttttatttatttatctaaaacctctgttcgactgtcacctgattgctccctactaacttttgaggttctgaagggttctaaagataaaagaaaggaaacctttgcagaaggcaacactcaggaggaatgcaagtattattcaacacctggaggatgcaaattcggtaaaacttgcaaatacctccaccgtgagggaaatggagggaaaacagaggttgaaaaagctgagctaaactttctaggtcttccactgcgaccaggtgaaaaggagtgcccatactatatgcgcactgggagctgcaaatttgcgactaactgcaagtttcaccacccagatcctactaatgcatcttcaaaagaaccagggttggaacatgagaatggcgatgtaccactgcaaaatgtccaaggatcctctcagcctagccttcagatgtggcctgaccagagagcattgaatgaacagcatgttccttttcttgctccagcaccgtcatacagtggagggatggttccacctcaaggaatgtatccatcttctgattggagtgggtatcatcaggtacctttgaatccatattaccctcccggtgttcctttcccgcattttccagctgcccatatgaatcacccgatgtacaaggctgcagatataccaggacatcaaccaccaccatctgatgagtatcccgagagacctggccaacctgaatgccagcatttcgttaagagcggtttctgtaaatacaggatgaaatgcagatatcaccatccaaggtcgcgccagtctgcaccaccaccagcaggtcttagccccatcggcttgcctatcaaacctgatcaacctgtgtgcacttactatggacgctatggcttctgcaagtatgggccagcctgcatgttcaaccaccccttcaacttcgggcctcccgtgccggcagcaggaccacccctccctgggcagtaccctacgcatggaaacttcgcctagcaggcacgtgacgagcgattttctgagtcgccacgattgcttgtaataacctcctccacctgtaaagtagcgtagacaaaagctgtacgtggttggcagtagacatccagcatgtaggcgcaacgaagttgcatggagatgggtacgttacagttggtattgcaaactttacgctgtacaagttacagtccatacataagctgccatcgcatttaaaatcctggttgctgagtactccctcggtctgtctacatgatttagtcgttttagatttatcaactttgacagattatattgtatgtgttttatagtattttacaacataaacataaagacttgacttagggcaaacctagaacgaattaaatcatgtggatggagggagtatgtgcttt

SEQ ID NO: 15833 - DNA, 2150 bp, Zea Mays
ctctttctgtaggttttctccccacttcgctttgcttccccacctgctctctctcactcgtccccatcaccgtcgccatcactacccctctcctctctctcatcggctccaatggcggacgccgacgccaagtcccagccgcccgacgccgcggcatccccggatgcctcgatctcctccccctcctccctaggcggcggcggcggcgacgcggccgacgcggacgcgatcgagaagcagctcgccggcctgggcatcgccgtcgccggtgggttccccgagccatcgggatgggacgatggccccgtaccagtccccatcccggccgatgtccttgtcggcggtgatgagggtgccggcgagaagccgcgggcgccggcgccggcgccgactggggcggtggatgtgaaggtgcggttcccgcgccggcccggggagccggactgcagctactacctcaagttcggcacctgccgcttcgggatgaagtgcaagttcaaccaccctgcgaggaagaagaagactagtagggtgagaggcgtcgggagcaacggcagcgggagcaacagcagcagcaataaagcatcttctcctgatgatgatcaggctcctaaagaagaatacgaaggtcttgttccggacatttcggattccatgggctttgatgacaaggggagcttatctagttcagaaaatcataggaatatgtcatatgaagttattgatatgaaaagggggaaactagagccaaaggaaaaggtttgtgaagaacctgaaaaggcaattcattttacgaagttagacgagacaaatatcgcaacccaaaaggttctgaagggttctaaagataaaagaaaggaaacctttgcagaaggcaacactcaggaggaatgcaagtattattcaacacctggaggatgcaaattcggtaaaacttgcaaatacctccaccgtgagggaaatggagggaaaacagaggttgaaaaagctgagctaaactttctaggtcttccactgcgaccaggtgaaaaggagtgcccatactatatgcgcactgggagctgcaaatttgcgactaactgcaagtttcaccacccagatcctactaatgcatcttcaaaagaaccagggttggaacatgagaatggcgatgtaccactgcaaaatgtccaaggatcctctcagcctagccttcagatgtggcctgaccagagagcattgaatgaacagcatgttccttttcttgctccagcaccgtcatacagtggagggatggttccacctcaaggaatgtatccatcttctgattggagtgggtatcatcaggtacctttgaatccatattaccctcccggtgttcctttcccgcattttccagctgcccatatgaatcacccgatgtacaaggctgcagatataccaggacatcaaccaccaccatctgatgagtatcccgagagacctggccaacctgaatgccagcatttcgttaagagcggtttctgtaaatacaggatgaaatgcagatatcaccatccaaggtcgcgccagtctgcaccaccaccagcaggtcttagccccatcggcttgcctatcaaacctgatcaacctgtgtgcacttactatggacgctatggcttctgcaagtatgggccagcctgcatgttcaaccaccccttcaacttcgggcctcccgtgccggcagcaggaccacccctccctgggcagtaccctacgcatggaaacttcgcctagcaggcacgtgacgagcgattttctgagtcgccacgattgcttgtaataacctcctccacctgtaaagtagcgtagacaaaagctgtacgtggttggcagtagacatccagcatgtaggcgcaacgaagttgcatggagatgggtacgttacagttggtattgcaaactttacgctgtacaagttacagtccatacataagctgccatcgcatttaaaatcctggttgctgagtactccctcggtctgtctacatgatttagtcgttttagatttatcaactttgacagattatattgtatgtgttttatagtattttacaacataaacataaagacttgacttagggcaaacctagaacgaattaaatcatgtggatggagggagtatgtgcttt

SEQ ID NO: 15834 - DNA, 2587 bp, Zea Mays
ctacttctgcagattaatgaccgctatgaatttcctcttcaacttgaccttgatagagacaatggaaaatatcttgctccagatgcagatcgaagtattagaaacctctatacacttcatagtgttcttgttcatagtggaggagtacatggtggccactactatgctttcattcggccgacactctcggatcagtggtacaaatttgatgatgagcgggttacaaaagaagacactaaaaaggcacttgaagagcagtatgggggtgaggaagagttgcctcaaataaaccctggtttcaataacacgccatttaaattcacaaagtattcgaatgcctacatgcttgtctatatacgtgagagtgacaaagagaaaataatgtgtaatgtcgatgagaaggacatcgctgagcatttgcggataaggttgaagaaagaacaagaagagaaagaacacaagaagaaggagaaggctgaagctcatctctacactatcataaagatcgctcgagacgaggacttaaaggagcaaatcggtaagaatatatattttgatctggtggaccatgaaaaagttcacagtttccgcattcagaagcagttgccttttacttcattcaaggaggaagttgcaaaggaatttggcatccctgtacagtttcagcgcttctggttgtgggctaagaggcagaaccatacataccggcccaatcgtccattgacaccccatgaggaagcacaatcagtcgggcagcttagggaagtctcaaataaggcacacaatgctgagctgaagctgtttctggaagttgaacttggaccggagttatgtccaattcgtccacctgagaagagcaaagaagacatacttcttttcttcaagctttataatgctgagaaggaagagcttcattttgttggtaggctttttgtgaaggctctgggaaagccatctgaaatattgacaaaactgaatgcaatggctggattttctccaaatgaagaaattgagctgaaattaagtttgagccaaatgtgatgtgcgaacatattgacaagaaacttactttccgctctagtcagcttgaagacggagacattatctgtttccaaaaggctcctgttccagatggtgatgcacaagtgcgctatccagatgttccttcattcttggagtatgttcacaataggtcgaagcttcatacatatgatgatgttgttgagagagttgcacatcaacttgggttggatgatccatcaaagatacggcttacgtctcacaattgttattctcagcaacctaaaccacagcctattagatataggggggtagcacatctactggatatgcttgttcattataatcagacttctgatatcttgtattatgaggttctggacattccactgccagatttgcagcgtttgaaaacgcttaaagttgcattccaccatgcaacaaaagacgaggttgtcgttcatagcataagacttccaagaaatagcaccatcagtgatgtgattactgatttgaaaaccaaggttgaactatctaatcctgacgctgagctccgcttgcttgaagtattttaccacaagatttataagatctttccacctcatgagaagatagagaacataaatgatcagtactggacattacgagctgaggagatcccagaggaagagaagaatcttggcccacatgatcgattgattcatgtttaccatttcatgaaagaccctaaccagaatcaacaaattcaaaattttggagatccttttttgatggttattcgggaaggtgagactgctgcagaggtaatggagcgcatccagagaaaacttagagttcctgatgatgagttctccaagtggaagcttgcattcatatccatgaaccggccagagtacctccaggacactgacgttgtatcagcacgttttcagcggagagatgtatatggtgcttgggaacaataccttggcttggagcacactgatacaacatcgaaacggtcttacacatccaatcagaatcggcacacctatgagaagcccgtaaaaatttataattgagaaaccttcatcaaagttcaatccattgtcaaaggcgtcgacagcagcatgcccaaggtgatacgacgcttcaaacagaaaaatctggtatagtatttgcctgtgctaaggcctgcaaggcgcaagcccaccaggccaccaatgctgcttccaaccttcattgttccaagcaaccaagcatgtgtttggtttttcttcgtcgtgtcgagtatgacggcccctgacaggctgtgggaacaatggcagagattgtataatgggtttggtataattcttcgtgctgttgagaaacgtacgaggataacccgatcagatagtagagttttgagacctgtcaaacagaaccttttgaaactaacctacccgttataccagaagggccgtttgcaagtcttctattatacatagtttttattatatatatatatatatatgcatctagaaaataagaacaatttagaatttagaatggagtagaatacatttctacccttatttagaaatag

SEQ ID NO: 15835 - DNA, 2455 bp, Zea Mays
ctacttctgcagattaatgaccgctatgaatttcctcttcaacttgaccttgatagagacaatggaaaatatcttgctccagatgcagatcgaagtattagaaacctctatacacttcataggtaatttatttatcataaactgttccaattctttgaatggtatatatgtacaaatttgatgatgagcgggttacaaaagaagacactaaaaaggcacttgaagagcagtatgggggtgaggaagagttgcctcaaataaaccctggtttcaataacacgccatttaaattcacaaagtattcgaatgcctacatgcttgtctatatacgtgagagtgacaaagagaaaataatgtgtaatgtcgatgagaaggacatcgctgagcatttgcggataaggttgaagaaagaacaagaagagaaagaacacaagaagaaggagaaggctgaagctcatctctacactatcataaagatcgctcgagacgaggacttaaaggagcaaatcggtaagaatatatattttgatctggtggaccatgaaaaagttcacagtttccgcattcagaagcagttgccttttacttcattcaaggaggaagttgcaaaggaatttggcatccctgtacagtttcagcgcttctggttgtgggctaagaggcagaaccatacataccggcccaatcgtccattgacaccccatgaggaagcacaatcagtcgggcagcttagggaagtctcaaataaggcacacaatgctgagctgaagctgtttctggaagttgaacttggaccggagttatgtccaattcgtccacctgagaagagcaaagaagacatacttcttttcttcaagctttataatgctgagaaggaagagcttcattttgttggtaggctttttgtgaaggctctgggaaagccatctgaaatattgacaaaactgaatgcaatggctggattttctccaaatgaagaaattgagctgtacgaggaaattaagtttgagccaaatgtgatgtgcgaacatattgacaagaaacttactttccgctctagtcagcttgaagacggagacattatctgtttccaaaaggctcctgttccagatggtgatgcacaagtgcgctatccagatgttccttcattcttggagtatgttcacaataggcaggttgtgcactttcggtgtctggacaaaccaaaggatgatgatttttctttggaattgtcgaagcttcatacatatgatgatgttgttgagagagttgcacatcaacttgggttggatgatccatcaaagatacggcttacgtctcacaattgttattctcagcaacctaaaccacagcctattagatataggggggtagcacatctactggatatgcttgttcattataatcagacttctgatatcttgtattatgaggttctggacattccactgccagatttgcagcgtttgaaaacgcttaaagttgcattccaccatgcaacaaaagacgaggttgtcgttcatagcataagacttccaagaaatagcaccatcagtgatgtgattactgatttgaaaaccaaggttgaactatctaatcctgacgctgagctccgcttgcttgaagtattttaccacaagatttataagatctttccacctcatgagaagatagagaacataaatgatcagtactggacattacgagctgaggagatcccagaggaagagaagaatcttggcccacatgatcgattgattcatgtttaccatttcatgaaagaccctaaccagaatcaacaaattcaaaattttggagatccttttttgatggttattcgggaaggtgagactgctgcagaggtaatggagcgcatccagagaaaacttagagttcctgatgatgagttctccaagtggaagcttgcattcatatccatgaaccggccagagtacctccaggacactgacgttgtatcagcacgttttcagcggagagatgtatatggtgcttgggaacaataccttggcttggagcacactgatacaacatcgaaacggtcttacacatccaatcagaatcggcacacctatgagaagcccgtaaaaatttataattgagaaaccttcatcaaagttcaatccattgtcaaaggcgtcgacagcagcatgcccaagctgtgggaacaatggcagagattgtataatgggtttggtataattcttcgtgctgttgagaaacgtacgaggataacccgatcagatagtagagttttgagacctgtcaaacagaaccttttgaaactaacctacccgttataccagaagggccgtttgcaagtcttctattatacatagtttttattatatatatatatatatatgcatctagaaaataagaacaatttagaatttagaatggagtagaatacatttctacccttatttagaaatag

SEQ ID NO: 15836 - DNA, 2403 bp, Zea Mays
ctacttctgcagattaatgaccgctatgaatttcctcttcaacttgaccttgatagagacaatggaaaatatcttgctccagatgcagatcgaagtattagaaacctctatacacttcataggtaatttatttatcataaactgttccaattctttgaatggtatatatgtacaaatttgatgatgagcgggttacaaaagaagacactaaaaaggcacttgaagagcagtatgggggtgaggaagagttgcctcaaataaaccctggtttcaataacacgccatttaaattcacaaagtattcgaatgcctacatgcttgtctatatacgtgagagtgacaaagagaaaataatgtgtaatgtcgatgagaaggacatcgctgagcatttgcggataaggttgaagaaagaacaagaagagaaagaacacaagaagaaggagaaggctgaagctcatctctacactatcataaagatcgctcgagacgaggacttaaaggagcaaatcggtaagaatatatattttgatctggtggaccatgaaaaagttcacagtttccgcattcagaagcagttgccttttacttcattcaaggaggaagttgcaaaggaatttggcatccctgtacagtttcagcgcttctggttgtgggctaagaggcagaaccatacataccggcccaatcgtccattgacaccccatgaggaagcacaatcacttgaagacggagacattatctgtttccaaaaggctcctgttccagatggtgatgcacaagtgcgctatccagatgttccttcattcttggagtatgttcacaataggcaggttgtgcactttcggtgtctggacaaaccaaaggatgatgatttttctttggaattgtcgaagcttcatacatatgatgatgttgttgagagagttgcacatcaacttgggttggatgatccatcaaagatacggcttacgtctcacaattgttattctcagcaacctaaaccacagcctattagatataggggggtagcacatctactggatatgcttgttcattataatcagacttctgatatcttgtattatgaggttctggacattccactgccagatttgcagcgtttgaaaacgcttaaagttgcattccaccatgcaacaaaagacgaggttgtcgttcatagcataagacttccaagaaatagcaccatcagtgatgtgattactgatttgaaaaccaaggttgaactatctaatcctgacgctgagctccgcttgcttgaagtattttaccacaagatttataagatctttccacctcatgagaagatagagaacataaatgatcagtactggacattacgagctgaggagatcccagaggaagagaagaatcttggcccacatgatcgattgattcatgtttaccatttcatgaaagaccctaaccagaatcaacaaattcaaaattttggagatccttttttgatggttattcgggaaggtgagactgctgcagaggtaatggagcgcatccagagaaaacttagagttcctgatgatgagttctccaagtggaagcttgcattcatatccatgaaccggccagagtacctccaggacactgacgttgtatcagcacgttttcagcggagagatgtatatggtgcttgggaacaataccttggcttggagcacactgatacaacatcgaaacggtcttacacatccaatcagaatcggcacacctatgagaagcccgtaaaaatttataattgagaaaccttcatcaaagttcaatccattgtcaaaggcgtcgacagcagcatgcccaaggtgatacgacgcttcaaacagaaaaatctggtatagtatttgcctgtgctaaggcctgcaaggcgcaagcccaccaggccaccaatgctgcttccaaccttcattgttccaagcaaccaagcatgtgtttggtttttcttcgtcgtgtcgagtatgacggcccctgacagggtaggtgtttgcttagtttgtagagcaaagctagcacataagaaaaaatattttggtaggggtggggggcatgtatacaggattgtagccgatactgattgctgaatttgcgtctcttgcagctgtgggaacaatggcagagattgtataatgggtttggtataattcttcgtgctgttgagaaacgtacgaggataacccgatcagatagtagagttttgagacctgtcaaacagaaccttttgaaactaacctacccgttataccagaagggccgtttgcaagtcttctattatacatagtttttattatatatatatatatatatgcatctagaaaataagaacaatttagaatttagaatggagtagaatacatttctacccttatttagaaatag

SEQ ID NO: 15837 - DNA, 2744 bp, Zea Mays
ctacttctgcagattaatgaccgctatgaatttcctcttcaacttgaccttgatagagacaatggaaaatatcttgctccagatgcagatcgaagtattagaaacctctatacacttcataggtaatttatttatcataaactgttccaattctttgaatggtatatatgtacaaatttgatgatgagcgggttacaaaagaagacactaaaaaggcacttgaagagcagtatgggggtgaggaagagttgcctcaaataaaccctggtttcaataacacgccatttaaattcacaaagtattcgaatgcctacatgcttgtctatatacgtgagagtgacaaagagaaaataatgtgtaatgtcgatgagaaggacatcgctgagcatttgcggataaggttgaagaaagaacaagaagagaaagaacacaagaagaaggagaaggctgaagctcatctctacactatcataaagatcgctcgagacgaggacttaaaggagcaaatcggtaagaatatatattttgatctggtggaccatgaaaaagttcacagtttccgcattcagaagcagttgccttttacttcattcaaggaggaagttgcaaaggaatttggcatccctgtacagtttcagcgcttctggttgtgggctaagaggcagaaccatacataccggcccaatcgtccattgacaccccatgaggaagcacaatcagtcgggcagcttagggaagtctcaaataaggcacacaatgctgagctgaagctgtttctggaagttgaacttggaccggagttatgtccaattcgtccacctgagaagagcaaagaagacatacttcttttcttcaagctttataatgctgagaaggaagagcttcattttgttggtaggctttttgtgaaggctctgggaaagccatctgaaatattgacaaaactgaatgcaatggctggattttctccaaatgaagaaattgagctgtacgaggaaattaagtttgagccaaatgtgatgtgcgaacatattgacaagaaacttactttccgctctagtcagcttgaagacggagacattatctgtttccaaaaggctcctgttccagatggtgatgcacaagtgcgctatccagatgttccttcattcttggagtatgttcacaataggttgtgcactttcggtgtctggacaaaccaaaggatgatgatttttctttggaattgtcgaagcttcatacatatgatgatgttgttgagagagttgcacatcaacttgggttggatgatccatcaaagatacggcttacgtctcacaattgttattctcagcaacctaaaccacagcctattagatataggggggtagcacatctactggatatgcttgttcattataatcagacttctgatatcttgtattatgaggttctggacattccactgccagatttgcagcgtttgaaaacgcttaaagttgcattccaccatgcaacaaaagacgaggttgtcgttcatagcataagacttccaagaaatagcaccatcagtgatgtgattactgatttgaaaaccaaggttgaactatctaatcctgacgctgagctccgcttgcttgaagtattttaccacaagatttataagatctttccacctcatgagaagatagagaacataaatgatcagtactggacattacgagctgaggagatcccagaggaagagaagaatcttggcccacatgatcgattgattcatgtttaccatttcatgaaagaccctaaccagaatcaacaaattcaaaattttggagatccttttttgatggttattcgggaaggtgagactgctgcagaggtaatggagcgcatccagagaaaacttagagttcctgatgatgagttctccaagtggaagcttgcattcatatccatgaaccggccagagtacctccaggacactgacgttgtatcagcacgttttcagcggagagatgtatatggtgcttgggaacaataccttggcttggagcacactgatacaacatcgaaacggtcttacacatccaatcagaatcggcacacctatgagaagcccgtaaaaatttataattgagaaaccttcatcaaagttcaatccattgtcaaaggcgtcgacagcagcatgcccaaggtgatacgacgcttcaaacagaaaaatctggtatagtatttgcctgtgctaaggcctgcaaggcgcaagcccaccaggccaccaatgctgcttccaaccttcattgttccaagcaaccaagcatgtgtttggtttttcttcgtcgtgtcgagtatgacggcccctgacagggtaggtgtttgcttagtttgtagagcaaagctagcacataagaaaaaatattttggtaggggtggggggcatgtatacaggattgtagccgatactgattgctgaatttgcgtctcttgcagctgtgggaacaatggcagagattgtataatgggtttggtataattcttcgtgctgttgagaaacgtacgaggataacccgatcagatagtagagttttgagacctgtcaaacagaaccttttgaaactaacctacccgttataccagaagggccgtttgcaagtcttctattatacatagtttttattatatatatatatatatatgcatctagaaaataagaacaatttagaatttagaatggagtagaatacatttctacccttatttagaaatag

SEQ ID NO: 15838 - DNA, 2619 bp, Zea Mays
ctacttctgcagattaatgaccgctatgaatttcctcttcaacttgaccttgatagagacaatggaaaatatcttgctccagatgcagatcgaagtattagaaacctctatacacttcataggtaatttatttatcataaactgttccaattctttgaatggtatatatgtacaaatttgatgatgagcgggttacaaaagaagacactaaaaaggcacttgaagagcagtatgggggtgaggaagagttgcctcaaataaaccctggtttcaataacacgccatttaaattcacaaagtattcgaatgcctacatgcttgtctatatacgtgagagtgacaaagagaaaataatgtgtaatgtcgatgagaaggacatcgctgagcatttgcggataaggttgaagaaagaacaagaagagaaagaacacaagaagaaggagaaggctgaagctcatctctacactatcataaagatcgctcgagacgaggacttaaaggagcaaatcggtaagaatatatattttgatctggtggaccatgaaaaagttcacagtttccgcattcagaagcagttgccttttacttcattcaaggaggaagttgcaaaggaatttggcatccctgtacagtttcagcgcttctggttgtgggctaagaggcagaaccatacataccggcccaatcgtccattgacaccccatgaggaagcacaatcagtcgggcagcttagggaagtctcaaataaggcacacaatgctgagctgaagctgtttctggaagttgaacttggaccggagttatgtccaattcgtccacctgagaagagcaaagaagacatacttcttttcttcaagctttataatgctgagaaggaagagcttcattttgttggtaggctttttgtgaaggctctgggaaagccatctgaaatattgacaaaactgaatgcaatggctggattttctccaaatgaagaaattgagctgaaattaagtttgagccaaatgtgatgtgcgaacatattgacaagaaacttactttccgctctagtcagcttgaagacggagacattatctgtttccaaaaggctcctgttccagatggtgatgcacaagtgcgctatccagatgttccttcattcttggagtatgttcacaataggcaggttgtgcactttcggtgtctggacaaaccaaaggatgatgatttttctttggaattgtcgaagcttcatacatatgatgatgttgttgagagagttgcacatcaacttgggttggatgatccatcaaagatacggcttacgtctcacaattgttattctcagcaacctaaaccacagcctattagatataggggggtagcacatctactggatatgcttgttcattataatcagacttctgatatcttgtattatgaggttctggacattccactgccagatttgcagcgtttgaaaacgcttaaagttgcattccaccatgcaacaaaagacgaggttgtcgttcatagcataagacttccaagaaatagcaccatcagtgatgtgattactgatttgaaaaccaaggttgaactatctaatcctgacgctgagctccgcttgcttgaagtattttaccacaagatttataagatctttccacctcatgagaagatagagaacataaatgatcagtactggacattacgagctgaggagatcccagaggaagagaagaatcttggcccacatgatcgattgattcatgtttaccatttcatgaaagaccctaaccagaatcaacaaattcaaaattttggagatccttttttgatggttattcgggaaggtgagactgctgcagaggtaatggagcgcatccagagaaaacttagagttcctgatgatgagttctccaagtggaagcttgcattcatatccatgaaccggccagagtacctccaggacactgacgttgtatcagcacgttttcagcggagagatgtatatggtgcttgggaacaataccttggcttggagcacactgatacaacatcgaaacggtcttacacatccaatcagaatcggcacacctatgagaagcccgtaaaaatttataattgagaaaccttcatcaaagttcaatccattgtcaaaggcgtcgacagcagcatgcccaaggtgatacgacgcttcaaacagaaaaatctggtatagtatttgcctgtgctaaggcctgcaaggcgcaagcccaccaggccaccaatgctgcttccaaccttcattgttccaagcaaccaagcatgtgtttggtttttcttcgtcgtgtcgagtatgacggcccctgacaggctgtgggaacaatggcagagattgtataatgggtttggtataattcttcgtgctgttgagaaacgtacgaggataacccgatcagatagtagagttttgagacctgtcaaacagaaccttttgaaactaacctacccgttataccagaagggccgtttgcaagtcttctattatacatagtttttattatatatatatatatatatgcatctagaaaataagaacaatttagaatttagaatggagtagaatacatttctacccttatttagaaatag

SEQ ID NO: 15839 - DNA, 2647 bp, Zea Mays
ctacttctgcagattaatgaccgctatgaatttcctcttcaacttgaccttgatagagacaatggaaaatatcttgctccagatgcagatcgaagtattagaaacctctatacacttcatagtgttcttgttcatagtggaggagtacatggtggccactactatgctttcattcggccgacactctcggatcagtggtacaaatttgatgatgagcgggttacaaaagaagacactaaaaaggcacttgaagagcagtatgggggtgaggaagagttgcctcaaataaaccctggtttcaataacacgccatttaaattcacaaagtattcgaatgcctacatgcttgtctatatacgtgagagtgacaaagagaaaataatgtgtaatgtcgatgagaaggacatcgctgagcatttgcggataaggttgaagaaagaacaagaagagaaagaacacaagaagaaggagaaggctgaagctcatctctacactatcataaagatcgctcgagacgaggacttaaaggagcaaatcgtttcagcgcttctggttgtgggctaagaggcagaaccatacataccggcccaatcgtccattgacaccccatgaggaagcacaatcagtcgggcagcttagggaagtctcaaataaggcacacaatgctgagctgaagctgtttctggaagttgaacttggaccggagttatgtccaattcgtccacctgagaagagcaaagaagacatacttcttttcttcaagctttataatgctgagaaggaagagcttcattttgttggtaggctttttgtgaaggctctgggaaagccatctgaaatattgacaaaactgaatgcaatggctggattttctccaaatgaagaaattgagctgaaattaagtttgagccaaatgtgatgtgcgaacatattgacaagaaacttactttccgctctagtcagcttgaagacggagacattatctgtttccaaaaggctcctgttccagatggtgatgcacaagtgcgctatccagatgttccttcattcttggagtatgttcacaataggcaggttgtgcactttcggtgtctggacaaaccaaaggatgatgatttttctttggaattgtcgaagcttcatacatatgatgatgttgttgagagagttgcacatcaacttgggttggatgatccatcaaagatacggcttacgtctcacaattgttattctcagcaacctaaaccacagcctattagatataggggggtagcacatctactggatatgcttgttcattataatcagacttctgatatcttgtattatgaggttctggacattccactgccagatttgcagcgtttgaaaacgcttaaagttgcattccaccatgcaacaaaagacgaggttgtcgttcatagcataagacttccaagaaatagcaccatcagtgatgtgattactgatttgaaaaccaaggttgaactatctaatcctgacgctgagctccgcttgcttgaagtattttaccacaagatttataagatctttccacctcatgagaagatagagaacataaatgatcagtactggacattacgagctgaggagatcccagaggaagagaagaatcttggcccacatgatcgattgattcatgtttaccatttcatgaaagaccctaaccagaatcaacaaattcaaaattttggagatccttttttgatggttattcgggaaggtgagactgctgcagaggtaatggagcgcatccagagaaaacttagagttcctgatgatgagttctccaagtggaagcttgcattcatatccatgaaccggccagagtacctccaggacactgacgttgtatcagcacgttttcagcggagagatgtatatggtgcttgggaacaataccttggcttggagcacactgatacaacatcgaaacggtcttacacatccaatcagaatcggcacacctatgagaagcccgtaaaaatttataattgagaaaccttcatcaaagttcaatccattgtcaaaggcgtcgacagcagcatgcccaaggtgatacgacgcttcaaacagaaaaatctggtatagtatttgcctgtgctaaggcctgcaaggcgcaagcccaccaggccaccaatgctgcttccaaccttcattgttccaagcaaccaagcatgtgtttggtttttcttcgtcgtgtcgagtatgacggcccctgacagggtaggtgtttgcttagtttgtagagcaaagctagcacataagaaaaaatattttggtaggggtggggggcatgtatacaggattgtagccgatactgattgctgaatttgcgtctcttgcagctgtgggaacaatggcagagattgtataatgggtttggtataattcttcgtgctgttgagaaacgtacgaggataacccgatcagatagtagagttttgagacctgtcaaacagaaccttttgaaactaacctacccgttataccagaagggccgtttgcaagtcttctattatacatagtttttattatatatatatatatatatgcatctagaaaataagaacaatttagaatttagaatggagtagaatacatttctacccttatttagaaatag

SEQ ID NO: 15840 - DNA, 2776 bp, Zea Mays
ctacttctgcagattaatgaccgctatgaatttcctcttcaacttgaccttgatagagacaatggaaaatatcttgctccagatgcagatcgaagtattagaaacctctatacacttcatagtgttcttgttcatagtggaggagtacatggtggccactactatgctttcattcggccgacactctcggatcagtggtacaaatttgatgatgagcgggttacaaaagaagacactaaaaaggcacttgaagagcagtatgggggtgaggaagagttgcctcaaataaaccctggtttcaataacacgccatttaaattcacaaagtattcgaatgcctacatgcttgtctatatacgtgagagtgacaaagagaaaataatgtgtaatgtcgatgagaaggacatcgctgagcatttgcggataaggttgaagaaagaacaagaagagaaagaacacaagaagaaggagaaggctgaagctcatctctacactatcataaagatcgctcgagacgaggacttaaaggagcaaatcggtaagaatatatattttgatctggtggaccatgaaaaagttcacagtttccgcattcagaagcagttgccttttacttcattcaaggaggaagttgcaaaggaatttggcatccctgtacagtttcagcgcttctggttgtgggctaagaggcagaaccatacataccggcccaatcgtccattgacaccccatgaggaagcacaatcagtcgggcagcttagggaagtctcaaataaggcacacaatgctgagctgaagctgtttctggaagttgaacttggaccggagttatgtccaattcgtccacctgagaagagcaaagaagacatacttcttttcttcaagctttataatgctgagaaggaagagcttcattttgttggtaggctttttgtgaaggctctgggaaagccatctgaaatattgacaaaactgaatgcaatggctggattttctccaaatgaagaaattgagctgtacgaggaaattaagtttgagccaaatgtgatgtgcgaacatattgacaagaaacttactttccgctctagtcagcttgaagacggagacattatctgtttccaaaaggctcctgttccagatggtgatgcacaagtgcgctatccagatgttccttcattcttggagtatgttcacaataggcaggttgtgcactttcggtgtctggacaaaccaaaggatgatgatttttctttggaattgtcgaagcttcatacatatgatgatgttgttgagagagttgcacatcaacttgggttggatgatccatcaaagatacggcttacgtctcacaattgttattctcagcaacctaaaccacagcctattagatataggggggtagcacatctactggatatgcttgttcattataatcagacttctgatatcttgtattatgaggttctggacattccactgccagatttgcagcgtttgaaaacgcttaaagttgcattccaccatgcaacaaaagacgaggttgtcgttcatagcataagacttccaagaaatagcaccatcagtgatgtgattactgatttgaaaaccaaggttgaactatctaatcctgacgctgagctccgcttgcttgaagtattttaccacaagatttataagatctttccacctcatgagaagatagagaacataaatgatcagtactggacattacgagctgaggagatcccagaggaagagaagaatcttggcccacatgatcgattgattcatgtttaccatttcatgaaagaccctaaccagaatcaacaaattcaaaattttggagatccttttttgatggttattcgggaaggtgagactgctgcagaggtaatggagcgcatccagagaaaacttagagttcctgatgatgagttctccaagtggaagcttgcattcatatccatgaaccggccagagtacctccaggacactgacgttgtatcagcacgttttcagcggagagatgtatatggtgcttgggaacaataccttggcttggagcacactgatacaacatcgaaacggtcttacacatccaatcagaatcggcacacctatgagaagcccgtaaaaatttataattgagaaaccttcatcaaagttcaatccattgtcaaaggcgtcgacagcagcatgcccaaggtgatacgacgcttcaaacagaaaaatctggtatagtatttgcctgtgctaaggcctgcaaggcgcaagcccaccaggccaccaatgctgcttccaaccttcattgttccaagcaaccaagcatgtgtttggtttttcttcgtcgtgtcgagtatgacggcccctgacagggtaggtgtttgcttagtttgtagagcaaagctagcacataagaaaaaatattttggtaggggtggggggcatgtatacaggattgtagccgatactgattgctgaatttgcgtctcttgcagctgtgggaacaatggcagagattgtataatgggtttggtataattcttcgtgctgttgagaaacgtacgaggataacccgatcagatagtagagttttgagacctgtcaaacagaaccttttgaaactaacctacccgttataccagaagggccgtttgcaagtcttctattatacatagtttttattatatatatatatatatatgcatctagaaaataagaacaatttagaatttagaatggagtagaatacatttctacccttatttagaaatag

SEQ ID NO: 15841 - DNA, 2626 bp, Zea Mays
ctacttctgcagattaatgaccgctatgaatttcctcttcaacttgaccttgatagagacaatggaaaatatcttgctccagatgcagatcgaagtattagaaacctctatacacttcataggtaatttatttatcataaactgttccaattctttgaatggtatatatgtacaaatttgatgatgagcgggttacaaaagaagacactaaaaaggcacttgaagagcagtatgggggtgaggaagagttgcctcaaataaaccctggtttcaataacacgccatttaaattcacaaagtattcgaatgcctacatgcttgtctatatacgtgagagtgacaaagagaaaataatgtgtaatgtcgatgagaaggacatcgctgagcatttgcggataaggttgaagaaagaacaagaagagaaagaacacaagaagaaggagaaggctgaagctcatctctacactatcataaagatcgctcgagacgaggacttaaaggagcaaatcggtaagaatatatattttgatctggtggaccatgaaaaagttcacagtttccgcattcagaagcagttgccttttacttcattcaaggaggaagttgcaaaggaatttggcatccctgtacagtttcagcgcttctggttgtgggctaagaggcagaaccatacataccggcccaatcgtccattgacaccccatgaggaagcacaatcagtcgggcagcttagggaagtctcaaataaggcacacaatgctgagctgaagctgtttctggaagttgaacttggaccggagttatgtccaattcgtccacctgagaagagcaaagaagacatacttcttttcttcaagctttataatgctgagaaggaagagcttcattttgttggtaggctttttgtgaaggctctgggaaagccatctgaaatattgacaaaactgaatgcaatggctggattttctccaaatgaagaaattgagctgtacgaggaaattaagtttgagccaaatgtgatgtgcgaacatattgacaagaaacttactttccgctctagtcagcttgaagacggagacattatctgtttccaaaaggctcctgttccagatggtgatgcacaagtgcgctatccagatgttccttcattcttggagtatgttcacaataggcaggttgtgcactttcggtgtctggacaaaccaaaggatgatgatttttctttggaattgtcgaagcttcatacatatgatgatgttgttgagagagttgcacatcaacttgggttggatgatccatcaaagatacggcttacgtctcacaattgttattctcagcaacctaaaccacagcctattagatataggggggtagcacatctactggatatgcttgttcattataatcagacttctgatatcttgtattatgaggttctggacattccactgccagatttgcagcgtttgaaaacgcttaaagttgcattccaccatgcaacaaaagacgaggttgtcgttcatagcataagacttccaagaaatagcaccatcagtgatgtgattactgatttgaaaaccaaggttgaactatctaatcctgacgctgagctccgcttgcttgaagtattttaccacaagatttataagatctttccacctcatgagaagatagagaacataaatgatcagtactggacattacgagctgaggagatcccagaggaagagaagaatcttggcccacatgatcgattgattcatgtttaccatttcatgaaagaccctaaccagaatcaacaaattcaaaattttggagatccttttttgatggttattcgggaaggtgagactgctgcagaggtaatggagcgcatccagagaaaacttagagttcctgatgatgagttctccaagtggaagcttgcattcatatccatgaaccggccagagtacctccaggacactgacgttgtatcagcacgttttcagcggagagatgtatatggtgcttgggaacaataccttggcttggagcacactgatacaacatcgaaacggtcttacacatccaatcagaatcggcacacctatgagaagcccgtaaaaatttataattgagaaaccttcatcaaagttcaatccattgtcaaaggcgtcgacagcagcatgcccaaggtgatacgacgcttcaaacagaaaaatctggtatagtatttgcctgtgctaaggcctgcaaggcgcaagcccaccaggccaccaatgctgcttccaaccttcattgttccaagcaaccaagcatgtgtttggtttttcttcgtcgtgtcgagtatgacggcccctgacaggctgtgggaacaatggcagagattgtataatgggtttggtataattcttcgtgctgttgagaaacgtacgaggataacccgatcagatagtagagttttgagacctgtcaaacagaaccttttgaaactaacctacccgttataccagaagggccgtttgcaagtcttctattatacatagtttttattatatatatatatatatatgcatctagaaaataagaacaatttagaatttagaatggagtagaatacatttctacccttatttagaaatag

SEQ ID NO: 15842 - DNA, 2645 bp, Zea Mays
gttaccctgagtaaaccatgcctcattcagacaaaaatcgcgatcaatttttcgtagccctggttctttcttttgttaggattatctgtttcatgttcttgtttgcctcattcagttttctgttgtctatgtgtggcttgctcaagcaatcaacattagatgtctttcgtttaagaaatggtgaataagattatctaggattggtaataaagaactacctacttctgcagattaatgaccgctatgaatttcctcttcaacttgaccttgatagagacaatggaaaatatcttgctccagatgcagatcgaagtattagaaacctctatacacttcatagtgttcttgttcatagtggaggagtacatggtggccactactatgctttcattcggccgacactctcggatcagtggtacaaatttgatgatgagcgggttacaaaagaagacactaaaaaggcacttgaagagcagtatgggggtgaggaagagttgcctcaaataaaccctggtttcaataacacgccatttaaattcacaaagtattcgaatgcctacatgcttgtctatatacgtgagagtgacaaagagaaaataatgtgtaatgtcgatgagaaggacatcgctgagcatttgcggataaggttgaagaaagaacaagaagagaaagaacacaagaagaaggagaaggctgaagctcatctctacactatcataaagatcgctcgagacgaggacttaaaggagcaaatcggtaagaatatatattttgatctggtggaccatgaaaaagttcacagtttccgcattcagaagcagttgccttttacttcattcaaggaggaagttgcaaaggaatttggcatccctgtacagtttcagcgcttctggttgtgggctaagaggcagaaccatacataccggcccaatcgtccattgacaccccatgaggaagcacaatcagtcgggcagcttagggaagtctcaaataaggcacacaatgctgagctgaagctgtttctggaagttgaacttggaccggagttatgtccaattcgtccacctgagaagagcaaagaagacatacttcttttcttcaagctttataatgctgagaaggaagagcttcattttgttggtaggctttttgtgaaggctctgggaaagccatctgaaatattgacaaaactgaatgcaatggctggattttctccaaatgaagaaattgagctgtacgaggaaattaagtttgagccaaatgtgatgtgcgaacatattgacaagaaacttactttccgctctagtcagcttgaagacggagacattatctgtttccaaaaggctcctgttccagatggtgatgcacaagtgcgctatccagatgttccttcattcttggagtatgttcacaataggcaggtcgaagcttcatacatatgatgatgttgttgagagagttgcacatcaacttgggttggatgatccatcaaagatacggcttacgtctcacaattgttattctcagcaacctaaaccacagcctattagatataggggggtagcacatctactggatatgcttgttcattataatcagacttctgatatcttgtattatgaggttctggacattccactgccagatttgcagcgtttgaaaacgcttaaagttgcattccaccatgcaacaaaagacgaggttgtcgttcatagcataagacttccaagaaatagcaccatcagtgatgtgattactgatttgaaaaccaaggttgaactatctaatcctgacgctgagctccgcttgcttgaagtattttaccacaagatttataagatctttccacctcatgagaagatagagaacataaatgatcagtactggacattacgagctgaggagatcccagaggaagagaagaatcttggcccacatgatcgattgattcatgtttaccatttcatgaaagaccctaaccagaatcaacaaattcaaaattttggagatccttttttgatggttattcgggaaggtgagactgctgcagaggtaatggagcgcatccagagaaaacttagagttcctgatgatgagttctccaagtggaagcttgcattcatatccatgaaccggccagagtacctccaggacactgacgttgtatcagcacgttttcagcggagagatgtatatggtgcttgggaacaataccttggcttggagcacactgatacaacatcgaaacggtcttacacatccaatcagaatcggcacacctatgagaagcccgtaaaaatttataattgagaaaccttcatcaaagttcaatccattgtcaaaggcgtcgacagcagcatgcccaagctgtgggaacaatggcagagattgtataatgggtttggtataattcttcgtgctgttgagaaacgtacgaggataacccgatcagatagtagagttttgagacctgtcaaacagaaccttttgaaactaacctacccgttataccagaagggccgtttgcaagtcttctattatacatagtttttattatatatatatatatatatgcatctagaaaataagaacaatttagaatttagaatggagtagaatacatttctacccttatttagaaatag

SEQ ID NO: 15843 - DNA, 1508 bp, Zea Mays
cgcggggaggggcacgacctgtcttgggtgacaatacaactttcatcatcagctaaagcaaggtccccagcgcaaaaactatttacaaaaatatctgtcgtcctctgtcggacaagagcgtctctcagcgtagtaccaaattttcctctaccgggaaaaaggcgaagaaagaaactaacagacagacagtcattaaaagctccggcgactatgctcccgcctccgttggcgatgagcagttcaggtcgagatcgaacacggtgggcttcctcgccgacacagcgaccgatggcgacggcgacagatccactaccgacgaacagtccgagtcgctctacgccacggtgaccgtcgacgccagcttgagcacacgacaccctgcttccgcggtggctgcgcaacttcccctcgtctgcctcggcctcgggctcgcatccgccctcgacctcggccgttcttcctcctgttcccgccgccgtccgccgccgccgctgcttggcggccgcctctctcacacccaccgcagtgcgggcgacgaggaccccatgactatgatgacgccgccccctctcgagcagcagcagggggacgagatgctggtgccgcaccaggagctccctgtcgctggcccagaacctgccccacagccgatggaagttgttgcgcagacagaacccgccaacacagcggagacccagccacccgaggacccgcagacgtcgcgcttcacctggacaattgaaagcttcagtcgtcttaacactaagaagcactactctgatgcgttcgtcgttggaggatacaaatggcgtgtgctaattttccccaaggggaacaatgtggatcacttatcgttgtatttggatgttgcggattctgggagcctcccatatgggtggagccggtatgctcagttcagcttggctgttgtgaatcaggtccacccaaagtatacaattcggaaagatacccagcaccaatttaatgcacgcgagagcgactggggtttcacatcgtttatgcctttgagtgacctatatgacccaaacaggggttatcttgtgaatgacactgttgttatcgaagctgaggttgctgtccgcagaatggttgattattggacttatgactcgaaaaaagaaacaggttttgtaggtcttaagaatcaaggtgctacctgttatatgaactctctccttcaaacgttataccacacaccatattttagaaaggctgtatatcatatgccaacaactgagaatgacatgccatctgggagtattcctttagccctgcagagccttttttacaagctccagtatagcgacaacagtgtagcgacgaaagagttgaccaaatcctttggatgggatacttatgattctttcatgcagcatgacgtgcaagaactcaacagagttctttgtgagaaactggaagataagatgaaggtaaatatgaaaataatgaattatcaatacatctaaaaggacagaccgagtgttgtc

SEQ ID NO: 15844 - DNA, 1502 bp, Zea Mays
cgcggggaggggcacgacctgtcttgggtgacaatacaactttcatcatcagctaaagcaaggtccccagcgcaaaaactatttacaaaaatatctgtcgtcctctgtcggacaagagcgtctctcagcgtagtaccaaattttcctctaccgggaaaaaggcgaagaaagaaactaacagacagacagtcattaaaagctccggcgactatgctcccgcctccgttggcgatgagcagttcaggtcgagatcgaacacggtgggcttcctcgccgacacagcgaccgatggcgacggcgacagatccactaccgacgaacagtccgagtcgctctacgccacggtgaccgtcgacgccagcttgagcacacgacaccctgcttccgcggtggctgcgcaacttcccctcgtctgcctcggcctcgggctcgcatccgccctcgacctcggccgttcttcctcctgttcccgccgccgtccgccgccgccgctgcttggcggccgcctctctcacacccaccgcagtgcgggcgacgaggaccccatgactatgatgacgccgccccctctcgagcagggggacgagatgctggtgccgcaccaggagctccctgtcgctggcccagaacctgccccacagccgatggaagttgttgcgcagacagaacccgccaacacagcggagacccagccacccgaggacccgcagacgtcgcgcttcacctggacaattgaaagcttcagtcgtcttaacactaagaagcactactctgatgcgttcgtcgttggaggatacaaatggcgtgtgctaattttccccaaggggaacaatgtggatcacttatcgttgtatttggatgttgcggattctgggagcctcccatatgggtggagccggtatgctcagttcagcttggctgttgtgaatcaggtccacccaaagtatacaattcggaaagatacccagcaccaatttaatgcacgcgagagcgactggggtttcacatcgtttatgcctttgagtgacctatatgacccaaacaggggttatcttgtgaatgacactgttgttatcgaagctgaggttgctgtccgcagaatggttgattattggacttatgactcgaaaaaagaaacaggttttgtaggtcttaagaatcaaggtgctacctgttatatgaactctctccttcaaacgttataccacacaccatattttagaaaggctgtatatcatatgccaacaactgagaatgacatgccatctgggagtattcctttagccctgcagagccttttttacaagctccagtatagcgacaacagtgtagcgacgaaagagttgaccaaatcctttggatgggatacttatgattctttcatgcagcatgacgtgcaagaactcaacagagttctttgtgagaaactggaagataagatgaaggtaaatatgaaaataatgaattatcaatacatctaaaaggacagaccgagtgttgtc

SEQ ID NO: 15845 - DNA, 1328 bp, Zea Mays
cgcggggaggggcacgacctgtcttgggtgacaatacaactttcatcatcagctaaagcaaggtccccagcgcaaaaactatttacaaaaatatctgtcgtcctctgtcggacaagagcgtctctcagcgtagtaccaaattttcctctaccgggaaaaaggcgaagaaagaaactaacagacagacagtcattaaaagctccggcgactatgctcccgcctccgttggcgatgagcagttcaggtcgagatcgaacacggtgggcttcctcgccgacacagcgaccgatggcgacggcgacagatccactaccgacgaacagtccgagtcgctctacgccacggtgaccgtcgacgccagcttgagcacacgacaccctgcttccgcggtggctgcgcaacttcccctcgtctgcctcggcctcgggctcgcatccgccctcgacctcggccgttcttcctcctgttcccgccgccgtccgccgccgccgctgcttggcggccgcctctctcacacccaccgcagtgcgggcgacgaggaccccatgactatgatgacgccgccccctctcgagcagcagcagggggacgagatgctggtgccgcaccaggagctccctgtcgctggcccagaacctgccccacagccgatggaagttgttgcgcagacagaacccgccaacacagcggagacccagccacccgaggacccgcagacgtcgcgcttcacctggacaattgaaagcttcagtcgtcttaacactaagaagcactactctgatgcgttcgtcgttggaggatacaaatggcgtgtgctaattttccccaaggggaacaatgtggatcacttatcgttgtatttggatgttgcggattctgggagcctcccatatgggtggagccggtatgctcagttcagcttggctgttgtgaatcaggtccacccaaagtatacaattcggaaaggttttgtaggtcttaagaatcaaggtgctacctgttatatgaactctctccttcaaacgttataccacacaccatattttagaaaggctgtatatcatatgccaacaactgagaatgacatgccatctgggagtattcctttagccctgcagagccttttttacaagctccagtatagcgacaacagtgtagcgacgaaagagttgaccaaatcctttggatgggatacttatgattctttcatgcagcatgacgtgcaagaactcaacagagttctttgtgagaaactggaagataagatgaaggtaaatatgaaaataatgaattatcaatacatctaaaaggacagaccgagtgttgtc

SEQ ID NO: 15846 - DNA, 1422 bp, Zea Mays
cgcggggaggggcacgacctgtcttgggtgacaatacaactttcatcatcagctaaagcaaggtccccagcgcaaaaactatttacaaaaatatctgtcgtcctctgtcggacaagagcgtctctcagcgtagtaccaaattttcctctaccgggaaaaaggcgaagaaagaaactaacagacagacagtcattaaaagctccggcgactatgctcccgcctccgttggcgatgagcagttcaggtcgagatcgaacacggtgggcttcctcgccgacacagcgaccgatggcgacggcgacagatccactaccgacgaacagtccgagtcgctctacgccacggtgaccgtcgacgccagcttgagcacacgacaccctgcttccgcggtggctgcgcaacttcccctcgtctgcctcggcctcgggctcgcatccgccctcgacctcggccgttcttcctcctgttcccgccgccgtccgccgccgccgctgcttggcggccgcctctctcacacccaccgcagtgcgggcgacgaggaccccatgactatgatgacgccgccccctctcgagcagcagcagggggacgagatgctggtgccgcaccaggagctccctgtcgctggcccagaacctgccccacagccgatggaagttgttgcgcagacagaacccgccaacacagcggagacccagccacccgaggacccgcagacgtcgcgcttcacctggacaattgaaagcttcagtcgtcttaacactaagaagcactactctgatgcgttcgtcgttggaggatacaaatggcgtgtgctaattttccccaaggggaacaatgtggatcacttatcgttgtatttggatgttgcggattctgggagcctcccatatgggtggagccggtatgctcagttcagcttggctgttgtgaatcaggtccacccaaagtatacaattcggaaagatacccagcaccaatttaatgcacgcgagagcgactggggtttcacatcgtttatgcctttgagtgacctatatgacccaaacaggggttatcttgtgaatgacactgttgttatcgaagctgaggttgctgtccgcagaatggttgattattggacttatgactcgaaaaaagaaacaggctgtatatcatatgccaacaactgagaatgacatgccatctgggagtattcctttagccctgcagagccttttttacaagctccagtatagcgacaacagtgtagcgacgaaagagttgaccaaatcctttggatgggatacttatgattctttcatgcagcatgacgtgcaagaactcaacagagttctttgtgagaaactggaagataagatgaaggtaaatatgaaaataatgaattatcaatacatctaaaaggacagaccgagtgttgtc

SEQ ID NO: 15847 - DNA, 993 bp, Zea Mays
atgacgttgctatcgttggtggaggcatggtgggcttgcctgtcgcttgtgcattgtgtaggaacaccgccgaaggggacgacggcatgggcgccgccgccgaagccgagcgacgacagcagcagggcaaagcagcgagagatgggaggtcagatgaagattagtgcaatgtgggaggaaggtggcaacaaagcaccggcttcaactgccaaggtcgtgcaatatgaagcttctgatgttggtgtggatgatgcattaggcatttggaaaatagatgacgtcgacaatagcttccacacacagccatttcggatcaattgtggctatcacctgcgggtggtcgatgtgaacatgcaagtggaagttggtagtgtcagtgagaggtattcaagttggaattggaattataggttacagtccactaaaagagggttttttgtgcagtggagcacctcgtggccagcacaagctggccttcttcgactccggcgacgccgccagcccccatcacccgtccccaaactcatcttcctagagagtacgctggtgcagaccttaggccctaaaaggcgcgtgcgcgtcgcgaccctggacgaggcgttgcagatcccgcaggagttggcagcgttcgtgacttgctatggtcaaagcctccatgtcctggttgggtacattggctggaattatggatcagttatagaggatatcttgactggatttaagatgcactgccatggttggcggtctatttactgcatctcgaaggaggaattaaccgagatcagtttcacagtgtaccacatttgcaggctgcactttgtgctcaagttcttccgagacgtcaagcatgtgcgagaacaaggagctatagatgatcgtgacactttcctccatgcagtgcgagatctcctatgttttcactcaactcaaagagtcgggggaaattttatgcatgaacagtgtgtaatgcaggagtactatctacttgcgtgg

SEQ ID NO: 15848 - DNA, 1870 bp, Zea Mays
ttggaggaccgggaaggccaagcacttgtctctgcttctatccccatcggctctagacgctatggccatcacaaacttctgcaacatcaggcatctggcaggggcagcagcagatgagctacgtgatgctgtgctgcttgttttcgccaacaagcaagatcttcctaatgccatgaatgctgctgagatcactgacaagcttggattacactccctgcgccagcgacactggtacatccagagcacttgtgccacaactggcgagggtctgtacgagggcctggactggctgtccagcaacattgcgagcaaggcttgaatatcaaatgcgaactgactaggagctccggatgtatcatggaaacttaggacagaatcgcctctgcaacctgttaggtgtcttctaccggcacaatatattttttgtttggaatatgtaatgatgttacggttcaacgtttattctaccctactatactgttggatgttctttgggcctgtttcattttgcacaaggattggagttccaatatcatgctacattttaaattcgtaccccatcgcaaattttaggatgtataccaaattataggatattccgacattttttggagagtccgagcatcttgagttggatcaaatttatatcataaaacatttatgatactaaaaagtatcgttatttttttattagttatatttttagtgtatctatttggtgtcatgaaactgtgtttttttgtaattttagttaaatttgaggaaagatgaatctgtgatttccacagatggtggaaatgaggagacagacactgacagcctccatgttgctagaggattgtctcatcctgggcttttgtcaagtttatccaataaggcatcagtggtcccaacccctttgcttccttctggacaatctgatctccggttcaatcgtcttcgaccctcaattgatgaaagtgattgcaaatacaaaagattatttggctactatgttgctcgtgaggctgtaatcgatgaggaatactggatcgttgcatggttgagagcagaagatcagtatgaaaatgagtcaggcaatcggtaagacatttgtttttaagggaaaattctttagtgttccttattgtctgcactgttatatacatttactgttagcatggtcctttcagctactttatcattttttcctgcagctatgttgaaagctttaaaagaaagtttgcatcaaaggtacttgcgtaaacaacttagtagtgttttctatgtgcttaaacataattgagatatgatgtacatcttatttgtagcaagtaatgttaagaaattacaataacctctattcaaaaagatttgttgacgcacgttataaaatattcacattaatttgtcacatcctaatagtttctattctggctcacatgtatgagagtctgtcatctcattgcaggaattccatgcattaaagaagagatgcaacaaacaacatagagagaagtatatctgtcttgtcgtggtaaagaacgatgacatcaggcgaactgtcctgaatagtgttgttggtaccttagatgtatgtgtaaggcatcctctatatggggagaaatttcctgaggagcttggaaaaccgtctcttcactgtcgaatttatcagcctgatcagccaaaatttgggtatgtaacaaatgtatgtgttgctaaatatgcaaggcgtcaagggattgctagcaacatgctattataatatatgtccatatgttaattaaagaaaaacccaaaagccctaacattgacaacgtggccgaaatgacttgccgagctccaaaagtatcaagcaactccaagatttatgaaatgtcggcgtttatgt

SEQ ID NO: 15849 - DNA, 2775 bp, Zea Mays
gtgaagcccccgcgcctttgcgcggaatcgtggactctgacgggaattgtctggcggcttttgcggggtggaggcatcgacaaaccatcttgccgagcatcagggcacgcccctctacaacctgccatggaagataccctgcaagctcatgaacatggagctgaaggctgagccggatactgatgaggtgtacgcccaactcaccctgctccctgataagaagcaagatgagaatacatctgcaagagtggagaatgaggaggcagaggaggaggtggtgcctcatgtgccaccagccacaagtgaggggcttcgcatccattccttctgcaagacattgactgcctcagacacaagcacacatggtggtttctcagtgttgcgccggcatgcagatgagtgcctcccaccactggatatgagtcaacatcccccaaatcaagaattggtggccaaggacctgcatggggttgagtggcggttccgtcacatctttcgaggtcagccacggagacacctccttcagagtggttggagtgtttttgttagtgccaagcgtcttgttgcgggggatgcattcatatttctcagaggtgagaatggggagttacgtgttggagttcggcgtgcactgaggcaccaaaccactatcccatcttcagtcatatcaagccacagtatgcatcttggtgttcttgcaacagcatggcatgcagtgaacactgggagtatgttcactgtctactacaaaccaaggactagtccagctgaatttgtggtttcacgagctaggtactgtgaatcactgaaacgaaattattcaatagggatgaggtttaggatgagatttgaaggtgaagaagcggcagagcaaagattcactggcacaatagttggaatatgtgtttctgatccatctggctgggctgactcgaaatggcgttcccttaaggtgagatgggatgaagcttcttctgttcctcgtcctgaaagagtttctccttggcaaatagaacctgctgttagcccatctcctgtgaaccctcttccagtcagattcaagaggtctcgttcaagtgttaacgcctcaccatctgatgtgtctactgtaaacagagaagttgcttctaaagtcatggtagagtcgcaacagaataatctcccaagggccttgcacaatcaaggaaggacacaattgacaggtcgataccgtgatagcactgatgtgaagactgctcaggatcttaccatgtggtcttcaggaactgagcaacagagaaacaatattgctgcccagacaaaacgatgtctggagggttggacgcaatctagaactccagaaggttacaatcaactgttctcggcatttcaaccactgaaggatgcacataatccacttcgtccttttcctaataaaatatctgggactcgctcaagtacctgggtcacagccgatgcccgttatccagctcaacaagccaatcacaacatgttacatggcacattgtcttttatgcctcatagcagtggttttaggatgattcaacagaataatctagtgacacctgaagctgcaaattttactgggaaatcagctttcacttcacttcagggccatgtcactgatcagtgctccacaggctggtttggatctattgagtcaaattcccacacagaccatgcatcgtcaagtttgatcaggtcccagcctttggttattggaaatgatgttcagaaaaccaaaggcacttcattcaaactatttgggattcctcttggcagtccagaaaaatctgaacctctggtatccccaccaagtgtcgcatatgacgggaaacttcaaacttctccaacagacaacaatgagccttgttcagaagctacccagaatatccagaacaaagtgcaaagtagttcaaccagaagctgcaagaaggtccataagcaaggcagcgccctcgggagatcgatcgatctaacaaagttcgcttgctacgatgagctgattgccgaactagaccagatgtttgacttcgatggtgagctgaagagtccttgcaggaactggttggtcgtctacactgacaacgaaggcgacatgatgctggtcggcgacgacccctggaatgagttctgtgacatggtccacaagatcttcatctacacaagggaggaagtggagaggatgaacccaggcgccctaaacgcgaggctcgaagactgcctgtctgactcgctgggaagagggctggcttccaaagagccccggagcggcccctcgacttcggctgtcgattctgagaaccgcgctaacttgtccagtcacccttttgaaagtggtgaagcagacaaaaggccacgtgtcagagtgaccggaagaacgagaaaggggtgtgtttcagtggtgtgtagtaggtaggtaattttgtgtgtatgcctccgggtaaaagccccgcggtacccagtttgtagatggtgcttctcctggtgctagtttcccgtcgtaagctggatttttttggggggtgtgtgccctgctctgtgtgctgacccgcctgggggtaagttgtagcagagcaggagaaagcaggcaagaaaccgctggtgcgcctgcttggccaatccttttccttgcggagcgctgtaaatagccttggatctgaagcgtagtaatgtattgtcatggtactcgaagtcatgctccagtttgtgttgggtatgacctgcaactgtcggttcgatgggtgcggatgtcgaagggtttgcatggttgag

SEQ ID NO: 15850 - DNA, 2745 bp, Zea Mays
gtcccggattccaaatcctcgtcgtccgcagcttggggtggaggcatcgacaaaccatcttgccgagcatcagggcacgcccctctacaacctgccatggaagataccctgcaagctcatgaacatggagctgaaggctgagccggatactgatgaggtgtacgcccaactcaccctgctccctgataagaagcaagatgagaatacatctgcaagagtggagaatgaggaggcagaggaggaggtggtgcctcatgtgccaccagccacaagtgaggggcttcgcatccattccttctgcaagacattgactgcctcagacacaagcacacatggtggtttctcagtgttgcgccggcatgcagatgagtgcctcccaccactggatatgagtcaacatcccccaaatcaagaattggtggccaaggacctgcatggggttgagtggcggttccgtcacatctttcgaggtcagccacggagacacctccttcagagtggttggagtgtttttgttagtgccaagcgtcttgttgcgggggatgcattcatatttctcagaggtgagaatggggagttacgtgttggagttcggcgtgcactgaggcaccaaaccactatcccatcttcagtcatatcaagccacagtatgcatcttggtgttcttgcaacagcatggcatgcagtgaacactgggagtatgttcactgtctactacaaaccaaggactagtccagctgaatttgtggtttcacgagctaggtactgtgaatcactgaaacgaaattattcaatagggatgaggtttaggatgagatttgaaggtgaagaagcggcagagcaaagattcactggcacaatagttggaatatgtgtttctgatccatctggctgggctgactcgaaatggcgttcccttaaggtgagatgggatgaagcttcttctgttcctcgtcctgaaagagtttctccttggcaaatagaacctgctgttagcccatctcctgtgaaccctcttccagtcagattcaagaggtctcgttcaagtgttaacgcctcaccatctgatgtgtctactgtaaacagagaagttgcttctaaagtcatggtagagtcgcaacagaataatctcccaagggccttgcacaatcaaggaaggacacaattgacaggtcgataccgtgatagcactgatgtgaagactgctcaggatcttaccatgtggtcttcaggaactgagcaacagagaaacaatattgctgcccagacaaaacgatgtctggagggttggacgcaatctagaactccagaaggttacaatcaactgttctcggcatttcaaccactgaaggatgcacataatccacttcgtccttttcctaataaaatatctgggactcgctcaagtacctgggtcacagccgatgcccgttatccagctcaacaagccaatcacaacatgttacatggcacattgtcttttatgcctcatagcagtggttttaggatgattcaacagaataatctagtgacacctgaagctgcaaattttactgggaaatcagctttcacttcacttcagggccatgtcactgatcagtgctccacaggctggtttggatctattgagtcaaattcccacacagaccatgcatcgtcaagtttgatcaggtcccagcctttggttattggaaatgatgttcagaaaaccaaaggcacttcattcaaactatttgggattcctcttggcagtccagaaaaatctgaacctctggtatccccaccaagtgtcgcatatgacgggaaacttcaaacttctccaacagacaacaatgagccttgttcagaagctacccagaatatccagaacaaagtgcaaagtagttcaaccagaagctgcaagaaggtccataagcaaggcagcgccctcgggagatcgatcgatctaacaaagttcgcttgctacgatgagctgattgccgaactagaccagatgtttgacttcgatggtgagctgaagagtccttgcaggaactggttggtcgtctacactgacaacgaaggcgacatgatgctggtcggcgacgacccctggaatgagttctgtgacatggtccacaagatcttcatctacacaagggaggaagtggagaggatgaacccaggcgccctaaacgcgaggctcgaagactgcctgtctgactcgctgggaagagggctggcttccaaagagccccggagcggcccctcgacttcggctgtcgattctgagaaccgcgctaacttgtccagtcacccttttgaaagtggtgaagcagacaaaaggccacgtgtcagagtgaccggaagaacgagaaaggggtgtgtttcagtggtgtgtagtaggtaggtaattttgtgtgtatgcctccgggtaaaagccccgcggtacccagtttgtagatggtgcttctcctggtgctagtttcccgtcgtaagctggatttttttggggggtgtgtgccctgctctgtgtgctgacccgcctgggggtaagttgtagcagagcaggagaaagcaggcaagaaaccgctggtgcgcctgcttggccaatccttttccttgcggagcgctgtaaatagccttggatctgaagcgtagtaatgtattgtcatggtactcgaagtcatgctccagtttgtgttgggtatgacctgcaactgtcggttcgatgggtgcggatgtcgaagggtttgcatggttgag

SEQ ID NO: 15851 - DNA, 2988 bp, Zea Mays
gagtgcgtctgtgtcgctcgctgctggttgcggcgcttgagcgccgacgcgggatgcggaggcggaggcggaggcggagggaaggacgcgctgttcgtggagctgtggaaggcctgcgcggggccgctgtccagcgtgccgctactcggggagaaggtctactacttcccgcagggccacatcgagcaggtggaggcatcgacaaaccatcttgccgagcatcagggcacgcccctctacaacctgccatggaagataccctgcaagctcatgaacatggagctgaaggctgagccggatactgatgaggtgtacgcccaactcaccctgctccctgataagaagcaagatgagaatacatctgcaagagtggagaatgaggaggcagaggaggaggtggtgcctcatgtgccaccagccacaagtgaggggcttcgcatccattccttctgcaagacattgactgcctcagacacaagcacacatggtggtttctcagtgttgcgccggcatgcagatgagtgcctcccaccactggatatgagtcaacatcccccaaatcaagaattggtggccaaggacctgcatggggttgagtggcggttccgtcacatctttcgaggtcagccacggagacacctccttcagagtggttggagtgtttttgttagtgccaagcgtcttgttgcgggggatgcattcatatttctcagaggtgagaatggggagttacgtgttggagttcggcgtgcactgaggcaccaaaccactatcccatcttcagtcatatcaagccacagtatgcatcttggtgttcttgcaacagcatggcatgcagtgaacactgggagtatgttcactgtctactacaaaccaaggactagtccagctgaatttgtggtttcacgagctaggtactgtgaatcactgaaacgaaattattcaatagggatgaggtttaggatgagatttgaaggtgaagaagcggcagagcaaagattcactggcacaatagttggaatatgtgtttctgatccatctggctgggctgactcgaaatggcgttcccttaaggtgagatgggatgaagcttcttctgttcctcgtcctgaaagagtttctccttggcaaatagaacctgctgttagcccatctcctgtgaaccctcttccagtcagattcaagaggtctcgttcaagtgttaacgcctcaccatctgatgtgtctactgtaaacagagaagttgcttctaaagtcatggtagagtcgcaacagaataatctcccaagggccttgcacaatcaaggaaggacacaattgacaggtcgataccgtgatagcactgatgtgaagactgctcaggatcttaccatgtggtcttcaggaactgagcaacagagaaacaatattgctgcccagacaaaacgatgtctggagggttggacgcaatctagaactccagaaggttacaatcaactgttctcggcatttcaaccactgaaggatgcacataatccacttcgtccttttcctaataaaatatctgggactcgctcaagtacctgggtcacagccgatgcccgttatccagctcaacaagccaatcacaacatgttacatggcacattgtcttttatgcctcatagcagtggttttaggatgattcaacagaataatctagtgacacctgaagctgcaaattttactgggaaatcagctttcacttcacttcagggccatgtcactgatcagtgctccacaggctggtttggatctattgagtcaaattcccacacagaccatgcatcgtcaagtttgatcaggtcccagcctttggttattggaaatgatgttcagaaaaccaaaggcacttcattcaaactatttgggattcctcttggcagtccagaaaaatctgaacctctggtatccccaccaagtgtcgcatatgacgggaaacttcaaacttctccaacagacaacaatgagccttgttcagaagctacccagaatatccagaacaaagtgcaaagtagttcaaccagaagctgcaagaaggtccataagcaaggcagcgccctcgggagatcgatcgatctaacaaagttcgcttgctacgatgagctgattgccgaactagaccagatgtttgacttcgatggtgagctgaagagtccttgcaggaactggttggtcgtctacactgacaacgaaggcgacatgatgctggtcggcgacgacccctggaatgagttctgtgacatggtccacaagatcttcatctacacaagggaggaagtggagaggatgaacccaggcgccctaaacgcgaggctcgaagactgcctgtctgactcgctgggaagagggctggcttccaaagagccccggagcggcccctcgacttcggctgtcgattctgagaaccgcgctaacttgtccagtcagtgaggcagcttcagcagcaatgtctagccttggctgcacggaagaactactgaccctaagctaatcttgtgtgtgtttcacttcttgcagcccttttgaaagtggtgaagcagacaaaaggccacgtgtcagagtgaccggaagaacgagaaaggggtgtgtttcagtggtgtgtagtaggtaggtaattttgtgtgtatgcctccgggtaaaagccccgcggtacccagtttgtagatggtgcttctcctggtgctagtttcccgtcgtaagctggatttttttggggggtgtgtgccctgctctgtgtgctgacccgcctgggggtaagttgtagcagagcaggagaaagcaggcaagaaaccgctggtgcgcctgcttggccaatccttttccttgcggagcgctgtaaatagccttggatctgaagcgtagtaatgtattgtcatggtactcgaagtcatgctccagtttgtgttgggtatgacctgcaactgtcggttcgatgggtgcggatgtcgaagggtttgcatggttgag

SEQ ID NO: 15852 - DNA, 3071 bp, Zea Mays
cgcgaggcggccgaaactgacacactccctctccgctctctctctctctctcgcagccatgctcacacacacacgcaggcagcagtcacgctgtgggaggggcagagaagcgagcgacacaggaaactgacgtcgcttttgacggcctgctacataaatcccctcgcctgcctcccttcccatctccttccccgcaaaaatcgcccgggtgccaggtgcgcggcgcagggaggtcgcgacggattccgggcaagtgcatgtgagatccgatggtggcggctgcagcggcggccggcggcggcgccgacgcgggatgcggaggcggaggcggaggcggagggaaggacgcgctgttcgtggagctgtggaaggcctgcgcggggccgctgtccagcgtgccgctactcggggagaaggtctactacttcccgcagggccacatcgagcaggtggaggcatcgacaaaccatcttgccgagcatcagggcacgcccctctacaacctgccatggaagataccctgcaagctcatgaacatggagctgaaggctgagccggatactgatgaggtgtacgcccaactcaccctgctccctgataagaagcaagatgagaatacatctgcaagagtggagaatgaggaggcagaggaggaggtggtgcctcatgtgccaccagccacaagtgaggggcttcgcatccattccttctgcaagacattgactgcctcagacacaagcacacatggtggtttctcagtgttgcgccggcatgcagatgagtgcctcccaccactggatatgagtcaacatcccccaaatcaagaattggtggccaaggacctgcatggggttgagtggcggttccgtcacatctttcgagaggtgagaatggggagttacgtgttggagttcggcgtgcactgaggcaccaaaccactatcccatcttcagtcatatcaagccacagtatgcatcttggtgttcttgcaacagcatggcatgcagtgaacactgggagtatgttcactgtctactacaaaccaaggactagtccagctgaatttgtggtttcacgagctaggtactgtgaatcactgaaacgaaattattcaatagggatgaggtttaggatgagatttgaaggtgaagaagcggcagagcaaagattcactggcacaatagttggaatatgtgtttctgatccatctggctgggctgactcgaaatggcgttcccttaaggtgagatgggatgaagcttcttctgttcctcgtcctgaaagagtttctccttggcaaatagaacctgctgttagcccatctcctgtgaaccctcttccagtcagattcaagaggtctcgttcaagtgttaacgcctcaccatctgatgtgtctactgtaaacagagaagttgcttctaaagtcatggtagagtcgcaacagaataatctcccaagggccttgcacaatcaaggaaggacacaattgacaggtcgataccgtgatagcactgatgtgaagactgctcaggatcttaccatgtggtcttcaggaactgagcaacagagaaacaatattgctgcccagacaaaacgatgtctggagggttggacgcaatctagaactccagaaggttacaatcaactgttctcggcatttcaaccactgaaggatgcacataatccacttcgtccttttcctaataaaatatctgggactcgctcaagtacctgggtcacagccgatgcccgttatccagctcaacaagccaatcacaacatgttacatggcacattgtcttttatgcctcatagcagtggttttaggatgattcaacagaataatctagtgacacctgaagctgcaaattttactgggaaatcagctttcacttcacttcagggccatgtcactgatcagtgctccacaggctggtttggatctattgagtcaaattcccacacagaccatgcatcgtcaagtttgatcaggtcccagcctttggttattggaaatgatgttcagaaaaccaaaggcacttcattcaaactatttgggattcctcttggcagtccagaaaaatctgaacctctggtatccccaccaagtgtcgcatatgacgggaaacttcaaacttctccaacagacaacaatgagccttgttcagaagctacccagaatatccagaacaaagtgcaaagtagttcaaccagaagctgcaagaaggtccataagcaaggcagcgccctcgggagatcgatcgatctaacaaagttcgcttgctacgatgagctgattgccgaactagaccagatgtttgacttcgatggtgagctgaagagtccttgcaggaactggttggtcgtctacactgacaacgaaggcgacatgatgctggtcggcgacgacccctggaatgagttctgtgacatggtccacaagatcttcatctacacaagggaggaagtggagaggatgaacccaggcgccctaaacgcgaggctcgaagactgcctgtctgactcgctgggaagagggctggcttccaaagagccccggagcggcccctcgacttcggctgtcgattctgagaaccgcgctaacttgtccagtcagtgagcccttttgaaagtggtgaagcagacaaaaggccacgtgtcagagtgaccggaagaacgagaaaggggtgtgtttcagtggtgtgtagtaggtaggtaattttgtgtgtatgcctccgggtaaaagccccgcggtacccagtttgtagatggtgcttctcctggtgctagtttcccgtcgtaagctggatttttttggggggtgtgtgccctgctctgtgtgctgacccgcctgggggtaagttgtagcagagcaggagaaagcaggcaagaaaccgctggtgcgcctgcttggccaatccttttccttgcggagcgctgtaaatagccttggatctgaagcgtagtaatgtattgtcatggtactcgaagtcatgctccagtttgtgttgggtatgacctgcaactgtcggttcgatgggtgcggatgtcgaagggtttgcatggttgag

SEQ ID NO: 15853 - DNA, 1534 bp, Zea Mays
cttggattacgcggtcagggcccaatacccgtaattcgttatccgtaggccgacgaaggccgaaggccgaagcccaaacccttcgaaaacccttctcccgtcctgctcactcccgtctccgagcgccgccgccgccagcgccgacacgcgataaacaagaggaagaagaggccaaccgatccagcagcgatggcaggcgggggcatggtggggggcgctttctgggcgacgcgggcgctggaggtggtcaagcggaacgattccccgggcctattgtggaagcgcatcaagctcaccaccacccgcaagaacaacgccaagaagcgcctcaagcggctctggcagaatgaggcggttataagagcttgtggtgcatcagcgtctgacgcggcttccacagctgacaaacaacagtagcttggagcacaactggagcaggtcctgtgacctacctatgcttgataagctgaagccttgactttgctgtccacccccagtgttttgattttgctgtcctcggattgaatactttctccatccagaggacaacatcattgcttgttaccagctcgccaccccattctttttcgaagcttgcaagtttggttaaagacatgttggaagagtccggtgcccatcaatggaccggatgctgccccatgtactctctcatgtagtcatgtgctgcgttaacaaaacatgtggtgtgtgtggtgatggtacaaggaagcacgcaacggaataccatgctgcgtgtgccgacgaagcaggacccgattcgatccgctgatgaacgggcacacggcaagatacggcgtcgtattttattttcctcgtttcatattttttttaaaaaaaattaattttaatttcgcttttatatgctctgatggattgaaacaacagttcggtcaacgcgaaccgtaccgatattgcatagggtcccactgtgtagcacaatgctcatgctcagttcctggtgcccactgccagagacagtttggcgcgaacgagcggaatctttcggagaccgcggaaaccaaacatggttttgacttttgtcaaatgagaggatggtttcttctgtaaaacagcctgacgacccgtgaggctggattagcagccctcgtcgccaccgtgtcaactatcccgtcaagctatcgtagctagcacacaatcttttagtgtcggcctacacgttaatgccgcatcacatcacctttgttttttttataaagtacgacattttgtttagaaacaaactcatgaagccgttatataattcaaacaaaataaaaaaatgcaaataaataaataaaattatatatttcatgaaaattacttgttatcatcgtcatcatggctccatctctttcgcattttctttatcatctagttttaaatgtttgatcaattgttttacagacaatgtttggaccatttttattgtaacatctaaatagacggtggactgatccggcaacttgataaagtgcgtgtacaattatatatataatgtgatttttagattgat

SEQ ID NO: 15854 - DNA, 1276 bp, Zea Mays
gtcgttaccaacccacaagcttgggccatagggccaggcaacctggtcatcagccaccttgtccaacccttcctttgtttgaacttcaccaacggttcgtagaggtcgaaggtgaagatctcatctgggatgggctttttccccgacgcaatggtcgatagctcgtcggcctcggcgttgaaacgtatgtagctgtggtgcagctcgaagcctttgaacttttcctctagcttttgtactttactgtagtatgtgcacatccacatgtcgtgtagctccattgccttcatgacctagtcgatgaccaacttggagttgcccctaactaggagccgctgcacacccacctcgctcgcaatccggagcccattgacgagggcctcatattcagcgacattgttggcggaatcaaagtggaggaagatggcgtagcggagtttgtgcccttaaggcgacatgaggacgacacccgtgccgcttctggtcttgaggtaggatccgttgaagtacatgatccggtactctgggtccttgattgtgggtggctcctgcgcttcgatccattctgcgatgaagtcggtaagagcctagaatttggtcacagttctagggatgtagttgatgtcgagcccactgaggttgaggggccattttgtcatgcgactggacgcatcccgattattgatgatttcaccaaggggtgccatggacaccacctgcacgaagtgtcggtcaaagaagtggatcaactcccacttggcaatgaggactgcatagagcagtttctagatctaagggtactgtgtcttggactccatcagcacctcactaacgaattaaatggacttctgcaccttgagcacgtttccctcgtcctccctttccacaaccacctcaacgttgaccacctgggtggtggctgcaacatagaggaggagtgtttcacctgggtcaggcacgaccaagaccagtggcgagctcaagaacacattattcggtcgagggcctcttggatttcaattgtctaagaaaaatggttgctcttattgaggaatttgttaaggggaatacccttttcttcgagcatagagtcgaattggaaatctctatgaatctgtgtcttctgtgtgtgtatgcattgtgaagttcccttgcaggtgatgttctccctttgggaggtttgcccctaaaaacccttgtttcacctcttttgctacaccacgcacaccaggtgttcgatagaatgtacaaaccagccttctgtgctcaaatcaac

SEQ ID NO: 15855 - DNA, 1435 bp, Zea Mays
ccatctccctccgcgccgcgcgcccaggtgcctgctcgctgcctgcttgccccggcccccctgcgttcagccgagtggctcccccacgcgtgcctctctttcccccagcccactcgtctccatggccgctcgtcctagctgcgaccctgtcgcgaagctcctgcgcacccgccttcttttccctctgccgagctcccttgttggccgacgcccagcctcttcccaaaccgcctcatctccggccgtcgagtggagcatcagctcagtccctctccacgtccgcgctcgcccagacctgcgcgtccctggttcccgctccctcgccggggagttcctgcgcgcgcgctctgttttctcctaccggcacccagccggattcctctacgtcgtgccctgctcgccctgctccagctctgttgccacgcgagctcgccgtggagctctgcgcgccaagcttctccctggtctcccatggcgcccagctcagatctcgccctgctcctctgcgcgcagccccctgacgcgttttcctccctgccgagctcgtctcgaactcccgcccaccctctgcccagccgtcgcttgcccctgccccaacgccgtgcctctgttatttacggccgtcgctctcctagcccggccggatctcccagcgtcgcgccctgctgtcctcccattcccatggccggcgatccgttttcctctgccggctgagtctcatcgacatggagcatctccctgcgcgcgttgaacttctgctcggcgtcctgctggccgaagcttcggattgccgcgccgatggccgagcccggcccgtgccttccctgtcctctgtacgcgcgtagctcgccccctcagctcgtcgcgcgcctgggatgcttgccggtgctcagcttcaccgtgccgtgaagtccctgcacgcaagctatctgttggccgcgcgcgaactcctctgtttggcccgtcgtcgttctccagctccttaccgcactcgattgttttgtcgtctcgtcttcagtccctacgtgacatctctgacgtatgttcacgccgacaaaagaatcccaagaagatgtagagaagcaagcctttggtcgatgttcaagtggtcggcgaaaggccagaacaagaatcatcaccgtttatgcggagttctacttaatacgaaaagattctaagaattgtggatggaagaaaaagtgaagcttcgtgctatactcgtcagctgctcgatcaaagacttcaatcgaagactatcgtcgttcccgccaacactgaatcaagttgataacggtacgttaaataatcgcgtgatgtggaagacgacccaagttgaccccaagcgcgggctactccgcaggatggtgctgatggacgaatcggaagatggataatctgaatgagtgccaagccaaaggatgctcgtcaagtggac

SEQ ID NO: 15856 - DNA, 1220 bp, Zea Mays
gttccttccggcatcctctcccttcgagagtgcagcggagcattttgcactctgacattcaatcgaaggcagacaagactcctgttacagttgcggattatggatcacaggtactggtatgtctggtcctgaagaaggaattgccttctcactctttctcaatcatagctgaagaggattcaaaagacttgagagaagatggtgcccaagaaattatagaacacattaccaccctcattaatgaaaccatcgtaaatgatggttcatacaacatgtcgttatctaaggaagatgtgctttctgcaattgatggtggtaaatctgagggaggtccatctgggcgacattggatattagacccaatagatggcactaaaggtttcataaggggagatcagtatgcagttgcacttggactacttgatgagggcaaagttgttctgggtgtgttgggatgtccaaatcttccattaaaatcaacaaacaagaacaatagcagctcttttggggatcgaataggttccctcttttttgctacaattggttgtggagcgcaagttgaggccttagaaggatctgagccacaaaagattagtgtttgctccaccaataatccagttgacgcctcattctttgaatcctttgaagcatcacactccaagcgtgatttaactagctccattgcagagaaacttggtgtccgagctcctcctgttagaatggatagccaagcaaaatatggtgccctagcacgtggtgatggtgccatttttctgcgcatcccgcacaaaagttacatagaaacagtttgggatcatgcagctggatcaattattgtcacagaagctggtggcatggtaaaagatgccgcaggaaacgatttggatttttgcaaaggtagatatcttgatcgtgacagaggaattattgcaacaaacaagcatttaatgccactagttctaaaggcggttcaagaggctatgaaggaggaacagtaggctgctgtgttcatggagcagttgcaatatttgttatgacatttcctgtttgaatcttaatattagttttgcacaatctcgatgtgcggaaaagttgttgtacttgtaccatatgctagtgtatcgtgtgagtcatatgccactcacatactcacatttccttatctcaacaaatggatatgaatttacctgattgggtttcctattttctatgtgcatttt

SEQ ID NO: 15857 - DNA, 1369 bp, Zea Mays
atagaaggaaaaatttagagacagtcgctgcggatagttgttccatattcgaaaaagcaaaaatgatatgcacgtcacaatagttgttccccagatttgttttgtcacgcgccccgcccgacgcccgccacggcgccaccatgtcgcaggctacggaggtcgtcggaaacccgtacgccgccgagctcgctgcagccaagaaggccgtcgccctagcggcccgcctctgccagagagtgcagcggagcattttgcactctgacattcaatcgaaggcagacaagactcctgttacagttgcggattatggatcacaggtactggtatgtctggtcctgaagaaggaattgccttctcactctttctcaatcatagctgaagaggattcaaaagacttgagagaagatggtgcccaagaaattatagaacacattaccaccctcattaatgaaaccatcgtaaatgatggttcatacaacatgtcgttatctaaggaagatgtgctttctgcaattgatggtggtaaatctgagggaggtccatctgggcgacattggatattagacccaatagatggcactaaaggtttcataaggggagatcagtatgcagttgcacttggactacttgatgagggcaaagttgttctgggtgtgttgggatgtccaaatcttccattaaaatcaacaaacaagaacaatagcagctcttttggggatcgaataggttccctcttttttgctacaattggttgtggagcgcaagttgaggccttagaaggatctgagccacaaaagcatcacactccaagcgtgatttaactagctccattgcagagaaacttggtgtccgagctcctcctgttagaatggatagccaagcaaaatatggtgccctagcacgtggtgatggtgccatttttctgcgcatcccgcacaaaagttacatagaaacagtttgggatcatgcagctggatcaattattgtcacagaagctggtggcatggtaaaagatgccgcaggaaacgatttggatttttgcaaaggtagatatcttgatcgtgacagaggaattattgcaacaaacaagcatttaatgccactagttctaaaggcggttcaagaggctatgaaggaggaacagtaggctgctgtgttcatggagcagttgcaatatttgttatgacatttcctgtttgaatcttaatattagttttgcacaatctcgatgtgcggaaaagttgttgtacttgtaccatatgctagtgtatcgtgtgagtcatatgccactcacatactcacatttccttatctcaacaaatggatatgaatttacctgattgggtttcctattttctatgtgcatttt

SEQ ID NO: 15858 - DNA, 1451 bp, Zea Mays
gggggatgaaaaagtagataataaaatgttgatgatatgacgcaaaaaatgatatagaaggaaaaatttagagacagtcgctgcggatagttgttccatattcgaaaaagcaaaaatgatatgcacgtcacaatagttgttccccagatttgttttgtcacgcgccccgcccgacgcccgccacggcgccaccatgtcgcaggctacggaggtcgtcggaaacccgtacgccgccgagctcgctgcagccaagaaggccgtcgccctagcggcccgcctctgccagagagtgcagcggagcattttgcactctgacattcaatcgaaggcagacaagactcctgttacagttgcggattatggatcacaggtactggtatgtctggtcctgaagaaggaattgccttctcactctttctcaatcatagctgaagaggattcaaaagacttgagagaagatggtgcccaagaaattatagaacacattaccaccctcattaatgaaaccatcgtaaatgatggttcatacaacatgtcgttatctaaggaagatgtgctttctgcaattgatggtggtaaatctgagggaggtccatctgggcgacattggatattagacccaatagatggcactaaaggtttcataaggggagatcagtatgcagttgcacttggactacttgatgagggcaaagttgttctgggtgtgttgggatgtccaaatcttccattaaaatcaacaaacaagaacaatagcagctcttttggggatcgaataggttccctcttttttgctacaattggttgtggagcgcaagttgaggccttagaaggatctgagccacaaaagattagtgtttgctccaccaataatccagttgacgcctcattctttgaatcctttgaagcatcacactccaagcgtgatttaactagctccattgcagagaatggatagccaagcaaaatatggtgccctagcacgtggtgatggtgccatttttctgcgcatcccgcacaaaagttacatagaaacagtttgggatcatgcagctggatcaattattgtcacagaagctggtggcatggtaaaagatgccgcaggaaacgatttggatttttgcaaaggtagatatcttgatcgtgacagaggaattattgcaacaaacaagcatttaatgccactagttctaaaggcggttcaagaggctatgaaggaggaacagtaggctgctgtgttcatggagcagttgcaatatttgttatgacatttcctgtttgaatcttaatattagttttgcacaatctcgatgtgcggaaaagttgttgtacttgtaccatatgctagtgtatcgtgtgagtcatatgccactcacatactcacatttccttatctcaacaaatggatatgaatttacctgattgggtttcctattttctatgtgcatttt

SEQ ID NO: 15859 - DNA, 168 bp, Zea Mays
gcggagagatcaaactgagagatggagagagaaagccagatgccgcggaaccactagcgccgtggtcggagaatatcagcatcctcaccattggtcaagaacaggtaccgcaggatgaggcgcttggaggatgctgtgtcgagttcgtgagaggtctaggccgtcgtc

SEQ ID NO: 15860 - DNA, 1749 bp, Zea Mays
gtccaggtgagggtccatcacctagggtgatgaatagatctgcctcgtccccttgacaatgacacaacacaccatcgccgacacgactgcatcctctacgcaaatccgagtgcccttccacttggttgtcgtcacactagatcattgtccagggtcactagatcattgtccagggctgatttacctctccagagttccagcattctgaaatctatcctctctacagctttgattacagaaattggtgatggtcgtaacaccttattttggagggacagatggttgatggggttgaggattgaggatctaactcctcatatttttgccatcgtcccgaccaggattaccaataggagaacggtggctgagggtatcgtggagatggcttggattcgggatctgagaggcaccatcacttgggatgtcctctctgattttttaactcttagtgaagtcattgcagattactccattaatgttggagtgccagacaagcatatctggaaattctccccgacaggccaatactcttcaaagtcggcttatgatatgttatttcttggttccacttctttgggagcatatgagcgcatttgggaatcttgggcaccttcaaagtgcagtttcttcctttggcttgtcatgcacaacagatgctggaccgcagaccgtcttgctagaagggggctaccccaccccagtgtgtgccccctttgcgaccaagaagaggaaacaatacaacatcttctcatctcttgcgtctttgcacgacagttctggtattccttgttaagcaggtctgggttgcctaacctttcaccagataatgctagttgcagccttgatgactggtggagcagagctgtggagaagattccccgtgatctccaatccggcttcaattctctagttattcttggcgcttggagcctttggcgtcatcgcaacgactgcgtgtttaatgggagatcgccaagtctggcgagtgctctcaccctcgctggcgatgagctcaggatgtggtgtagtgccggggcaaaagggctgaacctgcttttaactcttatgtttatgcttgacccagggggatagtctagtggcttgttcagagtggttgtgtgtggttgctgtgttgtgtcttgtgtcttgttgtgtcatgtgtgtgtgtgtcgtgtcaggtgtgtgtcgggtgtggtgtgttgtaccttcttctatctattaatggaatgatacgcagatctcctgcgtgttcgagaaaaatagggccttagcctaaataactcagtcttacagtcttgttagtaataagatgagatagtactcagagttaaccatctcattttcccttattttttggtgtgttcgaaagtcagtgaatttcgaatttctggaccaatttgagttttcgagaacaaattaaaaaacgagattcggatttgtcagcggagattcggtacatatatttttgtttttttaatgaattttgaattttcggtcgaaatccgtgtttcctcagcgaaattcgttttttttaccgaaaaatgatgattaatttaaaaaaaataaaagtaaatatgggaactttgttttctcagctaaattcgttgtttttactcataaatatctatttttattatacttttctgattttttatatcagttttaaaaattttgaatgaaatttgccgaaatcagttcggaaccgtttcccccagaccaccgggaacggaaaattttcgggaaaccctg

SEQ ID NO: 15861 - DNA, 5682 bp, Zea Mays
ctaagagttgtaaactagagtacaacaacttctatttgcatttcagtatgggcgaagtgtgatgtcctgtttccaagagtaatttttttaattgtaagtagaagttcaaattttgcagtaaaaaaacacacttttttttgtcaagcatgcaagagagatgcacatatttgcatgaagaagaaaaaaggcgtaataaccactacaacacaaacccacacactcaagaatcttggaagaacagtggctaagttattcaaaacatcatataatataaaaccacagaaatatcatatacgtaactaaaaatactatgggaaagaacatttcactcaagattaaggaataatggagcagagtaaaatcataaatttgttggtgcccaggggaaccatgagcaaagatacagtttatccaacattttgctatgttccaaaaaaactcaagaaatgataatatttcagacacaatttatccaacacataaggtaatcctgtaaaaatgaattttaacatcatcatccatatcgatattcaaaaaaggaaggaagaatggttcctgtgtatataagttaactttaacaatgattgttggttttggggtaacaacatgatgttaacaagagataggatggcgacccttcctttcccgcctgacccttcctatcccctgaccatctcctctacccccgacgcctcttcacattcctccaccagccccacgccggagaccactccgatcccggcggccaatcacctctcctcttccccggcgtcggcggggccctctgcatgcggtggtcgttccaaggcgcagcggtggtgtgaggacggcgcagcaggcgcggcgggcgtgggtgctgtcccggcgcacgccgcgggtgcaggtgttgtaccggtgggcgcgggtgttgtcccggcgggcgcgggtgttgtcccggcggccgtgggtgtggccccgtctcagaatcgccgctcctacagggatgcgctggtgtcctcacagcgccctgtttctcgggtagcggtggtgagtgctggtggcggctgggagactgtccagagtcgccgcggccgccgcttggctcgtcgccctccccagccagaacccagacccgttccggttgatctgcggggcagatgtttcaactgtttctctgctgatcatcgggcggcgcggtgttcaaacagggttcggtgcttcttctgcaggcggcgggggcaccgtgtgagcgagtgcccgcgcaggcagacgaacctggtcgctcttcagacaaacctggccgctcctgtggccgctcctgtgcgcagactggtgtggcggccaatttccaaggagacatcggcggcggtctctggtgccgatcacgccatggcgggtgctggtggcgaccatgccatggcgggtggctcgacgcttggtggttccgatgtcgcgatcagcgggaagcggcgtacccgtcgtgggcagcgaaagcgcagggccgggactggtggtggtcttggcggtgatcctctgctgctatcttcgggaaacttgtcgcccgcggctcaggatggtcctcgtcctgtgaggtttattgggcggtccagaatgatcgaccgtgctgagttggagcttcgccatgccctgatcgtcagcgttgttgggcaggaaggaactggttgcgccacggaggttagagaggcgctcgcctcaaggtttggccttgatgccgatgcgctccgcctacgtcgtgctgcgccaggttcctttattgtcctcttcccttcggaggagctggctgggcgagtgtttagtggaggaccgtcgctctttgtccctccattgaggttgcatattaagagatggactaggcaggcttttgcttcgggaggcagtgtcttgtcttccctcattgacgtcgaactccgtggtatccctgctcacctttggggactggagacagcggagggactacacccggattctaccagcggggaggacttgtcagtcatcaggttgagtgcatggtgccgctctcccgtggagttgcctgaggtgttggaccttcatgctgtggagccagcggtccccgatgaagacgaagtctggattccacgttcgttggtgttccctgtgtttgtgaagattattgggccggagggtgttcttgtggaggagcagctgcagccacctccatcggatccctctgatgatgagccggagcagagtcgtcgggctaggcgggtgcagaggctgggtgatcaggcctcattgcctcggacttcggtgcactcgcggctgggtcctcgtcttcattcctcgtcgacgcgtgttggaccctctgatgatgtggagcttttggatgcattaatggataacagtgatgatgtggcggcgtctgtctcttcggattcgttggcagaaccagttgatgcccctaccctcccgtgtgctgcggttgagaagctggcggcgcctggtgttctggccttgtgtgatgttgtggttcccgtttattctcctgatggtgcctctgctgatttggctgctgagttgagggaggattcgttgttggcagtgagttgtgttgtcaatacttcttctgctagatggaatttgaagccgcctgtttttaaagtctactctaggaggttgagaccatctattttggatgatcaggatggcccgttggttcagtcgggtcttgataattctatggtgatttcttcgcccttgtgcgagttccaatgtttggtcactaaaccggtggatgccttgctgccaactccacagattccaaagagaaggaagaagcctctacccagtaattttataccaaggcggagcaggagggtggccaaatttcctccagaactcggttctgaggctgctgcccaggatggcagtaattatgcggagctatttgtttctgggctctctagcgtccatattgctgctttggcagcgctgtttggctggacggttctggtagcttttgagcctgactgttttgaaccagcaattgagctaccggtgagtgaagagcagcaagacaaagatgatgatggctacaaaaaaaagagtagaatggatgataatggtgatcaggttataaagaagcaaacaagcgctgttaatagcagttcctcaccatctaatcaagagaatggtggccctgttcctatgcagacaacaagtttttctttgcttgcatctctttcgtcagtgggggtaaccaattcccctcccaggacagaagggcttagtgcaaccttgtctcatcttccactgtccttgatcggctgtcattctgtgcatcttgctggtatcaatccagagcatcaaaagcagggaagtgatatgatacaggagcaagtcggaacaggcgctgggacggttatagccgaaggtgtcaacaacgatgtgtttgcagcggctactaccactatggaaaaacttgaagtctcaaaggctgaccagaggattgaaggtactgtgcagttggtacagcactctgcaaagcgatgaggaggaagacgactctgaacttagatggcgcgaggaatagtacgatgatggcagactctactccaaatatatcacaaccttctcggtagtatccatccacgagtggttgaggtcggcgtccgcgttgacagcagcagcggtattgggaggatcaacacgattgttgcgagatctgaaattttgaccagggatgggacgttgtgagcgcgatggtcggagcgaggcgaggggcccgggagcggcgcgtgcggatctggcatgggggcgtgggcggctgtttcaccagttggcgtgggatgggactgggagcggcgtgcgcagatccggatgggggccgtgggcggcagtttcgccgagagcatcgcacgcgaaggggatgggggccccgctgttggccgcagccacgccggcggagaagtcgagcttgccgatgaggttgtccatggactggctcctgacttggcgagccatgggcgcacggggcggtggggaggtgtgggagggtggggcggtcgtggatggagcgggggaggaaggggcagggggcggcggcggtcgcagtcgcggattgagcaagttaggaaggggcgggggcgacgagctgggtcacgaatggagcgaggggagggggtggtcgcggctggagcaccatggagatgcgaggcgggggcattggccgcgccaggcgcccacgctccgtacttaattagtagtaaggataaggatgtccctcagtgggttattaaatcaattgataaaattcggcgaggatttctttggagaggaagaaaggaagttaatggtggtagctgtcttgttccatgggaagttgtcacgaggcctctgaagcttggtgggcttgggatccctaaccttaagctcaaaagctgggcattgcaggcaaaatggttatggttggaaaagacggatctaagcagaccttggtgtgggctgtcccttccagtgcagcgtcaggttagacagttctttgatttgtcggttgttaccattttagggaatggggctactactctcttctggtcggatagatggattcatgggaataatatccaagacattgcccctgaggtggtgggtatggttggccgcaaggcgtattcttccagaacggtggcacaggctctggataattggcattgggtcagtgatattcatggtgctctttccttgagtgggttgcagcaatatctgttgttatgggatactttgggggaagttaggctttctcatgatgctgacagacatgtttggatgcactcttcttctgggatgttctcctcaaagtcttgctataaggcttttttcatgggttcaatttcgtttgagccatggaaacgtttgtggaaatcctgggctcccccaaaatgcaagttctttctctggctggcgataaggaataagtgttggactgctgatagattaaggaggagagggctgcaacaccccgttgtttgtgttctttgtgaccaagagcaggaaacagtgcaacatcttctgtgtacttgcagttttgccaggcaattttggcatgctattcttgttcccttgtgtcttggggatctcattcctgctgttcatgaaatctcatttgctgattggtggaggaaggtgcttaagaaggtgcccaaaaacagaaagaaaggcttcgacagtctcattatcttggggtcttggtgcctatggctgactaggaacaaagctgtttttgatggtgtaaacccttccctgtgttttgttaaaagcttatttctgaatgagttaagttgttgggagagggctggggctaaacagctagcaagttttggtcttcctgctattatgagtagggtctagattgtggtcaagtgttctgtttgccctacgggcattgtactttggtcctcttggacctttttcctctcttaatataatgacgtgcagtcctcctgcgcgttcgagaaaaaaaacatgatgttaacaaggattaatagcagagttggacaatcctgtcaagacttccaaagtaaaatgctaattttgaacactactagttgtcatgtagtagcatattaaataaaaggaagaatagtaccgtctttatgtccaagataggcgtgtcagcattaacagcctgcacacttatccctttcatcaaatggatgccaaatttca

SEQ ID NO: 15862 - DNA, 5507 bp, Zea Mays
cggccatcctctagatatggttttccctgaaaagaatcacaagagaccattctaagagttgtaaactagagtacaacaacttctatttgcatttcagtatgggcgaagtgtgatgtcctgtttccaagagtaatttttttaattgtaagtagaagttcaaattttgcagtaaaaaaacacacttttttttgtcaagcatgcaagagagatgcacatatttgcatgaagaagaaaaaaggcgtaataaccactacaacacaaacccacacactcaagaatcttggaagaacagtggctaagttattcaaaacatcatataatataaaaccacagaaatatcatatacgtaactaaaaatactatgggaaagaacatttcactcaagattaaggaataatggagcagagtaaaatcataaatttgttggtgcccaggggaaccatgagcaaagatacagtttatccaacattttgctatgttccaaaaaaactcaagaaatgataatatttcagacacaatttatccaacacataaggtaatcctgtaaaaatgaattttaacatcatcatccatatcgatattcaaaaaaggaaggaagaatggttcctgtgtatataagttaactttaacaatgattgttggttttggggtaacaacatgatgttaacaagagataggatggcgacccttcctttcccgcctgacccttcctatcccctgaccatctcctctacccccgacgcctcttcacattcctccaccagccccacgccggagaccactccgatcccggcggccaatcacctctcctcttccccggcgtcggcggggccctctgcatgcggtggtcgttccaaggcgcagcggtggtgtgaggacggcgcagcaggcgcggcgggcgtgggtgctgtcccggcgcacgccgcgggtgcaggtgttgtaccggtgggcgcgggtgttgtcccggcgggcgcgggtgttgtcccggcggccgtgggtgtggccccgtctcagaatcgccgctcctacagggatgcgctggtgtcctcacagcgccctgtttctcgggtagcggtggtgagtgctggtggcggctgggagactgtccagagtcgccgcggccgccgcttggctcgtcgccctccccagccagaacccagacccgttccggttgatctgcggggcagatgtttcaactgtttctctgctgatcatcgggcggcgcggtgttcaaacagggttcggtgcttcttctgcaggcggcgggggcaccgtgtgagcgagtgcccgcgcaggcagacgaacctggtcgctcttcagacaaacctggccgctcctgtggccgctcctgtgcgcagactggtgtggcggccaatttccaaggagacatcggcggcggtctctggtgccgatcacgccatggcgggtgctggtggcgaccatgccatggcgggtggctcgacgcttggtggttccgatgtcgcgatcagcgggaagcggcgtacccgtcgtgggcagcgaaagcgcagggccgggactggtggtggtcttggcggtgatcctctgctgctatcttcgggaaacttgtcgcccgcggctcaggatggtcctcgtcctgtgaggtttattgggcggtccagaatgatcgaccgtgctgagttggagcttcgccatgccctgatcgtcagcgttgttgggcaggaaggaactggttgcgccacggaggttagagaggcgctcgcctcaaggtttggccttgatgccgatgcgctccgcctacgtcgtgctgcgccaggttcctttattgtcctcttcccttcggaggagctggctgggcgagtgtttagtggaggaccgtcgctctttgtccctccattgaggttgcatattaagagatggactaggcaggcttttgcttcgggaggcagtgtcttgtcttccctcattgacgtcgaactccgtggtatccctgctcacctttggggactggagacagcggagggactacacccggattctaccagcggggaggacttgtcagtcatcaggttgagtgcatggtgccgctctcccgtggagttgcctgaggtgttggaccttcatgctgtggagccagcggtccccgatgaagacgaagtctggattccacgttcgttggtgttccctgtgtttgtgaagattattgggccggagggtgttcttgtggaggagcagctgcagccacctccatcggatccctctgatgatgagccggagcagagtcgtcgggctaggcgggtgcagaggctgggtgatcaggcctcattgcctcggacttcggtgcactcgcggctgggtcctcgtcttcattcctcgtcgacgcgtgttggaccctctgatgatgtggagcttttggatgcattaatggataacagtgatgatgtggcggcgtctgtctcttcggattcgttggcagaaccagttgatgcccctaccctcccgtgtgctgcggttgagaagctggcggcgcctggtgttctggccttgtgtgatgttgtggttcccgtttattctcctgatggtgcctctgctgatttggctgctgagttgagggaggattcgttgttggcagtgagttgtgttgtcaatacttcttctgctagatggaatttgaagccgcctgtttttaaagtctactctaggaggttgagaccatctattttggatgatcaggatggcccgttggttcagtcgggtcttgataattctatggtgatttcttcgcccttgtgcgagttccaatgtttggtcactaaaccggtggatgccttgctgccaactccacagattccaaagagaaggaagaagcctctacccagtaattttataccaaggcggagcaggagggtggccaaatttcctccagaactcggttctgaggctgctgcccaggatggcagtaattatgcggagctatttgtttctgggctctctagcgtccatattgctgctttggcagcgctgtttggctggacggttctggtagcttttgagcctgactgttttgaaccagcaattgagctaccggtgagtgaagagcagcaagacaaagatgatgatggctacaaaaaaaagagtagaatggatgataatggtgatcaggttataaagaagcaaacaagcgctgttaatagcagttcctcaccatctaatcaagagaatggtggccctgttcctatgcagacaacaagtttttctttgcttgcatctctttcgtcagtgggggtaaccaattcccctcccaggacagaagggcttagtgcaaccttgtctcatcttccactgtccttgatcggctgtcattctgtgcatcttgctggtatcaatccagagcatcaaaagcagggaagtgatatgatacaggagcaagtcggaacaggcgctgggacggttatagccgaaggtgtcaacaacgatgtgtttgcagcggctactaccactatggaaaaacttgaagtctcaaaggctgaccagaggattgaagggatgggacgttgtgagcgcgatggtcggagcgaggcgaggggcccgggagcggcgcgtgcggatctggcatgggggcgtgggcggctgtttcaccagttggcgtgggatgggactgggagcggcgtgcgcagatccggatgggggccgtgggcggcagtttcgccgagagcatcgcacgcgaaggggatgggggccccgctgttggccgcagccacgccggcggagaagtcgagcttgccgatgaggttgtccatggactggctcctgacttggcgagccatgggcgcacggggcggtggggaggtgtgggagggtggggcggtcgtggatggagcgggggaggaaggggcagggggcggcggcggtcgcagtcgcggattgagcaagttaggaaggggcgggggcgacgagctgggtcacgaatggagcgaggggagggggtggtcgcggctggagcaccatggagatgcgaggcgggggcattggccgcgccaggcgcccacgctccgtacttaattagtagtaaggataaggatgtccctcagtgggttattaaatcaattgataaaattcggcgaggatttctttggagaggaagaaaggaagttaatggtggtagctgtcttgttccatgggaagttgtcacgaggcctctgaagcttggtgggcttgggatccctaaccttaagctcaaaagctgggcattgcaggcaaaatggttatggttggaaaagacggatctaagcagaccttggtgtgggctgtcccttccagtgcagcgtcaggttagacagttctttgatttgtcggttgttaccattttagggaatggggctactactctcttctggtcggatagatggattcatgggaataatatccaagacattgcccctgaggtggtgggtatggttggccgcaaggcgtattcttccagaacggtggcacaggctctggataattggcattgggtcagtgatattcatggtgctctttccttgagtgggttgcagcaatatctgttgttatgggatactttgggggaagttaggctttctcatgatgctgacagacatgtttggatgcactcttcttctgggatgttctcctcaaagtcttgctataaggcttttttcatgggttcaatttcgtttgagccatggaaacgtttgtggaaatcctgggctcccccaaaatgcaagttctttctctggctggcgataaggaataagtgttggactgctgatagattaaggaggagagggctgcaacaccccgttgtttgtgttctttgtgaccaagagcaggaaacagtgcaacatcttctgtgtacttgcagttttgccaggcaattttggcatgctattcttgttcccttgtgtcttggggatctcattcctgctgttcatgaaatctcatttgctgattggtggaggaaggtgcttaagaaggtgcccaaaaacagaaagaaaggcttcgacagtctcattatcttggggtcttggtgcctatggctgactaggaacaaagctgtttttgatggtgtaaacccttccctgtgttttgttaaaagcttatttctgaatgagttaagttgttgggagagggctggggctaaacagctagcaagttttggtcttcctgctattatgagtagggtctagattgtggtcaagtgttctgtttgccctacgggcattgtactttggtcctcttggacctttttcctctcttaatataatgacgtgcagtcctcctgcgcgttcgagaaaaaaaacatgatgttaacaaggattaatagcagagttggacaatcctgtcaagacttccaaagtaaaatgctaattttgaacactactagttgtcatgtagtagcatattaaataaaaggaagaatagtaccgtctttatgtccaagataggcgtgtcagcattaacagcctgcacacttatccctttcatcaaatggatgccaaatttca

SEQ ID NO: 15863 - DNA, 1793 bp, Zea Mays
aaaacaattgtgttacgtcacataaacgtaacttcgagtaaacgatgcgcgtggtaaccatccacgcatcttacgcttgtgtatatatagcggcttgtcctcgcacaagcgagtgctcgatgacacttctctctacccttccgtcaagttgatgtggcggcgtattggatatggcagtgcatcgactactcttcgactccatgtctttctctctacctagtcttgtgcctaacaacttcttaggaatcaacattgtaagcaacattacccttctaccttgttgactgccctcacctaatgttttcctttgctatcactttgtgttgttattcttatctccccggccacatgcaatcctcacactactacaccagtaatcactgaacttgacatatatgtgtgtgtggatgattggattttacatgacttgccattgatgaagaaggtataatatctaagaggacctcaccatcttgtaacatgtccattattaggccttgtttgggagaactccgctgtctgattgattcttgaattctgctccttgattctccaatggagtgatttcaatggtttcctaggagggatcgataagaagtgattctctcttgatctccacctgaaaatataatagggagcaggatgaagcaggtttttagcttctagcttctagtacaaatggagaagtgattatatccttatcccgacctgaatcaattgatattttaagtgcttggctggctaggagtggttctctacttctcttcgaagaagctgaagctagagatctatccccttagattaatggcttcagcattctttcacccttttttaaagaaaagttattattaagattaacaataatgatgtatcaaaattatgatactatattgttttaaactaaaagcgcgacaaaatattctgaatattaaaaatatatattatacatgcaatgtatatatatacttggtatttatatattatattagtggtgttttcgtgtggtattcctcatatatatgttgcctaattaagttgattatttaatttctgattcagaaactaggaatttatatatagtatatggaaatttaatgtgaaatttcaactttcaaagcgagagacgacggctcaaggaattatattgctttcttcctactgcatacggtacacaaggcgttgctgcaggaaaagacgggttagatttaaaactgctgctttctgttacaggtgtattgtatggttttggcaactgatcgattgcgtttccatcgagcaaataaaaaaggaaccttaatatattacttgtggaattggagaatagaattggaaaccgaaacttgcggcgtggaggatgacaggatgtggcgtggtttggcggccggctacgaaccaggcacgcccttaaacctgaaaacatagaaaagaagaaggagcacctggagtataacgttatcgtatgtcgttatattaacctattgccaggtttgcaagggtttttgtccttattcagtctgatcaccgcatttgtggatcacacgttggatctagagtcagtatctcaatccggctctttgctgagtgccagtgccaggtgatttgccgagtgtgttttcggacaccctaccgagtgtaaaaaaacattcggcaacacttctttgtcgagtgtttttttttcaacccttggcaaagagcttatttgtcgactactttttctgatactagacaaagaatttctttgctcagtatttgtttttcgacactagataaagaatttttttgtcgagtgtttt

SEQ ID NO: 15864 - DNA, 1029 bp, Zea Mays
ataaatttgtagttggaaaaaattaagataaaacaattgtgttacgtcacataaacgtaacttcgagtaaacgatgcgcgtggtaaccatccacgcatcttacgcttgtgtatatatagcggcttgtcctcgcacaagcgagtgctcgatgacacttctctctacccttccgtcaagttgatgtggcggcgtattggatatggcagtgcatcgactactcttcgactccatgtctttctctctacctagtcttgtgcctaacaacttcttaggaatcaacattgtatgtccaaaaaaaacatttggagcaaagcaagggatcaaagttgccaaatcgatcactgctgtcatgcatgcacgctagatatataaacggttaacatgtctgtgggattcgaatcagagagaaacttgtggaactggaatcagataagcgataagtattcgaaactgaatcactttacacgtgtattgtatggttttggcaactgatcgattgcgtttccatcgagcaaataaaaaaggaaccttaatatattacttgtggaattggagaatagaattggaaaccgaaacttgcggcgtggaggatgacaggatgtggcgtggtttggcggccggctacgaaccaggcacgcccttaaacctgaaaacatagaaaagaagaaggagcacctggagtataacgttatcgtatgtcgttatattaacctattgccaggtttgcaagggtttttgtccttattcagtctgatcaccgcatttgtggatcacacgttggatctagagtcagtatctcaatccggctctttgctgagtgccagtgccaggtgatttgccgagtgtgttttcggacaccctaccgagtgtaaaaaaacattcggcaacacttctttgtcgagtgtttttttttcaacccttggcaaagagcttatttgtcgactactttttctgatactagacaaagaatttctttgctcagtatttgtttttcgacactagataaagaatttttttgtcgagtgtttt

SEQ ID NO: 15865 - DNA, 1194 bp, Zea Mays
atcaaattctcgtgtgccttatataaatttgtagttggaaaaaattaagataaaacaattgtgttacgtcacataaacgtaacttcgagtaaacgatgcgcgtggtaaccatccacgcatcttacgcttgtgtatatatagcggcttgtcctcgcacaagcgagtgctcgatgacacttctctctacccttccgtcaagttgatgtggcggcgtattggatatggcagtgcatcgactactcttcgactccatgtctttctctctacctagtcttgtgcctaacaacttcttaggaatcaacattgtatgtccaaaaaaaacatttggagcaaagcaagggatcaaagttgccaaatcgatcactgctgtcatgcatgcacgctagatatataaacggttaacatgtctgtgggattcgaatcagagagaaacttgtggaactggaatcagataagcgataagtattcgaaactgaatcactttacacgtatgtactgtgtggaaacttgctctgttagtaactacacgctatatatatatgagatcacatttttggctctgtgtgtacgtggagtactgtttcgttctattagcttaactttccagcatttcgttttgtatcatgtacaggtgtattgtatggttttggcaactgatcgattgcgtttccatcgagcaaataaaaaaggaaccttaatatattacttgtggaattggagaatagaattggaaaccgaaacttgcggcgtggaggatgacaggatgtggcgtggtttggcggccggctacgaaccaggcacgcccttaaacctgaaaacatagaaaagaagaaggagcacctggagtataacgttatcgtatgtcgttatattaacctattgccaggtttgcaagggtttttgtccttattcagtctgatcaccgcatttgtggatcacacgttggatctagagtcagtatctcaatccggctctttgctgagtgccagtgccaggtgatttgccgagtgtgttttcggacaccctaccgagtgtaaaaaaacattcggcaacacttctttgtcgagtgtttttttttcaacccttggcaaagagcttatttgtcgactactttttctgatactagacaaagaatttctttgctcagtatttgtttttcgacactagataaagaatttttttgtcgagtgtttt

SEQ ID NO: 15866 - DNA, 2429 bp, Zea Mays
atcggcctctcgaatccatcgcccctgttccctctcccttccgtcggacttcaaaccctagcggcgatggcgtccgcggcggcgggcacaccgaagcgctgctactacgaggtcctgggcctatctcgcgactgctccccgacggacatcaagcttgctttccgccgcctcgcgctctcgctccaccccgacaagcagccccccggctccgacctcgccgccgccaccgccgccttccaggagctccagcatgcccactctgtcctctctgacccgcaggagcgtgcctactacgactcccaccgctcccagatcctcttctctgacccagcctccgccggcgccaaatccgcttccatcgtccccgatcttttcgccttcttctcttcgtccgctttctccggcttctccgacacgggccgcggcttctacaaggtctacggggacgtcttcgacaaggtattcgcgcaggagcttgcctatgctcgccggatgggggttcccgaccccgctgcgccaccggtcattgggaacctcgattccccctatgcgcaggtcactgctttctacagttattggcttgggtttggctcggtcatggatttcggatgggcggctgagtgggacgctgcacgtggggaaagtcgccgtgttcggaggctcatggaggaggacaacaagaaggcgatgcgcaaggcacggcgggagtacaatgacgctgtcaggggcctggctgccttctgcaagaagagggataagagggtggtggacatggttttaaagaagaagctggaggaggagaagagaaaggcagaggagaaggaaaggaagaaggaggaggacaagaggaagaaggagcgagccatggcatgtcaggaacctgagtgggcgagggcagaggaggtagaggagggactgtatgatgaagatgaagaagaggagatgagggccaagaaggaggagctgtactgtgtggcgtgcaataaaaagttcaaatcggacaaacagtggaagaaccacgagcagtcgaagaagcatagggataaggtttctgaactgaggatggcctttagggaggaggagtctttgaaagaggcagaggagggggaaggtgattggaatgaagttgatgtggggtttgattttaagcctacacaggagtcagatgatgagagtgcattttcagatgctgcagaagagttagctgaagaatttgaggaaggtttggaggtgcatgataaagagaacggtgataaggatttcgatagtgcagagcaggaggttgggtcatatgatgaggcaagtgtattggaggcaatgctatcaagctgcaagaacagaaagggtggttatgtggctcctccagaggaggctttgtctggtactgctgaggatgacgatcatcatagaagttctgaagttaataatgcaaaaaggaaaggacgcaggcgacgggcagcaaagaaggagcaagatgaaagtaattatgctggcaatgagcatcatggtaaatgtgaggttcagcctgagggttcggtccatggtaatgatgttgatgatatcatggaagggccatcctcttctaatgtcaacaatggttcagtaagcaaaggagataagcagaatggtgaaaacacgaatcctaaaaagaacaagaaaggcacaaaaaagaaaccaactgtttctactgatcagaagagtatgtcaaaggctgaccagaagagcacatcaaaagggaagaaacaaaaggaggtctcgaaggcacctagtaatgattgcgatacttgtggaggaacttttgagtcgagttgttttctcacttggaagaaacaggtcacgcaatgctgaagacgcggcagaagaatcgtcgttgagggaaataagttgaacttccaagcacgtagttggttctgctagttaccacataacagcatggttctcttatgttttggcgcacttttttatctgtagcgaacatattttttttctagattctttatgtgtagtgtggagatgatgtttttgtttataaggccatatggtaccgggggtagggggggtataccgggcgggaaagacactgataattacaatatgtaacattatttcattatttgtgcgacctgtgccatccttacaaattttagtgttacaatggctgccccatctcagatgtaatggcttcatatttttctctcttttttttattattgtcagttctcttagtcctgattcgtaaattatgttttgtgtggtagagtggaaatcaccaaagcattataagagctggacagtcttctcttgaacagaattgccccgatcttgtttggaagcagcgggagcactgattctatctttgtcacagaagccatgcgcttcattttcttgaacatagcttttaccctattcatatatacctttaaaataaa

SEQ ID NO: 15867 - DNA, 1826 bp, Zea Mays
gaaaaacataacggtctaggttctactgcacctctttcaggctaagcatctaaacaacaatatgtaaattatccttttccaataaaatacatgcttaaaccgtggttgctaggcgaatggtcctactttggtcatcaaatgcaggaattccactactatatgtgccacttaaagttgttatgtcaaaatattatggtgaaagcgagcgtctattgggatctattttttatcttgcaaatgatcttcctgaaggaggtaatatattcttagatgaggtatatatcgtaatacttatagcataaacactcaagccactacaagtaagctcttgccctttgcttgtttccagattgatatgtcaagatacgcttgtttcatttgagctcactgttatctgaaaatctatagactgccttcgtccccttcatcactgccaatgaccgtgacttggccaccacagcaaaagcacgcaggatccttgatgtgtgtggtctagacgtgattgaattgggcgtgcctgactttgatccattagccgaatgtccagttattcagctcagattgtttgcctatacaatttgttcttatactatactgtctatgtatgctcctgcttcctgcgttttggtccagtagaagggtgcaagctcatcagaaaagaaaaggtggatctttctttattttaattaaaaaatgtctatagatagcttgtaacagataaatccataccccacctgtccccagcacccactcgcccactcacctgtaaaattgtggctgccttttcagattgctctttgcatctgatttttggctttgctttccccgtatgtctcaagtctagttaccatttatggctttcgcacctgtaaacatttatggttgcttttgttgattcatactagcatctatgctaattttttaatgcacgaccttaatgctacttttatgtgtatttatgatcaatcaccatgtattttacgctcttcggtttttatgtcaaaaaaatgggtttttacgctgatttatatgtgtgcctatgctgcaacacatacaattctaactaaatatgcataaagcagcgcgccagcacctcatattttattctcattgtttctacttcgttaattcattgacccatgtctctgtcttggtatattctggagacaaatccccacgtccagagttacaagaagatcaagcttggctgtggctgcagctgtgttgcctcctcttgttggaccgaagagagggaggggagaagcagctggcgtgcagacttctactcaggtggtcttttattctctatggggcttctaggatacatcttctccagaagcaccataagtcttgtcttgggcattacaccagggctagccactctgctacttggcactctcagtctgaagttctggaggagcgacagatccagcttcctgcttatcttggctcagaggtgatgctgatgtgcaagcatcttcaccttgagttctgcctagatccttgaatcaagtttattttcccatcctgctccattcgaggtagcccaatcgtctgtcctcacatcaactttcacctgccttaagcctttaggttcatttgtcttatatataccatggtaaaccacaccatgaatatgccataaataagtaacaagagtgtatagcaactcagcacacacaggaaatcaggatccttcacgtacacctttcatgttcttgcaaccttgattctacatgcttcaggtagtctagaatatcagattgttgtatatatttaacaccttttgtaccatcaaattcagaaatgcactcaagaaaaggctt

SEQ ID NO: 15868 - DNA, 990 bp, Zea Mays
ccagccgccaacgccccaatcccgtaaccgcagcctcgccctgctcgcatcttcctctccctctcagcgctggtgctcaatctacaggtcgtcccgctccctacacacccgccctccggtgtgaaccttcatgacgtccgcaaccactctccgatctgctgtcgtgacctcatccagccgtgctgtggcagtggatcggagttcgctccagctctgattgaattccactactatatgtgccacttaaagttgttatgtcaaaatattatggtgaaagcgagcgtctattgggatctattttttatcttgcaaatgatcttcctgaaggagacaaatccccacgtccagagttacaagaagatcaagcttggctgtggctgcagctgtgttgcctcctcttgttggaccgaagagagggaggggagaagcagctggcgtgcagacttctactcaggtggtcttttattctctatggggcttctaggatacatcttctccagaagcaccataagtcttgtcttgggcattacaccagggctagccactctgctacttggcactctcagtctgaagttctggaggagcgacagatccagcttcctgcttatcttggctcagaggtgatgctgatgtgcaagcatcttcaccttgagttctgcctagatccttgaatcaagtttattttcccatcctgctccattcgaggtagcccaatcgtctgtcctcacatcaactttcacctgccttaagcctttaggttcatttgtcttatatataccatggtaaaccacaccatgaatatgccataaataagtaacaagagtgtatagcaactcagcacacacaggaaatcaggatccttcacgtacacctttcatgttcttgcaaccttgattctacatgcttcaggtagtctagaatatcagattgttgtatatatttaacaccttttgtaccatcaaattcagaaatgcactcaagaaaaggctt

SEQ ID NO: 15869 - DNA, 972 bp, Zea Mays
ccagccgccaacgccccaatcccgtaaccgcagcctcgccctgctcgcatcttcctctccctctcagcgctggtgctcaatctacaggtcgtcccgctccctacacacccgccctccggtgtgaaccttcatgacgtccgcaaccactctccgatctgctgtcgtgacctcatccagccgtgctgtggcagtggatcggagttcgctccagctctgattgaattccactactatatgtgccacttaaagttgttatgtcaaaatattatggtgaaagcgagcgtctattgggatctattttttatcttgcaaatgatcttcctgaaggagagttacaagaagatcaagcttggctgtggctgcagctgtgttgcctcctcttgttggaccgaagagagggaggggagaagcagctggcgtgcagacttctactcaggtggtcttttattctctatggggcttctaggatacatcttctccagaagcaccataagtcttgtcttgggcattacaccagggctagccactctgctacttggcactctcagtctgaagttctggaggagcgacagatccagcttcctgcttatcttggctcagaggtgatgctgatgtgcaagcatcttcaccttgagttctgcctagatccttgaatcaagtttattttcccatcctgctccattcgaggtagcccaatcgtctgtcctcacatcaactttcacctgccttaagcctttaggttcatttgtcttatatataccatggtaaaccacaccatgaatatgccataaataagtaacaagagtgtatagcaactcagcacacacaggaaatcaggatccttcacgtacacctttcatgttcttgcaaccttgattctacatgcttcaggtagtctagaatatcagattgttgtatatatttaacaccttttgtaccatcaaattcagaaatgcactcaagaaaaggctt

SEQ ID NO: 15870 - DNA, 890 bp, Zea Mays
cctcacgccagccgccaacgccccaatcccgtaaccgcagcctcgccctgctcgcatcttcctctccctctcagcgctggtgctcaatctacaggtcgtcccgctccctacacacccgccctccggtgtgaaccttcatgacgtccgcaaccactctccgatctgctgtcgtgacctcatccagccgtgctgtggcagtggatcggagttcgctccagctctgattacaaatccccacgtccagagttacaagaagatcaagcttggctgtggctgcagctgtgttgcctcctcttgttggaccgaagagagggaggggagaagcagctggcgtgcagacttctactcaggtggtcttttattctctatggggcttctaggatacatcttctccagaagcaccataagtcttgtcttgggcattacaccagggctagccactctgctacttggcactctcagtctgaagttctggaggagcgacagatccagcttcctgcttatcttggctcaggcagaggtgatgctgatgtgcaagcatcttcaccttgagttctgcctagatccttgaatcaagtttattttcccatcctgctccattcgaggtagcccaatcgtctgtcctcacatcaactttcacctgccttaagcctttaggttcatttgtcttatatataccatggtaaaccacaccatgaatatgccataaataagtaacaagagtgtatagcaactcagcacacacaggaaatcaggatccttcacgtacacctttcatgttcttgcaaccttgattctacatgcttcaggtagtctagaatatcagattgttgtatatatttaacaccttttgtaccatcaaattcagaaatgcactcaagaaaaggctt

SEQ ID NO: 15871 - DNA, 1015 bp, Zea Mays
gtgcatgcatagcccctcacgccagccgccaacgccccaatcccgtaaccgcagcctcgccctgctcgcatcttcctctccctctcagcgctggtgctcaatctacaggtcgtcccgctccctacacacccgccctccggtgtgaaccttcatgacgtccgcaaccactctccgatctgctgtcgtgacctcatccagccgtgctgtggcagtggatcggagttcgctccagctctgattgaattccactactatatgtgccacttaaagttgttatgtcaaaatattatggtgaaagcgagcgtctattgggatctattttttatcttgcaaatgatcttcctgaaggagacaaatccccacgtccagagttacaagaagatcaagcttggctgtggctgcagctgtgttgcctcctcttgttggaccgaagagagggaggggagaagcagctggcgtgcagacttctactcaggtggtcttttattctctatggggcttctaggatacatcttctccagaagcaccataagtcttgtcttgggcattacaccagggctagccactctgctacttggcactctcagtctgaagttctggaggagcgacagatccagcttcctgcttatcttggctcaggcagaggtgatgctgatgtgcaagcatcttcaccttgagttctgcctagatccttgaatcaagtttattttcccatcctgctccattcgaggtagcccaatcgtctgtcctcacatcaactttcacctgccttaagcctttaggttcatttgtcttatatataccatggtaaaccacaccatgaatatgccataaataagtaacaagagtgtatagcaactcagcacacacaggaaatcaggatccttcacgtacacctttcatgttcttgcaaccttgattctacatgcttcaggtagtctagaatatcagattgttgtatatatttaacaccttttgtaccatcaaattcagaaatgcactcaagaaaaggctt

SEQ ID NO: 15872 - DNA, 1410 bp, Zea Mays
cctagttgtgcatgcatagcccctcacgccagccgccaacgccccaatcccgtaaccgcagcctcgccctgctcgcatcttcctctccctctcagcgctggtgctcaatctacaggtcgtcccgctccctacacacccgccctccggtgtgaaccttcatgacgtccgcaaccactctccgatctgctgtcgtgacctcatccagccgtgctgtggcagtggatcggagttcgctccagctctgattgaattccactactatatgtgccacttaaagttgttatgtcaaaatattatggtgaaagcgagcgtctattgggatctattttttatcttgcaaatgatcttcctgaaggaggtaatatattcttagatgaggtatatatcgtaatacttatagcataaacactcaagccactacaagtaagctcttgccctttgcttgtttccagattgatatgtcaagatacgcttgtttcatttgagctcactgttatctgaaaatctatagactgccttcgtccccttcatcactgccaatgaccgtgacttggccaccacagcaaaagcacgcaggatccttgatgtgtgtggtctagacgtgattgaattgggcgtgcctgactttgatccattagccgaatgtccagttattcagctcagattgtttgcctatacaatttgttcttatactatactgtctatgtatgctcctgcttcctgcgttttggtccagtagaagggtgcaagctcatcagaaaagaaaagagttacaagaagatcaagcttggctgtggctgcagctgtgttgcctcctcttgttggaccgaagagagggaggggagaagcagctggcgtgcagacttctactcaggtggtcttttattctctatggggcttctaggatacatcttctccagaagcaccataagtcttgtcttgggcattacaccagggctagccactctgctacttggcactctcagtctgaagttctggaggagcgacagatccagcttcctgcttatcttggctcagaggtgatgctgatgtgcaagcatcttcaccttgagttctgcctagatccttgaatcaagtttattttcccatcctgctccattcgaggtagcccaatcgtctgtcctcacatcaactttcacctgccttaagcctttaggttcatttgtcttatatataccatggtaaaccacaccatgaatatgccataaataagtaacaagagtgtatagcaactcagcacacacaggaaatcaggatccttcacgtacacctttcatgttcttgcaaccttgattctacatgcttcaggtagtctagaatatcagattgttgtatatatttaacaccttttgtaccatcaaattcagaaatgcactcaagaaaaggctt

SEQ ID NO: 15873 - DNA, 1436 bp, Zea Mays
cgccaaaccctagttgtgcatgcatagcccctcacgccagccgccaacgccccaatcccgtaaccgcagcctcgccctgctcgcatcttcctctccctctcagcgctggtgctcaatctacaggtcgtcccgctccctacacacccgccctccggtgtgaaccttcatgacgtccgcaaccactctccgatctgctgtcgtgacctcatccagccgtgctgtggcagtggatcggagttcgctccagctctgattgaattccactactatatgtgccacttaaagttgttatgtcaaaatattatggtgaaagcgagcgtctattgggatctattttttatcttgcaaatgatcttcctgaaggaggtaatatattcttagatgaggtatatatcgtaatacttatagcataaacactcaagccactacaagtaagctcttgccctttgcttgtttccagattgatatgtcaagatacgcttgtttcatttgagctcactgttatctgaaaatctatagactgccttcgtccccttcatcactgccaatgaccgtgacttggccaccacagcaaaagcacgcaggatccttgatgtgtgtggtctagacgtgattgaattgggcgtgcctgactttgatccattagccgaatgtccagttattcagctcagattgtttgcctatacaatttgttcttatactatactgtctatgtatgctcctgcttcctgcgttttggtccagtagaagggtgcaagctcatcagaaaagaaaagacaaatccccacgtccagagttacaagaagatcaagcttggctgtggctgcagctgtgttgcctcctcttgttggaccgaagagagggaggggagaagcagctggcgtgcagacttctactcaggtggtcttttattctctatggggcttctaggatacatcttctccagaagcaccataagtcttgtcttgggcattacaccagggctagccactctgctacttggcactctcagtctgaagttctggaggagcgacagatccagcttcctgcttatcttggctcagaggtgatgctgatgtgcaagcatcttcaccttgagttctgcctagatccttgaatcaagtttattttcccatcctgctccattcgaggtagcccaatcgtctgtcctcacatcaactttcacctgccttaagcctttaggttcatttgtcttatatataccatggtaaaccacaccatgaatatgccataaataagtaacaagagtgtatagcaactcagcacacacaggaaatcaggatccttcacgtacacctttcatgttcttgcaaccttgattctacatgcttcaggtagtctagaatatcagattgttgtatatatttaacaccttttgtaccatcaaattcagaaatgcactcaagaaaaggctt

SEQ ID NO: 15874 - DNA, 1907 bp, Zea Mays
ctcaggcccaaccaaaccgaccttcggcggcccagaacagcagcctatcacgaccaaaaccgccaaaccctagttgtgcatgcatagcccctcacgccagccgccaacgccccaatcccgtaaccgcagcctcgccctgctcgcatcttcctctccctctcagcgctggtgctcaatctacaggtcgtcccgctccctacacacccgccctccggtgtgaaccttcatgacgtccgcaaccactctccgatctgctgtcgtgacctcatccagccgtgctgtggcagtggatcggagttcgctccagctctgattgaattccactactatatgtgccacttaaagttgttatgtcaaaatattatggtgaaagcgagcgtctattgggatctattttttatcttgcaaatgatcttcctgaaggagattgatatgtcaagatacgcttgtttcatttgagctcactgttatctgaaaatctatagactgccttcgtccccttcatcactgccaatgaccgtgacttggccaccacagcaaaagcacgcaggatccttgatgtgtgtggtctagacgtgattgaattgggcgtgcctgactttgatccattagccgaatgtccagttattcagctcagattgtttgcctatacaatttgttcttatactatactgtctatgtatgctcctgcttcctgcgttttggtccagtagaagggtgcaagctcatcagaaaagaaaaggtggatctttctttattttaattaaaaaatgtctatagatagcttgtaacagataaatccataccccacctgtccccagcacccactcgcccactcacctgtaaaattgtggctgccttttcagattgctctttgcatctgatttttggctttgctttccccgtatgtctcaagtctagttaccatttatggctttcgcacctgtaaacatttatggttgcttttgttgattcatactagcatctatgctaattttttaatgcacgaccttaatgctacttttatgtgtatttatgatcaatcaccatgtattttacgctcttcggtttttatgtcaaaaaaatgggtttttacgctgatttatatgtgtgcctatgctgcaacacatacaattctaactaaatatgcataaagcagcgcgccagcacctcatattttattctcattgtttctacttcgttaattcattgacccatgtctctgtcttggtatattctggagacaaatccccacgtccagagttacaagaagatcaagcttggctgtggctgcagctgtgttgcctcctcttgttggaccgaagagagggaggggagaagcagctggcgtgcagacttctactcaggtggtcttttattctctatggggcttctaggatacatcttctccagaagcaccataagtcttgtcttgggcattacaccagggctagccactctgctacttggcactctcagtctgaagttctggaggagcgacagatccagcttcctgcttatcttggctcaggcagaggtgatgctgatgtgcaagcatcttcaccttgagttctgcctagatccttgaatcaagtttattttcccatcctgctccattcgaggtagcccaatcgtctgtcctcacatcaactttcacctgccttaagcctttaggttcatttgtcttatatataccatggtaaaccacaccatgaatatgccataaataagtaacaagagtgtatagcaactcagcacacacaggaaatcaggatccttcacgtacacctttcatgttcttgcaaccttgattctacatgcttcaggtagtctagaatatcagattgttgtatatatttaacaccttttgtaccatcaaattcagaaatgcactcaagaaaaggctt

SEQ ID NO: 15875 - DNA, 1489 bp, Zea Mays
gacggatctcaggcccaaccaaaccgaccttcggcggcccagaacagcagcctatcacgaccaaaaccgccaaaccctagttgtgcatgcatagcccctcacgccagccgccaacgccccaatcccgtaaccgcagcctcgccctgctcgcatcttcctctccctctcagcgctggtgctcaatctacaggtcgtcccgctccctacacacccgccctccggtgtgaaccttcatgacgtccgcaaccactctccgatctgctgtcgtgacctcatccagccgtgctgtggcagtggatcggagttcgctccagctctgattgaattccactactatatgtgccacttaaagttgttatgtcaaaatattatggtgaaagcgagcgtctattgggatctattttttatcttgcaaatgatcttcctgaaggaggtaatatattcttagatgaggtatatatcgtaatacttatagcataaacactcaagccactacaagtaagctcttgccctttgcttgtttccagattgatatgtcaagatacgcttgtttcatttgagctcactgttatctgaaaatctatagactgccttcgtccccttcatcactgccaatgaccgtgacttggccaccacagcaaaagcacgcaggatccttgatgtgtgtggtctagacgtgattgaattgggcgtgcctgactttgatccattagccgaatgtccagttattcagctcagattgtttgcctatacaatttgttcttatactatactgtctatgtatgctcctgcttcctgcgttttggtccagtagaagggtgcaagctcatcagaaaagaaaagagttacaagaagatcaagcttggctgtggctgcagctgtgttgcctcctcttgttggaccgaagagagggaggggagaagcagctggcgtgcagacttctactcaggtggtcttttattctctatggggcttctaggatacatcttctccagaagcaccataagtcttgtcttgggcattacaccagggctagccactctgctacttggcactctcagtctgaagttctggaggagcgacagatccagcttcctgcttatcttggctcaggcagaggtgatgctgatgtgcaagcatcttcaccttgagttctgcctagatccttgaatcaagtttattttcccatcctgctccattcgaggtagcccaatcgtctgtcctcacatcaactttcacctgccttaagcctttaggttcatttgtcttatatataccatggtaaaccacaccatgaatatgccataaataagtaacaagagtgtatagcaactcagcacacacaggaaatcaggatccttcacgtacacctttcatgttcttgcaaccttgattctacatgcttcaggtagtctagaatatcagattgttgtatatatttaacaccttttgtaccatcaaattcagaaatgcactcaagaaaaggctt

SEQ ID NO: 15876 - DNA, 1507 bp, Zea Mays
gacggatctcaggcccaaccaaaccgaccttcggcggcccagaacagcagcctatcacgaccaaaaccgccaaaccctagttgtgcatgcatagcccctcacgccagccgccaacgccccaatcccgtaaccgcagcctcgccctgctcgcatcttcctctccctctcagcgctggtgctcaatctacaggtcgtcccgctccctacacacccgccctccggtgtgaaccttcatgacgtccgcaaccactctccgatctgctgtcgtgacctcatccagccgtgctgtggcagtggatcggagttcgctccagctctgattgaattccactactatatgtgccacttaaagttgttatgtcaaaatattatggtgaaagcgagcgtctattgggatctattttttatcttgcaaatgatcttcctgaaggaggtaatatattcttagatgaggtatatatcgtaatacttatagcataaacactcaagccactacaagtaagctcttgccctttgcttgtttccagattgatatgtcaagatacgcttgtttcatttgagctcactgttatctgaaaatctatagactgccttcgtccccttcatcactgccaatgaccgtgacttggccaccacagcaaaagcacgcaggatccttgatgtgtgtggtctagacgtgattgaattgggcgtgcctgactttgatccattagccgaatgtccagttattcagctcagattgtttgcctatacaatttgttcttatactatactgtctatgtatgctcctgcttcctgcgttttggtccagtagaagggtgcaagctcatcagaaaagaaaagacaaatccccacgtccagagttacaagaagatcaagcttggctgtggctgcagctgtgttgcctcctcttgttggaccgaagagagggaggggagaagcagctggcgtgcagacttctactcaggtggtcttttattctctatggggcttctaggatacatcttctccagaagcaccataagtcttgtcttgggcattacaccagggctagccactctgctacttggcactctcagtctgaagttctggaggagcgacagatccagcttcctgcttatcttggctcaggcagaggtgatgctgatgtgcaagcatcttcaccttgagttctgcctagatccttgaatcaagtttattttcccatcctgctccattcgaggtagcccaatcgtctgtcctcacatcaactttcacctgccttaagcctttaggttcatttgtcttatatataccatggtaaaccacaccatgaatatgccataaataagtaacaagagtgtatagcaactcagcacacacaggaaatcaggatccttcacgtacacctttcatgttcttgcaaccttgattctacatgcttcaggtagtctagaatatcagattgttgtatatatttaacaccttttgtaccatcaaattcagaaatgcactcaagaaaaggctt

SEQ ID NO: 15877 - DNA, 1325 bp, Zea Mays
ctgatccaacggctagcaagcgttgacgtgtgagctccgccggtacgcgcaccagatcgagtgtacccgtgcacgaggcgccggcctggagtcgcggtcgctgccgcatggccctggcctccctcgcggcctcgctcccagtcgccgccaccgccgccgcggtgagattcccattccgtttccgcatcggtcgcgccatggcctccgccgccgcaggggcctcgccggcgagggtggccgtggtacagatgacctccgtgggggacgtcgacgccaactacgccacctgctcccgcctcaccaaggaagcagctgcttctggagtgaaatttctttgcttccctgaggtcttctcattcattggatccaaggatggcgaggctatgaagctagctgaaccattagatgggccaataatgcagagatactgctcacttgcaaaagaatcaagcatgtggctatctcttgggggttttcaagaaaagggacctgatgattctcaccagtacaatactcatgtattaattgatgacactggaaaagttaggagctcatatcgaaaaatacatttgtttgatgttgatgtacctggcaatatggtgtacaaggaaagtcgtttcacagccgcaggtgatactattgttgctgtggatagcccttttggacggttggggcttactgtttgctatgatttgagattcccagagctttatcaaattttgcgttttaagcatcaagcacaggtattactagtgccatctgcattcacaaagataacgggagaggcacactgggaaattctcctccgagctcgtgcaattgagacacaatgttatgttattgctgctgctcaagctggaaagcacaatgaaaaaagagaaagttacggtgattctataattattgacccatgggggacagtgatagctcgacttccagatcggctctccactggatttgcagttgcagatcttgatttgtcaaaagttgaggctgtgagaactcgaatgccaatttcagaggttagcgtgggctacaaagctttgaataggtgtaaacgctcagaaaaaggtgaattggtctaaacgcccccaaaaaagatatatagtggaaggatcaaaatgtataagaggtgaattgtataagagggaggtgatgagttagtctaaatttattttgcacaaatgacaccgaatattcattatacatgtgacatgatagaaatcacatgtatagcttcatcgtacattgtattgttatagaaccaatgttcatgataaatctttccttgaagccgactggttcattacatgcttaaaccttat

SEQ ID NO: 15878 - DNA, 1412 bp, Zea Mays
ctgatccaacggctagcaagcgttgacgtgtgagctccgccggtacgcgcaccagatcgagtgtacccgtgcacgaggcgccggcctggagtcgcggtcgctgccgcatggccctggcctccctcgcggcctcgctcccagtcgccgccaccgccgccgcggtgagattcccattccgtttccgcatcggtcgcgccatggcctccgccgccgcaggggcctcgccggcgagggtggccgtggtacagatgacctccgtgggggacgtcgacgccaactacgccacctgctcccgcctcaccaagctgcttctggagtgaaatttctttgcttccctgaggtcttctcattcattggatccaaggatggcgaggctatgaagctagctgaaccattagatgggccaataatgcagagatactgctcacttgcaaaagaatcaagcatgtggctatctcttgggggttttcaagaaaagggacctgatgattctcaccagtacaatactcatgtattaattgatgacactggaaaagttaggagctcatatcgaaaaatacatttgtttgatgttgatgtacctggcaatatggtgtacaaggaaagtcgtttcacagccgcaggtgatactattgttgctgtggatagcccttttggacggttggggcttactgtttgctatgatttgagattcccagagctttatcaaattttgcgttttaagcatcaagcacaggtattactagtgccatctgcattcacaaagataacgggagaggcacactgggaaattctcctccgagctcgtgcaattgagacacaatgttatgttattgctgctgctcaagctggaaagcacaatgaaaaaagagaaagttacggtgattctataattattgacccatgggggacagtgatagctcgacttccagaaaaatgtggttgcagatcggctctccactggatttgcagttgcagatcttgatttgtcaaaagttgaggctgtgagaactcgaatgccaatttcagagcaccggaagttcgacagcgattggaaacccacgcctctttagtagctgagggtttattttgtgtttcctatgtttaatgttagcgtgggctacaaagctttgaataggtgtaaacgctcagaaaaaggtgaattggtctaaacgcccccaaaaaagatatatagtggaaggatcaaaatgtataagaggtgaattgtataagagggaggtgatgagttagtctaaatttattttgcacaaatgacaccgaatattcattatacatgtgacatgatagaaatcacatgtatagcttcatcgtacattgtattgttatagaaccaatgttcatgataaatctttccttgaagccgactggttcattacatgcttaaaccttat

SEQ ID NO: 15879 - DNA, 1523 bp, Zea Mays
caaccggcgagcagcggcgccgtgtgacgagctctcgtccaactggctggtgggctcttcagtgcaacgcatcgcatgtggtcttctcacatccaacggtggcaagcatagaatgccgctctgatccaacggctagcaagcgttgacgtgtgagctccgccggtacgcgcaccagatcgagtgtacccgtgcacgaggcgccggcctggagtcgcggtcgctgccgcatggccctggcctccctcgcggcctcgctcccagtcgccgccaccgccgccgcggtgagattcccattccgtttccgcatcggtcgcgccatggcctccgccgccgcaggggcctcgccggcgagggtggccgtggtacagatgacctccgtgggggacgtcgacgccaactacgccacctgctcccgcctcaccaaggaagcagctgcttctggagtgaaatttctttgcttccctgaggtcttctcattcattggatccaaggatggcgaggctatgaagctagctgaaccattagatgggccaataatgcagagatactgctcacttgcaaaagaatcaagcatgtggctatctcttgggggttttcaagaaaagggacctgatgattctcaccagtacaatactcatgtattaattgatgacactggaaaagttaggagctcatatcgaaaaatacatttgtttgatgttgatgtacctggcaatatggtgtacaaggaaagtcgtttcacagccgcaggtgatactattgttgctgtggatagcccttttggacggttggggcttactgtttgctatgatttgagattcccagagctttatcaaattttgcgttttaagcatcaagcacaggtattactagtgccatctgcattcacaaagataacgggagaggcacactgggaaattctcctccgagctcgtgcaattgagacacaatgttatgttattgctgctgctcaagctggaaagcacaatgaaaaaagagaaagttacggtgattctataattattgacccatgggggacagtgatagctcgacttccagatcggctctccactggatttgcagttgcagatcttgatttgtcaaaagttgaggctgtgagaactcgaatgccaatttcagagcaccggaagttcgacagcgattggaaacccacgcctctttagtagctgagggtttattttgtgtttcctatgtttaatgttagcgtgggctacaaagctttgaataggtgtaaacgctcagaaaaaggtgaattggtctaaacgcccccaaaaaagatatatagtggaaggatcaaaatgtataagaggtgaattgtataagagggaggtgatgagttagtctaaatttattttgcacaaatgacaccgaatattcattatacatgtgacatgatagaaatcacatgtatagcttcatcgtacattgtattgttatagaaccaatgttcatgataaatctttccttgaagccgactggttcattacatgcttaaaccttat

SEQ ID NO: 15880 - DNA, 408 bp, Zea Mays
actattttgtggagattaggagccaaatcaaggtttgatgttgatgtacctggcaatatggtgtacaaggaaagtcgtttcacagccgcaggtgatactattgttgctgtggatagcccttttggacggttggggcttactgtttgctatgatttgagattcccagagctttatcaaattttgcgttttaagcatcaagcacaggtattactagtgccatctgcattcacaaagataacgggagaggcacactgggaaattctcctccgagctcgtgcaattgagacacaatgttatgttattgctgctgctcaagctggaaagcacaatgaaaaaagagaaagttacggtgattctataattattgacccatgggggacagtgatagctcgacttccagaaaaatgt

SEQ ID NO: 15881 - DNA, 848 bp, Zea Mays
ctgatccaacggctagcaagcgttgacgtgtgagctccgccggtacgcgcaccagatcgagtgtacccgtgcacgaggcgccggcctggagtcgcggtcgctgccgcatggccctggcctccctcgcggcctcgctcccagtcgccgccaccgccgccgcggtgagattcccattccgtttccgcatcggtcgcgccatggcctccgccgccgcaggggcctcgccggcgagggtggccgtggtacagatgacctccgtgggggacgtcgacgccaactacgccacctgctcccgcctcaccaagctgcttctggagtgaaatttctttgcttccctgaggtcttctcattcattggatccaaggatggcgaggctatgaagctagctgaaccattagatgggccaataatgcagagatactgctcacttgcaaaagaatcaagcatgtggctatctcttgggggttttcaagaaaagggacctgatgattctcaccagtacaatactcatgtattaattgatgacactggaaaagttaggagctcatatcgaaaaatacatttgtttgatgttgatgtacctggcaatatggtgtacaaggaaagtcgtttcacagccgcaggtgatactattgttgctgtggatagcccttttggacggttggggcttactgtttgctatgatttgagattcccagagctttatcaaattttgcgttttaagcatcaagcacaggtattactagtgccatctgcattcacaaagataacgggagaggcacactgggaaattctcctccgagctcgtgcaattgagacacaatgttattgttcgaaaccatttgcag

SEQ ID NO: 15882 - DNA, 1021 bp, Zea Mays
cacaagcatcatcatcttatgcttgcctcttccattcatgctcacatttgggtcgaggtttcggacgaatataagcttgtggcagatacactttaccttacagtatatcttattgaccaatttctttctcagaactgtatccaaacgcacaagctgcaacttcttgggataactagtatgctgattgcctcgaaatatgaagagtattctgctcctagtgctgaagaattttgtaacataacggctggtacatatgcaaaggctgaggttctggaaatggagcaacaagtgcttaatgatctgggctttcatttatctgttccaacaacaaacacatttctcaggagattccttagagcagcacaggcttctcgtacagctcatctgaccactttgaattatctggcgagttatcttgccgagttgactttaatcagttacgatttcatgaaatttcttccctcagaggtggcagcatcttcgattttccttgcaaaatggacacttgaccaatctgaccatccttggaaccctactcttgagcactacacgtcttacaaaagcttcgatattagaacttgcgtgcgggctctacaggaactgcagcacaacaccagtaattgccccctcaacgccatccgtgagaagtatgggcagcagaagttcgagtgcgttgccaacctcaggtcaccggagctgctgcggtcgctcttcagttgatgtgctcccctgcactctgctgattcactcgccatttgctgcaacgatcctgacactgtataaaatatttcttcagtttctgttccatttccaaactttcttcagtttgaacatgcattctgtgacttgggtcaccgacaaaagaggcgcgacacactaatatatcaatttgtaactcaaagcatgtttcaccatttttttcataaaacatagaacagaaataaatgcacacactctgcccctacaccatgagtgcctttgaaaaactggactgatagatcatgagattaaccaagtcatt

SEQ ID NO: 15883 - DNA, 1167 bp, Zea Mays
ctcttacctagttttcaagtcctggtgctcatgttcagaatggtgtggttgagcacaagcatcatcatcttatgcttgcctcttccattcatgctcacatttgggtcgaggtttcggacgaatataagcttgtggcagatacactttaccttacagtatatcttattgaccaatttctttctcagaactgtatccaaacgcacaagctgcaacttcttgggataactagtatgctgattgcctcgaaatatgaagagtattctgctcctagtgctgaagaattttgtaacataacggctggtacatatgcaaaggctgaggttctggaaatggagcaacaagtgcttaatgatctgggctttcatttatctgttccaacaacaaacacatttctcaggagattccttagagcagcacaggcttctcgtacagtaagatcagtacccaaaccacattgcaacgagtcctttcagtctatatgtattgtcctcaacactaagttggcaagctacatttccaggctcatctgaccactttgaattatctggcgagttatcttgccgagttgactttaatcagttacgatttcatgaaatttcttccctcagaggtggcagcatcttcgattttccttgcaaaatggacacttgaccaatctgaccatccttgggtttaaccctactcttgagcactacacgtcttacaaaagcttcgatattagaacttgcgtgcgggctctacaggaactgcagcacaacaccagtaattgccccctcaacgccatccgtgagaagtatgggcagcagaagttcgagtgcgttgccaacctcaggtcaccggagctgctgcggtcgctcttcagttgatgtgctcccctgcactctgctgattcactcgccatttgctgcaacgatcctgacactgtataaaatatttcttcagtttctgttccatttccaaactttcttcagtttgaacatgcattctgtgacttgggtcaccgacaaaagaggcgcgacacactaatatatcaatttgtaactcaaagcatgtttcaccatttttttcataaaacatagaacagaaataaatgcacacactctgcccctacaccatgagtgcctttgaaaaactggactgatagatcatgagattaaccaagtcatt

SEQ ID NO: 15884 - DNA, 1086 bp, Zea Mays
ctggttttgtgactcagtcctctgcacctacaggtttcggacgaatataagcttgtggcagatacactttaccttacagtatatcttattgaccaatttctttctcagaactgtatccaaacgcacaagctgcaacttcttgggataactagtatgctgattgcctcgaaatatgaagagtattctgctcctagtgctgaagaattttgtaacataacggctggtacatatgcaaaggctgaggttctggaaatggagcaacaagtgcttaatgatctgggctttcatttatctgttccaacaacaaacacatttctcaggagattccttagagcagcacaggcttctcgtacagtaagatcagtacccaaaccacattgcaacgagtcctttcagtctatatgtattgtcctcaacactaagttggcaagctacatttccaggctcatctgaccactttgaattatctggcgagttatcttgccgagttgactttaatcagttacgatttcatgaaatttcttccctcagaggtggcagcatcttcgattttccttgcaaaatggacacttgaccaatctgaccatccttggaaccctactcttgagcactacacgtcttacaaaagcttcgatattagaacttgcgtgcgggctctacaggaactgcagcacaacaccagtaattgccccctcaacgccatccgtgagaagtatgggcagcagaagttcgagtgcgttgccaacctcaggtcaccggagctgctgcggtcgctcttcagttgatgtgctcccctgcactctgctgattcactcgccatttgctgcaacgatcctgacactgtataaaatatttcttcagtttctgttccatttccaaactttcttcagtttgaacatgcattctgtgacttgggtcaccgacaaaagaggcgcgacacactaatatatcaatttgtaactcaaagcatgtttcaccatttttttcataaaacatagaacagaaataaatgcacacactctgcccctacaccatgagtgcctttgaaaaactggactgatagatcatgagattaaccaagtcatt

SEQ ID NO: 15885 - DNA, 1088 bp, Zea Mays
ggagattctacaattgatgagttctttgctcagatgtttcggacgaatataagcttgtggcagatacactttaccttacagtatatcttattgaccaatttctttctcagaactgtatccaaacgcacaagctgcaacttcttgggataactagtatgctgattgcctcgaaatatgaagagtattctgctcctagtgctgaagaattttgtaacataacggctggtacatatgcaaaggctgaggttctggaaatggagcaacaagtgcttaatgatctgggctttcatttatctgttccaacaacaaacacatttctcaggagattccttagagcagcacaggcttctcgtacagtaagatcagtacccaaaccacattgcaacgagtcctttcagtctatatgtattgtcctcaacactaagttggcaagctacatttccaggctcatctgaccactttgaattatctggcgagttatcttgccgagttgactttaatcagttacgatttcatgaaatttcttccctcagaggtggcagcatcttcgattttccttgcaaaatggacacttgaccaatctgaccatccttggaaccctactcttgagcactacacgtcttacaaaagcttcgatattagaacttgcgtgcgggctctacaggaactgcagcacaacaccagtaattgccccctcaacgccatccgtgagaagtatgggcagcagaagttcgagtgcgttgccaacctcaggtcaccggagctgctgcggtcgctcttcagttgatgtgctcccctgcactctgctgattcactcgccatttgctgcaacgatcctgacactgtataaaatatttcttcagtttctgttccatttccaaactttcttcagtttgaacatgcattctgtgacttgggtcaccgacaaaagaggcgcgacacactaatatatcaatttgtaactcaaagcatgtttcaccatttttttcataaaacatagaacagaaataaatgcacacactctgcccctacaccatgagtgcctttgaaaaactggactgatagatcatgagattaaccaagtcatt

SEQ ID NO: 15886 - DNA, 1913 bp, Zea Mays
gttctttcttatctccttcccaatcggcgtacggctcatcacacatgcggttgattacgtgttatgaatttgggtactgctagtactagtaccatctcatttccccaaataatcttggggattaatgttaaatccaccccctttaaaggtttacatggctgcaagaaagaaaaagcctttgcttattgcttgccaagcaaccagtgccagaataacaagatctcaggctgctgcaaatagtacaagatctgggctggctccttctgtaccagtacctctgaaaacggagcataaccatgcagcgaaaaaaaagatgaaaagggaagcttcagatgaaaatgcttctgctgatgctggagcttcagctcctctgcctaaaaggcgtacagttctcaagaatgtaactaacataagctgtgctaaaatttccaaaaggtgcactgctgtgactgggctgaagttgggtccctcccagaaggctgggcagagcataaacaagcaatgcacaaacaagatctccatgcttctccctctggctgttggagggagttcacttgtggatgattctaataatgctgaagaaacacaaatggtagaccttttggcacagaaagagaagcagattgttttgcttaaggaggctcagccattacagaatactgaacaaaacaaaggcggtgcttgtgatgaggcatctgttgaggaaagaaatgccatgaatgtacacgaaactgctgccttaaaggctggggtctctaatggtttaaacattgtagatattgacaaaaataatggtgatcctcaaatgtgtgttacctacgttgcagagatatacagaaatctaatggcctcagagcttataagaagacctaggtcaaattacatggagactttgcaacaggacatcacagctagcatgcgaggtgttctaattgattggcttgttgaggtttcggacgaatataagcttgtggcagatacactttaccttacagtatatcttattgaccaatttctttctcagaactgtatccaaacgcacaagctgcaacttcttgggataactagtatgctgattgcctcgaaatatgaagagtattctgctcctagtgctgaagaattttgtaacataacggctggtacatatgcaaaggctgaggttctggaaatggagcaacaagtgcttaatgatctgggctttcatttatctgttccaacaacaaacacatttctcaggagattccttagagcagcacaggcttctcgtacagctcatctgaccactttgaattatctggcgagttatcttgccgagttgactttaatcagttacgatttcatgaaatttcttccctcagaggtggcagcatcttcgattttccttgcaaaatggacacttgaccaatctgaccatccttggaaccctactcttgagcactacacgtcttacaaaagcttcgatattagaacttgcgtgcgggctctacaggaactgcagcacaacaccagtaattgccccctcaacgccatccgtgagaagtatgggcagcagaagttcgagtgcgttgccaacctcaggtcaccggagctgctgcggtcgctcttcagttgatgtgctcccctgcactctgctgattcactcgccatttgctgcaacgatcctgacactgtataaaatatttcttcagtttctgttccatttccaaactttcttcagtttgaacatgcattctgtgacttgggtcaccgacaaaagaggcgcgacacactaatatatcaatttgtaactcaaagcatgtttcaccatttttttcataaaacatagaacagaaataaatgcacacactctgcccctacaccatgagtgcctttgaaaaactggactgatagatcatgagattaaccaagtcatt

SEQ ID NO: 15887 - DNA, 1791 bp, Zea Mays
cgaatcttgagttctttcttatctccttcccaatcggcgtacggctcatcacacatgcggttgattacgtgttatgaatttgggtactgctagtactagtaccatctcatttccccaaataatcttggggattaatgttaaatccaccccctttaaaggtttacatggctgcaagaaagaaaaagcctttgcttattgcttgccaagcaaccagtgccagaataacaagatctcaggctgctgcaaatagtacaagatctgggctggctccttctgtaccagtacctctgaaaacggagcataaccatgcagcgaaaaaaaagatgaaaagggaagcttcagatgaaaatgcttctgctgatgctggagcttcagctcctctgcctaaaaggcgtacagttctcaagaatgtaactaacataagctgtgctaaaatttccaaaaggtgcactgctgtgactgggctgaagttgggtccctcccagaaggctgggcagagcataaacaagcaatgcacaaacaagatctccatgcttctccctctggctgttggagggagttcacttgtggatgattctaataatgctgaagaaacacaaatggtagaccttttggcacagaaagagaagcagattgttttgcttaaggaggctcagccattacagaatactgaacaaaacaaaggcggtgcttgtgatgaggcatctgttgaggaaagaaatgccatgaatgtacacgaaactgctgccttaaaggctggggtctctaatggtttaaacattgtagatattgacaaaaataatggtgatcctcaaatgtgtgttacctacgttgcagagatatacagaaatctaatggcctcagaggtttcggacgaatataagcttgtggcagatacactttaccttacagtatatcttattgaccaatttctttctcagaactgtatccaaacgcacaagctgcaacttcttgggataactagtatgctgattgcctcgaaatatgaagagtattctgctcctagtgctgaagaattttgtaacataacggctggtacatatgcaaaggctgaggttctggaaatggagcaacaagtgcttaatgatctgggctttcatttatctgttccaacaacaaacacatttctcaggagattccttagagcagcacaggcttctcgtacagtaagatcagtacccaaaccacattgcaacgagtcctttcagtctatataggtggcagcatcttcgattttccttgcaaaatggacacttgaccaatctgaccatccttggaaccctactcttgagcactacacgtcttacaaaagcttcgatattagaacttgcgtgcgggctctacaggaactgcagcacaacaccagtaattgccccctcaacgccatccgtgagaagtatgggcagcagaagttcgagtgcgttgccaacctcaggtcaccggagctgctgcggtcgctcttcagttgatgtgctcccctgcactctgctgattcactcgccatttgctgcaacgatcctgacactgtataaaatatttcttcagtttctgttccatttccaaactttcttcagtttgaacatgcattctgtgacttgggtcaccgacaaaagaggcgcgacacactaatatatcaatttgtaactcaaagcatgtttcaccatttttttcataaaacatagaacagaaataaatgcacacactctgcccctacaccatgagtgcctttgaaaaactggactgatagatcatgagattaaccaagtcatt

SEQ ID NO: 15888 - DNA, 1799 bp, Zea Mays
gtccttttttctgcaatacattcccttgttcgatgtttacatggctgcaagaaagaaaaagcctttgcttattgcttgccaagcaaccagtgccagaataacaagatctcaggctgctgcaaatagtacaagatctgggctggctccttctgtaccagtacctctgaaaacggagcataaccatgcagcgaaaaaaaagatgaaaagggaagcttcagatgaaaatgcttctgctgatgctggagcttcagctcctctgcctaaaaggcgtacagttctcaagaatgtaactaacataagctgtgctaaaatttccaaaaggtgcactgctgtgactgggctgaagttgggtccctcccagaaggctgggcagagcataaacaagcaatgcacaaacaagatctccatgcttctccctctggctgttggagggagttcacttgtggatgattctaataatgctgaagaaacacaaatggtagaccttttggcacagaaagagaagcagattgttttgcttaaggaggctcagccattacagaatactgaacaaaacaaaggcggtgcttgtgatgaggcatctgttgaggaaagaaatgccatgaatgtacacgaaactgctgccttaaaggctggggtctctaatggtttaaacattgtagatattgacaaaaataatggtgatcctcaaatgtgtgttacctacgttgcagagatatacagaaatctaatggcctcagagcttataagaagacctaggtcaaattacatggagactttgcaacaggacatcacagctagcatgcgaggtgttctaattgattggcttgttgaggtttcggacgaatataagcttgtggcagatacactttaccttacagtatatcttattgaccaatttctttctcagaactgtatccaaacgcacaagctgcaacttcttgggataactagtatgctgattgcctcgaaatatgaagagtattctgctcctagtgctgaagaattttgtaacataacggctggtacatatgcaaaggctgaggttctggaaatggagcaacaagtgcttaatgatctgggctttcatttatctgttccaacaacaaacacatttctcaggagattccttagagcagcacaggcttctcgtacagctcatctgaccactttgaattatctggcgagttatcttgccgagttgactttaatcagttacgatttcatgaaatttcttccctcagaggtggcagcatcttcgattttccttgcaaaatggacacttgaccaatctgaccatccttggaaccctactcttgagcactacacgtcttacaaaagcttcgatattagaacttgcgtgcgggctctacaggaactgcagcacaacaccagtaattgccccctcaacgccatccgtgagaagtatgggcagcagaagttcgagtgcgttgccaacctcaggtcaccggagctgctgcggtcgctcttcagttgatgtgctcccctgcactctgctgattcactcgccatttgctgcaacgatcctgacactgtataaaatatttcttcagtttctgttccatttccaaactttcttcagtttgaacatgcattctgtgacttgggtcaccgacaaaagaggcgcgacacactaatatatcaatttgtaactcaaagcatgtttcaccatttttttcataaaacatagaacagaaataaatgcacacactctgcccctacaccatgagtgcctttgaaaaactggactgatagatcatgagattaaccaagtcatt

SEQ ID NO: 15889 - DNA, 1900 bp, Zea Mays
ctctaaaaccccaaccgtcgacgttcactcctcaccccctgcggccctgctcttttgagcctcactcctcagtcttcacgccgccggggcagtgctaagatccaggacacgcgctgtcccgctagcaccacgcctccccttgtcatcgtcctcctcccacgtgctgctgtgggggtgcagacgggagacacatccggacctgattgatttcttcgttttgttctgctggtttacatggctgcaagaaagaaaaagcctttgcttattgcttgccaagcaaccagtgccagaataacaagatctcaggctgctgcaaatagtacaagatctgggctggctccttctgtaccagtacctctgaaaacggagcataaccatgcagcgaaaaaaaagatgaaaagggaagcttcagatgaaaatgcttctgctgatgctggagcttcagctcctctgcctaaaaggcgtacagttctcaagaatgtaactaacataagctgtgctaaaatttccaaaaggtgcactgctgtgactgggctgaagttgggtccctcccagaaggctgggcagagcataaacaagcaatgcacaaacaagatctccatgcttctccctctggctgttggagggagttcacttgtggatgattctaataatgctgaagaaacacaaatggtagaccttttggcacagaaagagaagcagattgttttgcttaaggaggctcagccattacagaatactgaacaaaacaaaggcggtgcttgtgatgaggcatctgttgaggaaagaaatgccatgaatgtacacgaaactgctgccttaaaggctggggtctctaatggtttaaacattgtagatattgacaaaaataatggtgatcctcaaatgtgtgttacctacgttgcagagatatacagaaatctaatggcctcagaggtttcggacgaatataagcttgtggcagatacactttaccttacagtatatcttattgaccaatttctttctcagaactgtatccaaacgcacaagctgcaacttcttgggataactagtatgctgattgcctcgaaatatgaagagtattctgctcctagtgctgaagaattttgtaacataacggctggtacatatgcaaaggctgaggttctggaaatggagcaacaagtgcttaatgatctgggctttcatttatctgttccaacaacaaacacatttctcaggagattccttagagcagcacaggcttctcgtacagctcatctgaccactttgaattatctggcgagttatcttgccgagttgactttaatcagttacgatttcatgaaatttcttccctcagaggtggcagcatcttcgattttccttgcaaaatggacacttgaccaatctgaccatccttggaaccctactcttgagcactacacgtcttacaaaagcttcgatattagaacttgcgtgcgggctctacaggaactgcagcacaacaccagtaattgccccctcaacgccatccgtgagaagtatgggcagcagaagttcgagtgcgttgccaacctcaggtcaccggagctgctgcggtcgctcttcagttgatgtgctcccctgcactctgctgattcactcgccatttgctgcaacgatcctgacactgtataaaatatttcttcagtttctgttccatttccaaactttcttcagtttgaacatgcattctgtgacttgggtcaccgacaaaagaggcgcgacacactaatatatcaatttgtaactcaaagcatgtttcaccatttttttcataaaacatagaacagaaataaatgcacacactctgcccctacaccatgagtgcctttgaaaaactggactgatagatcatgagattaaccaagtcatt

SEQ ID NO: 15890 - DNA, 1708 bp, Zea Mays
ctctaaaaccccaaccgtcgacgttcactcctcaccccctgcggccctgctcttttgagcctcactcctcagtcttcacgccgccggggcagtgctaagatccaggacacgcgctgtcccgctagcaccacgcctccccttgtcatcgtcctcctcccacgtgctgctgtgggggtgcagacgggagacacatccggacctgattgatttcttcgttttgttctgctggtttacatggctgcaagaaagaaaaagcctttgcttattgcttgccaagcaaccagtgccagaataacaagatctcaggctgctgcaaatagtacaagatctgggctggctccttctgtaccagtacctctgaaaacggagcataaccatgcagcgaaaaaaaagatgaaaagggaagcttcagatgaaaatgcttctgctgatgctggagcttcagctcctctgcctaaaaggcgtacagttctcaagaatgtaactaacataagctgtgctaaaatttccaaaaggtgcactgctgtgactgggctgaaggggtctctaatggtttaaacattgtagatattgacaaaaataatggtgatcctcaaatgtgtgttacctacgttgcagagatatacagaaatctaatggcctcagagcttataagaagacctaggtcaaattacatggagactttgcaacaggacatcacagctagcatgcgaggtgttctaattgattggcttgttgaggtttcggacgaatataagcttgtggcagatacactttaccttacagtatatcttattgaccaatttctttctcagaactgtatccaaacgcacaagctgcaacttcttgggataactagtatgctgattgcctcgaaatatgaagagtattctgctcctagtgctgaagaattttgtaacataacggctggtacatatgcaaaggctgaggttctggaaatggagcaacaagtgcttaatgatctgggctttcatttatctgttccaacaacaaacacatttctcaggagattccttagagcagcacaggcttctcgtacagctcatctgaccactttgaattatctggcgagttatcttgccgagttgactttaatcagttacgatttcatgaaatttcttccctcagaggtggcagcatcttcgattttccttgcaaaatggacacttgaccaatctgaccatccttgggtttaaccctactcttgagcactacacgtcttacaaaagcttcgatattagaacttgcgtgcgggctctacaggaactgcagcacaacaccagtaattgccccctcaacgccatccgtgagaagtatgggcagcagaagttcgagtgcgttgccaacctcaggtcaccggagctgctgcggtcgctcttcagttgatgtgctcccctgcactctgctgattcactcgccatttgctgcaacgatcctgacactgtataaaatatttcttcagtttctgttccatttccaaactttcttcagtttgaacatgcattctgtgacttgggtcaccgacaaaagaggcgcgacacactaatatatcaatttgtaactcaaagcatgtttcaccatttttttcataaaacatagaacagaaataaatgcacacactctgcccctacaccatgagtgcctttgaaaaactggactgatagatcatgagattaaccaagtcatt

SEQ ID NO: 15891 - DNA, 1392 bp, Zea Mays
ctctaaaaccccaaccgtcgacgttcactcctcaccccctgcggccctgctcttttgagcctcactcctcagtcttcacgccgccggggcagtgctaagatccaggacacgcgctgtcccgctagcaccacgcctccccttgtcatcgtcctcctcccacgtgctgctgtgggggtgcagacgggagacacatccggacctgattgatttcttcgttttgttctgctggggtctctaatggtttaaacattgtagatattgacaaaaataatggtgatcctcaaatgtgtgttacctacgttgcagagatatacagaaatctaatggcctcagagcttataagaagacctaggtcaaattacatggagactttgcaacaggacatcacagctagcatgcgaggtgttctaattgattggcttgttgaggtttcggacgaatataagcttgtggcagatacactttaccttacagtatatcttattgaccaatttctttctcagaactgtatccaaacgcacaagctgcaacttcttgggataactagtatgctgattgcctcgaaatatgaagagtattctgctcctagtgctgaagaattttgtaacataacggctggtacatatgcaaaggctgaggttctggaaatggagcaacaagtgcttaatgatctgggctttcatttatctgttccaacaacaaacacatttctcaggagattccttagagcagcacaggcttctcgtacagctcatctgaccactttgaattatctggcgagttatcttgccgagttgactttaatcagttacgatttcatgaaatttcttccctcagaggtggcagcatcttcgattttccttgcaaaatggacacttgaccaatctgaccatccttggaaccctactcttgagcactacacgtcttacaaaagcttcgatattagaacttgcgtgcgggctctacaggaactgcagcacaacaccagtaattgccccctcaacgccatccgtgagaagtatgggcagcagaagttcgagtgcgttgccaacctcaggtcaccggagctgctgcggtcgctcttcagttgatgtgctcccctgcactctgctgattcactcgccatttgctgcaacgatcctgacactgtataaaatatttcttcagtttctgttccatttccaaactttcttcagtttgaacatgcattctgtgacttgggtcaccgacaaaagaggcgcgacacactaatatatcaatttgtaactcaaagcatgtttcaccatttttttcataaaacatagaacagaaataaatgcacacactctgcccctacaccatgagtgcctttgaaaaactggactgatagatcatgagattaaccaagtcatt

SEQ ID NO: 15892 - DNA, 2222 bp, Zea Mays
ctctaaaaccccaaccgtcgacgttcactcctcaccccctgcggccctgctcttttgagcctcactcctcagtcttcacgccgccggggcagtgctaagatccaggacacgcgctgtcccgctagcaccacgcctccccttgtcatcgtcctcctcccacgtgctgctgtgggggtgcagacgggagacacatccggacctgattgatttcttcgttttgttctgctggtttacatggctgcaagaaagaaaaagcctttgcttattgcttgccaagcaaccagtgccagaataacaagatctcaggctgctgcaaatagtacaagatctgggctggctccttctgtaccagtacctctgaaaacggagcataaccatgcagcgaaaaaaaagatgaaaagggaagcttcagatgaaaatgcttctgctgatgctggagcttcagctcctctgcctaaaaggcgtacagttctcaagaatgtaactaacataagctgtgctaaaatttccaaaaggtgcactgctgtgactgggctgaagttgggtccctcccagaaggctgggcagagcataaacaagcaatgcacaaacaagatctccatgcttctccctctggctgttggagggagttcacttgtggatgattctaataatgctgaagaaacacaaatggtagaccttttggcacagaaagagaagcagattgttttgcttaaggaggctcagccattacagaatactgaacaaaacaaaggcggtgcttgtgatgaggcatctgttgaggaaagaaatgccatgaatgtacacgaaactgctgccttaaaggctggggtctctaatggtttaaacattgtagatattgacaaaaataatggtgatcctcaaatgtgtgttacctacgttgcagagatatacagaaatctaatggcctcagaggctctcttttatgcttgtcttatgttcagcttataagaagacctaggtcaaattacatggagactttgcaacaggacatcacagctagcatgcgaggtgttctaattgattggcttgttgaggtttcggacgaatataagcttgtggcagatacactttaccttacagtatatcttattgaccaatttctttctcagaactgtatccaaacgcacaagctgcaacttcttgggataactagtatgctgattgcctcgaaatatgaagagtattctgctcctagtgctgaagaattttgtaacataacggctggtacatatgcaaaggctgaggttctggaaatggagcaacaagtgcttaatgatctgggctttcatttatctgttccaacaacaaacacatttctcaggtcaccctcggtggccacacacatgttgatgcatattaattttttttttcacgcaaagttggttcttcattaacattctttttcttgtttccttcaattctgatcaggagattccttagagcagcacaggcttctcgtacagtaagatcagtacccaaaccacattgcaacgagtcctttcagtctatatgtattgtcctcaacactaagttggcaagctacatttccaggctcatctgaccactttgaattatctggcgagttatcttgccgagttgactttaatcagttacgatttcatgaaatttcttccctcagaggtggcagcatcttcgattttccttgcaaaatggacacttgaccaatctgaccatccttgggtttaaccctactcttgagcactacacgtcttacaaaagcttcgatattagaacttgcgtgcgggctctacaggaactgcagcacaacaccagtaattgccccctcaacgccatccgtgagaagtatgggcagcagaagttcgagtgcgttgccaacctcaggtcaccggagctgctgcggtcgctcttcagttgatgtgctcccctgcactctgctgattcactcgccatttgctgcaacgatcctgacactgtataaaatatttcttcagtttctgttccatttccaaactttcttcagtttgaacatgcattctgtgacttgggtcaccgacaaaagaggcgcgacacactaatatatcaatttgtaactcaaagcatgtttcaccatttttttcataaaacatagaacagaaataaatgcacacactctgcccctacaccatgagtgcctttgaaaaactggactgatagatcatgagattaaccaagtcatt

SEQ ID NO: 15893 - DNA, 2005 bp, Zea Mays
ctctaaaaccccaaccgtcgacgttcactcctcaccccctgcggccctgctcttttgagcctcactcctcagtcttcacgccgccggggcagtgctaagatccaggacacgcgctgtcccgctagcaccacgcctccccttgtcatcgtcctcctcccacgtgctgctgtgggggtgcagacgggagacacatccggacctgattgatttcttcgttttgttctgctgtaacaaattcaggtttacatggctgcaagaaagaaaaagcctttgcttattgcttgccaagcaaccagtgccagaataacaagatctcaggctgctgcaaatagtacaagatctgggctggctccttctgtaccagtacctctgaaaacggagcataaccatgcagcgaaaaaaaagatgaaaagggaagcttcagatgaaaatgcttctgctgatgctggagcttcagctcctctgcctaaaaggcgtacagttctcaagaatgtaactaacataagctgtgctaaaatttccaaaaggtgcactgctgtgactgggctgaagttgggtccctcccagaaggctgggcagagcataaacaagcaatgcacaaacaagatctccatgcttctccctctggctgttggagggagttcacttgtggatgattctaataatgctgaagaaacacaaatggtagaccttttggcacagaaagagaagcagattgttttgcttaaggaggctcagccattacagaatactgaacaaaacaaaggcggtgcttgtgatgaggcatctgttgaggaaagaaatgccatgaatgtacacgaaactgctgccttaaaggctggggtctctaatggtttaaacattgtagatattgacaaaaataatggtgatcctcaaatgtgtgttacctacgttgcagagatatacagaaatctaatggcctcagagcttataagaagacctaggtcaaattacatggagactttgcaacaggacatcacagctagcatgcgaggtgttctaattgattggcttgttgaggtttcggacgaatataagcttgtggcagatacactttaccttacagtatatcttattgaccaatttctttctcagaactgtatccaaacgcacaagctgcaacttcttgggataactagtatgctgattgcctcgaaatatgaagagtattctgctcctagtgctgaagaattttgtaacataacggctggtacatatgcaaaggctgaggttctggaaatggagcaacaagtgcttaatgatctgggctttcatttatctgttccaacaacaaacacatttctcaggagattccttagagcagcacaggcttctcgtacagctcatctgaccactttgaattatctggcgagttatcttgccgagttgactttaatcagttacgatttcatgaaatttcttccctcagaggtggcagcatcttcgattttccttgcaaaatggacacttgaccaatctgaccatccttggaaccctactcttgagcactacacgtcttacaaaagcttcgatattagaacttgcgtgcgggctctacaggaactgcagcacaacaccagtaattgccccctcaacgccatccgtgagaagtatgggcagcagaagttcgagtgcgttgccaacctcaggtcaccggagctgctgcggtcgctcttcagttgatgtgctcccctgcactctgctgattcactcgccatttgctgcaacgatcctgacactgtataaaatatttcttcagtttctgttccatttccaaactttcttcagtttgaacatgcattctgtgacttgggtcaccgacaaaagaggcgcgacacactaatatatcaatttgtaactcaaagcatgtttcaccatttttttcataaaacatagaacagaaataaatgcacacactctgcccctacaccatgagtgcctttgaaaaactggactgatagatcatgagattaaccaagtcatt

SEQ ID NO: 15894 - DNA, 1353 bp, Zea Mays
ctctaaaaccccaaccgtcgacgttcactcctcaccccctgcggccctgctcttttgagcctcactcctcagtcttcacgccgccggggcagtgctaagatccaggacacgcgctgtcccgctagcaccacgcctccccttgtcatcgtcctcctcccacgtgctgctgtgggggtgcagacgggagacacatccggacctgattgatttcttcgttttgttctgctggggtctctaatggtttaaacattgtagatattgacaaaaataatggtgatcctcaaatgtgtgttacctacgttgcagagatatacagaaatctaatggcctcagagcttataagaagacctaggtcaaattacatggagactttgcaacaggacatcacagctagcatgcgaggtgttctaattgattggcttgttgaggtttcggacgaatataagcttgtggcagatacactttaccttacagtatatcttattgaccaatttctttctcagaactgtatccaaacgcacaagctgcaacttcttgggataactagtatgctgattgcctcgaaatatgaagagtattctgctcctagtgctgaagaattttgtaacataacggctggtacatatgcaaaggctgaggttctggaaatggagcaacaagtgcttaatgatctgggctttcatttatctgttccaacaacaaacacatttctcaggagattccttagagcagcacaggcttctcgtacagtaagatcagtacccaaaccacattgcaacgagtcctttcagtctatataggtggcagcatcttcgattttccttgcaaaatggacacttgaccaatctgaccatccttggaaccctactcttgagcactacacgtcttacaaaagcttcgatattagaacttgcgtgcgggctctacaggaactgcagcacaacaccagtaattgccccctcaacgccatccgtgagaagtatgggcagcagaagttcgagtgcgttgccaacctcaggtcaccggagctgctgcggtcgctcttcagttgatgtgctcccctgcactctgctgattcactcgccatttgctgcaacgatcctgacactgtataaaatatttcttcagtttctgttccatttccaaactttcttcagtttgaacatgcattctgtgacttgggtcaccgacaaaagaggcgcgacacactaatatatcaatttgtaactcaaagcatgtttcaccatttttttcataaaacatagaacagaaataaatgcacacactctgcccctacaccatgagtgcctttgaaaaactggactgatagatcatgagattaaccaagtcatt

SEQ ID NO: 15895 - DNA, 1861 bp, Zea Mays
ctctaaaaccccaaccgtcgacgttcactcctcaccccctgcggccctgctcttttgagcctcactcctcagtcttcacgccgccggggcagtgctaagatccaggacacgcgctgtcccgctagcaccacgcctccccttgtcatcgtcctcctcccacgtgctgctgtgggggtgcagacgggagacacatccggacctgattgatttcttcgttttgttctgctggtttacatggctgcaagaaagaaaaagcctttgcttattgcttgccaagcaaccagtgccagaataacaagatctcaggctgctgcaaatagtacaagatctgggctggctccttctgtaccagtacctctgaaaacggagcataaccatgcagcgaaaaaaaagatgaaaagggaagcttcagatgaaaatgcttctgctgatgctggagcttcagctcctctgcctaaaaggcgtacagttctcaagaatgtaactaacataagctgtgctaaaatttccaaaaggtgcactgctgtgactgggctgaagttgggtccctcccagaaggctgggcagagcataaacaagcaatgcacaaacaagatctccatgcttctccctctggctgttggagggagttcacttgtggatgattctaataatgctgaagaaacacaaatggtagaccttttggcacagaaagagaagcagattgttttgcttaaggaggctcagccattacagaatactgaacaaaacaaaggcggtgcttgtgatgaggcatctgttgaggaaagaaatgccatgaatgtacacgaaactgctgccttaaaggctggggtctctaatggtttaaacattgtagatattgacaaaaataatggtgatcctcaaatgtgtgttacctacgttgcagagatatacagaaatctaatggcctcagaggtttcggacgaatataagcttgtggcagatacactttaccttacagtatatcttattgaccaatttctttctcagaactgtatccaaacgcacaagctgcaacttcttgggataactagtatgctgattgcctcgaaatatgaagagtattctgctcctagtgctgaagaattttgtaacataacggctggtacatatgcaaaggctgaggttctggaaatggagcaacaagtgcttaatgatctgggctttcatttatctgttccaacaacaaacacatttctcaggagattccttagagcagcacaggcttctcgtacagtaagatcagtacccaaaccacattgcaacgagtcctttcagtctatataggtggcagcatcttcgattttccttgcaaaatggacacttgaccaatctgaccatccttggaaccctactcttgagcactacacgtcttacaaaagcttcgatattagaacttgcgtgcgggctctacaggaactgcagcacaacaccagtaattgccccctcaacgccatccgtgagaagtatgggcagcagaagttcgagtgcgttgccaacctcaggtcaccggagctgctgcggtcgctcttcagttgatgtgctcccctgcactctgctgattcactcgccatttgctgcaacgatcctgacactgtataaaatatttcttcagtttctgttccatttccaaactttcttcagtttgaacatgcattctgtgacttgggtcaccgacaaaagaggcgcgacacactaatatatcaatttgtaactcaaagcatgtttcaccatttttttcataaaacatagaacagaaataaatgcacacactctgcccctacaccatgagtgcctttgaaaaactggactgatagatcatgagattaaccaagtcatt

SEQ ID NO: 15896 - DNA, 2086 bp, Zea Mays
ctctaaaaccccaaccgtcgacgttcactcctcaccccctgcggccctgctcttttgagcctcactcctcagtcttcacgccgccggggcagtgctaagatccaggacacgcgctgtcccgctagcaccacgcctccccttgtcatcgtcctcctcccacgtgctgctgtgggggtgcagacgggagacacatccggacctgattgatttcttcgttttgttctgctggtttacatggctgcaagaaagaaaaagcctttgcttattgcttgccaagcaaccagtgccagaataacaagatctcaggctgctgcaaatagtacaagatctgggctggctccttctgtaccagtacctctgaaaacggagcataaccatgcagcgaaaaaaaagatgaaaagggaagcttcagatgaaaatgcttctgctgatgctggagcttcagctcctctgcctaaaaggcgtacagttctcaagaatgtaactaacataagctgtgctaaaatttccaaaaggtgcactgctgtgactgggctgaagttgggtccctcccagaaggctgggcagagcataaacaagcaatgcacaaacaagatctccatgcttctccctctggctgttggagggagttcacttgtggatgattctaataatgctgaagaaacacaaatggtagaccttttggcacagaaagagaagcagattgttttgcttaaggaggctcagccattacagaatactgaacaaaacaaaggcggtgcttgtgatgaggcatctgttgaggaaagaaatgccatgaatgtacacgaaactgctgccttaaaggctggggtctctaatggtttaaacattgtagatattgacaaaaataatggtgatcctcaaatgtgtgttacctacgttgcagagatatacagaaatctaatggcctcagagcttataagaagacctaggtcaaattacatggagactttgcaacaggacatcacagctagcatgcgaggtgttctaattgattggcttgttgaggtttcggacgaatataagcttgtggcagatacactttaccttacagtatatcttattgaccaatttctttctcagaactgtatccaaacgcacaagctgcaacttcttgggataactagtatgctgattgcctcgaaatatgaagagtattctgctcctagtgctgaagaattttgtaacataacggctggtacatatgcaaaggctgaggttctggaaatggagcaacaagtgcttaatgatctgggctttcatttatctgttccaacaacaaacacatttctcaggagattccttagagcagcacaggcttctcgtacagtaagatcagtacccaaaccacattgcaacgagtcctttcagtctatatgtattgtcctcaacactaagttggcaagctacatttccaggctcatctgaccactttgaattatctggcgagttatcttgccgagttgactttaatcagttacgatttcatgaaatttcttccctcagaggtggcagcatcttcgattttccttgcaaaatggacacttgaccaatctgaccatccttgggtttaaccctactcttgagcactacacgtcttacaaaagcttcgatattagaacttgcgtgcgggctctacaggaactgcagcacaacaccagtaattgccccctcaacgccatccgtgagaagtatgggcagcagaagttcgagtgcgttgccaacctcaggtcaccggagctgctgcggtcgctcttcagttgatgtgctcccctgcactctgctgattcactcgccatttgctgcaacgatcctgacactgtataaaatatttcttcagtttctgttccatttccaaactttcttcagtttgaacatgcattctgtgacttgggtcaccgacaaaagaggcgcgacacactaatatatcaatttgtaactcaaagcatgtttcaccatttttttcataaaacatagaacagaaataaatgcacacactctgcccctacaccatgagtgcctttgaaaaactggactgatagatcatgagattaaccaagtcatt

SEQ ID NO: 15897 - DNA, 1299 bp, Zea Mays
ctctaaaaccccaaccgtcgacgttcactcctcaccccctgcggccctgctcttttgagcctcactcctcagtcttcacgccgccggggcagtgctaagatccaggacacgcgctgtcccgctagcaccacgcctccccttgtcatcgtcctcctcccacgtgctgctgtgggggtgcagacgggagacacatccggacctgattgatttcttcgttttgttctgctggggtctctaatggtttaaacattgtagatattgacaaaaataatggtgatcctcaaatgtgtgttacctacgttgcagagatatacagaaatctaatggcctcagaggtttcggacgaatataagcttgtggcagatacactttaccttacagtatatcttattgaccaatttctttctcagaactgtatccaaacgcacaagctgcaacttcttgggataactagtatgctgattgcctcgaaatatgaagagtattctgctcctagtgctgaagaattttgtaacataacggctggtacatatgcaaaggctgaggttctggaaatggagcaacaagtgcttaatgatctgggctttcatttatctgttccaacaacaaacacatttctcaggagattccttagagcagcacaggcttctcgtacagctcatctgaccactttgaattatctggcgagttatcttgccgagttgactttaatcagttacgatttcatgaaatttcttccctcagaggtggcagcatcttcgattttccttgcaaaatggacacttgaccaatctgaccatccttggaaccctactcttgagcactacacgtcttacaaaagcttcgatattagaacttgcgtgcgggctctacaggaactgcagcacaacaccagtaattgccccctcaacgccatccgtgagaagtatgggcagcagaagttcgagtgcgttgccaacctcaggtcaccggagctgctgcggtcgctcttcagttgatgtgctcccctgcactctgctgattcactcgccatttgctgcaacgatcctgacactgtataaaatatttcttcagtttctgttccatttccaaactttcttcagtttgaacatgcattctgtgacttgggtcaccgacaaaagaggcgcgacacactaatatatcaatttgtaactcaaagcatgtttcaccatttttttcataaaacatagaacagaaataaatgcacacactctgcccctacaccatgagtgcctttgaaaaactggactgatagatcatgagattaaccaagtcatt

SEQ ID NO: 15898 - DNA, 1404 bp, Zea Mays
ctctaaaaccccaaccgtcgacgttcactcctcaccccctgcggccctgctcttttgagcctcactcctcagtcttcacgccgccggggcagtgctaagatccaggacacgcgctgtcccgctagcaccacgcctccccttgtcatcgtcctcctcccacgtgctgctgtgggggtgcagacgggagacacatccggacctgattgatttcttcgttttgttctgctggggtctctaatggtttaaacattgtagatattgacaaaaataatggtgatcctcaaatgtgtgttacctacgttgcagagatatacagaaatctaatggcctcagagcttataagaagacctaggtcaaattacatggagactttgcaacaggacatcacagctagcatgcgaggtgttctaattgattggcttgttgaggtttcggacgaatataagcttgtggcagatacactttaccttacagtatatcttattgaccaatttctttctcagaactgtatccaaacgcacaagctgcaacttcttgggataactagtatgctgattgcctcgaaatatgaagagtattctgctcctagtgctgaagaattttgtaacataacggctggtacatatgcaaaggctgaggttctggaaatggagcaacaagtgcttaatgatctgggctttcatttatctgttccaacaacaaacacatttctcaggagattccttagagcagcacaggcttctcgtacactacatttccaggctcatctgaccactttgaattatctggcgagttatcttgccgagttgactttaatcagttacgatttcatgaaatttcttccctcagaggtggcagcatcttcgattttccttgcaaaatggacacttgaccaatctgaccatccttggaaccctactcttgagcactacacgtcttacaaaagcttcgatattagaacttgcgtgcgggctctacaggaactgcagcacaacaccagtaattgccccctcaacgccatccgtgagaagtatgggcagcagaagttcgagtgcgttgccaacctcaggtcaccggagctgctgcggtcgctcttcagttgatgtgctcccctgcactctgctgattcactcgccatttgctgcaacgatcctgacactgtataaaatatttcttcagtttctgttccatttccaaactttcttcagtttgaacatgcattctgtgacttgggtcaccgacaaaagaggcgcgacacactaatatatcaatttgtaactcaaagcatgtttcaccatttttttcataaaacatagaacagaaataaatgcacacactctgcccctacaccatgagtgcctttgaaaaactggactgatagatcatgagattaaccaagtcatt

SEQ ID NO: 15899 - DNA, 2130 bp, Zea Mays
ctctaaaaccccaaccgtcgacgttcactcctcaccccctgcggccctgctcttttgagcctcactcctcagtcttcacgccgccggggcagtgctaagatccaggacacgcgctgtcccgctagcaccacgcctccccttgtcatcgtcctcctcccacgtgctgctgtgggggtgcagacgggagacacatccggacctgattgatttcttcgttttgttctgctggtttacatggctgcaagaaagaaaaagcctttgcttattgcttgccaagcaaccagtgccagaataacaagatctcaggctgctgcaaatagtacaagatctgggctggctccttctgtaccagtacctctgaaaacggagcataaccatgcagcgaaaaaaaagatgaaaagggaagcttcagatgaaaatgcttctgctgatgctggagcttcagctcctctgcctaaaaggcgtacagttctcaagaatgtaactaacataagctgtgctaaaatttccaaaaggtgcactgctgtgactgggctgaagttgggtccctcccagaaggctgggcagagcataaacaagcaatgcacaaacaagatctccatgcttctccctctggctgttggagggagttcacttgtggatgattctaataatgctgaagaaacacaaatggtagaccttttggcacagaaagagaagcagattgttttgcttaaggaggctcagccattacagaatactgaacaaaacaaaggcggtgcttgtgatgaggcatctgttgaggaaagaaatgccatgaatgtacacgaaactgctgccttaaaggctggggtctctaatggtttaaacattgtagatattgacaaaaataatggtgatcctcaaatgtgtgttacctacgttgcagagatatacagaaatctaatggcctcagagtaacatttcacaagcttgtgatctaggggacaagcgttatgctcagagtacttgtattttatctgtgtgctgcattttgatatattattcttaattgaatgcattcaggctctcttttatgcttgtcttatgttcagcttataagaagacctaggtcaaattacatggagactttgcaacaggacatcacagctagcatgcgaggtgttctaattgattggcttgttgaggtttcggacgaatataagcttgtggcagatacactttaccttacagtatatcttattgaccaatttctttctcagaactgtatccaaacgcacaagctgcaacttcttgggataactagtatgctgattgcctcgaaatatgaagagtattctgctcctagtgctgaagaattttgtaacataacggctggtacatatgcaaaggctgaggttctggaaatggagcaacaagtgcttaatgatctgggctttcatttatctgttccaacaacaaacacatttctcaggagattccttagagcagcacaggcttctcgtacagctcatctgaccactttgaattatctggcgagttatcttgccgagttgactttaatcagttacgatttcatgaaatttcttccctcagaggtggcagcatcttcgattttccttgcaaaatggacacttgaccaatctgaccatccttggaaccctactcttgagcactacacgtcttacaaaagcttcgatattagaacttgcgtgcgggctctacaggaactgcagcacaacaccagtaattgccccctcaacgccatccgtgagaagtatgggcagcagaagttcgagtgcgttgccaacctcaggtcaccggagctgctgcggtcgctcttcagttgatgtgctcccctgcactctgctgattcactcgccatttgctgcaacgatcctgacactgtataaaatatttcttcagtttctgttccatttccaaactttcttcagtttgaacatgcattctgtgacttgggtcaccgacaaaagaggcgcgacacactaatatatcaatttgtaactcaaagcatgtttcaccatttttttcataaaacatagaacagaaataaatgcacacactctgcccctacaccatgagtgcctttgaaaaactggactgatagatcatgagattaaccaagtcatt

SEQ ID NO: 15900 - DNA, 1963 bp, Zea Mays
ctaaaacgcctctaaaaccccaaccgtcgacgttcactcctcaccccctgcggccctgctcttttgagcctcactcctcagtcttcacgccgccggggcagtgctaagatccaggacacgcgctgtcccgctagcaccacgcctccccttgtcatcgtcctcctcccacgtgctgctgtgggggtgcagacgggagacacatccggacctgattgatttcttcgttttgttctgctggtttacatggctgcaagaaagaaaaagcctttgcttattgcttgccaagcaaccagtgccagaataacaagatctcaggctgctgcaaatagtacaagatctgggctggctccttctgtaccagtacctctgaaaacggagcataaccatgcagcgaaaaaaaagatgaaaagggaagcttcagatgaaaatgcttctgctgatgctggagcttcagctcctctgcctaaaaggcgtacagttctcaagaatgtaactaacataagctgtgctaaaatttccaaaaggtgcactgctgtgactgggctgaagttgggtccctcccagaaggctgggcagagcataaacaagcaatgcacaaacaagatctccatgcttctccctctggctgttggagggagttcacttgtggatgattctaataatgctgaagaaacacaaatggtagaccttttggcacagaaagagaagcagattgttttgcttaaggaggctcagccattacagaatactgaacaaaacaaaggcggtgcttgtgatgaggcatctgttgaggaaagaaatgccatgaatgtacacgaaactgctgccttaaaggctggggtctctaatggtttaaacattgtagatattgacaaaaataatggtgatcctcaaatgtgtgttacctacgttgcagagatatacagaaatctaatggcctcagagcttataagaagacctaggtcaaattacatggagactttgcaacaggacatcacagctagcatgcgaggtgttctaattgattggcttgttgaggtttcggacgaatataagcttgtggcagatacactttaccttacagtatatcttattgaccaatttctttctcagaactgtatccaaacgcacaagctgcaacttcttgggataactagtatgctgattgcctcgaaatatgaagagtattctgctcctagtgctgaagaattttgtaacataacggctggtacatatgcaaaggctgaggttctggaaatggagcaacaagtgcttaatgatctgggctttcatttatctgttccaacaacaaacacatttctcaggagattccttagagcagcacaggcttctcgtacagtaagatcagtacccaaaccacattgcaacgagtcctttcagtctatataggtggcagcatcttcgattttccttgcaaaatggacacttgaccaatctgaccatccttggaaccctactcttgagcactacacgtcttacaaaagcttcgatattagaacttgcgtgcgggctctacaggaactgcagcacaacaccagtaattgccccctcaacgccatccgtgagaagtatgggcagcagaagttcgagtgcgttgccaacctcaggtcaccggagctgctgcggtcgctcttcagttgatgtgctcccctgcactctgctgattcactcgccatttgctgcaacgatcctgacactgtataaaatatttcttcagtttctgttccatttccaaactttcttcagtttgaacatgcattctgtgacttgggtcaccgacaaaagaggcgcgacacactaatatatcaatttgtaactcaaagcatgtttcaccatttttttcataaaacatagaacagaaataaatgcacacactctgcccctacaccatgagtgcctttgaaaaactggactgatagatcatgagattaaccaagtcatt

SEQ ID NO: 15901 - DNA, 609 bp, Zea Mays
cctctttggcataggcttgtcgagctaggttcttgaccagagggtgcagtctctggaacgcgaactcgatgccgccatttctgcagcagctcgagctcgtacagataaacgacaggccgaagctgcgcaacgagctgcagagttacgcacacaggaggtcaccaaggaactggagaacactgcgagagtgtttcagctgcacatggaggagttgcggctgaagcaagaggagattgcgaagaaagatagcgatatcaaggtgttggaagcgataatacgaaccctcggtagcaaagatgatgatggatccagcgaataattgtcatgaacagggagcgaggcttttatgttcaaatatctcacggcgtgtttatgattatgtatttccttttggggtttaatccctttgttactcagatggatgtaacttgtttcgacaagattgagcgtgtccgcactcatactactataaatttgtattctaaaacaaatattttatcatcgttagcaagattatctactatataccataatcctctgtattcatatgtactctatatctcaccactataccaaatatcatatattatatatttttttttcacttca

SEQ ID NO: 15902 - DNA, 1200 bp, Zea Mays
actagcaaataacaatataacatgaaagtatgccatgtttgccggcacaagcgccagcatgcaacgcacgctttgaaagttccacaactcaaactcaacaaaaggactcgttccattatttagacatcagacacctatcatgttaacagaaaacactaccgaatacatatggcctagaatccacacggcctcgcatggtggtggtggacacaaattagctcctcttgttggcgtagctgtcaggctcatcgtccttgaagagatcatccatgatttcatcattcttgttaccgtcaccaggtgtgccggcagagaacccatcagcgccactggaaccacccattgcgccaaagctaccagcagggttttcaccaaaaccactgtcagcaaagttactgctgccaaagctgtcgctacctccagcagcaaaactgccttcagccccacctgcaactccataatcaccaccaccaccatagccaccaccagccctgtcgccgtagttgccaccatatccaccgctgccgccaccatagtcaccactgccgccgccgccatagccaccgctaccaccaccatagccgccaccatagccaccgccaccatagccaccaccaccaccaccatagccgccaccaccataaccaccgctgctgcggaagccacctgtcctctcgttagcatgattaacccgtatgttccgtccatccagagtctagtacaagcaagaaagagtcaggtgtaggcatagttacatgtttcgagtgcaacctaccttaatatcaacattaatgttcagaagaaataataaacagaacaataaaaagttaaaatttaaatatcaaatcaataaaagaaatctataaaggagtgttagaaaaatattaaagcgtaatcataacggaacagtttcatttataactaaacagatgtgatctctaagtttgtcccaagttagctatttcaagcttgacaaagtttgtcataatttacatgaccaaatagatataatatgaaaatgttacatgaaaaaattaattgtatttatctggtaatatgagtctcagaattttttgtacaaacttactcaaactcaagatagtctgacttagaaaaaaattagaatgtcaagtttcttgggacaggggtagtaactcattagtgctgcccaagatacaaattacaactgactggaattca

SEQ ID NO: 15903 - DNA, 2094 bp, Zea Mays
gttgggccaagcttgggcgcttgcaccatttggaccaggcacatgattgttaggcaaccgaaaactgttgtgctgcatgagtggacctggctagtggatgcatttattctttgggacacttatggttatccaattgatttgactgaggtcatggcaatcgactatgggctaactgttgataagaaggggtttaatgcttctatggaagaagcgaggcaaaaagctagaaatgctcgtaacaagtctggagggaactctattgctatggatgcgaatgctacagcgcagttgcgcaaactggggcttgccagcacggacgatagcccaaagtttctgtggcccaaggaacatgaaagcgtggtgaaggctatctatactggctcagaatacattactacagctactggtgatggggactttggtcttgtgctggaaagtacaagtttctatgctgaacaaggaggccagatatttgacactgggagcattgaggggtcatttggaactttcaatgtgaacaacgtccaagtgtttgctggctatgttctacatattggctcatttacaaaaggttcgaaggttttgtctcttggagatagtgtgatatgcaaggttgattacaaccggcgcacactgattgctccaaatcatacgtgtacccacatgttgaactttgctctaagggaagtacttggtgatcatgttgaccagaagggttcaattgttctaccagagaagctaagatttgatttctctcatggaaaacctgtccagcctgaagatctgaggaaaatcgagttcatagtgaaccagcaaataaaggacgagctgggtgtgtatgcacttgaaataaaactagaggatgcgaagcgcataaatggtcttcgtgctgtgtttggtgaaatctaccctgatccagtaagagttgtatcagttggtcgcaaagttgaagatctgcttgcagatcctgatagcaaagagtggctatccatatcgactgaactatgtggaggtacacatatcacaaacacaagagatgctaaagcatttgcactcttatctgaggagggtattgcaaaaggagttaggaggataacagccgtgactgctggatgtgccacccaggctatggagttggcgtcatctatcgattctgatatcaataaagcatctcagttggagggagctttgttggaaaagaaaattgcttccatcaagagtgggctggatgcagctgctatccctgctgcgagaaaagctgatttgagaggcaaggtttcaaagttagaggacgaacttaggaaggcaaagaagaaaatgggggagcaaaatatacaaaaggctgtgaagtccgcaatggatgctgcagaagctgctctttcaggaaataaaccgttttgtgttactcatgtggatgtgggtcttgataccacggctgtccgtgaggcggttatcaaagtcatggaccagaagggtttgcctataatgttattcagcaccgatgaggcatcaaacaaagccgttatctatgctggtgtgcctcccaatgctcctagcggcttcaaggtgttggactggctaacaccttcaattgcgccactcaagggaagaggcggtggcggcaagaacggcgtcgcccagggccaggggagtgacgcttctcagctcaaggaagcaatggcacttgcgaacagcattgcttcaatgaagctctgctgattggtggtagtaactggtgcactgcccatggaactcatgcgtggctgctgctggattactctttgattttagctttctatttacccattatacttaaacagaagttcaatggtgcttgcagtttcatttatacttaccatacaattggaagcacaggacatgtaacagtataaagcttgttgtgtgcccgattgaacgaaaggttctatgcatatacgattgggagtcactttgtaggcgtttaggagtcgaatcatttccttccctgctaaggctattttcagatcctctatccaattccctatcttactctattttaaatttcactctgtaaatagtgttatttattatttatagtgtcctctatcttaccat

SEQ ID NO: 15904 - DNA, 2246 bp, Zea Mays
gcaaggataagttttgtgctcattattcaattggtaaagttactatctttattgtgaagcttgtaaatgtttttgtccaactgatgggtgatgtatttcccgagttaaaagacaacgaaaagaagatcaaatgtattattagagatgaagaagaaagctttgagaacactctagcaaagggttatgaaaaatttaagaaagctgcagacgctgttaaggataatggtggaactatacttagtggacaggatgcatttattctttgggacacttatggttatccaattgatttgactgaggtcatggcaatcgactatgggctaactgttgataagaaggggtttaatgcttctatggaagaagcgaggcaaaaagctagaaatgctcgtaacaagtctggagggaactctattgctatggatgcgaatgctacagcgcagttgcgcaaactggggcttgccagcacggacgatagcccaaagtttctgtggcccaaggaacatgaaagcgtggtgaaggctatctatactggctcagaatacattactacagctactggtgatggggactttggtcttgtgctggaaagtacaagtttctatgctgaacaaggaggccagatatttgacactgggagcattgaggggtcatttggaactttcaatgtgaacaacgtccaagtgtttgctggctatgttctacatattggctcatttacaaaaggttcgaaggttttgtctcttggagatagtgtgatatgcaaggttgattacaaccggcgcacactgattgctccaaatcatacgtgtacccacatgttgaactttgctctaagggaagtacttggtgatcatgttgaccagaagggttcaattgttctaccagagaagctaagatttgatttctctcatggaaaacctgtccagcctgaagatctgaggaaaatcgagttcatagtgaaccagcaaataaaggacgagctgggtgtgtatgcacttgaaataaaactagaggatgcgaagcgcataaatggtcttcgtgctgtgtttggtgaaatctaccctgatccagtaagagttgtatcagttggtcgcaaagttgaagatctgcttgcagatcctgatagcaaagagtggctatccatatcgactgaactatgtggaggtacacatatcacaaacacaagagatgctaaagcatttgcactcttatctgaggagggtattgcaaaaggagttaggaggataacagccgtgactgctggatgtgccacccaggctatggagttggcgtcatctatcgattctgatatcaataaagcatctcagttggagggagctttgttggaaaagaaaattgcttccatcaagagtgggctggatgcagctgctatccctgctgcgagaaaagctgatttgagaggcaaggtttcaaagttagaggacgaacttaggaaggcaaagaagaaaatgggggagcaaaatatacaaaaggctgtgaagtccgcaatggatgctgcagaagctgctctttcaggaaataaaccgttttgtgttactcatgtggatgtgggtcttgataccacggctgtccgtgaggcggttatcaaagtcatggaccagaagggtttgcctataatgttattcagcaccgatgaggcatcaaacaaagccgttatctatgctggtgtgcctcccaatgctcctagcggcttcaaggtgttggactggctaacaccttcaattgcgccactcaagggaagaggcggtggcggcaagaacggcgtcgcccagggccaggggagtgacgcttctcagctcaaggaagcaatggcacttgcgaacagcattgcttcaatgaagctctgctgattggtggtagtaactggtgcactgcccatggaactcatgcgtggctgctgctggattactctttgattttagctttctatttacccattatacttaaacagaagttcaatggtgcttgcagtttcatttatacttaccatacaattggaagcacaggacatgtaacagtataaagcttgttgtgtgcccgattgaacgaaaggttctatgcatatacgattgggagtcactttgtaggcgtttaggagtcgaatcatttccttccctgctaaggctattttcagatcctctatccaattccctatcttactctattttaaatttcactctgtaaatagtgttatttattatttatagtgtcctctatcttaccat

SEQ ID NO: 15905 - DNA, 3244 bp, Zea Mays
gtttttatttgtttttctttttctttccttctttggctattttttgtgttatttttctgctatattaataaatgtgtactcgcttgtgccatttgtttgagaaattacaatggaactacaagtatatatctctgccaattttgtctcctttgcttttcatctatgcatacaaggttcgctagatgtatgggagaagattaaatcacaaggaatactaaaatagtgacaattgatggttttcattacataggacatgtgaaatactattataagaacatctgcgtataaataattatcttttagattttttgtcttgttagcatgacctctctcaaacattgtctctgcagaggactacaatgttgattataaattatgtgttgtttttcttactgtaatcattgtaggctaacattttaacgaataatttatattccgttgcaacgcacgggcactcacctagtgaattttaaatgcttcaacatcaaatcacacgctcgtgtcgggccacgaccgaccggcccgtttggacattggacatgtgaagttctgggcgttgcctgaaaggggctgaagtttgtaattgaaaagatttctcgtcgttgtcagacgaagcctagatgggtggatgctgaccgtgccgaccctcccacgcgcgtgccgcctgcttcgtctcttcactcgtctcgaagctagggttttgcccgccgccaccatcctagtttccttctcgtcatcgttctcatcttccccagccgccgccccgcctcagatggatccgtcgccggcgtggccgtcccggcggatccgccaggagttcttaaccttcttcgagtccaaggcacatacgaggtggccgtcgagtcccgtggtccccgtcgacgaccccacgctgctgttcgccaacgctggaatgaaccagttcaagccggtcttcctcggcacagcggcgccggactcgccgctcggccgcctgcaccgtgcctgtaacacccaaaagtgcatccgcgccggcgggaagcacaacgacctcgacgacgtggggaatgacacctaccaccataccttcttcgagatgcttgggaactggtctttcggggactatttcaaggaggaggccatcagatgggcctgggagcttctcacccaggtatataaattgcccaccgatagaatttatgccacatactttggtggtgatgtgaaatctggtcttggtgctgatgatgaatcgaaggacatttggttgaaatatctaccgaaagaaaaggttctgccttttggctgcaaggacaacttttgggagatgggtgacactggtccttgtggaccatgtactgaaattcattttgaccgtattggcaaccgtgatgctgcgtccttggttaacaatgatgatccaacttgtattgagatatggaaccttgtattcattcagttcaatagggaggcagatggcacattgagacctttgccagcaaaacatgtggacactgggctgggctttgagcgtttaacttctattcttcagaataaaatgagcaattatgatacagatatattcatgccaatatttgatgccatccaccaattggctggcgatggaattcagccatactctggtaaattaggttctgatgatattggcaaagttgatatggcttacagagtagtagctgaccacataagaaccctttctttcgctattgctgatggttctcaacctggtaatgagggaagagagtatgttctgaggcgcatacttaggcgagctgttcactttggtcatcagaaattgaaggcaaagcaaagtttttttagctcgcttgtaaatgtttttgtccaactgatgggtgatgtatttcccgagttaaaagacaacgaaaagaagatcaaatgtattattagagatgaagaagaaagctttgagaacactctagcaaagggttatgaaaaatttaagaaagctgcagacgctgttaaggataatggtggaactatacttagtggacaggatgcatttattctttgggacacttatggttatccaattgatttgactgaggtcatggcaatcgactatgggctaactgttgataagaaggggtttaatgcttctatggaagaagcgaggcaaaaagctagaaatgctcgtaacaagtctggagggaactctattgctatggatgcgaatgctacagcgcagttgcgcaaactggggcttgccagcacggacgatagcccaaagtttctgtggcccaaggaacatgaaagcgtggtgaaggctatctatactggctcagaatacattactacagctactggtgatggggactttggtcttgtgctggaaagtacaagtttctatgctgaacaaggaggccagatatttgacactgggagcattgaggggtcatttggaactttcaatgtgaacaacgtccaagtgtttgctggctatgttctacatattggctcatttacaaaaggttcgaaggttttgtctcttggagatagtgtgatatgcaaggttgattacaaccggcgcacactgattgctccaaatcatacgtgtacccacatgttgaactttgctctaagggaagtacttggtgatcatgttgaccagaagggttcaattgttctaccagagaagctaagatttgatttctctcatggaaaacctgtccagcctgaagatctgaggaaaatcgagttcatagtgaaccagcaaataaaggacgagctgggtgtgtatgcacttgaaataaaactagaggatgcgaagcgcataaatggtcttcgtgctgtgtttggtgaaatctaccctgatccagtaagagttgtatcagttggtcgcaaagttgaagatctgcttgcagatcctgatagcaaagagtggctatccatatcgactgaactatgtggaggtacacatatcacaaacacaagagatgctaaagcatttgcactcttatctgaggagggtattgcaaaaggagttaggaggataacagccgtgactgctggatgtgccacccaggctatggagttggcgtcatctatcgattctgatatcaataaagcatctcagttggagggagctttgttggaaaagaaaattgcttccatcaagagtgggctggatgcagctgctatccctgctgcgagaaaagctgatttgagaggcaaggtttcaaagttagagactgcgcgtgcattgaccaagaagcagccgctgttt

SEQ ID NO: 15906 - DNA, 2106 bp, Zea Mays
ctgttctcggatcgtttcctctctctttaatacaaatatatgcatactcaaggaaaacaatgctcctttgtcatttccacacttcttcgtcacttcatgtggatagccacctgttcttctcaactctgggactatgcggcaatagtacatagacagcaaggaggggaagtggatgctggaactgagacaaacatcaatcttaatcatcagatatattaccatgttttgggatctgatcagtcagaggatatattgtgctggaaagatcccgaacacccaaagtattcctttggtgcctcagtcactgaagatggaaagtacatcatattgggcatctatgaaggttgtgaccctgtcaacaaattatactattgtgaaatttcttctcttcctcaaggaatagagggctttagagggacacaggatttgcttccgtttgtcaagcttattgacaattttgatgctcaatatcaagttgtggccaatgatggtgatgaatttacatttttgaccaataaaagtgcccctaagaataagctggtaagggtaaatatcaaaaatccagagctgtggactgatgttctctcagagcatgaaaaagatgtgctcgaatcagccgacgccgttaacaataaccaacttttggtgaattatatgtcagatgttaagcatattctgcagataagagaccttagaactggaaactttattcatcagttgcctttggagatcggttctgtttcagagatctcgtgcagacgagaagacaaggaagtatttattggcttcacaagctttctttctccaggcattattttcaggtgtaacttagcatctacaatccctgaaatgaagatgtttcgagaaatttcagttcctggatttgatcgcacaagttttcaagttaagcaggtttttgttcctagcaaggatggaaccaaaattcccatgttcataatgtcgaagaaagatatcgatcttaatggatcgcatccaactttgctatatggttatggaggattcaacataagcataacaccttcatttagtgttggtcgcgttgtgctatgcaagaacatgggctttgttgtctgtgtagcaaacattcggggtggtggagagtacggggaggagtggcacaaagctggagcacttgcaatgaaacaaaattgttttgatgactttgctgcctgtgctgaattcctcatttctaatggttacaccagttccagacgtttatgtattgaaggcggaagcaatggtggtcttctggttgctgcttccattaatcagaggcctgatctctttggatgtgctctcgctcatgttggcgtcatggacatgctccgttttcacaagtttacaattggtcatgcatggactacagactatggttgttcagataaggaagaagagttccagtggctcattaaatattctccccttcataatgtacggagaccttgggagcaaagctctggtaataactgccagtatccagcaaccatgttgttgacagctgatcatgacgatcgtgttgtgccattgcattcactgaagttattagcaactttgcagcatgtcctgtgtaccagcactgaggacagtccgcagacgaatccaataattggtcgcattgatcggaagtcagggcatggagctggcaggccaactcaaaaaatgattgacgaagctgcagacagatatagctttatggcaaaaatgttaggggcttcgtggactgaatagtgaattttgtccagcttagtgtggagatggtgagcaagattactctatgcagtcaaagtaaagtggctgtaaaagttatattgcttatgttttgctcttgcttggatgatcatccaccaaatagtatagtgtttatgcttcggtttgagataagggttcagggagcattgtcatgcttggcgttggtgcaccatttctttcatatatatcttttgattgttaaattttatacgttactacttcattgattctaaattataagatgttttggttttttcagatatattgtttttgttatgctatattgctatgtatactatatgtctaaaagaaaggtgaattgagattttttctttc

SEQ ID NO: 15907 - DNA, 2248 bp, Zea Mays
actaggagtggagcaccgcgccgcaggggatgatttggacgggaaggcagaggttcttttggatccaaatactctaagcaaggatgggacggttgctctttcaacatattctatcagcgaggatggaaactacattgcttatgggctaagtgaaagtggtagtgattgggtctctattcatgtgatgagcattactaacaagcagcctatgcctgataaattatcctgggtaaagttctcatctatcagctggacgcatgacgggaaaggttttttctatggtcggtatccagcacctagaggaggggaagtggatgctggaactgagacaaacatcaatcttaatcatcagatatattaccatgttttgggatctgatcagtcagaggatatattgtgctggaaagatcccgaacacccaaagtattcctttggtgcctcagtcactgaagatggaaagtacatcatattgggcatctatgaaggttgtgaccctgtcaacaaattatactattgtgaaatttcttctcttcctcaaggaatagagggctttagagggacacaggatttgcttccgtttgtcaagcttattgacaattttgatgctcaatatcaagttgtggccaatgatggtgatgaatttacatttttgaccaataaaagtgcccctaagaataagctggtaagggtaaatatcaaaaatccagagctgtggactgatgttctctcagagcatgaaaaagatgtgctcgaatcagccgacgccgttaacaataaccaacttttggtgaattatatgtcagatgttaagcatattctgcagataagagaccttagaactggaaactttattcatcagttgcctttggagatcggttctgtttcagagatctcgtgcagacgagaagacaaggaagtatttattggcttcacaagctttctttctccaggcattattttcaggtgtaacttagcatctacaatccctgaaatgaagatgtttcgagaaatttcagttcctggatttgatcgcacaagttttcaagttaagcaggtttttgttcctagcaaggatggaaccaaaattcccatgttcataatgtcgaagaaagatatcgatcttaatggatcgcatccaactttgctatatggttatggaggattcaacataagcataacaccttcatttagtgttggtcgcgttgtgctatgcaagaacatgggctttgttgtctgtgtagcaaacattcggggtggtggagagtacggggaggagtggcacaaagctggagcacttgcaatgaaacaaaattgttttgatgactttgctgcctgtgctgaattcctcatttctaatggttacaccagttccagacgtttatgtattgaaggcggaagcaatggtggtcttctggttgctgcttccattaatcagaggcctgatctctttggatgtgctctcgctcatgttggcgtcatggacatgctccgttttcacaagtttacaattggtcatgcatggactacagactatggttgttcagataaggaagaagagttccagtggctcattaaatattctccccttcataatgtacggagaccttgggagcaaagctctggtaataactgccagtatccagcaaccatgttgttgacagctgatcatgacgatcgtgttgtgccattgcattcactgaagttattagcaactttgcagcatgtcctgtgtaccagcactgaggacagtccgcagacgaatccaataattggtcgcattgatcggaagtcagggcatggagctggcaggccaactcaaaaaatgattgacgaagctgcagacagatatagctttatggcaaaaatgttaggggcttcgtggactgaatagtgaattttgtccagcttagtgtggagatggtgagcaagattactctatgcagtcaaagtaaagtggctgtaaaagttatattgcttatgttttgctcttgcttggatgatcatccaccaaatagtatagtgtttatgcttcggtttgagataagggttcagggagcattgtcatgcttggcgttggtgcaccatttctttcatatatatcttttgattgttaaattttatacgttactacttcattgattctaaattataagatgttttggttttttcagatatattgtttttgttatgctatattgctatgtatactatatgtctaaaagaaaggtgaattgagattttttctttc

SEQ ID NO: 15908 - DNA, 2235 bp, Zea Mays
cgtagtctagtcaagactcaagactcaagaggagtccccaccctgccggcaaatgcttctcctgcacaaatctgttcccctccgcctgctccttccacgccgtcctctcaaaacctttctcctcccgccgccgtctcgcccccgctgtctctcgctcctcccacgcgctgccatgggctccgtagctggagacaccgccgcccgcctcgcgtacccgccggcccgccgcgacgattcggtcgtcgacgactaccacggcgttcggatcccagatccctatcgctggctggaggacccggactcggaggagacgaaagagttcgtggcgcggcaggcggagctggcggagacggtgctcgccgggtgccccgacagggagaacctgcgccgcgaggttacgcggctcttcgaccacccgcgccacgccgcgccgttccgccgcgggaacaagtacttctacttccacaactccggcctccaggcccagagcgtgctctacatgctggatgatttggacgggaaggcagaggttcttttggatccaaatactctaagcaaggatgggacggttgctctttcaacatattctatcagcgaggatggaaactacattgcttatgggctaagtgaaagtggtagtgattgggtctctattcatgtgatgagcattactaacaagcagcctatgcctgataaattatcctgggtaaagttctcatctatcagctggacgcatgacgggaaaggttttttctatggtcggtatccagcacctagaggaggggaagtggatgctggaactgagacaaacatcaatcttaatcatcagatatattaccatgttttgggatctgatcagtcagaggatatattgtgctggaaagatcccgaacacccaaagtattcctttggtgcctcagtcactgaagatggaaaggcattattttcaggtgtaacttagcatctacaatccctgaaatgaagatgtttcgagaaatttcagttcctggatttgatcgcacaagttttcaagttaagcaggtttttgttcctagcaaggatggaaccaaaattcccatgttcataatgtcgaagaaagatatcgatcttaatggatcgcatccaactttgctatatggttatggaggattcaacataagcataacaccttcatttagtgttggtcgcgttgtgctatgcaagaacatgggctttgttgtctgtgtagcaaacattcggggtggtggagagtacggggaggagtggcacaaagctggagcacttgcaatgaaacaaaattgttttgatgactttgctgcctgtgctgaattcctcatttctaatggttacaccagttccagacgtttatgtattgaaggcggaagcaatggtggtcttctggttgctgcttccattaatcagaggcctgatctctttggatgtgctctcgctcatgttggcgtcatggacatgctccgttttcacaagtttacaattggtcatgcatggactacagactatggttgttcagataaggaagaagagttccagtggctcattaaatattctccccttcataatgtacggagaccttgggagcaaagctctggtaataactgccagtatccagcaaccatgttgttgacagctgatcatgacgatcgtgttgtgccattgcattcactgaagttattagcaactttgcagcatgtcctgtgtaccagcactgaggacagtccgcagacgaatccaataattggtcgcattgatcggaagtcagggcatggagctggcaggccaactcaaaaaatgattgacgaagctgcagacagatatagctttatggcaaaaatgttaggggcttcgtggactgaatagtgaattttgtccagcttagtgtggagatggtgagcaagattactctatgcagtcaaagtaaagtggctgtaaaagttatattgcttatgttttgctcttgcttggatgatcatccaccaaatagtatagtgtttatgcttcggtttgagataagggttcagggagcattgtcatgcttggcgttggtgcaccatttctttcatatatatcttttgattgttaaattttatacgttactacttcattgattctaaattataagatgttttggttttttcagatatattgtttttgttatgctatattgctatgtatactatatgtctaaaagaaaggtgaattgagattttttctttc

SEQ ID NO: 15909 - DNA, 2604 bp, Zea Mays
cgtagtctagtcaagactcaagactcaagaggagtccccaccctgccggcaaatgcttctcctgcacaaatctgttcccctccgcctgctccttccacgccgtcctctcaaaacctttctcctcccgccgccgtctcgcccccgctgtctctcgctcctcccacgcgctgccatgggctccgtagctggagacaccgccgcccgcctcgcgtacccgccggcccgccgcgacgattcggtcgtcgacgactaccacggcgttcggatcccagatccctatcgctggctggaggacccggactcggaggagacgaaagagttcgtggcgcggcaggcggagctggcggagacggtgctcgccgggtgccccgacagggagaacctgcgccgcgaggttacgcggctcttcgaccacccgcgccacgccgcgccgttccgccgcgggaacaagtacttctacttccacaactccggcctccaggcccagagcgtgctctacatgctggatgatttggacgggaaggcagaggttcttttggatccaaatactctaagcaaggatgggacggttgctctttcaacatattctatcagcgaggatggaaactacattgcttatgggctaagtgaaagtggtagtgattgggtctctattcatgtgatgagcattactaacaagcagcctatgcctgataaattatcctgggtaaagttctcatctatcagctggacgcatgacgggaaaggttttttctatggtcggtatccagcacctagaggaggggaagtggatgctggaactgagacaaacatcaatcttaatcatcagatatattaccatgttttgggatctgatcagtcagaggatatattgtgctggaaagatcccgaacacccaaagtattcctttggtgcctcagtcactgaagatggaaagtacatcatattgggcatctatgaaggttgtgaccctgtcaacaaattatactattgtgaaatttcttctcttcctcaaggaatagagggctttagagggacacaggatttgcttccgtttgtcaagcttattgacaattttgatgctcaatatcaagttgtggccaatgatggtgatgaatttacatttttgaccaataaaagtgcccctaagaataagctgatgttaagcatattctgcagataagagaccttagaactggaaactttattcatcagttgcctttggagatcggttctgtttcagagatctcgtgcagacgagaagacaaggaagtatttattggcttcacaagctttctttctccaggcattattttcaggtgtaacttagcatctacaatccctgaaatgaagatgtttcgagaaatttcagttcctggatttgatcgcacaagttttcaagttaagcaggtttttgttcctagcaaggatggaaccaaaattcccatgttcataatgtcgaagaaagatatcgatcttaatggatcgcatccaactttgctatatggttatggaggattcaacataagcataacaccttcatttagtgttggtcgcgttgtgctatgcaagaacatgggctttgttgtctgtgtagcaaacattcggggtggtggagagtacggggaggagtggcacaaagctggagcacttgcaatgaaacaaaattgttttgatgactttgctgcctgtgctgaattcctcatttctaatggttacaccagttccagacgtttatgtattgaaggcggaagcaatggtggtcttctggttgctgcttccattaatcagaggcctgatctctttggatgtgctctcgctcatgttggcgtcatggacatgctccgttttcacaagtttacaattggtcatgcatggactacagactatggttgttcagataaggaagaagagttccagtggctcattaaatattctccccttcataatgtacggagaccttgggagcaaagctctggtaataactgccagtatccagcaaccatgttgttgacagctgatcatgacgatcgtgttgtgccattgcattcactgaagttattagcaactttgcagcatgtcctgtgtaccagcactgaggacagtccgcagacgaatccaataattggtcgcattgatcggaagtcagggcatggagctggcaggccaactcaaaaaatgattgacgaagctgcagacagatatagctttatggcaaaaatgttaggggcttcgtggactgaatagtgaattttgtccagcttagtgtggagatggtgagcaagattactctatgcagtcaaagtaaagtggctgtaaaagttatattgcttatgttttgctcttgcttggatgatcatccaccaaatagtatagtgtttatgcttcggtttgagataagggttcagggagcattgtcatgcttggcgttggtgcaccatttctttcatatatatcttttgattgttaaattttatacgttactacttcattgattctaaattataagatgttttggttttttcagatatattgtttttgttatgctatattgctatgtatactatatgtctaaaagaaaggtgaattgagattttttctttc

SEQ ID NO: 15910 - DNA, 4747 bp, Zea Mays
aaagaaaactggatgcactaccaaggctaacaaacagcacataaagatatgcttcatcgtgcatatacatgtcagaaataaaatctttgttatcattttctttgctggctaagtgcatcacttgcgtttggtgaactgtccattagatcgaaagtcttacgggaattttcgctctgccagcatcacacaacttccaaatttacaatgatgtaaatttagggcaagagcaattgtgaccataatcagatgtgtgctgtgaaaccaaacatataatgtataaattggctaattcacatacatcaagggcatataatgacatactccctccattccaatttattatttgtttgccttttttaccctaaatttgaccgactgtcttattcaaaaaatttcacaattattataagtttttactgtggaattgtttagcatataatatactttaattttggccttgaattttccagtttttcgcgaaaattttgaataagacaagccggtcaaacttggtccaaaaaagtcaaaagaattataaattgggacggagggagtataagccaagtaaaacatttatctcatggacaagaaaatactatacttacaagaatgtgacacataaattaactaataattttgacagggtaaaaggtaagattcacaaggattaggagatcagtctgcatcagtgcaagttactacctgtgatcagtttgtttatgttgtataagaaccaactatataatcaacaaaacactctgatacaactacagagttactaacaagaaaacaagaattcactagagaattctggttcttccttttaaggcaatttgggttgcagagtttagccccacaaccaggttcttcttcatctttcatgaattggtggcaagaggcgtccgaagcagtgtataatcctatcaagaagggcctcaactctctcatcattttgggaacttcgataatttggaaccactgaaacaaatgtgtttttaaaggaaggacacccagcttagcagcagcccttacactagcgggggaggaaagaggcttgtgggagatggcaggagccaaatgcctctcctacctggcagcctcccagttcattagtggtagtgatttgggagcttagtctgtagatggatcctttcatatatgcttgttgttggcccctgtaaggaggcctctgtttttgtatctgttttggtctatattagaccttttctcctattttaatataatgaagcgcagttattctgcacgttcgagaaaaaaataaacaattaaatatttaattctctaagttacatcacaatcacggcaaagttactccctggttgtatataccatacatcatttggataagaatatttcacaatgagcttctagatatcaaacaaccaatatataatctgttcactgagcagaagtgttgcctatagtcaaaatttaacctcacggaactataatgtatctttctgccgattattaatcttaaaaaagcatatctttctgcttccctgctgtgatgtcagcgctgaggatggtgatcaggctacggaggatggtgttcaggagatggctgcacgcgacgcacctgaagctgtgactactgggccgcgacgtggcttgcgtgtgcgccagcctaacactcgcgtgagtgggctggactgggttatagcgtgagtcttgtgagtgccccaatataaggaggcacaggtcttagtaaacgtttaagcaaaaacagaatgctgcaatagcgaacaagttgtcgccttcctcctacttcctatcttcttccttctcaaggcacaatccgtgctctaccacaccactgctaacattctggtatcagatttgtcgatccctagcaccagtctggagtcgtccaccagccacgaccactttacccgttttcagcaacggcactgggcaatggatcccaacacgaagattattcgggaggagttggagaagaaattcgcagccatggatctcaaatgggagcaacaattctccgaatacgcccgtcacaaggaggagcgtgtggaggccttggagtcggctacggccgatttcgagcagtgtcggcctaaagtggatgccgccatggaagaccaggaaactcagcaagcagtgggagcgtgcggcgctcgaacactcctcaacggaacccggacttccctcgaagccagagttctccatgccgcatcctggtggtggcaaacactttgacggcccatacaggcatcgcgacgaccactacttccgggatcaggggcatgggtcggtcacgaccttcctccctggcccgggcaagggtatgctccaccccccatctcctcccgtgcatacaatttgccatggttagttgtatgaggattgtttggctagacatcggtattctaaccagggcgcgcgctcactagacaaattacccaagttgtcatttccattgttcgatggggataaccctcgcctctggatttcccattgtgaatgcatctttctccatccgtagcatgctggtttcagtctgtagaaagacaatatacggcagtgagttggccccttttctgcaatctactgcatggtcgatttggtagggatcagcatcaatctctgttgcgacaattattccatatcaaacaaactgctgctttgtctgaatatattgatagattctctacattggtcgatcagttatcagcctatgaacatgtgtctgatccaatgtattttacaactcgtttcgttgaagggttacgtgctgatatacgtgttgtcgttctcattcagcacccctgtgatttggatactgcgtgctctctcgtccttttgcaggaggtggcagagacgatgagatgacggggctatctgaaatatgatccgggtgggtggtcttaatctgtttctagagggccaacttctcaatcatcaaccccggtggctgacaagtccactacaatgggagttgtcgaggattgttcagcagtacctccacctcgatcaatggaagacaaatttaaggcactgcgagcatatcgccgtgccaaggggttgtgtgaccggtgtgctgagaagtggttcaagggtcatacatgtgctgcttcagtccaactgcatgctatgcaagaggtctttgaattgttgccgattgaggagactgaaggcgagcttcactctgatgaagctgttgaggagcagttgttcttggctatttcttcccaagcagtgtcaggtgggacagccaaaaggtctctccaaatgttgggagttatgcagcaacagatgatcaacatcctgatagattcaggcaatactcactcgttcatcagtcagaacttggtggacaaactgagcaacctcaccttgttacctgctgcagtttcagtaacggtggctgatggcagtgccatgcagtgtgtctcgatggtgtctcaagtggtttggactatccagcaccgtgagttttctctggacctcaaggtattgcctctgcctacctttgacctcattttgggtatggattggcttggaaacacaagtgggtattaattcagtatcaaggagcaccggtattgttacaaggcaccagtcaggaggagccagctactatcctgcttcacatttcagcttacagacacgtcagaacaaacattacaacctgaggtgtccaagctgttagatgattttgctctggtattttctaagccgacttttctgccacctgtaagagcttgtgatcatgtgattccattggtgccgggtgctaggccagtgaatatacgcccttataggtaccctcctctcaaagatggaattgagaattaggttgctgaaattaggtatcattcggcctagtttgtcagctttctcatccccggttctgttggttcgcaaaaagtatggctcgttccaattctgtggtgattatcgttacttgaatgccctcactattaagagcaaattccctattcctgtcttcgaacaactcatggacgagttagctggagctagttggttctctacattggacttactctcaggatatcaccaagttcgtttgagagcagacgaggaatttaaaactgcacttcaaactcaccacgaccagtttgagtttttggtaatggcatttggtctttctggggcgccagctacattccaaggggcaatgaacacaactctagcaccattgttgaggaaatgtgtcattgtgtttttcgatgatatattagtctacagtaaatcttttgagcggaacttggaccactgcaccaagtcttgctgatgttacagaaagactcttggtttgttaagaagtccaaatgcacttttgctgcaagatctattgcttacttggggcatattatcagtgggcagggggttgccactgacccatcaaaggttgaagctatggtgaattggccttctcccacaaatatcaaggaactccggggttttttgggactggcgggatattatagaaagtttgtcaagcattttgctattgtgtctaagccccttactgaactcaggaagaaaggaacactatatgtgtggactcatgatcatgaggtaacattccgcaccttaaagcatctcctgagtactgctcaggttctctccttaaagcatctcctgagtactgctccagttctttccttaatagacttcaacaaaactttttgtatagagactgatgcttgccacaatggtgtcggggcagttttgctgcaag

SEQ ID NO: 15911 - DNA, 2283 bp, Zea Mays
caccgtagcccccctcctctcttccccaaacacacaccacaaccataaccacgaactacctgaacggctgaacaattcccttcgtcccatcttcctctcgtctctcccaccccccgacccgaccgggcggcctcctccccgaaccctagcccctctacaaccaccgcgtcctgcctcctctgggcggctccgccccagatccagcacagcaggttaaaaagggggcgggcaggcgttggatggacgggccgaagcggtcgcagctgcgggtgcgcctccgcgtcacggcgcgccggcgtggtgccgatggcgacggcgccgggggcgctgccgggcctggggggcgtaagcgccggatggaggcccccgtccgcaactccgtcgccaagctgcagcgccgcgagatcgggggccgccagctcgccgcgcgcggcggcggccccgccgccgccgtgcccgagcgcttccggaacatgcagctccaggaggagttcgatacatatgatgaaaatgctcacctatttgtgaagctgcagtttcttaaaagaagatccaaaattattgagattgttgcagcaaaggatatcatatttgcccttgctaattctgggctttgtgctgcttttgaccgagtaacaaacaagcgcatagccttcttgaatttgagcccagatgaagtgattcggagcttgttttacaacaagaacaatgattctcttattactgtttcagtttatgcggctgacaaattcagcacattgaagtgcagaacaaccccgattgagtatattagaaggaatcagttagatgcagggtttcctctctttgaatcagagtctctgaaatggcctggatttgtggagtttgatgatgtgaatggaaaagtactcacatattcagcgcaggatggcatatataaggtatttgaattgaagaactactccttcctatattcaataccagatgaaaacgtgcaggagataaagatcagtccaggaatcatgctcttgatatatgataggacaccaagttatgttccattgaagatactatcaattgaagatggaaagcaactgaaatcttttaagcacttgttgcatcgcaacaagaaaattgatttcatcgagcagttcaatgagaagctccttgtcaagcaagagaatgaaaacttccagatatttgatgtgcggagttctgagctaattgaagtcagtgtctccaagtttatgaccccttcagcattcatttttctgtatgagaacaacctcttcttgacattccgaaacagaacagtcgctgtatgggacttcagaggagagcttgtgacttcatttgaagaccatttgctctggcataatgattgtagcaccaacaatatttacatcacgagtgaccaggatctcattatctcgtactgcaaatctgaggcagtggctgaggatggtacaggtgcagtactcaaaccctgaccatttcctcagtatttagtttgcactatctatatagatgcaactgctcccatatcccaattgggatttttcctttttactggcctcttcaactagcctctgatgtcaacatgctggatgtttgcaacattgaatataggctgatagatatcgggcaccattacaagttgttccagttggatccatcaacataagtgagattatgacaggcaggtgtatcgccaagattactgccaatgatccttccctaagtgtacccggacgcagaaatggttacagcaagcggtcctcggactggagcaccgttccagaagctctggaggacgtcactgcactgttttatgatgaggacaggaatgagatctacaccggcaacagccatgggctggtgcatgtgtggtctaactagatagtagcatgtacatacatcatttcgcccttttgatttgacttggttagctttactgcatgctgtataatccttggctcgggggctcacctagcttttctatttggcaatagaatgtgtttccttgagcaattgtgattgcatagtgttcttgtaaatatcttttgttcagctaccttgttcaagtaacatagaaataggcctgccaaatgtaactttgctggatactgccagccaagtttcgggcagcaagagagtgaagacctgcagttctgaccatcatgttattgttattttcaagtgtgttgtagtgttcgttttgtctgtaagctgctgaattatcgtatctgaagccttggatgaaccacctttaattatcagttaatctgtacctgattgacctca

SEQ ID NO: 15912 - DNA, 2359 bp, Zea Mays
aacaaacacaccgtagcccccctcctctcttccccaaacacacaccacaaccataaccacgaactacctgaacggctgaacaattcccttcgtcccatcttcctctcgtctctcccaccccccgacccgaccgggcggcctcctccccgaaccctagcccctctacaaccaccgcgtcctgcctcctctgggcggctccgccccagatccagcacagcaggttaaaaagggggcgggcaggcgttggatggacgggccgaagcggtcgcagctgcgggtgcgcctccgcgtcacggcgcgccggcgtggtgccgatggcgacggcgccgggggcgctgccgggcctggggggcgtaagcgccggatggaggcccccgtccgcaactccgtcgccaagctgcagcgccgcgagatcgggggccgccagctcgccgcgcgcggcggcggccccgccgccgccgtgcccgagcgcttccggaacatgcagctccaggaggagttcgatacatatgatgaaaatgctcacctatttgtgaagctgcagtttcttaaaagaagatccaaaattattgagattgttgcagcaaaggatatcatatttgcccttgctaattctgggctttgtgctgcttttgaccgagtaacaaacaagcgcatagccttcttgaatttgagcccagatgaagtgattcggagcttgttttacaacaagaacaatgattctcttattactgtttcagtttatgcggctgacaaattcagcacattgaagtgcagaacaaccccgattgagtatattagaaggaatcagttagatgcagggtttcctctctttgaatcagagtctctgaaatggcctggatttgtggagtttgatgatgtgaatggaaaagtactcacatattcagcgcaggatggcatatataaggtatttgaattgaagaactactccttcctatattcaataccagatgaaaacgtgcaggagataaagatcaggacaccaagttatgttccattgaagatactatcaattgaagatggaaagcaactgaaatcttttaagcacttgttgcatcgcaacaagaaaattgatttcatcgagcagttcaatgagaagctccttgtcaagcaagagaatgaaaacttccagatatttgatgtgcggagttctgagctaattgaagtcagtgtctccaagtttatgaccccttcagcattcatttttctgtatgagaacaacctcttcttgacattccgaaacagaacagtcgctgtatgggacttcagaggagagcttgtgacttcatttgaagaccatttgctctggcataatgattgtagcaccaacaatatttacatcacgagtgaccaggatctcattatctcgtactgcaaatctgaggcagtggctgaggatggtacaggtgcagtactcaaaccctgaccatttcctcagtatttagtttgcactatctatatagatgcaactgctcccatatcccaattgggatttttcctttttactggcctcttcaactagcctctgatgtcaacatgctggatgtttgcaacattgaatataggctgatagatatcgggcaccattacaaggtcatgaatatgaccacataaaaaaagtgaactggcattatagaaatctttctttgattgtgctatcaggaaataatcttgacactggtgtcgtgcagttgttccagttggatccatcaacataagtgagattatgacaggcaggtgtatcgccaagattactgccaatgatccttccctaagtgtacccggacgcagaaatggttacagcaagcggtcctcggactggagcaccgttccagaagctctggaggacgtcactgcactgttttatgatgaggacaggaatgagatctacaccggcaacagccatgggctggtgcatgtgtggtctaactagatagtagcatgtacatacatcatttcgcccttttgatttgacttggttagctttactgcatgctgtataatccttggctcgggggctcacctagcttttctatttggcaatagaatgtgtttccttgagcaattgtgattgcatagtgttcttgtaaatatcttttgttcagctaccttgttcaagtaacatagaaataggcctgccaaatgtaactttgctggatactgccagccaagtttcgggcagcaagagagtgaagacctgcagttctgaccatcatgttattgttattttcaagtgtgttgtagtgttcgttttgtctgtaagctgctgaattatcgtatctgaagccttggatgaaccacctttaattatcagttaatctgtacctgattgacctca

SEQ ID NO: 15913 - DNA, 1930 bp, Zea Mays
attctctgcaaaatggagacatagtggttgttttgcaagtgaatgttagcgttaacaaattggaagatcctgtgcttgaagtccttcagtttgagaaaagtatatcaaacaattgtatgcctgggaatcttgtggatggacaatgtgacagtaacgatgatccatgtcaggagctgcttagttggttgctccctttagatcgcacattaccacctcgttctttggcaccccctactctcaatccaagtgtatcacacaagcaatcttattctgcttctggttctcaaatattcaacttcagaagttactccatgccttcagcctcttctgttcagacaccaaataatataagaccaccaccaatatctgaaagtcaagaatttatgcctgaaaaacctgcaaaaaccccagatattataaatgatgggcaactttcgtttagaggagttcctttagaacctgaacggtattctgtacgttgtggtttagaaggcgtgtatctaccagggaaaagatggcggagaaaagttgaaatcattcaaccaattgaggttcaatcttttgctgcaaaatgtactgtggaaaatcttctctgtgtcacagtaaagaatattgctcctactcatgcaaaagatatagtcgtattcatcgatgcaattactattgtatttgaggaggcatccaaaggaggtgctcctttgtctttaccaattgctagtattgaggttgggcatggtcacagcttgccaaacctagcactcaggaggggcgaggaacactcttttattctcaaaccagcaactatgtcctcaagggaacggaagactaacagtcatgcacctctggccttatcactcccaacgatgaccggtgctactttaaatactcatacaccaaaggctggtgagccgtatgctgatctaagtgaccaatatgctgtactggtatcttatcgctgtaattacacagaatcgaaactttttttcaagcaagcaacaagctggcgaccctctgcagccagcgatcttatgatctcagtatcatccgaactgtctttacggaatcctagtcttggtgctcgtgttcctcaactccccgtgcagatactaacactcgaagctactaatatgacatccgaaaaccttacattaactgtccttgctcctgaagcatctggttcttcttcagttgtatccttgaactcatctccaaccaccccaaatggttcttttgatggtgttaatgagtcagcaaaaagatctggggtgggaaaagatgggattggctttcgaagattgaattctgtcctagctactccaaaagaaggtgataatggaggaaacagaatgagtaatgcttcaggctgtactcatctgtggttgcaaagtgcagtgcccctagggtgtgttcctgcccgctcaagcaccactgtcaaacttgagctgctaccattatcagatggaattatcacacttgatactctgcaaataaccgcaagggagaaaggccttgcttacataccggagcactccttggagatacatgccacctctggtatgtcatcaggaaggtcataggataggagagcatcaagagattttaccgaaggatggttgctgccaacatggggaaactaccccagatgaatcattatgtatcacaattgtgttacaaatccattcatttcatactgaggtcgccgagacactggtgttcgtcttcacaaaggcttatgaaattcgtaatgtgttgcttagttttgatgccgttattgttgttggtggtgttcatttaatcccactcatgttgctgagttgtaccatatgcgggctctgatcataaatatactggagaaataggaacatgtgtgtccattggccattgctcatcttcatgatgatatatcagttgctcatgaatcattatgatc

SEQ ID NO: 15914 - DNA, 1937 bp, Zea Mays
attctctgcaaaatggagacatagtggttgttttgcaagtgaatgttagcgttaacaaattggaagatcctgtgcttgaagtccttcagtttgagaaaagtatatcaaacaattgtatgcctgggaatcttgtggatggacaatgtgacagtaacgatgatccatgtcaggagctgcttagttggttgctccctttagatcgcacattaccacctcgttctttggcaccccctactctcaatccaagtgtatcacacaagcaatcttattctgcttctggttctcaaatattcaacttcagaagttactccatgccttcagcctcttctgttcagacaccaaataatataagaccaccaccaatatctgaaagtcaagaatttatgcctgaaaaacctgcaaaaaccccagatattataaatgatgggcaactttcgtttagaggagttcctttagaacctgaacggtattctgtacgttgtggtttagaaggcgtgtatctaccagggaaaagatggcggagaaaagttgaaatcattcaaccaattgaggttcaatcttttgctgcaaaatgtactgtggaaaatcttctctgtgtcacagtaaagaatattgctcctactcatgcaaaagatatagtcgtattcatcgatgcaattactattgtatttgaggaggcatccaaaggaggtgctcctttgtctttaccaattgctagtattgaggttgggcatggtcacagcttgccaaacctagcactcaggaggggcgaggaacactcttttattctcaaaccagcaactatgtcctcaagggaacggaagactaacagtcatgcacctctggccttatcactcccaacgatgaccggtgctactttaaatactcatacaccaaaggctggtgagccgtatgctgatctaagtgaccaatatgctgtactggtatcttatcgctgtaattacacagaatcgaaactttttttcaagcaagcaacaagctggcgaccctctgcagccagcgatcttatgatctcagtatcatccgaactgtctttacggaatcctagtcttggtgctcgtgttcctcaactccccgtgcagatactaacactcgaagctactaatatgacatccgaaaaccttacattaactgtccttgctcctgaagcatctggttcttcttcagttgtatccttgaactcatctccaaccaccccaaatggttcttttgatggtgttaatgagtcagcaaaaagatctggggtgggaaaagatgggattggctttcgaagattgaattctgtcctagctactccaaaagaaggtgataatggaggaaacagaatgagtaatgcttcaggctgtactcatctgtggttgcaaagtgcagtgcccctagggtgtgttcctgcccgctcaagcaccactgtcaaacttgagctgctaccattatcagatggaattatcacacttgatactctgcaaataaccgcaagggagaaaggccttgcttacataccggagcactccttggagatacatgccacctctggtatgtcatcaggaaggtcataggataggagagcatcaagaggcatactattttaccgaaggatggttgctgccaacatggggaaactaccccagatgaatcattatgtatcacaattgtgttacaaatccattcatttcatactgaggtcgccgagacactggtgttcgtcttcacaaaggcttatgaaattcgtaatgtgttgcttagttttgatgccgttattgttgttggtggtgttcatttaatcccactcatgttgctgagttgtaccatatgcgggctctgatcataaatatactggagaaataggaacatgtgtgtccattggccattgctcatcttcatgatgatatatcagttgctcatgaatcattatgatc

SEQ ID NO: 15915 - DNA, 1998 bp, Zea Mays
gataaaggggtttttgatggtaacacatctgggggagttgctcgagatgttgtcaagtgttattctctgcaaaatggagacatagtgtatgcaggttgttttgcaagtgaatgttagcgttaacaaattggaagatcctgtgcttgaagtccttcagtttgagaaaagtatatcaaacaattgtatgcctgggaatcttgtggatggacaatgtgacagtaacgatgatccatgtcaggagctgcttagttggttgctccctttagatcgcacattaccacctcgttctttggcaccccctactctcaatccaagtgtatcacacaagcaatcttattctgcttctggttctcaaatattcaacttcagaagttactccatgccttcagcctcttctgttcagacaccaaataatataagaccaccaccaatatctgaaagtcaagaatttatgcctgaaaaacctgcaaaaaccccagatattataaatgatgggcaactttcgtttagaggagttcctttagaacctgaacggtattctgtacgttgtggtttagaaggcgtgtatctaccagggaaaagatggcggagaaaagttgaaatcattcaaccaattgaggttcaatcttttgctgcaaaatgtactgtggaaaatcttctctgtgtcacagtaaagaatattgctcctactcatgcaaaagatatagtcgtattcatcgatgcaattactattgtatttgaggaggcatccaaaggaggtgctcctttgtctttaccaattgctagtattgaggttgggcatggtcacagcttgccaaacctagcactcaggaggggcgaggaacactcttttattctcaaaccagcaactatgtcctcaagggaacggaagactaacagtcatgcacctctggccttatcactcccaacgatgaccggtgctactttaaatactcatacaccaaaggctggtgagccgtatgctgatctaagtgaccaatatgctgtactggtatcttatcgctgtaattacacagaatcgaaactttttttcaagcaagcaacaagctggcgaccctctgcagccagcgatcttatgatctcagtatcatccgaactgtctttacggaatcctagtcttggtgctcgtgttcctcaactccccgtgcagatactaacactcgaagctactaatatgacatccgaaaaccttacattaactgtccttgctcctgaagcatctggttcttcttcagttgtatccttgaactcatctccaaccaccccaaatggttcttttgatggtgttaatgagtcagcaaaaagatctggggtgggaaaagatgggattggctttcgaagattgaattctgtcctagctactccaaaagaaggtgataatggaggaaacagaatgagtaatgcttcaggctgtactcatctgtggttgcaaagtgcagtgcccctagggtgtgttcctgcccgctcaagcaccactgtcaaacttgagctgctaccattatcagatggaattatcacacttgatactctgcaaataaccgcaagggagaaaggccttgcttacataccggagcactccttggagatacatgccacctctggtatgtcatcaggaaggtcataggataggagagcatcaagagattttaccgaaggatggttgctgccaacatggggaaactaccccagatgaatcattatgtatcacaattgtgttacaaatccattcatttcatactgaggtcgccgagacactggtgttcgtcttcacaaaggcttatgaaattcgtaatgtgttgcttagttttgatgccgttattgttgttggtggtgttcatttaatcccactcatgttgctgagttgtaccatatgcgggctctgatcataaatatactggagaaataggaacatgtgtgtccattggccattgctcatcttcatgatgatatatcagttgctcatgaatcattatgatc

SEQ ID NO: 15916 - DNA, 880 bp, Zea Mays
aggagatccaatcggcgtgcgggcgtccgcggtccatccatcgatccaattccaatctgcagctacgtgcccatccgatcctcgcttgacacaggggaaattcacggcctgctgctacagagcatggccgctgagcacactgtggtgcccgccgtgacaacctgtctccctccctctcgccagatgcctcggacaggcgtctagttggggggggggggggcggagatccgcgtccaggcgaggtctgctctggtcacctctggcgatcctcctccctcgcccatcgcctccgccgatcaattcccttcgctggcactcagagatcggcgtcctcctcccgtcttcccacgcttgcggggactaactcagagtagtgtcgctcaatgaatttcctctaccgaactacgcagcctgcagcgcctgagctgccaagaatttcagagcaagatcacaggaacgccttacaaaagacgacctcgacactggagggtctcattgcggacgattcacaccaccagccctcctctgcccacagcgaagatggagctgctaataacgggtctagggatatcagtggggattcttcatctgttgatttgaaaagcccagtcccactggggacacatgccgatgtcatggaagacgaaagatggatcacaattccatgcaaggcacttcctgaaagttggaacgacatatcagaaatgggttcagttgcaggctctggaccgttccttcctttttccaggcgagcaggttcctatactggcgtgcctgtcagcttctaagcaagatctacaggttatatccccctttagaattgctgcagtaatgtctaagaatggaacttctatgcaaaactttacaaataaatctagcc

SEQ ID NO: 15917 - DNA, 880 bp, Zea Mays
atcccaacccagttagcagccgcccaaggaggaggagatccaatcggcgtgcgggcgtccgcggtccatccatcgatccaattccaatctgcaggggaaattcacggcctgctgctacagagcatggccgctgagcacactgtggtgcccgccgtgacaacctgtctccctccctctcgccagatgcctcggacaggcgtctagttggggggggggggggcggagatccgcgtccaggcgaggtctgctctggtcacctctggcgatcctcctccctcgcccatcgcctccgccgatcaattcccttcgctggcactcagagatcggcgtcctcctcccgtcttcccacgcttgcggggactaactcagagtagtgtcgctcaatgaatttcctctaccgaactacgcagcctgcagcgcctgagctgccaagaatttcagagcaagatcacaggaacgccttacaaaagacgacctcgacactggagggtctcattgcggacgattcacaccaccagccctcctctgcccacagcgaagatggagctgctaataacgggtctagggatatcagtggggattcttcatctgttgatttgaaaagcccagtcccactggggacacatgccgatgtcatggaagacgaaagatggatcacaattccatgcaaggcacttcctgaaagttggaacgacatatcagaaatgggttcagttgcaggctctggaccgttccttcctttttccaggcgagcaggttcctatactggcgtgcctgtcagcttctaagcaagatctacaggttatatccccctttagaattgctgcagtaatgtctaagaatggaacttctatgcaaaactttacaaataaatctagcc

SEQ ID NO: 15918 - DNA, 1211 bp, Zea Mays
gttatttgaaacctaacattatttgattatattggcagctagtgacctgacacttttgcccctcttaaccacttttgcccctcttaaccaaaagagccggcatctcaaaaccgacggcgctctcttctctatcctctgtgtcccctccaccaaaaccgacggtgacgtcgctctcctccaccggtgctcggcgctctccctccaccagcggcggtccaccgacgctcggcgagctccaccggtgggcgctggtcagatccgctcggcagtcatcaacctggcacatcgggtagctcgcgcctccgttggcagtcccaccgccgcccggccctcccccagcgcccccggtgatccggatcgcactcgcttgctcggtctaacgaccggctcctgccccgccgcagccgaagctcccagcgtcctcctgcaggccgagctgaaggttcagcgcgccggtggagttcgacgacgaaactccgtcacgtcatacctctccgcctctcgtcttccagacgtctccaatcggggttcccagcgtctcggagaagaggagcagcacggcacggcggctgtggcgaggaaggctcctgtcccatcccaacccagttagcagccgcccaaggaggaggagatccaatcggcgtgcgggcgtccgcggtccatccatcgatccaattccaatctgcagggactaactcagagtagtgtcgctcaatgaatttcctctaccgaactacgcagcctgcagcgcctgagctgccaagaatttcagagcaagatcacaggaacgccttacaaaagacgacctcgacactggagggtctcattgcggacgattcacaccaccagccctcctctgcccacagcgaagatggagctgctaataacgggtctagggatatcagtggggattcttcatctgttgatttgaaaagcccagtcccactggggacacatgccgatgtcatggaagacgaaagatggatcacaattccatgcaaggcacttcctgaaagttggaacgacatatcagaaatgggttcagttgcaggctctggaccgttccttcctttttccaggcgagcaggttcctatactggcgtgcctgtcagcttctaagcaagatctacaggttatatccccctttagaattgctgcagtaatgtctaagaatggaacttctatgcaaaactttacaaataaatctagcc

SEQ ID NO: 15919 - DNA, 941 bp, Zea Mays
gttagcagccgcccaaggaggaggagatccaatcggcgtgcgggcgtccgcggtccatccatcgatccaattccaatctgcaggggaaattcacggcctgctgctacagagcatggccgctgagcacactgtggtgcccgccgtgacaacctgtctccctccctctcgccagatgcctcggacaggcgtctagttggggggggggggggcggagatccgcgtccaggcgaggtctgctctggtcacctctggcgatcctcctccctcgcccatcgcctccgccgatcaattcccttcgctggcactcagagatcggcgtcctcctcccgtcttcccacgcttgcggggactaactcagagtagtgtcgctcaatgaatttcctctaccgaactacgcagcctgcagcgcctgagctgccaagaatttcagagcaagatcacaggaacgccttacaaaagacgacctcgacactggagggtctcattgcggacgattcacaccaccagccctcctctgcccacagcgaagatggagctgctaataacgggtctagggatatcagtggggattcttcatctgttgatttgaaaagcccagtcccactggggacacatgccgatgtcatggaagacgaaagatggatcacaattccatgcagtttggtgcctttgacttgcttgtctctttttttgttatatatcatataggcataattacaccgatgcttattattaattagacttaactgatctttcatctgccaagtgatcactccttactccttatctccacccttaatctgcattgcataaggttatacattcatttttttctttactactaactaattgacgagtagttgttttcagtgcgaaagtgtaaccctaccatatacctgctaaacactctaagcctgaccgtttacccgctaaacaccccg

SEQ ID NO: 15920 - DNA, 1283 bp, Zea Mays
gttatttgaaacctaacattatttgattatattggcagctagtgacctgacacttttgcccctcttaaccacttttgcccctcttaaccaaaagagccggcatctcaaaaccgacggcgctctcttctctatcctctgtgtcccctccaccaaaaccgacggtgacgtcgctctcctccaccggtgctcggcgctctccctccaccagcggcggtccaccgacgctcggcgagctccaccggtgggcgctggtcagatccgctcggcagtcatcaacctggcacatcgggtagctcgcgcctccgttggcagtcccaccgccgcccggccctcccccagcgcccccggtgatccggatcgcactcgcttgctcggtctaacgaccggctcctgccccgccgcagccgaagctcccagcgtcctcctgcaggccgagctgaaggttcagcgcgccggtggagttcgacgacgaaactccgtcacgtcatacctctccgcctctcgtcttccagacgtctccaatcggggttcccagcgtctcggagaagaggagcagcacggcacggcggctgtggcgaggaaggctcctgtcccatcccaacccagttagcagccgcccaaggaggaggagatccaatcggcgtgcgggcgtccgcggtccatccatcgatccaattccaatctgcagggactaactcagagtagtgtcgctcaatgaatttcctctaccgaactacgcagcctgcagcgcctgagctgccaagaatttcagagcaagatcacaggaacgccttacaaaagacgacctcgacactggagggtctcattgcggacgattcacaccaccagccctcctctgcccacagcgaagatggagctgctaataacgggtctagggatatcagtggggattcttcatctgttgatttgaaaagcccagtcccactggggacacatgccgatgtcatggaagacgaaagatggatcacaattccatgcagtttggtgcctttgacttgcttgtctctttttttgttatatatcatataggcataattacaccgatgcttattattaattagacttaactgatctttcatctgccaagtgatcactccttactccttatctccacccttaatctgcattgcataaggttatacattcatttttttctttactactaactaattgacgagtagttgttttcagtgcgaaagtgtaaccctaccatatacctgctaaacactctaagcctgaccgtttacccgctaaacaccccg

SEQ ID NO: 15921 - DNA, 647 bp, Zea Mays
gcttgttgacaccgttatttggttaaggacacttgcagatccatcattcccacataagatgggtttggagtttgtggctaccttttcctcatctatttggtgggaaatgaatattcgtaaggagaggtttaaacaagaatgggacttagtgattgtgaatgctttgactgcatcgtgttgcaacttgatggttcttgggcttttggcgccatgccgttcatatgggagtacatctcgatttgagttccaaaatgcaattgagaaacttccaagcaacatattcgagaagagctatcctttgagagagtttgatctaccaaaacgaatcagtgcattcttttataaagctgctgagcttagtcttgtcgggtttgtggccggctctgttcaaggtggtatgtccaaagtcttgtctgtaagaaaagaaaggaggttatcggtgactattccctctatcagcaccaatgctcttggttacggagctttcctagggctctatgtgaacttgcgatatcaaattgctctgtggactagaccaatatatggtcaagcgctttgacgttttgggtgtggcaatcttctttagcacagcagcaaggtaaatctgtattgatgttctcgtcttaatacattagtgtttcatggga

SEQ ID NO: 15922 - DNA, 792 bp, Zea Mays
cgtcagtttgtagaaactgtgttgcaagaatggtgcaagacgatgagtaatttgcctgctggtctccaccaagcttgtgagatgggtttggtgagttctgcacagatggtacgttacttgtcaatatttgcaagacctacaaacactaggtccttctcaagagctcttccaggacacttgcagatccatcattcccacataagatgggtttggagtttgtggctaccttttcctcatctatttggtgggaaatgaatattcgtaaggagaggtttaaacaagaatgggacttagtgattgtgaatgctttgactgcatcgtgttgcaacttgatggttcttgggcttttggcgccatgccgttcatatgggagtacatctcgatttgagttccaaaatgcaattgagaaacttccaagcaacatattcgagaagagctatcctttgagagagtttgatctaccaaaacgaatcagtgcattcttttataaagctgctgagcttagtcttgtcgggtttgtggccggctctgttcaaggtggtatgtccaaagtcttgtctgtaagaaaagaaaggaggttatcggtgactattccctctatcagcaccaatgctcttggttacggagctttcctagggctctatgtgaacttgcgatatcaaattgctctgtggactagaccaatatatggtcaagcgctttgacgttttgggtgtggcaatcttctttagcacagcagcaaggtaaatctgtattgatgttctcgtcttaatacattagtgtttcatggga

SEQ ID NO: 15923 - DNA, 830 bp, Zea Mays
tttttttttttttttttttgtagaaactgtgttgcaagaatggtgcaagacgatgagtaatttgcctgctggtctccaccaagcttgtgagatgggtttggtgagttctgcacagatggtacgttacttgtcaatatttgcaagacctacaaacactaggtccttctcaagagctcttccaggttggctttccaaaggtcttgttggaaggacacttgcagatccatcattcccacataagatgggtttggagtttgtggctaccttttcctcatctatttggtgggaaatgaatattcgtaaggagaggtttaaacaagaatgggacttagtgattgtgaatgctttgactgcatcgtgttgcaacttgatggttcttgggcttttggcgccatgccgttcatatgggagtacatctcgatttgagttccaaaatgcaattgagaaacttccaagcaacatattcgagaagagctatcctttgagagagtttgatctaccaaaacgaatcagtgcattcttttataaagctgctgagcttagtcttgtcgggtttgtggccggctctgttcaaggtggtatgtccaaagtcttgtctgtaagaaaagaaaggaggttatcggtgactattccctctatcagcaccaatgctcttggttacggagctttcctagggctctatgtgaacttgcgatatcaaattgctctgtggactagaccaatatatggtcaagcgctttgacgttttgggtgtggcaatcttctttagcacagcagcaaggtaaatctgtattgatgttctcgtcttaatacattagtgtttcatggga

SEQ ID NO: 15924 - DNA, 4834 bp, Zea Mays
atttttcttctctggcctatggtcattatacagcagaaaagatgaagcagttacttgcaaattctgctcttacatgcatgcaactctctgagttctgaaagtctgatttctagtagagtttattggctacactgactttttttattctacagaacaaaggagaaaaaacaaacggatcctttaaagcaggatatagtgcgtcttcatgttcgtctggatcaccaggttatgtttggtgagcatgttggcattattggttcgacaaaagagcttggctcatggaagagtcaggttgatatggattggacaccaaatggttgggtctgccagcttgatgtccctggggaagcacttctggagttcaagtttgtgataattttgaataaaggcaaggacaaaatatgggaggatggtgataaccgtgtagttaatttgccaaaaaatggttcatttgatatgccatgccactggaataagacaaaagagcctttagatcttttaggatcatcagagattaagttgtctggagatactgaggtgataggtgaagatgctaaactatctgaaaatattgctctagaagagatggggagtatctgcaacgctggggttggcgatctgacaccaaaacacgagtcaagcacacttggtggccaatggcaagtatcgctgaaattggtggagggtgataaagcatcaagaaactggtggcggaagttggagcttgtccgtgtgctcttgtctgaatatgttcaagatcagagtcacttggaggctcttacatattctgctatatatctaaagtggatatatactggtcaaataccatgctttgaggatggtggtcaccatcgacccaataaacatgctgagatatctaggcaaatttttggtgaaattgaaaggatatactatggaaaaaacacatcgtctcaggttgattgcttcattcctcatagtagttgtgaaatcaacattgtccttcaattattttatttatatcactaatttctataaaaaacttgactgatggggcaaagagcccatgactttgcactaagaagaaacctcgtcgaaactacccatgaacctggcgaagatagaccatgttttctgcactactagttgggaggattcctttcctgactgtctgctttatagcaatgcctctgaatcctctgatcactgtcccttaacactcaaattcagggaggattgtaggggaaagcgcagatttcacttcgaggtttctggcctaaaattcctggatttttggatgtggtagctgcctcttggaaccaaccaatttaggcctcctgtcctatggagaggttgtcgctaaagcttaaaagtctggctaaaaatttgcagtcttgggggcataaggaagtgggtaatttaaggaaccagttggagcttgctcgggaagtgatgcataggctggaaacggcttaggacagcagagttttgtcgggagaagagctttggttgttaagaaaagtgcagcagcactgcctagttcttgcttctctagaaagaactattgcacgtttgagatccagaatccaatacttgaaagaacgagatgctaattctaagttcttccatatgcaagcttgctttcgaaagaaaaggaatttaccaaactagaggaggaaggaagggtggttatatacatgaagtgttagatgggtttttttccaacttgtttggtgctggttttcagagacagtatacaattgatttgatgaattgtcacagagatgcagttgatctcagtgccctggattgccctctctgaaaaggaagtgatggacactattgcatgcctcccatccgacaaagctaccgggcctgatgtgtttactgggaggttttataaaacctgttggaacattattaaggtggatctaagaggttttataaaacctgttggaacattattaaggtggatctaatggaggctctggctgtccttcatcaaggcaatgctcaaaagctttggcagctgaattcgtcctatctcatttgatccctaaaaagatggatgcttcttcgcttggtgatttcagacctattagcctaaattggtcacaaaattgcttgctaatcggctgggccctcgcctgcatgagttggttgcagctaatcaaagtgcttttgtcagaggaaggtcaattcatgataattttatgctagttcaacaatcaattaagtctcttcacaaaaagaaagtcgctagtctgtttttgaagctggatattttcaaggcctttgattcagtttcatgggcttttctccttgacgtattatctcatcttggttttggtcctatttggcacaatctgatttcaaatctgctggcgtcttcttctacgcaagtgttgctgaatgggtttcctgggaatcatattaggcatcgaagaggccttcggcagggggaccctttttctcctatgctgtttgtgttgattatgtatgttcttagcaacatctttagactctctccagcaacggacgctaaagcgtccggtacgctaaatttagcgtctgttaacgtccgcaaggcgtccaacaacgctcgctatcgcgtccactaagatagcgttcgtccctggctgccactaaatgtagtggttcactgtgcgtcctctatccacacagcggcacactattcctcttcgaatcgcttcaccgttccgagttttgactgccacttgctggtcatcttctccacggccgttcacttcgccgagtcaccgactacacgagctcacgtatgcacgatggagcactggtatggaacgcggtcgcggtcattacgtcagcttcttcctatgcgcaggggagcagccgaggacgccccagaccgcacagtcgccgccgccgccgctcgccatcaaagtcgtgctccatctcctcatcctccgctatgctctcctgacttgaagaagccaatcatgcaacagatcaagtgtggcaactagtggagacgatgctagagacgacgtgcatagaaggtgttcgacgatatgctcaaatcagcttgcagcaaccctgttgtggatgtcctgcttaaacaacaagagtagccccgtactgatgttaagccctttgtttaatattataagtttatttaaaaaatattttgttatagaggatgggatatagatgatgaaatttagagaacacttaaaaaatagtgtagattattgaaatttggtaacactgtagatatagagaaccaaatttaggggacgttgctggagacgaagaaaatatagagagtagaatcgtttagagggtgctgtaaaggacaaagaatattcctttagaggatgaaatttaggggacgctgctggagacagccttagggcggctgaaagcagggggctgctgcattggttggaaggagcaagtgtctgaaacaggctttctatctatgctgatgacgtggtcctctttgttaaacccattgtggatgatctaaattgtgttagattgattttgaattgctttgggccggcttcagcgttggttactaatccatttgggaggtttgggatttctagtttgaaggaattatgctgggctcttcgtatgagatggttgtggctacataaaattgatccaggcaggccttgggcaaacctcactatgcaagtccctaagaaggcaaggtctttcttctccactgttttggtttcagaagtgggaaatggagcacgcactctgtcctggactgataaatggctcttgggtcagaatgtgagcaatctggctcctaggttatttgccatcattcctaaaaggattgctaataggaggaccgtcctcgaggctctagccaacataaaatggatatctgatataaagggtgccttgtctgttggagctatagtggactacttgaacctttgggagattctatcagacatagtgttgcatcctgtagtggaagataaacatgtattcagcattgccgcagatggcaaatattcggctaagttggcttatgaaggtctttttgttggttcaacatcctttggtcattaccatctggtgtggaaaacctgggcacctccaaagtgtcagtttttcctttggttggctacaaacaagagatgctggactgctgataggcttgctaagagaggtttgtttcacccagctaggtgtctcttatgtgatcaggaagctgaaactcttgaccatatccttgtctcttgtgtgttcacaagagtgttctggtttaaccatctgaaaccttttggttttgaaagattgactcctcagctaggtcttacatccttcatgatttggtgggagcaaatctcagaaatggtcagtggtctatctggaaagggtctcaactcccttttttttctcgaacacgcaggagatctgcgtatcattccattaatagatagaagaaggtacaacacaacacaacacacagaactcaacccacacgacacaacacagccaccacacacaaccactctgaacaaggcactaggttatcaccctgggtcaagcataaacactagagttgaaagcaagttcaaccctttagctccggcacgacaccacatcctaagctcatcactagcgagggtgagagcacttgctaggcttggcgacctcccattgaacacacagtcgttgctatgacgccaaaggctccaagcgccaagaatagctagagaattgaagtctgattggagatctcgaggaatcttctccacacccctgctccatcagtcttctaagctgcaaagagcattgtccggtgaaagattaggcaacccggacctgcgcagcaagaggtacc

SEQ ID NO: 15925 - DNA, 591 bp, Zea Mays
agaacaaaggagaaaaaacaaacggatcctttaaagcaggatatagtgcgtcttcatgttcgtctggatcaccaggttatgtttggtgagcatgttggcattattggttcgacaaaagagcttggctcatggaagagtcaggttgatatggattggacaccaaatggttgggtctgccagcttgatgtccctggggaagcacttctggagttcaagtttgtgataattttgaataaaggcaaggacaaaatatgggaggatggtgataaccgtgtagttaatttgccaaaaaatggttcatttgatatgccatgccactggaataagacaaaagagcctttagatcttttaggatcatcagagattaagttgtctggagatactgaggtgataggtgaagatgctaaactatctgaaaatattgctctagaagagatggggagtatctgcaacgctggggttggcgatctgacaccaaaacacgagtcaagcacacttggtggccaatggcaagtatcgctgaaattggtggagggtgataaagcatcaagaaactggtggcggaagaatttgtaaagctttcaaccgaga

SEQ ID NO: 15926 - DNA, 1593 bp, Zea Mays
gtgcccagccccagctcccggctccagctcgtccgcgtcgtctggcgcagtgcttgccccagcgccatcagtcttctatccagcttcaaccccaccgtcggtctctagttcgtcatggcgctgaatttcttcctcgtgtcatccctgctcctcgcgcgttgggcaccgggagactctccctgcttggtctggcgtgggctgtagctgcatgacaaaagcgcccctgttttctgctcgccaaccatgctcgctttacgtccacctcgtcgtgtgtcgtcgtgggctcatcggcaactctggccaactaacagtaccagcctccctggcgttcgtctcttcgtcgcgcctgtatagccccagttgcgacaccatgcactcttctggttgttgacgtcgttcctcgcatcccgcctattcgatgaaacgcccaaatccatagactgtcgacgcactgctgccatacgcggttgtctccgtcacttgcgtcagctcgccagacctgcagctctatacgtcaccctcttgtatcgtcgtcgagctcgtcgaaccccttccttccctgctcgacctcgacgaaccccgaatcccggatgttacgaaaacgcaagcgaagttcgggtgacgcttgtgtgtccgatagaaagatcgaagtcaaaacaattgatgtgttcgcgccgacaaaagaatcccaagatgatgtggagaaacaagccccaggtcgatgcccccaagtgctcggcaaaaggcctgaacaaggatcatcgtcgtttattcggattgctagtcgatatggtaatcgtactctgattcgctattctagttaattaatttgatagatggaggagaagaatatgttaatagaattgtaggcatggttgattcgattaaaaatattctatctgctaggtcatagaataatgtgatgttcatgtatttggcatgatatgcaaattaatctggataaatagtttagaaagttagttaatatgctcccttactctaaattgtcggtattcaaaaatagtgaataaaaatgtgacgagtaatttgatattgggtgttttgacaaaagacttgtgcttagcttattattacttaatgtttgaagtagatgtgattacgctagaaaaatgtgataattgggtgtagtcgtatatcggtatctagtgtttatgtattctagtttgtgatgcctgaccataagtattaatcctttttggtatagcaataattagttatgtactatttcttggtattcatacatgtgcataatgcatttcatttatgtacgataattaatctcgtgatgcggaagacgagccaagttgacctcaagatggtgtaaggagtggtcttcttcgcacaacgatatcgtcagtcggacgaacctgaagatggataaactaaacgagtgccaagacaaaggatgctcgccaagtggtcaccacttaaccaacagtaacctagtgttatccaggcaagccccggtgcatttgccacctccttgttgttttactagtcggttgcctgtgcgttgcgacggcttacaacaatacccacgtaaactatcaatcaaaaaaattcaagattttt

SEQ ID NO: 15927 - DNA, 1070 bp, Zea Mays
gtgcccagccccagctcccggctccagctcgtccgcgtcgtctggcgcagtgcttgccccagcgccatcagtcttctatccagcttcaaccccaccgtcggtctctagttcgtcatggcgctgaatttcttcctcgtgtcatccctgctcctcgcgcgttgggcaccgggagactctccctgcttggtctggcgtgggctgtagctgcatgacaaaagcgcccctgttttctgctcgccaaccatgctcgctttacgtccacctcgtcgtgtgtcgtcgtgggctcatcggcaactctggccaactaacagtaccagcctccctggcgttcgtctcttcgtcgcgcctgtatagccccagttgcgacaccatgcactcttctggttgttgacgtcgttcctcgcatcccgcctattcgatgaaacgcccaaatccatagactgtcgacgcactgctgccatacgcggttgtctccgtcacttgcgtcagctcgccagacctgcagctctatacgtcaccctcttgtatcgtcgtcgagctcgtcgaaccccttccttccctgctcgacctcgacgaaccccgaatcccggatgttacgaaaacgcaagcgaagttcgggtgacgcttgtgtgtccgatagaaagatcgaagtcaaaacaattgatgtgttcgcgccgacaaaagaatcccaagatgatgtggagaaacaagccccaggtcgatgcccccaagtgctcggcaaaaggcctgaacaaggatcatcgtcgtttattcggattgctagtcgatatgacgagccaagttgacctcaagatggtgtaaggagtggtcttcttcgcacaacgatatcgtcagtcggacgaacctgaagatggataaactaaacgagtgccaagacaaaggatgctcgccaagtggtcaccacttaaccaacagtaacctagtgttatccaggcaagccccggtgcatttgccacctccttgttgttttactagtcggttgcctgtgcgttgcgacggcttacaacaatacccacgtaaactatcaatcaaaaaaattcaagattttt

SEQ ID NO: 15928 - DNA, 11432 bp, Zea Mays
ctcttcaccccaaacaacaatcacagccctctctccctctcccctcctttacgtcgccgcctccgaatccccacctctttgctcctccgccatcctcctccgcggccgatgtgtgtgccccgccggcccaaaaccctagaggttacgagcaggtaagggtttcgatcggagatggcggctgcggctgcggcgatggccgcacatagagccagcttcccgctgcgcctgcagcagatccttgctggcagccgcgccgtctcacctgcgatcaagatcgagtctgagccgcctgcaaacatcaaagcatttattgatcgagtagtcaatattccactacatgacattgccataccgctatcaggcttctgttgggagttcaataagggaaatttccaccattggaggcctttatttattcattttgacacctatttcaagacatacatttcttctcggaaggatcttcttttatctgatgatatgaccgaggctgaccctatgccaaagaatgccatcttgaaaatcttaagagttatgcagattattttggagaactgccagaatagaagttcttttactggtcttgcgcatcttaagcttctcctggcatcgtcagaccctgagatagttgtagcagctttggaaactcttgttgccttggtcaaaataaatccttcaaagttgcatatgaatggaaagctaattagctgcggacctataaacacccatcttctatcattggcccaaggatggggcagcaaggaggaaggtcttggcatatattcttgtgttgtggcaaatgaaggaaaccatcaggggggtttgtccttgttccctgtagacttggagaacaaatatggtggcacacaacatcgtcttggttcaactcttcattttgagtataatttgggtcctgcacagtatcctggccaaactagtgacaagggcaagtcatctaatttgtgtgtgatacatattccagacatgcatcttcagaaagaggatgacttgagcatactgaagcaatgtgtagacaagttcaatgtgcccccagagcacaggtttgcattgcttacaaggataagatatgcccgtgctttcaactctgcacggacttgtaggatctatagccgcataagtcttctttcgttcattgttcttgtgcaatcgagtgatgctcatgatgaactcacatatttctttacaaatgaaccagagtacataaacgagttaatcaggcttgttcggtcagaggattctgttcctgggtccattcgtgctctggctatgctagcactgggagcacagctggcagcatatgcatcatctcatgagcgtgctaggatattgagtggctcaagtattatctctgctggtggcaatcgtatggtcttgctcagtgtcctgcagaaagcaatatcctcactcaatagcctgaatgatacctcatctcctctaattgttgatgcccttcttcagttttttctgctccatgtactgtcttcatcaagttcagggactacggttagaggctcagggatggttcctcctctcttgcccttgctgcgagataatgatccttctcatatgcatcttgtctgcttggcagtgaagactctccaaaagcttatggagtacagcagccctgctgtttctctgtttaaagacttgggtggtgtagagcttttgtctcagaggttacatgtagaagttcagcgtgttattggtactgctgatggacataattcaatggttactgatgcagtgaaatcagatgataaccacatgtactctcagaagcgattgattaaagctttgctcaaggctttggggtctgctacttattcccctgggaatcctgctcgttctcaaagctcccaagataactcattgcctgtctcactttcccttatatttcagaatgtagataagtttgggggtgacatttatttttcagcagttactgttatgagcgaaataatccataaagatcctacatgctttattactttgaaggaactcggtgttccagatgcttttatctcatcagtgactgctggggtaataccatcttgtaaagcccttatctgtgttcctaatggcctgggtgcaatatgcctcaataatcaaggacttgaggctgtcagggaaacttcagcactgcgatttcttgtagataccttcactagcaggaaatacttgataccaatgaatgagggtgtggtccttctagctaatgcagtggaagagcttcttcgtcatgtgcaatccctgagaagtattggtgttgacatcattattgaaataatcaataaactaagttcgtctcaggaatataaaaacaatgaaacagccaccttgcaagaaaaaacagatatggaaactgatgttgaagggcgtgatttggtaagtgctatggactcaagcgtggatggaagtaatgatgaacagttttctcatctgagcattttccatgtgatggtattggtgcaccggacaatggaaaactcggaaacctgccggttatttgtagaaaagggagggctacatgctcttttgacactcttgttgaggcctagcatcacacagtcatctggagggatgcctattgctttgcatagcacgatggtgttcaagggttttactcagcatcactctactccacttgcacgtgcattttgctcatctttaaaggagcatttgaagagtgcattgaaggaacttgataaagtttccaactcatttgatatgaccaagattgaaaaaggagcgatcccatctttgtttgttgttgaatttttgctattcctagctgcctcaaaagataatcgttggatgaatgctttgctctcagaatttggcgatgccagcagggaggtcctggaagatgttgggcaagttcaccgggaagtgctttggaaaatttcgctttttgaaaaaaacaagattgtcgctgaaaccagttcatcttcttccacatctgaagctcagcagcctgacatgtctgccagcgacattggtgatagcagatacacttctttcaggcaatatcttgatccaattttaaggcgaaggggttctgggtggaacatagagtctcaagtgtctgacctcattaatatgtatcgagacattggccgtgcagctagtgactcgcagagggttggttctgatagatattctagtctaggtttgccctcaagttcccaggaccagttttccagttcatctgatgcaaatgccagcacaaggtcagaagaggacaagaaaaaatctgagcattcctcctgctttgacatgatgagatctctctcctaccatatcaaccatctttttttggagcttggtaaagcaatgctttttgcatctcgtcgggagaatagtcctgtaaacctatccccagccgttatatctgttgctaacaatattgcttctattgtgttggagcacctcaactttgaaggtcattcggtaagttttgagagggacatgactgttaccacaaaatgcagatatcttggaaaggtggttgaatttgttgatgggatgttattagaccggccagaatcatgtaattcgattatggtgaattcattttattgccgtggtgtcattcaggccatcctgaccacatttcaggccaccagtgagttgctcttcacaatgagcaggccaccgtcttcacctatggagacggatagtaaaaccggaaaggatggaaaggagatggattcttcatggatctatggtcccctcaccagttatggggcaattatggatcatcttgtgacctcatcttttattctctcttcatcaactagacaattacttgagcaacctatttttaatggatctgtaaggttccctcaagatgctgagacgttcatgaagttacttcagtcaaaggtgttgaagacagttcttcccatctgggcccatccccagttcccagaatgcaacatcgagctgattagttcagtcatgtccatcatgaggcatgtttgctctggggtggaagtgaaagacactgttggcaatggtggtgctcgtttggctggtccacctcctgatgagagtgcaatttcacttattgtagagatgggtttttctcgtgccagggctgaagaagcattaagacaagttggaacaaacagtgttgaaatagcaactgattggttattcgcacacccagaggaaccacaagaggaggatgatgaacttgctcgggcgcttgcaatgtctcttgggaattctgttacccctgcacaagagggagatagtaggtccaatgatcttgagctggaagaagcaacagttcagccgcctcctatagatgaaatgttacgttcatgtcttcagctacttcagagaaaggaagcattagctttctctgtcagggatatgcttgttactatcagctcacagaatgatggccaaaaccgagtaaaggtgcttacatatttgattgataatctgaaacaatgtgtggtggcatctgagccttcaaatgatactgcattgtctgctcttttacatgttcttgctttgattcttcatggagatactgctgcccgtgaagttgcctcaaaggcaggacttgtgaaggttgctttggatctgctgtgcagctgggaggtgcaaattagggaaagtagcatgattgaggttcctaattgggtaatttcctgtttcctttctgttgatcagatgctccagttggaaccaaagttgccagatgttacagagctacatgtcctgaaaagggataactcaaatataaaaacatcacttgtgattgatgacagcaagagaaaagattcagaatccttgccaaatgttgggttactagacatggaggaccagtttcaacttttgaagatctgttgtaagtgcataggaaaacagttaccttcggcttccatgcatgctattctccagctctctgcaacactgacaaaagtccatgcagctgctatttgtttccttgaatctggtggtttgaatgcattactatcactgccgacaagtagtttgttttctgggttcaacaatatggcttctacaataattcgtcacattttggaggaccctcacacccttcagcaagcaatggaattagagatacgtcacagtcttgttacagctgctaatcgacatgcaaatcccagggttacaccacgcaattttatccagaatttggcttttgtcgtgtatagggacccagtgatatttatgaaagctgcccagtctgtgtgccagattgagatggttggagataggccatatgttgttctgttaaaggatcgtgagaaggaaaggatcaaggagaaagataaggacaagtcagttgataaggataaagcaacagtcgcagtcactaaggtagtttctggggacacagctgcaggatctcctgcaaattctcatggaaaacagtctgatttgaattcaagaaacgtgaaatctcaccgcaagccaccacaaagttttgtcactgttatagagcatctcttagatctgctgatgtcctttgttccgccaccccgtccagaggatcaagttgatgtctctggtactgccttatcttcagacatggatattgactgcagttctgcaaaagggaaagggaaagctgtgtctgtcccacctgaagagagcaagcatgctatccaagagtctactgcatcccttgccaaaactgcatttttccttaagttgctgacagatgtattgttaacttacgcatcatccattcatgttgttcttcgtcatgatgctgagctgagtaacatgcacggtccaaatcgaacaagtgccagactaactagtggtggaatctttaaccatatcctgcagcatttccttcctcatgctacaaggcaaaagaaagagagaaaaaatgatggagattggatgtataaattggcaacaagggctaatcagttcttggtggcttcatctattcgttctgcagaggcccgaaaaaggattttctctgaaatctgcagtatatttcttgatttcactgactcgtctgcagggtacaatgccccagtaccaaggatgaatgtgtatgtcgatttactgaatgatattctgtcagcccgatcaccaactggctcctcgctgtcagcagaatctgcagttatatttgttgaagctggtcttgttcattcattatcgacaatgcttcaagttcttgatttggatcaccctgattctgcaaagattgttactgctgttgttaaggccttggaactcgtcagtaaggaacatattcattcagcagataatgcgaaaggagtgaactcgtcaaagattgcttctgacagcaacaacgtgaattcatcatctaatagattccaggctcttgacatgacttctcagcccacagagatggttactgatcacagggaaacgtttaatgctgtccgaacttcacaaatatcagattcagtggcagatgagatggatcatgatcgtgatatggatggcggctttgctcgtgatggtgaagatgattttatgcatgagatggctgaagatggaactggtgatggatctacaatggaaattagaattgaaattccacgcaatagagaggatgatatggcccctgctgctgatgacactgatgaagatatatctgccgaggatggtgaagatgatgaagacgaagatgaggagaacaacaatctggaggaagatgatgcccatcggatgtctcatcctgacacagatcaggaagaccgtgaaatggatgaagaggaatttgatgaggatctgctagaagaagacgatgaagatgaggatgaggaaggagtcatccttcgcctggaggaggggattaatggcattaatgtgttggaccatgttgaagtatttggtgggagcaacaatttgtctggggatacgctgcgtgtgatgcctctagacatttttggtacaagaaggcaaggccgaagtacctccatatacaatcttcttggtagggctagtgatcatggtgttcttgatcatccacttctcgaagagccttcttcaacaacgaatttttcagaccaagggcatccagagaatcttgttgagatggctttctctgatcgaaaccatgaaagtagctcctctcgtttggatgctatattccgcagcttgcgaagtggacgtaatggacaccgctttaatatgtggctagatgacggtccacaacgtaatggatctgctgcccctgcagtacctgaaggcattgaagaattgctgatctctcatctgagacggcccactcctcaacctgatggccagagaacacctgttggtggtgctcaagaaaatgaccagcccaaccatggatcagatgctgaggcaagggaagtagcaccagctcagcaaaatgagaacagtgaaagtacactgaatcctctagatctgtcagaatgtgctggccctgcacctcctgatagtgatgcacttcaaagagatgtgtccaatgcaagtgagcttgctacagagatgcagtatgaacgtagtgatgctataacacgtgacgttgaagcagtgagccaagcaagcagtggcagtggtgctactttaggggagagcctcagaagtttagaggttgaaataggaagtgttgaagggcatgatgatggtgaccggcatggaacttcaggcacctcagaacgtttacctttgggtgatattcaagcagctgctcgatcacggaggccatctggaaatgctgtgccagtaagcagtagagatatgtctctggagagtgttagtgaggttcctcaaaatccagaccaagaacctgatcagaatgctagtgaggggaatcaggagcctaccagagcggcaggtgctgactcaattgatcctacatttttggaggctcttcctgaggacttgcgagctgaagttctttcttcacgtcaaaatcaagtaactcagacttctaatgaccaacctcaggatgatggtgatattgatcctgaattccttgctgcacttccccctgatataagagaggaggtgctagctcagcaacgtactcaaaggatgcaacaacaatcacaagaattagaaggacaacctgttgaaatggatgctgtttcaattattgcaacattcccttcagaaatccgggaagaggtgcttttgacatctcctgacacactactagccacactcacgcctgcactagttgctgaggccaacatgttaagggagagatttgctcatcggtatcacagtagctccctttttggtatgaactccaggaacaggagaggtgagtcctcccgacgtgacataatggcagcaggacttgatagaaacacaggtgatccctccagatcaactagcaagccaattgagactgaaggtgctcctcttgtcgatgaagatggccttaaagctcttattcggttacttcgagttgttcagcctctatacaagggtcagctgcagaagctacttgtgaatctttgtactcatcggggtagcagacaggccttggttcaaattctagtggacatgcttatgcttgatctgcaggggttttcaaagaaatcaatagatgcacctgagccaccatttaggttgtatggttgccatgcaaatatcgcatattcacgccctcaatcttcggatggtcttcctccattagtctcacgtcgtgtgctcgaaacgctcacgaacttggcaagaagccatccaaatgttgctaaactcttgctctttcttgaattcccttgcccatcaagatgtttccccgaagcacatgatcataggcatggcaaggctgttctcctagatgatggtgaagaacagaaaacctttgcacttgttcttctgttaaatctgttggatcagccactttatatgagaagtgtagctcatcttgaacagagttgaatcctgaggatggcagcaaagcccctgctgttgacaacagaagtaacttgcaagctgttttgcgaagtcttcctcaaccagagcttagattgctatgttcattgcttgcgcatgatggattgtcggacagcgcttatctccttgtaggtgaagtgttgaaaaagattgtggctcttgcccctttcttctgttgccatttcataaatgagcttgcacgttcaatgcaaaacttgacacttcgtgcaatgaaggagcttcatttgtacgagaattctgaaaaggctcttcttagctcttcatcagccaatggtactgcagttcttagagtagtgcaggctttgagctctcttgtcaatactcttcaagagagaaaggatccagaacagcctgctgaaaaggaccattcggacgcagtttcccagatttctgaaattaacacagcattggattctctgtggttggaattgagcaactgcataagcaagatagaaagctcttcagagtatgcatcaaatctaagtcctgcttctgcaagtgcagctatgttaacaacaggagtagcacctccattgcctgcaggaactcaaaacttattaccatatatagaatcattttttgtgacatgtgagaagttgcgtcctgggcaacctgatgctgtacaagatgcttcaacttctgatatggaagatgcttcgacatctagtggtgggcagagatcatctgcttgtcaagctagtcttgatgaaaagcaaaatgcttttgtgaaattctcagagaagcacagaagattgctgaatgcattcatccgtcaaaactctggattgctggaaaagtcattctcgctgatgttgaaaattcctcgcctgattgattttgacaataaacgtgcatattttcggtctaaaatcaagcatcagtatgatcatcatcatcatagccctgttagaatttctgtgcgtcgtccatatattcttgaggactcctacaatcagcttaggatgcgatctcctcaggatttgaagggtaggctcactgtccaatttcaaggagaagaaggaattgatgctggtgggctgacaagggaatggtaccagtcgatatcacgagtcattgttgacaagagtgcccttctgtttacgacagtcgggaatgatttgacgtttcaaccgaatcctaattctgtgtatcaaactgagcacctctcatacttcaaatttgttggacgagtggttggcaaagctctcttcgatggtcagcttttagatgcccacttcactagatctttctacaaacacatacttggtgtcaaggttacataccatgacattgaagccatcgatccttcgtactacaaaaacttgaaatggatgcttgagaatgacataagtgatgttttggatctcacctttagcatggatgcagacgaagagaaactgatattgtacgagaaggcagaggtcactgattgtgagttgattcctggagggcgtaacatcagggttactgaggagaataagcatgaatatgtcgaccgggtagcagagcatagattgaccactgccatcaggcctcagattaatgccttcctggaagggtttaatgaactcattccacgggagctgatatctatcttcaacgacaaagagcttgagcttctgattagtggtcttccagatattgacttggacgatttgaaaacaaatacagaatattctggctacagcatagcctctccagtcgtccagtggttctgggaaatcgttcaggggttcagcaaggaagacaaagctcggttcctccagttcgtcactggcacttcaaaggtatgcagctggtaccgttggaaggttttagtgaacttcaagggatctctgggccacaaaggtttcagatacacaaggcatacggcagcacgaaccatctgccttcagctcatacttgctttaaccaactagacttgcctgagtacacgtccaaagagcagctccaggagaggttactgttggcaatccacgaagcaaatgaaggtttcggatttggctaatcagtcatgctcgtttgtccgtgagagtctgtacagatactgagcattgcaatgggcgagcagcacgtgtgtgctgatccttaccacattctgaactccacgtgtttgatggccggggagaacatagaagaatctccgtgggagaggtactgatgagagagagcgactattttgtgttcataatattcattacctttttttagcttttttcggtcgttgccccgttcgtagtttttgccttacattggacttcgctccgattttttttctctgcttttccttcatagactggtgtaagatgtaaccgaacactatgtcaaatgcaaatcatcttagggccccttcgattattactgaatggaggcatggaataatttctagccgtactgtttctctactatattaaagcatcagttttagttacacgattgtcctgcatctataaaaaaactaaaattatacataattagct

SEQ ID NO: 15929 - DNA, 5094 bp, Zea Mays
gtttcctccctcttcaccccaaacaacaatcacagccctctctccctctcccctcctttacgtcgccgcctccgaatccccacctctttgctcctccgccatcctcctccgcggccgatgtgtgtgccccgccggcccaaaaccctagaggttacgagcaggtaagggtttcgatcggagatggcggctgcggctgcggcgatggccgcacatagagccagcttcccgctgcgcctgcagcagatccttgctggcagccgcgccgtctcacctgcgatcaagatcgagtctgagccgcctgcaaacatcaaagcatttattgatcgagtagtcaatattccactacatgacattgccataccgctatcaggcttctgttgggagttcaataagggaaatttccaccattggaggcctttatttattcattttgacacctatttcaagacatacatttcttctcggaaggatcttcttttatctgatgatatgaccgaggctgaccctatgccaaagaatgccatcttgaaaatcttaagagttatgcagattattttggagaactgccagaatagaagttcttttactggtcttgcgagaatcttgttgagatggctttctctgatcgaaaccatgaaagtagctcctctcgtttggatgctatattccgcagcttgcgaagtggacgtaatggacaccgctttaatatgtggctagatgacggtccacaacgtaatggatctgctgcccctgcagtacctgaaggcattgaagaattgctgatctctcatctgagacggcccactcctcaacctgatggccagagaacacctgttggtggtgctcaagaaaatgaccagcccaaccatggatcagatgctgaggcaagggaagtagcaccagctcagcaaaatgagaacagtgaaagtacactgaatcctctagatctgtcagaatgtgctggccctgcacctcctgatagtgatgcacttcaaagagatgtgtccaatgcaagtgagcttgctacagagatgcagtatgaacgtagtgatgctataacacgtgacgttgaagcagtgagccaagcaagcagtggcagtggtgctactttaggggagagcctcagaagtttagaggttgaaataggaagtgttgaagggcatgatgatggtgaccggcatggaacttcaggcacctcagaacgtttacctttgggtgatattcaagcagctgctcgatcacggaggccatctggaaatgctgtgccagtaagcagtagagatatgtctctggagagtgttagtgaggttcctcaaaatccagaccaagaacctgatcagaatgctagtgaggggaatcaggagcctaccagagcggcaggtgctgactcaattgatcctacatttttggaggctcttcctgaggacttgcgagctgaagttctttcttcacgtcaaaatcaagtaactcagacttctaatgaccaacctcaggatgatggtgatattgatcctgaattccttgctgcacttccccctgatataagagaggaggtgctagctcagcaacgtactcaaaggatgcaacaacaatcacaagaattagaaggacaacctgttgaaatggatgctgtttcaattattgcaacattcccttcagaaatccgggaagaggtgcttttgacatctcctgacacactactagccacactcacgcctgcactagttgctgaggccaacatgttaagggagagatttgctcatcggtatcacagtagctccctttttggtatgaactccaggaacaggagaggtgagtcctcccgacgtgacataatggcagcaggacttgatagaaacacaggtgatccctccagatcaactagcaagccaattgagactgaaggtgctcctcttgtcgatgaagatggccttaaagctcttattcggttacttcgagttgttcagcctctatacaagggtcagctgcagaagctacttgtgaatctttgtactcatcggggtagcagacaggccttggttcaaattctagtggacatgcttatgcttgatctgcaggggttttcaaagaaatcaatagatgcacctgagccaccatttaggttgtatggttgccatgcaaatatcgcatattcacgccctcaatcttcggatggtcttcctccattagtctcacgtcgtgtgctcgaaacgctcacgaacttggcaagaagccatccaaatgttgctaaactcttgctctttcttgaattcccttgcccatcaagatgtttccccgaagcacatgatcataggcatggcaaggctgttctcctagatgatggtgaagaacagaaaacctttgcacttgttcttctgttaaatctgttggatcagccactttatatgagaagtgtagctcatcttgaacagttactaaaccttcttgacgttgtcatgcacaatgctgagaatgaaattaagcaagctaagctagaagcatcatctgagaagccatctgcacctgataatgcagtgcaagatggtaaaaataactccgacatttctgtatcatatggatcagagttgaatcctgaggatggcagcaaagcccctgctgttgacaacagaagtaacttgcaagctgttttgcgaagtcttcctcaaccagagcttagattgctatgttcattgcttgcgcatgatggattgtcggacagcgcttatctccttgtaggtgaagtgttgaaaaagattgtggctcttgcccctttcttctgttgccatttcataaatgagcttgcacgttcaatgcaaaacttgacacttcgtgcaatgaaggagcttcatttgtacgagaattctgaaaaggctcttcttagctcttcatcagccaatggtactgcagttcttagagtagtgcaggctttgagctctcttgtcaatactcttcaagagagaaaggatccagaacagcctgctgaaaaggaccattcggacgcagtttcccagatttctgaaattaacacagcattggattctctgtggttggaattgagcaactgcataagcaagatagaaagctcttcagagtatgcatcaaatctaagtcctgcttctgcaagtgcagctatgttaacaacaggagtagcacctccattgcctgcaggaactcaaaacttattaccatatatagaatcattttttgtgacatgtgagaagttgcgtcctgggcaacctgatgctgtacaagatgcttcaacttctgatatggaagatgcttcgacatctagtggtgggcagagatcatctgcttgtcaagctagtcttgatgaaaagcaaaatgcttttgtgaaattctcagagaagcacagaagattgctgaatgcattcatccgtcaaaactctggattgctggaaaagtcattctcgctgatgttgaaaattcctcgcctgattgattttgacaataaacgtgcatattttcggtctaaaatcaagcatcagtatgatcatcatcatcatagccctgttagaatttctgtgcgtcgtccatatattcttgaggactcctacaatcagcttaggatgcgatctcctcaggatttgaagggtaggctcactgtccaatttcaaggagaagaaggaattgatgctggtgggctgacaagggaatggtaccagtcgatatcacgagtcattgttgacaagagtgcccttctgtttacgacagtcgggaatgatttgacgtttcaaccgaatcctaattctgtgtatcaaactgagcacctctcatacttcaaatttgttggacgagtggttggcaaagctctcttcgatggtcagcttttagatgcccacttcactagatctttctacaaacacatacttggtgtcaaggttacataccatgacattgaagccatcgatccttcgtactacaaaaacttgaaatggatgcttgagaatgacataagtgatgttttggatctcacctttagcatggatgcagacgaagagaaactgatattgtacgagaaggcagaggtcactgattgtgagttgattcctggagggcgtaacatcagggttactgaggagaataagcatgaatatgtcgaccgggtagcagagcatagattgaccactgccatcaggcctcagattaatgccttcctggaagggtttaatgaactcattccacgggagctgatatctatcttcaacgacaaagagcttgagcttctgattagtggtcttccagatattgacttggacgatttgaaaacaaatacagaatattctggctacagcatagcctctccagtcgtccagtggttctgggaaatcgttcaggggttcagcaaggaagacaaagctcggttcctccagttcgtcactggcacttcaaaggtaccgttggaaggttttagtgaacttcaagggatctctgggccacaaaggtttcagatacacaaggcatacggcagcacgaaccatctgccttcagctcatacttgctttaaccaactagacttgcctgagtacacgtccaaagagcagctccaggagaggttactgttggcaatccacgaagcaaatgaaggtttcggatttggctaatcagtcatgctcgtttgtccgtgagagtctgtacagatactgagcattgcaatgggcgagcagcacgtgtgtgctgatccttaccacattctgaactccacgtgtttgatggccggggagaacatagaagaatctccgtgggagaggtactgatgagagagagcgactattttgtgttcataatattcattacctttttttagcttttttcggtcgttgccccgttcgtagtttttgccttacattggacttcgctccgattttttttctctgcttttccttcatagactggtgtaagatgtaaccgaacactatgtcaaatgcaaatcatcttagggccccttcgattattactgaatggaggcatggaataatttctagccgtactgtttctctactatattaaagcatcagttttagttacacgattgtcctgcatctataaaaaaactaaaattatacataattagct

SEQ ID NO: 15930 - DNA, 7080 bp, Zea Mays
gtttcctccctcttcaccccaaacaacaatcacagccctctctccctctcccctcctttacgtcgccgcctccgaatccccacctctttgctcctccgccatcctcctccgcggccgatgtgtgtgccccgccggcccaaaaccctagaggttacgagcaggtaagggtttcgatcggagatggcggctgcggctgcggcgatggccgcacatagagccagcttcccgctgcgcctgcagcagatccttgctggcagccgcgccgtctcacctgcgatcaagatcgagtctgagccgatgctccagttggaaccaaagttgccagatgttacagagctacatgtcctgaaaagggataactcaaatataaaaacatcacttgtgattgatgacagcaagagaaaagattcagaatccttgccaaatgttgggttactagacatggaggaccagtttcaacttttgaagatctgttgtaagtgcataggaaaacagttaccttcggcttccatgcatgctattctccagctctctgcaacactgacaaaagtccatgcagctgctatttgtttccttgaatctggtggtttgaatgcattactatcactgccgacaagtagtttgttttctgggttcaacaatatggcttctacaataattcgtcacattttggaggaccctcacacccttcagcaagcaatggaattagagatacgtcacagtcttgttacagctgctaatcgacatgcaaatcccagggttacaccacgcaattttatccagaatttggcttttgtcgtgtatagggacccagtgatatttatgaaagctgcccagtctgtgtgccagattgagatggttggagataggccatatgttgttctgttaaaggatcgtgagaaggaaaggatcaaggagaaagataaggacaagtcagttgataaggataaagcaacagtcgcagtcactaaggtagtttctggggacacagctgcaggatctcctgcaaattctcatggaaaacagtctgatttgaattcaagaaacgtgaaatctcaccgcaagccaccacaaagttttgtcactgttatagagcatctcttagatctgctgatgtcctttgttccgccaccccgtccagaggatcaagttgatgtctctggtactgccttatcttcagacatggatattgactgcagttctgcaaaagggaaagggaaagctgtgtctgtcccacctgaagagagcaagcatgctatccaagagtctactgcatcccttgccaaaactgcatttttccttaagttgctgacagatgtattgttaacttacgcatcatccattcatgttgttcttcgtcatgatgctgagctgagtaacatgcacggtccaaatcgaacaagtgccagactaactagtggtggaatctttaaccatatcctgcagcatttccttcctcatgctacaaggcaaaagaaagagagaaaaaatgatggagattggatgtataaattggcaacaagggctaatcagttcttggtggcttcatctattcgttctgcagaggcccgaaaaaggattttctctgaaatctgcagtatatttcttgatttcactgactcgtctgcagggtacaatgccccagtaccaaggatgaatgtgtatgtcgatttactgaatgatattctgtcagcccgatcaccaactggctcctcgctgtcagcagaatctgcagttatatttgttgaagctggtcttgttcattcattatcgacaatgcttcaagttcttgatttggatcaccctgattctgcaaagattgttactgctgttgttaaggccttggaactcgtcagtaaggaacatattcattcagcagataatgcgaaaggagtgaactcgtcaaagattgcttctgacagcaacaacgtgaattcatcatctaatagattccaggctcttgacatgacttctcagcccacagagatggttactgatcacagggaaacgtttaatgctgtccgaacttcacaaatatcagattcagtggcagatgagatggatcatgatcgtgatatggatggcggctttgctcgtgatggtgaagatgattttatgcatgagatggctgaagatggaactggtgatggatctacaatggaaattagaattgaaattccacgcaatagagaggatgatatggcccctgctgctgatgacactgatgaagatatatctgccgaggatggtgaagatgatgaagacgaagatgaggagaacaacaatctggaggaagatgatgcccatcggatgtctcatcctgacacagatcaggaagaccgtgaaatggatgaagaggaatttgatgaggatctgctagaagaagacgatgaagatgaggatgaggaaggagtcatccttcgcctggaggaggggattaatggcattaatgtgttggaccatgttgaagtatttggtgggagcaacaatttgtctggggatacgctgcgtgtgatgcctctagacatttttggtacaagaaggcaaggccgaagtacctccatatacaatcttcttggtagggctagtgatcatggtgttcttgatcatccacttctcgaagagccttcttcaacaacgaatttttcagaccaagggcatccagtacctgaaggcattgaagaattgctgatctctcatctgagacggcccactcctcaacctgatggccagagaacacctgttggtggtgctcaagaaaatgaccagcccaaccatggatcagatgctgaggcaagggaagtagcaccagctcagcaaaatgagaacagtgaaagtacactgaatcctctagatctgtcagaatgtgctggccctgcacctcctgatagtgatgcacttcaaagagatgtgtccaatgcaagtgagcttgctacagagatgcagtatgaacgtagtgatgctataacacgtgacgttgaagcagtgagccaagcaagcagtggcagtggtgctactttaggggagagcctcagaagtttagaggttgaaataggaagtgttgaagggcatgatgatggtgaccggcatggaacttcaggcacctcagaacgtttacctttgggtgatattcaagcagctgctcgatcacggaggccatctggaaatgctgtgccagtaagcagtagagatatgtctctggagagtgttagtgaggttcctcaaaatccagaccaagaacctgatcagaatgctagtgaggggaatcaggagcctaccagagcggcaggtgctgactcaattgatcctacatttttggaggctcttcctgaggacttgcgagctgaagttctttcttcacgtcaaaatcaagtaactcagacttctaatgaccaacctcaggatgatggtgatattgatcctgaattccttgctgcacttccccctgatataagagaggaggtgctagctcagcaacgtactcaaaggatgcaacaacaatcacaagaattagaaggacaacctgttgaaatggatgctgtttcaattattgcaacattcccttcagaaatccgggaagaggtgcttttgacatctcctgacacactactagccacactcacgcctgcactagttgctgaggccaacatgttaagggagagatttgctcatcggtatcacagtagctccctttttggtatgaactccaggaacaggagaggtgagtcctcccgacgtgacataatggcagcaggacttgatagaaacacaggtgatccctccagatcaactagcaagccaattgagactgaaggtgctcctcttgtcgatgaagatggccttaaagctcttattcggttacttcgagttgttcagcctctatacaagggtcagctgcagaagctacttgtgaatctttgtactcatcggggtagcagacaggccttggttcaaattctagtggacatgcttatgcttgatctgcaggggttttcaaagaaatcaatagatgcacctgagccaccatttaggttgtatggttgccatgcaaatatcgcatattcacgccctcaatcttcggatggtcttcctccattagtctcacgtcgtgtgctcgaaacgctcacgaacttggcaagaagccatccaaatgttgctaaactcttgctctttcttgaattcccttgcccatcaagatgtttccccgaagcacatgatcataggcatggcaaggctgttctcctagatgatggtgaagaacagaaaacctttgcacttgttcttctgttaaatctgttggatcagccactttatatgagaagtgtagctcatcttgaacagttactaaaccttcttgacgttgtcatgcacaatgctgagaatgaaattaagcaagctaagctagaagcatcatctgagaagccatctgcacctgataatgcagtgcaagatggtaaaaataactccgacatttctgtatcatatggatcagagttgaatcctgaggatggcagcaaagcccctgctgttgacaacagaagtaacttgcaagctgttttgcgaagtcttcctcaaccagagcttagattgctatgttcattgcttgcgcatgatggattgtcggacagcgcttatctccttgtaggtgaagtgttgaaaaagattgtggctcttgcccctttcttctgttgccatttcataaatgagcttgcacgttcaatgcaaaacttgacacttcgtgcaatgaaggagcttcatttgtacgagaattctgaaaaggctcttcttagctcttcatcagccaatggtactgcagttcttagagtagtgcaggctttgagctctcttgtcaatactcttcaagagagaaaggatccagaacagcctgctgaaaaggaccattcggacgcagtttcccagatttctgaaattaacacagcattggattctctgtggttggaattgagcaactgcataagcaagatagaaagctcttcagagtatgcatcaaatctaagtcctgcttctgcaagtgcagctatgttaacaacaggagtagcacctccattgcctgcaggaactcaaaacttattaccatatatagaatcattttttgtgacatgtgagaagttgcgtcctgggcaacctgatgctgtacaagatgcttcaacttctgatatggaagatgcttcgacatctagtggtgggcagagatcatctgcttgtcaagctagtcttgatgaaaagcaaaatgcttttgtgaaattctcagagaagcacagaagattgctgaatgcattcatccgtcaaaactctggattgctggaaaagtcattctcgctgatgttgaaaattcctcgcctgattgattttgacaataaacgtgcatattttcggtctaaaatcaagcatcagtatgatcatcatcatcatagccctgttagaatttctgtgcgtcgtccatatattcttgaggactcctacaatcagcttaggatgcgatctcctcaggatttgaagggtaggctcactgtccaatttcaaggagaagaaggaattgatgctggtgggctgacaagggaatggtaccagtcgatatcacgagtcattgttgacaagagtgcccttctgtttacgacagtcgggaatgatttgacgtttcaaccgaatcctaattctgtgtatcaaactgagcacctctcatacttcaaatttgttggacgagtggttggcaaagctctcttcgatggtcagcttttagatgcccacttcactagatctttctacaaacacatacttggtgtcaaggttacataccatgacattgaagccatcgatccttcgtactacaaaaacttgaaatggatgcttgagaatgacataagtgatgttttggatctcacctttagcatggatgcagacgaagagaaactgatattgtacgagaaggcagaggtatttgctgtgcttgtgtcacaagaatttgtggttttgatcttttctatgttgtaagtcccaagttatctttgcaggtcactgattgtgagttgattcctggagggcgtaacatcagggttactgaggagaataagcatgaatatgtcgaccgggtagcagagcatagattgaccactgccatcaggcctcagattaatgccttcctggaagggtttaatgaactcattccacgggagctgatatctatcttcaacgacaaagagcttgagcttctgattagtggtcttccagatattgacttggacgatttgaaaacaaatacagaatattctggctacagcatagcctctccagtcgtccagtggttctgggaaatcgttcaggggttcagcaaggaagacaaagctcggttcctccagttcgtcactggcacttcaaaggtaccgttggaaggttttagtgaacttcaagggatctctgggccacaaaggtttcagatacacaaggcatacggcagcacgaaccatctgccttcagctcatacttgctttaaccaactagacttgcctgagtacacgtccaaagagcagctccaggagaggttactgttggcaatccacgaagcaaatgaaggtttcggatttggctaatcagtcatgctcgtttgtccgtgagagtctgtacagatactgagcattgcaatgggcgagcagcacgtgtgtgctgatccttaccacattctgaactccacgtgtttgatggccggggagaacatagaagaatctccgtgggagaggtactgatgagagagagcgactattttgtgttcataatattcattacctttttttagcttttttcggtcgttgccccgttcgtagtttttgccttacattggacttcgctccgattttttttctctgcttttccttcatagactggtgtaagatgtaaccgaacactatgtcaaatgcaaatcatcttagggccccttcgattattactgaatggaggcatggaataatttctagccgtactgtttctctactatattaaagcatcagttttagttacacgattgtcctgcatctataaaaaaactaaaattatacataattagct

SEQ ID NO: 15931 - DNA, 11618 bp, Zea Mays
ctgaaccctccaagtttcctccctcttcaccccaaacaacaatcacagccctctctccctctcccctcctttacgtcgccgcctccgaatccccacctctttgctcctccgccatcctcctccgcggccgatgtgtgtgccccgccggcccaaaaccctagaggttacgagcaggtaagggtttcgatcggagatggcggctgcggctgcggcgatggccgcacatagagccagcttcccgctgcgcctgcagcagatccttgctggcagccgcgccgtctcacctgcgatcaagatcgagtctgagccgcctgcaaacatcaaagcatttattgatcgagtagtcaatattccactacatgacattgccataccgctatcaggcttctgttgggagttcaataagtttactttacatacttggaaacagggaaatttccaccattggaggcctttatttattcattttgacacctatttcaagacatacatttcttctcggaaggatcttcttttatctgatgatatgaccgaggctgaccctatgccaaagaatgccatcttgaaaatcttaagagttatgcagattattttggagaactgccagaatagaagttcttttactggtcttgcgcatcttaagcttctcctggcatcgtcagaccctgagatagttgtagcagctttggaaactcttgttgccttggtcaaaataaatccttcaaagttgcatatgaatggaaagctaattagctgcggacctataaacacccatcttctatcattggcccaaggatggggcagcaaggaggaaggtcttggcatatattcttgtgttgtggcaaatgaaggaaaccatcaggggggtttgtccttgttccctgtagacttggagaacaaatatggtggcacacaacatcgtcttggttcaactcttcattttgagtataatttgggtcctgcacagtatcctggccaaactagtgacaagggcaagtcatctaatttgtgtgtgatacatattccagacatgcatcttcagaaagaggatgacttgagcatactgaagcaatgtgtagacaagttcaatgtgcccccagagcacaggtttgcattgcttacaaggataagatatgcccgtgctttcaactctgcacggacttgtaggatctatagccgcataagtcttctttcgttcattgttcttgtgcaatcgagtgatgctcatgatgaactcacatatttctttacaaatgaaccagagtacataaacgagttaatcaggcttgttcggtcagaggattctgttcctgggtccattcgtgctctggctatgctagcactgggagcacagctggcagcatatgcatcatctcatgagcgtgctaggatattgagtggctcaagtattatctctgctggtggcaatcgtatggtcttgctcagtgtcctgcagaaagcaatatcctcactcaatagcctgaatgatacctcatctcctctaattgttgatgcccttcttcagttttttctgctccatgtactgtcttcatcaagttcagggactacggttagaggctcagggatggttcctcctctcttgcccttgctgcgagataatgatccttctcatatgcatcttgtctgcttggcagtgaagactctccaaaagcttatggagtacagcagccctgctgtttctctgtttaaagacttgggtggtgtagagcttttgtctcagaggttacatgtagaagttcagcgtgttattggtactgctgatggacataattcaatggttactgatgcagtgaaatcagatgataaccacatgtactctcagaagcgattgattaaagctttgctcaaggctttggggtctgctacttattcccctgggaatcctgctcgttctcaaagctcccaagataactcattgcctgtctcactttcccttatatttcagaatgtagataagtttgggggtgacatttatttttcagcagttactgttatgagcgaaataatccataaagatcctacatgctttattactttgaaggaactcggtgttccagatgcttttatctcatcagtgactgctggggtaataccatcttgtaaagcccttatctgtgttcctaatggcctgggtgcaatatgcctcaataatcaaggacttgaggctgtcagggaaacttcagcactgcgatttcttgtagataccttcactagcaggaaatacttgataccaatgaatgagggtgtggtccttctagctaatgcagtggaagagcttcttcgtcatgtgcaatccctgagaagtattggtgttgacatcattattgaaataatcaataaactaagttcgtctcaggaatataaaaacaatgaaacagccaccttgcaagaaaaaacagatatggaaactgatgttgaagggcgtgatttggtaagtgctatggactcaagcgtggatggaagtaatgatgaacagttttctcatctgagcattttccatgtgatggtattggtgcaccggacaatggaaaactcggaaacctgccggttatttgtagaaaagggagggctacatgctcttttgacactcttgttgaggcctagcatcacacagtcatctggagggatgcctattgctttgcatagcacgatggtgttcaagggttttactcagcatcactctactccacttgcacgtgcattttgctcatctttaaaggagcatttgaagagtgcattgaaggaacttgataaagtttccaactcatttgatatgaccaagattgaaaaaggagcgatcccatctttgtttgttgttgaatttttgctattcctagctgcctcaaaagataatcgttggatgaatgctttgctctcagaatttggcgatgccagcagggaggtcctggaagatgttgggcaagttcaccgggaagtgctttggaaaatttcgctttttgaaaaaaacaagattgtcgctgaaaccagttcatcttcttccacatctgaagctcagcagcctgacatgtctgccagcgacattggtgatagcagatacacttctttcaggcaatatcttgatccaattttaaggcgaaggggttctgggtggaacatagagtctcaagtgtctgacctcattaatatgtatcgagacattggccgtgcagctagtgactcgcagagggttggttctgatagatattctagtctaggtttgccctcaagttcccaggaccagttttccagttcatctgatgcaaatgccagcacaaggtcagaagaggacaagaaaaaatctgagcattcctcctgctttgacatgatgagatctctctcctaccatatcaaccatctttttttggagcttggtaaagcaatgctttttgcatctcgtcgggagaatagtcctgtaaacctatccccagccgttatatctgttgctaacaatattgcttctattgtgttggagcacctcaactttgaaggtcattcggtaagttttgagagggacatgactgttaccacaaaatgcagatatcttggaaaggtggttgaatttgttgatgggatgttattagaccggccagaatcatgtaattcgattatggtgaattcattttattgccgtggtgtcattcaggccatcctgaccacatttcaggccaccagtgagttgctcttcacaatgagcaggccaccgtcttcacctatggagacggatagtaaaaccggaaaggatggaaaggagatggattcttcatggatctatggtcccctcaccagttatggggcaattatggatcatcttgtgacctcatcttttattctctcttcatcaactagacaattacttgagcaacctatttttaatggatctgtaaggttccctcaagatgctgagacgttcatgaagttacttcagtcaaaggtgttgaagacagttcttcccatctgggcccatccccagttcccagaatgcaacatcgagctgattagttcagtcatgtccatcatgaggcatgtttgctctggggtggaagtgaaagacactgttggcaatggtggtgctcgtttggctggtccacctcctgatgagagtgcaatttcacttattgtagagatgggtttttctcgtgccagggctgaagaagcattaagacaagttggaacaaacagtgttgaaatagcaactgattggttattcgcacacccagaggaaccacaagaggaggatgatgaacttgctcgggcgcttgcaatgtctcttgggaattctgttacccctgcacaagagggagatagtaggtccaatgatcttgagctggaagaagcaacagttcagccgcctcctatagatgaaatgttacgttcatgtcttcagctacttcagagaaaggaagcattagctttctctgtcagggatatgcttgttactatcagctcacagaatgatggccaaaaccgagtaaaggtgcttacatatttgattgataatctgaaacaatgtgtggtggcatctgagccttcaaatgatactgcattgtctgctcttttacatgttcttgctttgattcttcatggagatactgctgcccgtgaagttgcctcaaaggcaggacttgtgaaggttgctttggatctgctgtgcagctgggaggtgcaaattagggaaagtagcatgattgaggttcctaattgggtaatttcctgtttcctttctgttgatcagatgctccagttggaaccaaagttgccagatgttacagagctacatgtcctgaaaagggataactcaaatataaaaacatcacttgtgattgatgacagcaagagaaaagattcagaatccttgccaaatgttgggttactagacatggaggaccagtttcaacttttgaagatctgttgtaagtgcataggaaaacagttaccttcggcttccatgcatgctattctccagctctctgcaacactgacaaaagtccatgcagctgctatttgtttccttgaatctggtggtttgaatgcattactatcactgccgacaagtagtttgttttctgggttcaacaatatggcttctacaataattcgtcacattttggaggaccctcacacccttcagcaagcaatggaattagagatacgtcacagtcttgttacagctgctaatcgacatgcaaatcccagggttacaccacgcaattttatccagaatttggcttttgtcgtgtatagggacccagtgatatttatgaaagctgcccagtctgtgtgccagattgagatggttggagataggccatatgttgttctgttaaaggatcgtgagaaggaaaggatcaaggagaaagataaggacaagtcagttgataaggataaagcaacagtcgcagtcactaaggtagtttctggggacacagctgcaggatctcctgcaaattctcatggaaaacagtctgatttgaattcaagaaacgtgaaatctcaccgcaagccaccacaaagttttgtcactgttatagagcatctcttagatctgctgatgtcctttgttccgccaccccgtccagaggatcaagttgatgtctctggtactgccttatcttcagacatggatattgactgcagttctgcaaaagggaaagggaaagctgtgtctgtcccacctgaagagagcaagcatgctatccaagagtctactgcatcccttgccaaaactgcatttttccttaagttgctgacagatgtattgttaacttacgcatcatccattcatgttgttcttcgtcatgatgctgagctgagtaacatgcacggtccaaatcgaacaagtgccagactaactagtggtggaatctttaaccatatcctgcagcatttccttcctcatgctacaaggcaaaagaaagagagaaaaaatgatggagattggatgtataaattggcaacaagggctaatcagttcttggtggcttcatctattcgttctgcagaggcccgaaaaaggattttctctgaaatctgcagtatatttcttgatttcactgactcgtctgcagggtacaatgccccagtaccaaggatgaatgtgtatgtcgatttactgaatgatattctgtcagcccgatcaccaactggctcctcgctgtcagcagaatctgcagttatatttgttgaagctggtcttgttcattcattatcgacaatgcttcaagttcttgatttggatcaccctgattctgcaaagattgttactgctgttgttaaggccttggaactcgtcagtaaggaacatattcattcagcagataatgcgaaaggagtgaactcgtcaaagattgcttctgacagcaacaacgtgaattcatcatctaatagattccaggctcttgacatgacttctcagcccacagagatggttactgatcacagggaaacgtttaatgctgtccgaacttcacaaatatcagattcagtggcagatgagatggatcatgatcgtgatatggatggcggctttgctcgtgatggtgaagatgattttatgcatgagatggctgaagatggaactggtgatggatctacaatggaaattagaattgaaattccacgcaatagagaggatgatatggcccctgctgctgatgacactgatgaagatatatctgccgaggatggtgaagatgatgaagacgaagatgaggagaacaacaatctggaggaagatgatgcccatcggatgtctcatcctgacacagatcaggaagaccgtgaaatggatgaagaggaatttgatgaggatctgctagaagaagacgatgaagatgaggatgaggaaggagtcatccttcgcctggaggaggggattaatggcattaatgtgttggaccatgttgaagtatttggtgggagcaacaatttgtctggggatacgctgcgtgtgatgcctctagacatttttggtacaagaaggcaaggccgaagtacctccatatacaatcttcttggtagggctagtgatcatggtgttcttgatcatccacttctcgaagagccttcttcaacaacgaatttttcagaccaagggcatccagagaatcttgttgagatggctttctctgatcgaaaccatgaaagtagctcctctcgtttggatgctatattccgcagcttgcgaagtggacgtaatggacaccgctttaatatgtggctagatgacggtccacaacgtaatggatctgctgcccctgcagtacctgaaggcattgaagaattgctgatctctcatctgagacggcccactcctcaacctgatggccagagaacacctgttggtggtgctcaagaaaatgaccagcccaaccatggatcagatgctgaggcaagggaagtagcaccagctcagcaaaatgagaacagtgaaagtacactgaatcctctagatctgtcagaatgtgctggccctgcacctcctgatagtgatgcacttcaaagagatgtgtccaatgcaagtgagcttgctacagagatgcagtatgaacgtagtgatgctataacacgtgacgttgaagcagtgagccaagcaagcagtggcagtggtgctactttaggggagagcctcagaagtttagaggttgaaataggaagtgttgaagggcatgatgatggtgaccggcatggaacttcaggcacctcagaacgtttacctttgggtgatattcaagcagctgctcgatcacggaggccatctggaaatgctgtgccagtaagcagtagagatatgtctctggagagtgttagtgaggttcctcaaaatccagaccaagaacctgatcagaatgctagtgaggggaatcaggagcctaccagagcggcaggtgctgactcaattgatcctacatttttggaggctcttcctgaggacttgcgagctgaagttctttcttcacgtcaaaatcaagtaactcagacttctaatgaccaacctcaggatgatggtgatattgatcctgaattccttgctgcacttccccctgatataagagaggaggtgctagctcagcaacgtactcaaaggatgcaacaacaatcacaagaattagaaggacaacctgttgaaatggatgctgtttcaattattgcaacattcccttcagaaatccgggaagaggtgcttttgacatctcctgacacactactagccacactcacgcctgcactagttgctgaggccaacatgttaagggagagatttgctcatcggtatcacagtagctccctttttggtatgaactccaggaacaggagaggtgagtcctcccgacgtgacataatggcagcaggacttgatagaaacacaggtgatccctccagatcaactagcaagccaattgagactgaaggtgctcctcttgtcgatgaagatggccttaaagctcttattcggttacttcgagttgttcagcctctatacaagggtcagctgcagaagctacttgtgaatctttgtactcatcggggtagcagacaggccttggttcaaattctagtggacatgcttatgcttgatctgcaggggttttcaaagaaatcaatagatgcacctgagccaccatttaggttgtatggttgccatgcaaatatcgcatattcacgccctcaatcttcggatggtcttcctccattagtctcacgtcgtgtgctcgaaacgctcacgaacttggcaagaagccatccaaatgttgctaaactcttgctctttcttgaattcccttgcccatcaagatgtttccccgaagcacatgatcataggcatggcaaggctgttctcctagatgatggtgaagaacagaaaacctttgcacttgttcttctgttaaatctgttggatcagccactttatatgagaagtgtagctcatcttgaacagttactaaaccttcttgacgttgtcatgcacaatgctgagaatgaaattaagcaagctaagctagaagcatcatctgagaagccatctgcacctgataatgcagtgcaagatggtaaaaataactccgacatttctgtatcatatggatcagagttgaatcctgaggatggcagcaaagcccctgctgttgacaacagaagtaacttgcaagctgttttgcgaagtcttcctcaaccagagcttagattgctatgttcattgcttgcgcatgatggattgtcggacagcgcttatctccttgtaggtgaagtgttgaaaaagattgtggctcttgcccctttcttctgttgccatttcataaatgagcttgcacgttcaatgcaaaacttgacacttcgtgcaatgaaggagcttcatttgtacgagaattctgaaaaggctcttcttagctcttcatcagccaatggtactgcagttcttagagtagtgcaggctttgagctctcttgtcaatactcttcaagagagaaaggatccagaacagcctgctgaaaaggaccattcggacgcagtttcccagatttctgaaattaacacagcattggattctctgtggttggaattgagcaactgcataagcaagatagaaagctcttcagagtatgcatcaaatctaagtcctgcttctgcaagtgcagctatgttaacaacaggagtagcacctccattgcctgcaggaactcaaaacttattaccatatatagaatcattttttgtgacatgtgagaagttgcgtcctgggcaacctgatgctgtacaagatgcttcaacttctgatatggaagatgcttcgacatctagtggtgggcagagatcatctgcttgtcaagctagtcttgatgaaaagcaaaatgcttttgtgaaattctcagagaagcacagaagattgctgaatgcattcatccgtcaaaactctggattgctggaaaagtcattctcgctgatgttgaaaattcctcgcctgattgattttgacaataaacgtgcatattttcggtctaaaatcaagcatcagtatgatcatcatcatcatagccctgttagaatttctgtgcgtcgtccatatattcttgaggactcctacaatcagcttaggatgcgatctcctcaggatttgaagggtaggctcactgtccaatttcaaggagaagaaggaattgatgctggtgggctgacaagggaatggtaccagtcgatatcacgagtcattgttgacaagagtgcccttctgtttacgacagtcgggaatgatttgacgtttcaaccgaatcctaattctgtgtatcaaactgagcacctctcatacttcaaatttgttggacgagtggttggcaaagctctcttcgatggtcagcttttagatgcccacttcactagatctttctacaaacacatacttggtgtcaaggttacataccatgacattgaagccatcgatccttcgtactacaaaaacttgaaatggatgcttgagaatgacataagtgatgttttggatctcacctttagcatggatgcagacgaagagaaactgatattgtacgagaaggcagaggtcactgattgtgagttgattcctggagggcgtaacatcagggttactgaggagaataagcatgaatatgtcgaccgggtagcagagcatagattgaccactgccatcaggcctcagattaatgccttcctggaagggtttaatgaactcattccacgggagctgatatctatcttcaacgacaaagagcttgagcttctgattagtggtcttccagatattgacttggacgatttgaaaacaaatacagaatattctggctacagcatagcctctccagtcgtccagtggttctgggaaatcgttcaggggttcagcaaggaagacaaagctcggttcctccagttcgtcactggcacttcaaaggtaccgttggaaggttttagtgaacttcaagggatctctgggccacaaaggtttcagatacacaaggcatacggcagcacgaaccatctgccttcagctcatacttgctttaaccaactagacttgcctgagtacacgtccaaagagcagctccaggagaggttactgttggcaatccacgaagcaaatgaaggtttcggatttggctaatcagtcatgctcgtttgtccgtgagagtctgtacagatactgagcattgcaatgggcgagcagcacgtgtgtgctgatccttaccacattctgaactccacgtgtttgatggccggggagaacatagaagaatctccgtgggagaggtactgatgagagagagcgactattttgtgttcataatattcattacctttttttagcttttttcggtcgttgccccgttcgtagtttttgccttacattggacttcgctccgattttttttctctgcttttccttcatagactggtgtaagatgtaaccgaacactatgtcaaatgcaaatcatcttagggccccttcgattattactgaatggaggcatggaataatttctagccgtactgtttctctactatattaaagcatcagttttagttacacgattgtcctgcatctataaaaaaactaaaattatacataattagct

SEQ ID NO: 15932 - DNA, 11435 bp, Zea Mays
ctgaaccctccaagtttcctccctcttcaccccaaacaacaatcacagccctctctccctctcccctcctttacgtcgccgcctccgaatccccacctctttgctcctccgccatcctcctccgcggccgatgtgtgtgccccgccggcccaaaaccctagaggttacgagcaggtaagggtttcgatcggagatggcggctgcggctgcggcgatggccgcacatagagccagcttcccgctgcgcctgcagcagatccttgctggcagccgcgccgtctcacctgcgatcaagatcgagtctgagccgcctgcaaacatcaaagcatttattgatcgagtagtcaatattccactacatgacattgccataccgctatcaggcttctgttgggagttcaataagggaaatttccaccattggaggcctttatttattcattttgacacctatttcaagacatacatttcttctcggaaggatcttcttttatctgatgatatgaccgaggctgaccctatgccaaagaatgccatcttgaaaatcttaagagttatgcagattattttggagaactgccagaatagaagttcttttactggtcttgcgcatcttaagcttctcctggcatcgtcagaccctgagatagttgtagcagctttggaaactcttgttgccttggtcaaaataaatccttcaaagttgcatatgaatggaaagctaattagctgcggacctataaacacccatcttctatcattggcccaaggatggggcagcaaggaggaaggtcttggcatatattcttgtgttgtggcaaatgaaggaaaccatcaggggggtttgtccttgttccctgtagacttggagaacaaatatggtggcacacaacatcgtcttggttcaactcttcattttgagtataatttgggtcctgcacagtatcctggccaaactagtgacaagggcaagtcatctaatttgtgtgtgatacatattccagacatgcatcttcagaaagaggatgacttgagcatactgaagcaatgtgtagacaagttcaatgtgcccccagagcacaggtttgcattgcttacaaggataagatatgcccgtgctttcaactctgcacggacttgtaggatctatagccgcataagtcttctttcgttcattgttcttgtgcaatcgagtgatgctcatgatgaactcacatatttctttacaaatgaaccagagtacataaacgagttaatcaggcttgttcggtcagaggattctgttcctgggtccattcgtgctctggctatgctagcactgggagcacagctggcagcatatgcatcatctcatgagcgtgctaggatattgagtggctcaagtattatctctgctggtggcaatcgtatggtcttgctcagtgtcctgcagaaagcaatatcctcactcaatagcctgaatgatacctcatctcctctaattgttgatgcccttcttcagttttttctgctccatgtactgtcttcatcaagttcagggactacggttagaggctcagggatggttcctcctctcttgcccttgctgcgagataatgatccttctcatatgcatcttgtctgcttggcagtgaagactctccaaaagcttatggagtacagcagccctgctgtttctctgtttaaagacttgggtggtgtagagcttttgtctcagaggttacatgtagaagttcagcgtgttattggtactgctgatggacataattcaatggttactgatgcagtgaaatcagatgataaccacatgtactctcagaagcgattgattaaagctttgctcaaggctttggggtctgctacttattcccctgggaatcctgctcgttctcaaagctcccaagataactcattgcctgtctcactttcccttatatttcagaatgtagataagtttgggggtgacatttatttttcagcagttactgttatgagcgaaataatccataaagatcctacatgctttattactttgaaggaactcggtgttccagatgcttttatctcatcagtgactgctggggtaataccatcttgtaaagcccttatctgtgttcctaatggcctgggtgcaatatgcctcaataatcaaggacttgaggctgtcagggaaacttcagcactgcgatttcttgtagataccttcactagcaggaaatacttgataccaatgaatgagggtgtggtccttctagctaatgcagtggaagagcttcttcgtcatgtgcaatccctgagaagtattggtgttgacatcattattgaaataatcaataaactaagttcgtctcaggaatataaaaacaatgaaacagccaccttgcaagaaaaaacagatatggaaactgatgttgaagggcgtgatttggtaagtgctatggactcaagcgtggatggaagtaatgatgaacagttttctcatctgagcattttccatgtgatggtattggtgcaccggacaatggaaaactcggaaacctgccggttatttgtagaaaagggagggctacatgctcttttgacactcttgttgaggcctagcatcacacagtcatctggagggatgcctattgctttgcatagcacgatggtgttcaagggttttactcagcatcactctactccacttgcacgtgcattttgctcatctttaaaggagcatttgaagagtgcattgaaggaacttgataaagtttccaactcatttgatatgaccaagattgaaaaaggagcgatcccatctttgtttgttgttgaatttttgctattcctagctgcctcaaaagataatcgttggatgaatgctttgctctcagaatttggcgatgccagcagggaggtcctggaagatgttgggcaagttcaccgggaagtgctttggaaaatttcgctttttgaaaaaaacaagattgtcgctgaaaccagttcatcttcttccacatctgaagctcagcagcctgacatgtctgccagcgacattggtgatagcagatacacttctttcaggcaatatcttgatccaattttaaggcgaaggggttctgggtggaacatagagtctcaagtgtctgacctcattaatatgtatcgagacattggccgtgcagctagtgactcgcagagggttggttctgatagatattctagtctaggtttgccctcaagttcccaggaccagttttccagttcatctgatgcaaatgccagcacaaggtcagaagaggacaagaaaaaatctgagcattcctcctgctttgacatgatgagatctctctcctaccatatcaaccatctttttttggagcttggtaaagcaatgctttttgcatctcgtcgggagaatagtcctgtaaacctatccccagccgttatatctgttgctaacaatattgcttctattgtgttggagcacctcaactttgaaggtcattcggtaagttttgagagggacatgactgttaccacaaaatgcagatatcttggaaaggtggttgaatttgttgatgggatgttattagaccggccagaatcatgtaattcgattatggtgaattcattttattgccgtggtgtcattcaggccatcctgaccacatttcaggccaccagtgagttgctcttcacaatgagcaggccaccgtcttcacctatggagacggatagtaaaaccggaaaggatggaaaggagatggattcttcatggatctatggtcccctcaccagttatggggcaattatggatcatcttgtgacctcatcttttattctctcttcatcaactagacaattacttgagcaacctatttttaatggatctgtaaggttccctcaagatgctgagacgttcatgaagttacttcagtcaaaggtgttgaagacagttcttcccatctgggcccatccccagttcccagaatgcaacatcgagctgattagttcagtcatgtccatcatgaggcatgtttgctctggggtggaagtgaaagacactgttggcaatggtggtgctcgtttggctggtccacctcctgatgagagtgcaatttcacttattgtagagatgggtttttctcgtgccagggctgaagaagcattaagacaagttggaacaaacagtgttgaaatagcaactgattggttattcgcacacccagaggaaccacaagaggaggatgatgaacttgctcgggcgcttgcaatgtctcttgggaattctgttacccctgcacaagagggagatagtaggtccaatgatcttgagctggaagaagcaacagttcagccgcctcctatagatgaaatgttacgttcatgtcttcagctacttcagagaaaggaagcattagctttctctgtcagggatatgcttgttactatcagctcacagaatgatggccaaaaccgagtaaaggtgcttacatatttgattgataatctgaaacaatgtgtggtggcatctgagccttcaaatgatactgcattgtctgctcttttacatgttcttgctttgattcttcatggagatactgctgcccgtgaagttgcctcaaaggcaggacttgtgaaggttgctttggatctgctgtgcagctgggaggtgcaaattagggaaagtagcatgattgaggttcctaattgggtaatttcctgtttcctttctgttgatcagatgctccagttggaaccaaagttgccagatgttacagagctacatgtcctgaaaagggataactcaaatataaaaacatcacttgtgattgatgacagcaagagaaaagattcagaatccttgccaaatgttgggttactagacatggaggaccagtttcaacttttgaagatctgttgtaagtgcataggaaaacagttaccttcggcttccatgcatgctattctccagctctctgcaacactgacaaaagtccatgcagctgctatttgtttccttgaatctggtggtttgaatgcattactatcactgccgacaagtagtttgttttctgggttcaacaatatggcttctacaataattcgtcacattttggaggaccctcacacccttcagcaagcaatggaattagagatacgtcacagtcttgttacagctgctaatcgacatgcaaatcccagggttacaccacgcaattttatccagaatttggcttttgtcgtgtatagggacccagtgatatttatgaaagctgcccagtctgtgtgccagattgagatggttggagataggccatatgttgttctgttaaaggatcgtgagaaggaaaggatcaaggagaaagataaggacaagtcagttgataaggataaagcaacagtcgcagtcactaaggtagtttctggggacacagctgcaggatctcctgcaaattctcatggaaaacagtctgatttgaattcaagaaacgtgaaatctcaccgcaagccaccacaaagttttgtcactgttatagagcatctcttagatctgctgatgtcctttgttccgccaccccgtccagaggatcaagttgatgtctctggtactgccttatcttcagacatggatattgactgcagttctgcaaaagggaaagggaaagctgtgtctgtcccacctgaagagagcaagcatgctatccaagagtctactgcatcccttgccaaaactgcatttttccttaagttgctgacagatgtattgttaacttacgcatcatccattcatgttgttcttcgtcatgatgctgagctgagtaacatgcacggtccaaatcgaacaagtgccagactaactagtggtggaatctttaaccatatcctgcagcatttccttcctcatgctacaaggcaaaagaaagagagaaaaaatgatggagattggatgtataaattggcaacaagggctaatcagttcttggtggcttcatctattcgttctgcagaggcccgaaaaaggattttctctgaaatctgcagtatatttcttgatttcactgactcgtctgcagggtacaatgccccagtaccaaggatgaatgtgtatgtcgatttactgaatgatattctgtcagcccgatcaccaactggctcctcgctgtcagcagaatctgcagttatatttgttgaagctggtcttgttcattcattatcgacaatgcttcaagttcttgatttggatcaccctgattctgcaaagattgttactgctgttgttaaggccttggaactcgtcagtaaggaacatattcattcagcagataatgcgaaaggagtgaactcgtcaaagattgcttctgacagcaacaacgtgaattcatcatctaatagattccaggctcttgacatgacttctcagcccacagagatggttactgatcacagggaaacgtttaatgctgtccgaacttcacaaatatcagattcagtggcagatgagatggatcatgatcgtgatatggatggcggctttgctcgtgatggtgaagatgattttatgcatgagatggctgaagatggaactggtgatggatctacaatggaaattagaattgaaattccacgcaatagagaggatgatatggcccctgctgctgatgacactgatgaagatatatctgccgaggatggtgaagatgatgaagacgaagatgaggagaacaacaatctggaggaagatgatgcccatcggatgtctcatcctgacacagatcaggaagaccgtgaaatggatgaagaggaatttgatgaggatctgctagaagaagacgatgaagatgaggatgaggaaggagtcatccttcgcctggaggaggggattaatggcattaatgtgttggaccatgttgaagtatttggtgggagcaacaatttgtctggggatacgctgcgtgtgatgcctctagacatttttggtacaagaaggcaaggccgaagtacctccatatacaatcttcttggtagggctagtgatcatggtgttcttgatcatccacttctcgaagagccttcttcaacaacgaatttttcagaccaagggcatccagtacctgaaggcattgaagaattgctgatctctcatctgagacggcccactcctcaacctgatggccagagaacacctgttggtggtgctcaagaaaatgaccagcccaaccatggatcagatgctgaggcaagggaagtagcaccagctcagcaaaatgagaacagtgaaagtacactgaatcctctagatctgtcagaatgtgctggccctgcacctcctgatagtgatgcacttcaaagagatgtgtccaatgcaagtgagcttgctacagagatgcagtatgaacgtagtgatgctataacacgtgacgttgaagcagtgagccaagcaagcagtggcagtggtgctactttaggggagagcctcagaagtttagaggttgaaataggaagtgttgaagggcatgatgatggtgaccggcatggaacttcaggcacctcagaacgtttacctttgggtgatattcaagcagctgctcgatcacggaggccatctggaaatgctgtgccagtaagcagtagagatatgtctctggagagtgttagtgaggttcctcaaaatccagaccaagaacctgatcagaatgctagtgaggggaatcaggagcctaccagagcggcaggtgctgactcaattgatcctacatttttggaggctcttcctgaggacttgcgagctgaagttctttcttcacgtcaaaatcaagtaactcagacttctaatgaccaacctcaggatgatggtgatattgatcctgaattccttgctgcacttccccctgatataagagaggaggtgctagctcagcaacgtactcaaaggatgcaacaacaatcacaagaattagaaggacaacctgttgaaatggatgctgtttcaattattgcaacattcccttcagaaatccgggaagaggtgcttttgacatctcctgacacactactagccacactcacgcctgcactagttgctgaggccaacatgttaagggagagatttgctcatcggtatcacagtagctccctttttggtatgaactccaggaacaggagaggtgagtcctcccgacgtgacataatggcagcaggacttgatagaaacacaggtgatccctccagatcaactagcaagccaattgagactgaaggtgctcctcttgtcgatgaagatggccttaaagctcttattcggttacttcgagttgttcagcctctatacaagggtcagctgcagaagctacttgtgaatctttgtactcatcggggtagcagacaggccttggttcaaattctagtggacatgcttatgcttgatctgcaggggttttcaaagaaatcaatagatgcacctgagccaccatttaggttgtatggttgccatgcaaatatcgcatattcacgccctcaatcttcggatggtcttcctccattagtctcacgtcgtgtgctcgaaacgctcacgaacttggcaagaagccatccaaatgttgctaaactcttgctctttcttgaattcccttgcccatcaagatgtttccccgaagcacatgatcataggcatggcaaggctgttctcctagatgatggtgaagaacagaaaacctttgcacttgttcttctgttaaatctgttggatcagccactttatatgagaagtgtagctcatcttgaacagttactaaaccttcttgacgttgtcatgcacaatgctgagaatgaaattaagcaagctaagctagaagcatcatctgagaagccatctgcacctgataatgcagtgcaagatggtaaaaataactccgacatttctgtatcatatggatcagagttgaatcctgaggatggcagcaaagcccctgctgttgacaacagaagtaacttgcaagctgttttgcgaagtcttcctcaaccagagcttagattgctatgttcattgcttgcgcatgatggattgtcggacagcgcttatctccttgtaggtgaagtgttgaaaaagattgtggctcttgcccctttcttctgttgccatttcataaatgagcttgcacgttcaatgcaaaacttgacacttcgtgcaatgaaggagcttcatttgtacgagaattctgaaaaggctcttcttagctcttcatcagccaatggtactgcagttcttagagtagtgcaggctttgagctctcttgtcaatactcttcaagagagaaaggatccagaacagcctgctgaaaaggaccattcggacgcagtttcccagatttctgaaattaacacagcattggattctctgtggttggaattgagcaactgcataagcaagatagaaagctcttcagagtatgcatcaaatctaagtcctgcttctgcaagtgcagctatgttaacaacaggagtagcacctccattgcctgcaggaactcaaaacttattaccatatatagaatcattttttgtgacatgtgagaagttgcgtcctgggcaacctgatgctgtacaagatgcttcaacttctgatatggaagatgcttcgacatctagtggtgggcagagatcatctgcttgtcaagctagtcttgatgaaaagcaaaatgcttttgtgaaattctcagagaagcacagaagattgctgaatgcattcatccgtcaaaactctggattgctggaaaagtcattctcgctgatgttgaaaattcctcgcctgattgattttgacaataaacgtgcatattttcggtctaaaatcaagcatcagtatgatcatcatcatcatagccctgttagaatttctgtgcgtcgtccatatattcttgaggactcctacaatcagcttaggatgcgatctcctcaggatttgaagggtaggctcactgtccaatttcaaggagaagaaggaattgatgctggtgggctgacaagggaatggtaccagtcgatatcacgagtcattgttgacaagagtgcccttctgtttacgacagtcgggaatgatttgacgtttcaaccgaatcctaattctgtgtatcaaactgagcacctctcatacttcaaatttgttggacgagtggttggcaaagctctcttcgatggtcagcttttagatgcccacttcactagatctttctacaaacacatacttggtgtcaaggttacataccatgacattgaagccatcgatccttcgtactacaaaaacttgaaatggatgcttgagaatgacataagtgatgttttggatctcacctttagcatggatgcagacgaagagaaactgatattgtacgagaaggcagaggtcactgattgtgagttgattcctggagggcgtaacatcagggttactgaggagaataagcatgaatatgtcgaccgggtagcagagcatagattgaccactgccatcaggcctcagattaatgccttcctggaagggtttaatgaactcattccacgggagctgatatctatcttcaacgacaaagagcttgagcttctgattagtggtcttccagatattgacttggacgatttgaaaacaaatacagaatattctggctacagcatagcctctccagtcgtccagtggttctgggaaatcgttcaggggttcagcaaggaagacaaagctcggttcctccagttcgtcactggcacttcaaaggtaccgttggaaggttttagtgaacttcaagggatctctgggccacaaaggtttcagatacacaaggcatacggcagcacgaaccatctgccttcagctcatacttgctttaaccaactagacttgcctgagtacacgtccaaagagcagctccaggagaggttactgttggcaatccacgaagcaaatgaaggtttcggatttggctaatcagtcatgctcgtttgtccgtgagagtctgtacagatactgagcattgcaatgggcgagcagcacgtgtgtgctgatccttaccacattctgaactccacgtgtttgatggccggggagaacatagaagaatctccgtgggagaggtactgatgagagagagcgactattttgtgttcataatattcattacctttttttagcttttttcggtcgttgccccgttcgtagtttttgccttacattggacttcgctccgattttttttctctgcttttccttcatagactggtgtaagatgtaaccgaacactatgtcaaatgcaaatcatcttagggccccttcgattattactgaatggaggcatggaataatttctagccgtactgtttctctactatattaaagcatcagttttagttacacgattgtcctgcatctataaaaaaactaaaattatacataattagct

SEQ ID NO: 15933 - DNA, 11563 bp, Zea Mays
cgaaccgacccaactctgaaccctccaagtttcctccctcttcaccccaaacaacaatcacagccctctctccctctcccctcctttacgtcgccgcctccgaatccccacctctttgctcctccgccatcctcctccgcggccgatgtgtgtgccccgccggcccaaaaccctagaggttacgagcaggtaagggtttcgatcggagatggcggctgcggctgcggcgatggccgcacatagagccagcttcccgctgcgcctgcagcagatccttgctggcagccgcgccgtctcacctgcgatcaagatcgagtctgagccgcctgcaaacatcaaagcatttattgatcgagtagtcaatattccactacatgacattgccataccgctatcaggcttctgttgggagttcaataagggaaatttccaccattggaggcctttatttattcattttgacacctatttcaagacatacatttcttctcggaaggatcttcttttatctgatgatatgaccgaggctgaccctatgccaaagaatgccatcttgaaaatcttaagagttatgcagattattttggagaactgccagaatagaagttcttttactggtcttgcgcatcttaagcttctcctggcatcgtcagaccctgagatagttgtagcagctttggaaactcttgttgccttggtcaaaataaatccttcaaagttgcatatgaatggaaagctaattagctgcggacctataaacacccatcttctatcattggcccaaggatggggcagcaaggaggaaggtcttggcatatattcttgtgttgtggcaaatgaaggaaaccatcaggggggtttgtccttgttccctgtagacttggagaacaaatatggtggcacacaacatcgtcttggttcaactcttcattttgagtataatttgggtcctgcacagtatcctggccaaactagtgacaagggcaagtcatctaatttgtgtgtgatacatattccagacatgcatcttcagaaagaggatgacttgagcatactgaagcaatgtgtagacaagttcaatgtgcccccagagcacaggtttgcattgcttacaaggataagatatgcccgtgctttcaactctgcacggacttgtaggatctatagccgcataagtcttctttcgttcattgttcttgtgcaatcgagtgatgctcatgatgaactcacatatttctttacaaatgaaccagagtacataaacgagttaatcaggcttgttcggtcagaggattctgttcctgggtccattcgtgctctggctatgctagcactgggagcacagctggcagcatatgcatcatctcatgagcgtgctaggatattgagtggctcaagtattatctctgctggtggcaatcgtatggtcttgctcagtgtcctgcagaaagcaatatcctcactcaatagcctgaatgatacctcatctcctctaattgttgatgcccttcttcagttttttctgctccatgtactgtcttcatcaagttcagggactacggttagaggctcagggatggttcctcctctcttgcccttgctgcgagataatgatccttctcatatgcatcttgtctgcttggcagtgaagactctccaaaagcttatggagtacagcagccctgctgtttctctgtttaaagacttgggtggtgtagagcttttgtctcagaggttacatgtagaagttcagcgtgttattggtactgctgatggacataattcaatggttactgatgcagtgaaatcagatgataaccacatgtactctcagaagcgattgattaaagctttgctcaaggctttggggtctgctacttattcccctgggaatcctgctcgttctcaaagctcccaagataactcattgcctgtctcactttcccttatatttcagaatgtagataagtttgggggtgacatttatttttcagcagttactgttatgagcgaaataatccataaagatcctacatgctttattactttgaaggaactcggtgttccagatgcttttatctcatcagtgactgctggggtaataccatcttgtaaagcccttatctgtgttcctaatggcctgggtgcaatatgcctcaataatcaaggacttgaggctgtcagggaaacttcagcactgcgatttcttgtagataccttcactagcaggaaatacttgataccaatgaatgagggtgtggtccttctagctaatgcagtggaagagcttcttcgtcatgtgcaatccctgagaagtattggtgttgacatcattattgaaataatcaataaactaagttcgtctcaggaatataaaaacaatgaaacagccaccttgcaagaaaaaacagatatggaaactgatgttgaagggcgtgatttggtaagtgctatggactcaagcgtggatggaagtaatgatgaacagttttctcatctgagcattttccatgtgatggtattggtgcaccggacaatggaaaactcggaaacctgccggttatttgtagaaaagggagggctacatgctcttttgacactcttgttgaggcctagcatcacacagtcatctggagggatgcctattgctttgcatagcacgatggtgttcaagggttttactcagcatcactctactccacttgcacgtgcattttgctcatctttaaaggagcatttgaagagtgcattgaaggaacttgataaagtttccaactcatttgatatgaccaagattgaaaaaggagcgatcccatctttgtttgttgttgaatttttgctattcctagctgcctcaaaagataatcgttggatgaatgctttgctctcagaatttggcgatgccagcagggaggtcctggaagatgttgggcaagttcaccgggaagtgctttggaaaatttcgctttttgaaaaaaacaagattgtcgctgaaaccagttcatcttcttccacatctgaagctcagcagcctgacatgtctgccagcgacattggtgatagcagatacacttctttcaggcaatatcttgatccaattttaaggcgaaggggttctgggtggaacatagagtctcaagtgtctgacctcattaatatgtatcgagacattggccgtgcagctagtgactcgcagagggttggttctgatagatattctagtctaggtttgccctcaagttcccaggaccagttttccagttcatctgatgcaaatgccagcacaaggtcagaagaggacaagaaaaaatctgagcattcctcctgctttgacatgatgagatctctctcctaccatatcaaccatctttttttggagcttggtaaagcaatgctttttgcatctcgtcgggagaatagtcctgtaaacctatccccagccgttatatctgttgctaacaatattgcttctattgtgttggagcacctcaactttgaaggtcattcggtaagttttgagagggacatgactgttaccacaaaatgcagatatcttggaaaggtggttgaatttgttgatgggatgttattagaccggccagaatcatgtaattcgattatggtgaattcattttattgccgtggtgtcattcaggccatcctgaccacatttcaggccaccagtgagttgctcttcacaatgagcaggccaccgtcttcacctatggagacggatagtaaaaccggaaaggatggaaaggagatggattcttcatggatctatggtcccctcaccagttatggggcaattatggatcatcttgtgacctcatcttttattctctcttcatcaactagacaattacttgagcaacctatttttaatggatctgtaaggttccctcaagatgctgagacgttcatgaagttacttcagtcaaaggtgttgaagacagttcttcccatctgggcccatccccagttcccagaatgcaacatcgagctgattagttcagtcatgtccatcatgaggcatgtttgctctggggtggaagtgaaagacactgttggcaatggtggtgctcgtttggctggtccacctcctgatgagagtgcaatttcacttattgtagagatgggtttttctcgtgccagggctgaagaagcattaagacaagttggaacaaacagtgttgaaatagcaactgattggttattcgcacacccagaggaaccacaagaggaggatgatgaacttgctcgggcgcttgcaatgtctcttgggaattctgttacccctgcacaagagggagatagtaggtccaatgatcttgagctggaagaagcaacagttcagccgcctcctatagatgaaatgttacgttcatgtcttcagctacttcagagaaaggaagcattagctttctctgtcagggatatgcttgttactatcagctcacagaatgatggccaaaaccgagtaaaggtgcttacatatttgattgataatctgaaacaatgtgtggtggcatctgagccttcaaatgatactgcattgtctgctcttttacatgttcttgctttgattcttcatggagatactgctgcccgtgaagttgcctcaaaggcaggacttgtgaaggttgctttggatctgctgtgcagctgggaggtgcaaattagggaaagtagcatgattgaggttcctaattgggtaatttcctgtttcctttctgttgatcagatgctccagttggaaccaaagttgccagatgttacagagctacatgtcctgaaaagggataactcaaatataaaaacatcacttgtgattgatgacagcaagagaaaagattcagaatccttgccaaatgttgggttactagacatggaggaccagtttcaacttttgaagatctgttgtaagtgcataggaaaacagttaccttcggcttccatgcatgctattctccagctctctgcaacactgacaaaagtccatgcagctgctatttgtttccttgaatctggtggtttgaatgcattactatcactgccgacaagtagtttgttttctgggttcaacaatatggcttctacaataattcgtcacattttggaggaccctcacacccttcagcaagcaatggaattagagatacgtcacagtcttgttacagctgctaatcgacatgcaaatcccagggttacaccacgcaattttatccagaatttggcttttgtcgtgtatagggacccagtgatatttatgaaagctgcccagtctgtgtgccagattgagatggttggagataggccatatgttgttctgttaaaggatcgtgagaaggaaaggatcaaggagaaagataaggacaagtcagttgataaggataaagcaacagtcgcagtcactaaggtagtttctggggacacagctgcaggatctcctgcaaattctcatggaaaacagtctgatttgaattcaagaaacgtgaaatctcaccgcaagccaccacaaagttttgtcactgttatagagcatctcttagatctgctgatgtcctttgttccgccaccccgtccagaggatcaagttgatgtctctggtactgccttatcttcagacatggatattgactgcagttctgcaaaagggaaagggaaagctgtgtctgtcccacctgaagagagcaagcatgctatccaagagtctactgcatcccttgccaaaactgcatttttccttaagttgctgacagatgtattgttaacttacgcatcatccattcatgttgttcttcgtcatgatgctgagctgagtaacatgcacggtccaaatcgaacaagtgccagactaactagtggtggaatctttaaccatatcctgcagcatttccttcctcatgctacaaggcaaaagaaagagagaaaaaatgatggagattggatgtataaattggcaacaagggctaatcagttcttggtggcttcatctattcgttctgcagaggcccgaaaaaggattttctctgaaatctgcagtatatttcttgatttcactgactcgtctgcagggtacaatgccccagtaccaaggatgaatgtgtatgtcgatttactgaatgatattctgtcagcccgatcaccaactggctcctcgctgtcagcagaatctgcagttatatttgttgaagctggtcttgttcattcattatcgacaatgcttcaagttcttgatttggatcaccctgattctgcaaagattgttactgctgttgttaaggccttggaactcgtcagtaaggaacatattcattcagcagataatgcgaaaggagtgaactcgtcaaagattgcttctgacagcaacaacgtgaattcatcatctaatagattccaggctcttgacatgacttctcagcccacagagatggttactgatcacagggaaacgtttaatgctgtccgaacttcacaaatatcagattcagtggcagatgagatggatcatgatcgtgatatggatggcggctttgctcgtgatggtgaagatgattttatgcatgagatggctgaagatggaactggtgatggatctacaatggaaattagaattgaaattccacgcaatagagaggatgatatggcccctgctgctgatgacactgatgaagatatatctgccgaggatggtgaagatgatgaagacgaagatgaggagaacaacaatctggaggaagatgatgcccatcggatgtctcatcctgacacagatcaggaagaccgtgaaatggatgaagaggaatttgatgaggatctgctagaagaagacgatgaagatgaggatgaggaaggagtcatccttcgcctggaggaggggattaatggcattaatgtgttggaccatgttgaagtatttggtgggagcaacaatttgtctggggatacgctgcgtgtgatgcctctagacatttttggtacaagaaggcaaggccgaagtacctccatatacaatcttcttggtagggctagtgatcatggtgttcttgatcatccacttctcgaagagccttcttcaacaacgaatttttcagaccaagggcatccagagaatcttgttgagatggctttctctgatcgaaaccatgaaagtagctcctctcgtttggatgctatattccgcagcttgcgaagtggacgtaatggacaccgctttaatatgtggctagatgacggtccacaacgtaatggatctgctgcccctgcagtacctgaaggcattgaagaattgctgatctctcatctgagacggcccactcctcaacctgatggccagagaacacctgttggtggtgctcaagaaaatgaccagcccaaccatggatcagatgctgaggcaagggaagtagcaccagctcagcaaaatgagaacagtgaaagtacactgaatcctctagatctgtcagaatgtgctggccctgcacctcctgatagtgatgcacttcaaagagatgtgtccaatgcaagtgagcttgctacagagatgcagtatgaacgtagtgatgctataacacgtgacgttgaagcagtgagccaagcaagcagtggcagtggtgctactttaggggagagcctcagaagtttagaggttgaaataggaagtgttgaagggcatgatgatggtgaccggcatggaacttcaggcacctcagaacgtttacctttgggtgatattcaagcagctgctcgatcacggaggccatctggaaatgctgtgccagtaagcagtagagatatgtctctggagagtgttagtgaggttcctcaaaatccagaccaagaacctgatcagaatgctagtgaggggaatcaggagcctaccagagcggcaggtgctgactcaattgatcctacatttttggaggctcttcctgaggacttgcgagctgaagttctttcttcacgtcaaaatcaagtaactcagacttctaatgaccaacctcaggatgatggtgatattgatcctgaattccttgctgcacttccccctgatataagagaggaggtgctagctcagcaacgtactcaaaggatgcaacaacaatcacaagaattagaaggacaacctgttgaaatggatgctgtttcaattattgcaacattcccttcagaaatccgggaagaggtgcttttgacatctcctgacacactactagccacactcacgcctgcactagttgctgaggccaacatgttaagggagagatttgctcatcggtatcacagtagctccctttttggtatgaactccaggaacaggagaggtgagtcctcccgacgtgacataatggcagcaggacttgatagaaacacaggtgatccctccagatcaactagcaagccaattgagactgaaggtgctcctcttgtcgatgaagatggccttaaagctcttattcggttacttcgagttgttcagcctctatacaagggtcagctgcagaagctacttgtgaatctttgtactcatcggggtagcagacaggccttggttcaaattctagtggacatgcttatgcttgatctgcaggggttttcaaagaaatcaatagatgcacctgagccaccatttaggttgtatggttgccatgcaaatatcgcatattcacgccctcaatcttcggatggtcttcctccattagtctcacgtcgtgtgctcgaaacgctcacgaacttggcaagaagccatccaaatgttgctaaactcttgctctttcttgaattcccttgcccatcaagatgtttccccgaagcacatgatcataggcatggcaaggctgttctcctagatgatggtgaagaacagaaaacctttgcacttgttcttctgttaaatctgttggatcagccactttatatgagaagtgtagctcatcttgaacagttactaaaccttcttgacgttgtcatgcacaatgctgagaatgaaattaagcaagctaagctagaagcatcatctgagaagccatctgcacctgataatgcagtgcaagatggtaaaaataactccgacatttctgtatcatatggatcagagttgaatcctgaggatggcagcaaagcccctgctgttgacaacagaagtaacttgcaagctgttttgcgaagtcttcctcaaccagagcttagattgctatgttcattgcttgcgcatgatggattgtcggacagcgcttatctccttgtaggtgaagtgttgaaaaagattgtggctcttgcccctttcttctgttgccatttcataaatgagcttgcacgttcaatgcaaaacttgacacttcgtgcaatgaaggagcttcatttgtacgagaattctgaaaaggctcttcttagctcttcatcagccaatggtactgcagttcttagagtagtgcaggctttgagctctcttgtcaatactcttcaagagagaaaggatccagaacagcctgctgaaaaggaccattcggacgcagtttcccagatttctgaaattaacacagcattggattctctgtggttggaattgagcaactgcataagcaagatagaaagctcttcagagtatgcatcaaatctaagtcctgcttctgcaagtgcagctatgttaacaacaggagtagcacctccattgcctgcaggaactcaaaacttattaccatatatagaatcattttttgtgacatgtgagaagttgcgtcctgggcaacctgatgctgtacaagatgcttcaacttctgatatggaagatgcttcgacatctagtggtgggcagagatcatctgcttgtcaagctagtcttgatgaaaagcaaaatgcttttgtgaaattctcagagaagcacagaagattgctgaatgcattcatccgtcaaaactctggattgctggaaaagtcattctcgctgatgttgaaaattcctcgcctgattgattttgacaataaacgtgcatattttcggtctaaaatcaagcatcagtatgatcatcatcatcatagccctgttagaatttctgtgcgtcgtccatatattcttgaggactcctacaatcagcttaggatgcgatctcctcaggatttgaagggtaggctcactgtccaatttcaaggagaagaaggaattgatgctggtgggctgacaagggaatggtaccagtcgatatcacgagtcattgttgacaagagtgcccttctgtttacgacagtcgggaatgatttgacgtttcaaccgaatcctaattctgtgtatcaaactgagcacctctcatacttcaaatttgttggacgagtggttggcaaagctctcttcgatggtcagcttttagatgcccacttcactagatctttctacaaacacatacttggtgtcaaggttacataccatgacattgaagccatcgatccttcgtactacaaaaacttgaaatggatgcttgagacgaagagaaactgatattgtacgagaaggcagaggtcactgattgtgagttgattcctggagggcgtaacatcagggttactgaggagaataagcatgaatatgtcgaccgggtagcagagcatagattgaccactgccatcaggcctcagattaatgccttcctggaagggtttaatgaactcattccacgggagctgatatctatcttcaacgacaaagagcttgagcttctgattagtggtcttccagatattgacttggacgatttgaaaacaaatacagaatattctggctacagcatagcctctccagtcgtccagtggttctgggaaatcgttcaggggttcagcaaggaagacaaagctcggttcctccagttcgtcactggcacttcaaaggtaccgttggaaggttttagtgaacttcaagggatctctgggccacaaaggtttcagatacacaaggcatacggcagcacgaaccatctgccttcagctcatacttgctttaaccaactagacttgcctgagtacacgtccaaagagcagctccaggagaggttactgttggcaatccacgaagcaaatgaaggtttcggatttggctaatcagtcatgctcgtttgtccgtgagagtctgtacagatactgagcattgcaatgggcgagcagcacgtgtgtgctgatccttaccacattctgaactccacgtgtttgatggccggggagaacatagaagaatctccgtgggagaggtactgatgagagagagcgactattttgtgttcataatattcattacctttttttagcttttttcggtcgttgccccgttcgtagtttttgccttacattggacttcgctccgattttttttctctgcttttccttcatagactggtgtaagatgtaaccgaacactatgtcaaatgcaaatcatcttagggccccttcgattattactgaatggaggcatggaataatttctagccgtactgtttctctactatattaaagcatcagttttagttacacgattgtcctgcatctataaaaaaactaaaattatacataattagct

SEQ ID NO: 15934 - DNA, 11461 bp, Zea Mays
aagcgaaccgacccaactctgaaccctccaagtttcctccctcttcaccccaaacaacaatcacagccctctctccctctcccctcctttacgtcgccgcctccgaatccccacctctttgctcctccgccatcctcctccgcggccgatgtgtgtgccccgccggcccaaaaccctagaggttacgagcaggtaagggtttcgatcggagatggcggctgcggctgcggcgatggccgcacatagagccagcttcccgctgcgcctgcagcagatccttgctggcagccgcgccgtctcacctgcgatcaagatcgagtctgagccgcctgcaaacatcaaagcatttattgatcgagtagtcaatattccactacatgacattgccataccgctatcaggcttctgttgggagttcaataagggaaatttccaccattggaggcctttatttattcattttgacacctatttcaagacatacatttcttctcggaaggatcttcttttatctgatgatatgaccgaggctgaccctatgccaaagaatgccatcttgaaaatcttaagagttatgcagattattttggagaactgccagaatagaagttcttttactggtcttgcgcatcttaagcttctcctggcatcgtcagaccctgagatagttgtagcagctttggaaactcttgttgccttggtcaaaataaatccttcaaagttgcatatgaatggaaagctaattagctgcggacctataaacacccatcttctatcattggcccaaggatggggcagcaaggaggaaggtcttggcatatattcttgtgttgtggcaaatgaaggaaaccatcaggggggtttgtccttgttccctgtagacttggagaacaaatatggtggcacacaacatcgtcttggttcaactcttcattttgagtataatttgggtcctgcacagtatcctggccaaactagtgacaagggcaagtcatctaatttgtgtgtgatacatattccagacatgcatcttcagaaagaggatgacttgagcatactgaagcaatgtgtagacaagttcaatgtgcccccagagcacaggtttgcattgcttacaaggataagatatgcccgtgctttcaactctgcacggacttgtaggatctatagccgcataagtcttctttcgttcattgttcttgtgcaatcgagtgatgctcatgatgaactcacatatttctttacaaatgaaccagagtacataaacgagttaatcaggcttgttcggtcagaggattctgttcctgggtccattcgtgctctggctatgctagcactgggagcacagctggcagcatatgcatcatctcatgagcgtgctaggatattgagtggctcaagtattatctctgctggtggcaatcgtatggtcttgctcagtgtcctgcagaaagcaatatcctcactcaatagcctgaatgatacctcatctcctctaattgttgatgcccttcttcagttttttctgctccatgtactgtcttcatcaagttcagggactacggttagaggctcagggatggttcctcctctcttgcccttgctgcgagataatgatccttctcatatgcatcttgtctgcttggcagtgaagactctccaaaagcttatggagtacagcagccctgctgtttctctgtttaaagacttgggtggtgtagagcttttgtctcagaggttacatgtagaagttcagcgtgttattggtactgctgatggacataattcaatggttactgatgcagtgaaatcagatgataaccacatgtactctcagaagcgattgattaaagctttgctcaaggctttggggtctgctacttattcccctgggaatcctgctcgttctcaaagctcccaagataactcattgcctgtctcactttcccttatatttcagaatgtagataagtttgggggtgacatttatttttcagcagttactgttatgagcgaaataatccataaagatcctacatgctttattactttgaaggaactcggtgttccagatgcttttatctcatcagtgactgctggggtaataccatcttgtaaagcccttatctgtgttcctaatggcctgggtgcaatatgcctcaataatcaaggacttgaggctgtcagggaaacttcagcactgcgatttcttgtagataccttcactagcaggaaatacttgataccaatgaatgagggtgtggtccttctagctaatgcagtggaagagcttcttcgtcatgtgcaatccctgagaagtattggtgttgacatcattattgaaataatcaataaactaagttcgtctcaggaatataaaaacaatgaaacagccaccttgcaagaaaaaacagatatggaaactgatgttgaagggcgtgatttggtaagtgctatggactcaagcgtggatggaagtaatgatgaacagttttctcatctgagcattttccatgtgatggtattggtgcaccggacaatggaaaactcggaaacctgccggttatttgtagaaaagggagggctacatgctcttttgacactcttgttgaggcctagcatcacacagtcatctggagggatgcctattgctttgcatagcacgatggtgttcaagggttttactcagcatcactctactccacttgcacgtgcattttgctcatctttaaaggagcatttgaagagtgcattgaaggaacttgataaagtttccaactcatttgatatgaccaagattgaaaaaggagcgatcccatctttgtttgttgttgaatttttgctattcctagctgcctcaaaagataatcgttggatgaatgctttgctctcagaatttggcgatgccagcagggaggtcctggaagatgttgggcaagttcaccgggaagtgctttggaaaatttcgctttttgaaaaaaacaagattgtcgctgaaaccagttcatcttcttccacatctgaagctcagcagcctgacatgtctgccagcgacattggtgatagcagatacacttctttcaggcaatatcttgatccaattttaaggcgaaggggttctgggtggaacatagagtctcaagtgtctgacctcattaatatgtatcgagacattggccgtgcagctagtgactcgcagagggttggttctgatagatattctagtctaggtttgccctcaagttcccaggaccagttttccagttcatctgatgcaaatgccagcacaaggtcagaagaggacaagaaaaaatctgagcattcctcctgctttgacatgatgagatctctctcctaccatatcaaccatctttttttggagcttggtaaagcaatgctttttgcatctcgtcgggagaatagtcctgtaaacctatccccagccgttatatctgttgctaacaatattgcttctattgtgttggagcacctcaactttgaaggtcattcggtaagttttgagagggacatgactgttaccacaaaatgcagatatcttggaaaggtggttgaatttgttgatgggatgttattagaccggccagaatcatgtaattcgattatggtgaattcattttattgccgtggtgtcattcaggccatcctgaccacatttcaggccaccagtgagttgctcttcacaatgagcaggccaccgtcttcacctatggagacggatagtaaaaccggaaaggatggaaaggagatggattcttcatggatctatggtcccctcaccagttatggggcaattatggatcatcttgtgacctcatcttttattctctcttcatcaactagacaattacttgagcaacctatttttaatggatctgtaaggttccctcaagatgctgagacgttcatgaagttacttcagtcaaaggtgttgaagacagttcttcccatctgggcccatccccagttcccagaatgcaacatcgagctgattagttcagtcatgtccatcatgaggcatgtttgctctggggtggaagtgaaagacactgttggcaatggtggtgctcgtttggctggtccacctcctgatgagagtgcaatttcacttattgtagagatgggtttttctcgtgccagggctgaagaagcattaagacaagttggaacaaacagtgttgaaatagcaactgattggttattcgcacacccagaggaaccacaagaggaggatgatgaacttgctcgggcgcttgcaatgtctcttgggaattctgttacccctgcacaagagggagatagtaggtccaatgatcttgagctggaagaagcaacagttcagccgcctcctatagatgaaatgttacgttcatgtcttcagctacttcagagaaaggaagcattagctttctctgtcagggatatgcttgttactatcagctcacagaatgatggccaaaaccgagtaaaggtgcttacatatttgattgataatctgaaacaatgtgtggtggcatctgagccttcaaatgatactgcattgtctgctcttttacatgttcttgctttgattcttcatggagatactgctgcccgtgaagttgcctcaaaggcaggacttgtgaaggttgctttggatctgctgtgcagctgggaggtgcaaattagggaaagtagcatgattgaggttcctaattgggtaatttcctgtttcctttctgttgatcagatgctccagttggaaccaaagttgccagatgttacagagctacatgtcctgaaaagggataactcaaatataaaaacatcacttgtgattgatgacagcaagagaaaagattcagaatccttgccaaatgttgggttactagacatggaggaccagtttcaacttttgaagatctgttgtaagtgcataggaaaacagttaccttcggcttccatgcatgctattctccagctctctgcaacactgacaaaagtccatgcagctgctatttgtttccttgaatctggtggtttgaatgcattactatcactgccgacaagtagtttgttttctgggttcaacaatatggcttctacaataattcgtcacattttggaggaccctcacacccttcagcaagcaatggaattagagatacgtcacagtcttgttacagctgctaatcgacatgcaaatcccagggttacaccacgcaattttatccagaatttggcttttgtcgtgtatagggacccagtgatatttatgaaagctgcccagtctgtgtgccagattgagatggttggagataggccatatgttgttctgttaaaggatcgtgagaaggaaaggatcaaggagaaagataaggacaagtcagttgataaggataaagcaacagtcgcagtcactaaggtagtttctggggacacagctgcaggatctcctgcaaattctcatggaaaacagtctgatttgaattcaagaaacgtgaaatctcaccgcaagccaccacaaagttttgtcactgttatagagcatctcttagatctgctgatgtcctttgttccgccaccccgtccagaggatcaagttgatgtctctggtactgccttatcttcagacatggatattgactgcagttctgcaaaagggaaagggaaagctgtgtctgtcccacctgaagagagcaagcatgctatccaagagtctactgcatcccttgccaaaactgcatttttccttaagttgctgacagatgtattgttaacttacgcatcatccattcatgttgttcttcgtcatgatgctgagctgagtaacatgcacggtccaaatcgaacaagtgccagactaactagtggtggaatctttaaccatatcctgcagcatttccttcctcatgctacaaggcaaaagaaagagagaaaaaatgatggagattggatgtataaattggcaacaagggctaatcagttcttggtggcttcatctattcgttctgcagaggcccgaaaaaggattttctctgaaatctgcagtatatttcttgatttcactgactcgtctgcagggtacaatgccccagtaccaaggatgaatgtgtatgtcgatttactgaatgatattctgtcagcccgatcaccaactggctcctcgctgtcagcagaatctgcagttatatttgttgaagctggtcttgttcattcattatcgacaatgcttcaagttcttgatttggatcaccctgattctgcaaagattgttactgctgttgttaaggccttggaactcgtcagtaaggaacatattcattcagcagataatgcgaaaggagtgaactcgtcaaagattgcttctgacagcaacaacgtgaattcatcatctaatagattccaggctcttgacatgacttctcagcccacagagatggttactgatcacagggaaacgtttaatgctgtccgaacttcacaaatatcagattcagtggcagatgagatggatcatgatcgtgatatggatggcggctttgctcgtgatggtgaagatgattttatgcatgagatggctgaagatggaactggtgatggatctacaatggaaattagaattgaaattccacgcaatagagaggatgatatggcccctgctgctgatgacactgatgaagatatatctgccgaggatggtgaagatgatgaagacgaagatgaggagaacaacaatctggaggaagatgatgcccatcggatgtctcatcctgacacagatcaggaagaccgtgaaatggatgaagaggaatttgatgaggatctgctagaagaagacgatgaagatgaggatgaggaaggagtcatccttcgcctggaggaggggattaatggcattaatgtgttggaccatgttgaagtatttggtgggagcaacaatttgtctggggatacgctgcgtgtgatgcctctagacatttttggtacaagaaggcaaggccgaagtacctccatatacaatcttcttggtagggctagtgatcatggtgttcttgatcatccacttctcgaagagccttcttcaacaacgaatttttcagaccaagggcatccagagaatcttgttgagatggctttctctgatcgaaaccatgaaagtagctcctctcgtttggatgctatattccgcagcttgcgaagtggacgtaatggacaccgctttaatatgtggctagatgacggtccacaacgtaatggatctgctgcccctgcagtacctgaaggcattgaagaattgctgatctctcatctgagacggcccactcctcaacctgatggccagagaacacctgttggtggtgctcaagaaaatgaccagcccaaccatggatcagatgctgaggcaagggaagtagcaccagctcagcaaaatgagaacagtgaaagtacactgaatcctctagatctgtcagaatgtgctggccctgcacctcctgatagtgatgcacttcaaagagatgtgtccaatgcaagtgagcttgctacagagatgcagtatgaacgtagtgatgctataacacgtgacgttgaagcagtgagccaagcaagcagtggcagtggtgctactttaggggagagcctcagaagtttagaggttgaaataggaagtgttgaagggcatgatgatggtgaccggcatggaacttcaggcacctcagaacgtttacctttgggtgatattcaagcagctgctcgatcacggaggccatctggaaatgctgtgccagtaagcagtagagatatgtctctggagagtgttagtgaggttcctcaaaatccagaccaagaacctgatcagaatgctagtgaggggaatcaggagcctaccagagcggcaggtgctgactcaattgatcctacatttttggaggctcttcctgaggacttgcgagctgaagttctttcttcacgtcaaaatcaagtaactcagacttctaatgaccaacctcaggatgatggtgatattgatcctgaattccttgctgcacttccccctgatataagagaggaggtgctagctcagcaacgtactcaaaggatgcaacaacaatcacaagaattagaaggacaacctgttgaaatggatgctgtttcaattattgcaacattcccttcagaaatccgggaagaggtgcttttgacatctcctgacacactactagccacactcacgcctgcactagttgctgaggccaacatgttaagggagagatttgctcatcggtatcacagtagctccctttttggtatgaactccaggaacaggagaggtgagtcctcccgacgtgacataatggcagcaggacttgatagaaacacaggtgatccctccagatcaactagcaagccaattgagactgaaggtgctcctcttgtcgatgaagatggccttaaagctcttattcggttacttcgagttgttcagcctctatacaagggtcagctgcagaagctacttgtgaatctttgtactcatcggggtagcagacaggccttggttcaaattctagtggacatgcttatgcttgatctgcaggggttttcaaagaaatcaatagatgcacctgagccaccatttaggttgtatggttgccatgcaaatatcgcatattcacgccctcaatcttcggatggtcttcctccattagtctcacgtcgtgtgctcgaaacgctcacgaacttggcaagaagccatccaaatgttgctaaactcttgctctttcttgaattcccttgcccatcaagatgtttccccgaagcacatgatcataggcatggcaaggctgttctcctagatgatggtgaagaacagaaaacctttgcacttgttcttctgttaaatctgttggatcagccactttatatgagaagtgtagctcatcttgaacagagttgaatcctgaggatggcagcaaagcccctgctgttgacaacagaagtaacttgcaagctgttttgcgaagtcttcctcaaccagagcttagattgctatgttcattgcttgcgcatgatggattgtcggacagcgcttatctccttgtaggtgaagtgttgaaaaagattgtggctcttgcccctttcttctgttgccatttcataaatgagcttgcacgttcaatgcaaaacttgacacttcgtgcaatgaaggagcttcatttgtacgagaattctgaaaaggctcttcttagctcttcatcagccaatggtactgcagttcttagagtagtgcaggctttgagctctcttgtcaatactcttcaagagagaaaggatccagaacagcctgctgaaaaggaccattcggacgcagtttcccagatttctgaaattaacacagcattggattctctgtggttggaattgagcaactgcataagcaagatagaaagctcttcagagtatgcatcaaatctaagtcctgcttctgcaagtgcagctatgttaacaacaggagtagcacctccattgcctgcaggaactcaaaacttattaccatatatagaatcattttttgtgacatgtgagaagttgcgtcctgggcaacctgatgctgtacaagatgcttcaacttctgatatggaagatgcttcgacatctagtggtgggcagagatcatctgcttgtcaagctagtcttgatgaaaagcaaaatgcttttgtgaaattctcagagaagcacagaagattgctgaatgcattcatccgtcaaaactctggattgctggaaaagtcattctcgctgatgttgaaaattcctcgcctgattgattttgacaataaacgtgcatattttcggtctaaaatcaagcatcagtatgatcatcatcatcatagccctgttagaatttctgtgcgtcgtccatatattcttgaggactcctacaatcagcttaggatgcgatctcctcaggatttgaagggtaggctcactgtccaatttcaaggagaagaaggaattgatgctggtgggctgacaagggaatggtaccagtcgatatcacgagtcattgttgacaagagtgcccttctgtttacgacagtcgggaatgatttgacgtttcaaccgaatcctaattctgtgtatcaaactgagcacctctcatacttcaaatttgttggacgagtggttggcaaagctctcttcgatggtcagcttttagatgcccacttcactagatctttctacaaacacatacttggtgtcaaggttacataccatgacattgaagccatcgatccttcgtactacaaaaacttgaaatggatgcttgagaatgacataagtgatgttttggatctcacctttagcatggatgcagacgaagagaaactgatattgtacgagaaggcagaggtcactgattgtgagttgattcctggagggcgtaacatcagggttactgaggagaataagcatgaatatgtcgaccgggtagcagagcatagattgaccactgccatcaggcctcagattaatgccttcctggaagggtttaatgaactcattccacgggagctgatatctatcttcaacgacaaagagcttgagcttctgattagtggtcttccagatattgacttggacgatttgaaaacaaatacagaatattctggctacagcatagcctctccagtcgtccagtggttctgggaaatcgttcaggggttcagcaaggaagacaaagctcggttcctccagttcgtcactggcacttcaaaggtaccgttggaaggttttagtgaacttcaagggatctctgggccacaaaggtttcagatacacaaggcatacggcagcacgaaccatctgccttcagctcatacttgctttaaccaactagacttgcctgagtacacgtccaaagagcagctccaggagaggttactgttggcaatccacgaagcaaatgaaggtttcggatttggctaatcagtcatgctcgtttgtccgtgagagtctgtacagatactgagcattgcaatgggcgagcagcacgtgtgtgctgatccttaccacattctgaactccacgtgtttgatggccggggagaacatagaagaatctccgtgggagaggtactgatgagagagagcgactattttgtgttcataatattcattacctttttttagcttttttcggtcgttgccccgttcgtagtttttgccttacattggacttcgctccgattttttttctctgcttttccttcatagactggtgtaagatgtaaccgaacactatgtcaaatgcaaatcatcttagggccccttcgattattactgaatggaggcatggaataatttctagccgtactgtttctctactatattaaagcatcagttttagttacacgattgtcctgcatctataaaaaaactaaaattatacataattagct

SEQ ID NO: 15935 - DNA, 11603 bp, Zea Mays
aaaaaagcgaaccgacccaactctgaaccctccaagtttcctccctcttcaccccaaacaacaatcacagccctctctccctctcccctcctttacgtcgccgcctccgaatccccacctctttgctcctccgccatcctcctccgcggccgatgtgtgtgccccgccggcccaaaaccctagaggttacgagcaggtaagggtttcgatcggagatggcggctgcggctgcggcgatggccgcacatagagccagcttcccgctgcgcctgcagcagatccttgctggcagccgcgccgtctcacctgcgatcaagatcgagtctgagccgcctgcaaacatcaaagcatttattgatcgagtagtcaatattccactacatgacattgccataccgctatcaggcttctgttgggagttcaataagggaaatttccaccattggaggcctttatttattcattttgacacctatttcaagacatacatttcttctcggaaggatcttcttttatctgatgatatgaccgaggctgaccctatgccaaagaatgccatcttgaaaatcttaagagttatgcagattattttggagaactgccagaatagaagttcttttactggtcttgcgcatcttaagcttctcctggcatcgtcagaccctgagatagttgtagcagctttggaaactcttgttgccttggtcaaaataaatccttcaaagttgcatatgaatggaaagctaattagctgcggacctataaacacccatcttctatcattggcccaaggatggggcagcaaggaggaaggtcttggcatatattcttgtgttgtggcaaatgaaggaaaccatcaggggggtttgtccttgttccctgtagacttggagaacaaatatggtggcacacaacatcgtcttggttcaactcttcattttgagtataatttgggtcctgcacagtatcctggccaaactagtgacaagggcaagtcatctaatttgtgtgtgatacatattccagacatgcatcttcagaaagaggatgacttgagcatactgaagcaatgtgtagacaagttcaatgtgcccccagagcacaggtttgcattgcttacaaggataagatatgcccgtgctttcaactctgcacggacttgtaggatctatagccgcataagtcttctttcgttcattgttcttgtgcaatcgagtgatgctcatgatgaactcacatatttctttacaaatgaaccagagtacataaacgagttaatcaggcttgttcggtcagaggattctgttcctgggtccattcgtgctctggctatgctagcactgggagcacagctggcagcatatgcatcatctcatgagcgtgctaggatattgagtggctcaagtattatctctgctggtggcaatcgtatggtcttgctcagtgtcctgcagaaagcaatatcctcactcaatagcctgaatgatacctcatctcctctaattgttgatgcccttcttcagttttttctgctccatgtactgtcttcatcaagttcagggactacggttagaggctcagggatggttcctcctctcttgcccttgctgcgagataatgatccttctcatatgcatcttgtctgcttggcagtgaagactctccaaaagcttatggagtacagcagccctgctgtttctctgtttaaagacttgggtggtgtagagcttttgtctcagaggttacatgtagaagttcagcgtgttattggtactgctgatggacataattcaatggttactgatgcagtgaaatcagatgataaccacatgtactctcagaagcgattgattaaagctttgctcaaggctttggggtctgctacttattcccctgggaatcctgctcgttctcaaagctcccaagataactcattgcctgtctcactttcccttatatttcagaatgtagataagtttgggggtgacatttatttttcagcagttactgttatgagcgaaataatccataaagatcctacatgctttattactttgaaggaactcggtgttccagatgcttttatctcatcagtgactgctggggtaataccatcttgtaaagcccttatctgtgttcctaatggcctgggtgcaatatgcctcaataatcaaggacttgaggctgtcagggaaacttcagcactgcgatttcttgtagataccttcactagcaggaaatacttgataccaatgaatgagggtgtggtccttctagctaatgcagtggaagagcttcttcgtcatgtgcaatccctgagaagtattggtgttgacatcattattgaaataatcaataaactaagttcgtctcaggaatataaaaacaatgaaacagccaccttgcaagaaaaaacagatatggaaactgatgttgaagggcgtgatttggtaagtgctatggactcaagcgtggatggaagtaatgatgaacagttttctcatctgagcattttccatgtgatggtattggtgcaccggacaatggaaaactcggaaacctgccggttatttgtagaaaagggagggctacatgctcttttgacactcttgttgaggcctagcatcacacagtcatctggagggatgcctattgctttgcatagcacgatggtgttcaagggttttactcagcatcactctactccacttgcacgtgcattttgctcatctttaaaggagcatttgaagagtgcattgaaggaacttgataaagtttccaactcatttgatatgaccaagattgaaaaaggagcgatcccatctttgtttgttgttgaatttttgctattcctagctgcctcaaaagataatcgttggatgaatgctttgctctcagaatttggcgatgccagcagggaggtcctggaagatgttgggcaagttcaccgggaagtgctttggaaaatttcgctttttgaaaaaaacaagattgtcgctgaaaccagttcatcttcttccacatctgaagctcagcagcctgacatgtctgccagcgacattggtgatagcagatacacttctttcaggcaatatcttgatccaattttaaggcgaaggggttctgggtggaacatagagtctcaagtgtctgacctcattaatatgtatcgagacattggccgtgcagctagtgactcgcagagggttggttctgatagatattctagtctaggtttgccctcaagttcccaggaccagttttccagttcatctgatgcaaatgccagcacaaggtcagaagaggacaagaaaaaatctgagcattcctcctgctttgacatgatgagatctctctcctaccatatcaaccatctttttttggagcttggtaaagcaatgctttttgcatctcgtcgggagaatagtcctgtaaacctatccccagccgttatatctgttgctaacaatattgcttctattgtgttggagcacctcaactttgaaggtcattcggtaagttttgagagggacatgactgttaccacaaaatgcagatatcttggaaaggtggttgaatttgttgatgggatgttattagaccggccagaatcatgtaattcgattatggtgaattcattttattgccgtggtgtcattcaggccatcctgaccacatttcaggccaccagtgagttgctcttcacaatgagcaggccaccgtcttcacctatggagacggatagtaaaaccggaaaggatggaaaggagatggattcttcatggatctatggtcccctcaccagttatggggcaattatggatcatcttgtgacctcatcttttattctctcttcatcaactagacaattacttgagcaacctatttttaatggatctgtaaggttccctcaagatgctgagacgttcatgaagttacttcagtcaaaggtgttgaagacagttcttcccatctgggcccatccccagttcccagaatgcaacatcgagctgattagttcagtcatgtccatcatgaggcatgtttgctctggggtggaagtgaaagacactgttggcaatggtggtgctcgtttggctggtccacctcctgatgagagtgcaatttcacttattgtagagatgggtttttctcgtgccagggctgaagaagcattaagacaagttggaacaaacagtgttgaaatagcaactgattggttattcgcacacccagaggaaccacaagaggaggatgatgaacttgctcgggcgcttgcaatgtctcttgggaattctgttacccctgcacaagagggagatagtaggtccaatgatcttgagctggaagaagcaacagttcagccgcctcctatagatgaaatgttacgttcatgtcttcagctacttcagagaaaggaagcattagctttctctgtcagggatatgcttgttactatcagctcacagaatgatggccaaaaccgagtaaaggtgcttacatatttgattgataatctgaaacaatgtgtggtggcatctgagccttcaaatgatactgcattgtctgctcttttacatgttcttgctttgattcttcatggagatactgctgcccgtgaagttgcctcaaaggcaggacttgtgaaggttgctttggatctgctgtgcagctgggaggtgcaaattagggaaagtagcatgattgaggttcctaattgggtaatttcctgtttcctttctgttgatcagatgctccagttggaaccaaagttgccagatgttacagagctacatgtcctgaaaagggataactcaaatataaaaacatcacttgtgattgatgacagcaagagaaaagattcagaatccttgccaaatgttgggttactagacatggaggaccagtttcaacttttgaagatctgttgtaagtgcataggaaaacagttaccttcggcttccatgcatgctattctccagctctctgcaacactgacaaaagtccatgcagctgctatttgtttccttgaatctggtggtttgaatgcattactatcactgccgacaagtagtttgttttctgggttcaacaatatggcttctacaataattcgtcacattttggaggaccctcacacccttcagcaagcaatggaattagagatacgtcacagtcttgttacagctgctaatcgacatgcaaatcccagggttacaccacgcaattttatccagaatttggcttttgtcgtgtatagggacccagtgatatttatgaaagctgcccagtctgtgtgccagattgagatggttggagataggccatatgttgttctgttaaaggatcgtgagaaggaaaggatcaaggagaaagataaggacaagtcagttgataaggataaagcaacagtcgcagtcactaaggtagtttctggggacacagctgcaggatctcctgcaaattctcatggaaaacagtctgatttgaattcaagaaacgtgaaatctcaccgcaagccaccacaaagttttgtcactgttatagagcatctcttagatctgctgatgtcctttgttccgccaccccgtccagaggatcaagttgatgtctctggtactgccttatcttcagacatggatattgactgcagttctgcaaaagggaaagggaaagctgtgtctgtcccacctgaagagagcaagcatgctatccaagagtctactgcatcccttgccaaaactgcatttttccttaagttgctgacagatgtattgttaacttacgcatcatccattcatgttgttcttcgtcatgatgctgagctgagtaacatgcacggtccaaatcgaacaagtgccagactaactagtggtggaatctttaaccatatcctgcagcatttccttcctcatgctacaaggcaaaagaaagagagaaaaaatgatggagattggatgtataaattggcaacaagggctaatcagttcttggtggcttcatctattcgttctgcagaggcccgaaaaaggattttctctgaaatctgcagtatatttcttgatttcactgactcgtctgcagggtacaatgccccagtaccaaggatgaatgtgtatgtcgatttactgaatgatattctgtcagcccgatcaccaactggctcctcgctgtcagcagaatctgcagttatatttgttgaagctggtcttgttcattcattatcgacaatgcttcaagttcttgatttggatcaccctgattctgcaaagattgttactgctgttgttaaggccttggaactcgtcagtaaggaacatattcattcagcagataatgcgaaaggagtgaactcgtcaaagattgcttctgacagcaacaacgtgaattcatcatctaatagattccaggctcttgacatgacttctcagcccacagagatggttactgatcacagggaaacgtttaatgctgtccgaacttcacaaatatcagattcagtggcagatgagatggatcatgatcgtgatatggatggcggctttgctcgtgatggtgaagatgattttatgcatgagatggctgaagatggaactggtgatggatctacaatggaaattagaattgaaattccacgcaatagagaggatgatatggcccctgctgctgatgacactgatgaagatatatctgccgaggatggtgaagatgatgaagacgaagatgaggagaacaacaatctggaggaagatgatgcccatcggatgtctcatcctgacacagatcaggaagaccgtgaaatggatgaagaggaatttgatgaggatctgctagaagaagacgatgaagatgaggatgaggaaggagtcatccttcgcctggaggaggggattaatggcattaatgtgttggaccatgttgaagtatttggtgggagcaacaatttgtctggggatacgctgcgtgtgatgcctctagacatttttggtacaagaaggcaaggccgaagtacctccatatacaatcttcttggtagggctagtgatcatggtgttcttgatcatccacttctcgaagagccttcttcaacaacgaatttttcagaccaagggcatccagagaatcttgttgagatggctttctctgatcgaaaccatgaaagtagctcctctcgtttggatgctatattccgcagcttgcgaagtggacgtaatggacaccgctttaatatgtggctagatgacggtccacaacgtaatggatctgctgcccctgcagtacctgaaggcattgaagaattgctgatctctcatctgagacggcccactcctcaacctgatggccagagaacacctgttggtggtgctcaagaaaatgaccagcccaaccatggatcagatgctgaggcaagggaagtagcaccagctcagcaaaatgagaacagtgaaagtacactgaatcctctagatctgtcagaatgtgctggccctgcacctcctgatagtgatgcacttcaaagagatgtgtccaatgcaagtgagcttgctacagagatgcagtatgaacgtagtgatgctataacacgtgacgttgaagcagtgagccaagcaagcagtggcagtggtgctactttaggggagagcctcagaagtttagaggttgaaataggaagtgttgaagggcatgatgatggtgaccggcatggaacttcaggcacctcagaacgtttacctttgggtgatattcaagcagctgctcgatcacggaggccatctggaaatgctgtgccagtaagcagtagagatatgtctctggagagtgttagtgaggttcctcaaaatccagaccaagaacctgatcagaatgctagtgaggggaatcaggagcctaccagagcggcaggtgctgactcaattgatcctacatttttggaggctcttcctgaggacttgcgagctgaagttctttcttcacgtcaaaatcaagtaactcagacttctaatgaccaacctcaggatgatggtgatattgatcctgaattccttgctgcacttccccctgatataagagaggaggtgctagctcagcaacgtactcaaaggatgcaacaacaatcacaagaattagaaggacaacctgttgaaatggatgctgtttcaattattgcaacattcccttcagaaatccgggaagaggtgcttttgacatctcctgacacactactagccacactcacgcctgcactagttgctgaggccaacatgttaagggagagatttgctcatcggtatcacagtagctccctttttggtatgaactccaggaacaggagaggtgagtcctcccgacgtgacataatggcagcaggacttgatagaaacacaggtgatccctccagatcaactagcaagccaattgagactgaaggtgctcctcttgtcgatgaagatggccttaaagctcttattcggttacttcgagttgttcagcctctatacaagggtcagctgcagaagctacttgtgaatctttgtactcatcggggtagcagacaggccttggttcaaattctagtggacatgcttatgcttgatctgcaggggttttcaaagaaatcaatagatgcacctgagccaccatttaggttgtatggttgccatgcaaatatcgcatattcacgccctcaatcttcggatggtcttcctccattagtctcacgtcgtgtgctcgaaacgctcacgaacttggcaagaagccatccaaatgttgctaaactcttgctctttcttgaattcccttgcccatcaagatgtttccccgaagcacatgatcataggcatggcaaggctgttctcctagatgatggtgaagaacagaaaacctttgcacttgttcttctgttaaatctgttggatcagccactttatatgagaagtgtagctcatcttgaacagttactaaaccttcttgacgttgtcatgcacaatgctgagaatgaaattaagcaagctaagctagaagcatcatctgagaagccatctgcacctgataatgcagtgcaagatggtaaaaataactccgacatttctgtatcatatggatcagagttgaatcctgaggatggcagcaaagcccctgctgttgacaacagaagtaacttgcaagctgttttgcgaagtcttcctcaaccagagcttagattgctatgttcattgcttgcgcatgatggattgtcggacagcgcttatctccttgtaggtgaagtgttgaaaaagattgtggctcttgcccctttcttctgttgccatttcataaatgagcttgcacgttcaatgcaaaacttgacacttcgtgcaatgaaggagcttcatttgtacgagaattctgaaaaggctcttcttagctcttcatcagccaatggtactgcagttcttagagtagtgcaggctttgagctctcttgtcaatactcttcaagagagaaaggatccagaacagcctgctgaaaaggaccattcggacgcagtttcccagatttctgaaattaacacagcattggattctctgtggttggaattgagcaactgcataagcaagatagaaagctcttcagagtatgcatcaaatctaagtcctgcttctgcaagtgcagctatgttaacaacaggagtagcacctccattgcctgcaggaactcaaaacttattaccatatatagaatcattttttgtgacatgtgagaagttgcgtcctgggcaacctgatgctgtacaagatgcttcaacttctgatatggaagatgcttcgacatctagtggtgggcagagatcatctgcttgtcaagctagtcttgatgaaaagcaaaatgcttttgtgaaattctcagagaagcacagaagattgctgaatgcattcatccgtcaaaactctggattgctggaaaagtcattctcgctgatgttgaaaattcctcgcctgattgattttgacaataaacgtgcatattttcggtctaaaatcaagcatcagtatgatcatcatcatcatagccctgttagaatttctgtgcgtcgtccatatattcttgaggactcctacaatcagcttaggatgcgatctcctcaggatttgaagggtaggctcactgtccaatttcaaggagaagaaggaattgatgctggtgggctgacaagggaatggtaccagtcgatatcacgagtcattgttgacaagagtgcccttctgtttacgacagtcgggaatgatttgacgtttcaaccgaatcctaattctgtgtatcaaactgagcacctctcatacttcaaatttgttggacgagtggttggcaaagctctcttcgatggtcagcttttagatgcccacttcactagatctttctacaaacacatacttggtgtcaaggttacataccatgacattgaagccatcgatccttcgtactacaaaaacttgaaatggatgcttgagaatgacataagtgatgttttggatctcacctttagcatggatgcagacgaagagaaactgatattgtacgagaaggcagaggtcactgattgtgagttgattcctggagggcgtaacatcagggttactgaggagaataagcatgaatatgtcgaccgggtagcagagcatagattgaccactgccatcaggcctcagattaatgccttcctggaagggtttaatgaactcattccacgggagctgatatctatcttcaacgacaaagagcttgagcttctgattagtggtcttccagatattgacttggacgatttgaaaacaaatacagaatattctggctacagcatagcctctccagtcgtccagtggttctgggaaatcgttcaggggttcagcaaggaagacaaagctcggttcctccagttcgtcactggcacttcaaaggttttagtgaacttcaagggatctctgggccacaaaggtttcagatacacaaggcatacggcagcacgaaccatctgccttcagctcatacttgctttaaccaactagacttgcctgagtacacgtccaaagagcagctccaggagaggttactgttggcaatccacgaagcaaatgaaggtttcggatttggctaatcagtcatgctcgtttgtccgtgagagtctgtacagatactgagcattgcaatgggcgagcagcacgtgtgtgctgatccttaccacattctgaactccacgtgtttgatggccggggagaacatagaagaatctccgtgggagaggtactgatgagagagagcgactattttgtgttcataatattcattacctttttttagcttttttcggtcgttgccccgttcgtagtttttgccttacattggacttcgctccgattttttttctctgcttttccttcatagactggtgtaagatgtaaccgaacactatgtcaaatgcaaatcatcttagggccccttcgattattactgaatggaggcatggaataatttctagccgtactgtttctctactatattaaagcatcagttttagttacacgattgtcctgcatctataaaaaaactaaaattatacataattagct

SEQ ID NO: 15936 - DNA, 11478 bp, Zea Mays
gccaagtgtccatccttttccttccccaggaaaaaagcgaaccgacccaactctgaaccctccaagtttcctccctcttcaccccaaacaacaatcacagccctctctccctctcccctcctttacgtcgccgcctccgaatccccacctctttgctcctccgccatcctcctccgcggccgatgtgtgtgccccgccggcccaaaaccctagaggttacgagcaggtaagggtttcgatcggagatggcggctgcggctgcggcgatggccgcacatagagccagcttcccgctgcgcctgcagcagatccttgctggcagccgcgccgtctcacctgcgatcaagatcgagtctgagccgcctgcaaacatcaaagcatttattgatcgagtagtcaatattccactacatgacattgccataccgctatcaggcttctgttgggagttcaataagggaaatttccaccattggaggcctttatttattcattttgacacctatttcaagacatacatttcttctcggaaggatcttcttttatctgatgatatgaccgaggctgaccctatgccaaagaatgccatcttgaaaatcttaagagttatgcagattattttggagaactgccagaatagaagttcttttactggtcttgcgcatcttaagcttctcctggcatcgtcagaccctgagatagttgtagcagctttggaaactcttgttgccttggtcaaaataaatccttcaaagttgcatatgaatggaaagctaattagctgcggacctataaacacccatcttctatcattggcccaaggatggggcagcaaggaggaaggtcttggcatatattcttgtgttgtggcaaatgaaggaaaccatcaggggggtttgtccttgttccctgtagacttggagaacaaatatggtggcacacaacatcgtcttggttcaactcttcattttgagtataatttgggtcctgcacagtatcctggccaaactagtgacaagggcaagtcatctaatttgtgtgtgatacatattccagacatgcatcttcagaaagaggatgacttgagcatactgaagcaatgtgtagacaagttcaatgtgcccccagagcacaggtttgcattgcttacaaggataagatatgcccgtgctttcaactctgcacggacttgtaggatctatagccgcataagtcttctttcgttcattgttcttgtgcaatcgagtgatgctcatgatgaactcacatatttctttacaaatgaaccagagtacataaacgagttaatcaggcttgttcggtcagaggattctgttcctgggtccattcgtgctctggctatgctagcactgggagcacagctggcagcatatgcatcatctcatgagcgtgctaggatattgagtggctcaagtattatctctgctggtggcaatcgtatggtcttgctcagtgtcctgcagaaagcaatatcctcactcaatagcctgaatgatacctcatctcctctaattgttgatgcccttcttcagttttttctgctccatgtactgtcttcatcaagttcagggactacggttagaggctcagggatggttcctcctctcttgcccttgctgcgagataatgatccttctcatatgcatcttgtctgcttggcagtgaagactctccaaaagcttatggagtacagcagccctgctgtttctctgtttaaagacttgggtggtgtagagcttttgtctcagaggttacatgtagaagttcagcgtgttattggtactgctgatggacataattcaatggttactgatgcagtgaaatcagatgataaccacatgtactctcagaagcgattgattaaagctttgctcaaggctttggggtctgctacttattcccctgggaatcctgctcgttctcaaagctcccaagataactcattgcctgtctcactttcccttatatttcagaatgtagataagtttgggggtgacatttatttttcagcagttactgttatgagcgaaataatccataaagatcctacatgctttattactttgaaggaactcggtgttccagatgcttttatctcatcagtgactgctggggtaataccatcttgtaaagcccttatctgtgttcctaatggcctgggtgcaatatgcctcaataatcaaggacttgaggctgtcagggaaacttcagcactgcgatttcttgtagataccttcactagcaggaaatacttgataccaatgaatgagggtgtggtccttctagctaatgcagtggaagagcttcttcgtcatgtgcaatccctgagaagtattggtgttgacatcattattgaaataatcaataaactaagttcgtctcaggaatataaaaacaatgaaacagccaccttgcaagaaaaaacagatatggaaactgatgttgaagggcgtgatttggtaagtgctatggactcaagcgtggatggaagtaatgatgaacagttttctcatctgagcattttccatgtgatggtattggtgcaccggacaatggaaaactcggaaacctgccggttatttgtagaaaagggagggctacatgctcttttgacactcttgttgaggcctagcatcacacagtcatctggagggatgcctattgctttgcatagcacgatggtgttcaagggttttactcagcatcactctactccacttgcacgtgcattttgctcatctttaaaggagcatttgaagagtgcattgaaggaacttgataaagtttccaactcatttgatatgaccaagattgaaaaaggagcgatcccatctttgtttgttgttgaatttttgctattcctagctgcctcaaaagataatcgttggatgaatgctttgctctcagaatttggcgatgccagcagggaggtcctggaagatgttgggcaagttcaccgggaagtgctttggaaaatttcgctttttgaaaaaaacaagattgtcgctgaaaccagttcatcttcttccacatctgaagctcagcagcctgacatgtctgccagcgacattggtgatagcagatacacttctttcaggcaatatcttgatccaattttaaggcgaaggggttctgggtggaacatagagtctcaagtgtctgacctcattaatatgtatcgagacattggccgtgcagctagtgactcgcagagggttggttctgatagatattctagtctaggtttgccctcaagttcccaggaccagttttccagttcatctgatgcaaatgccagcacaaggtcagaagaggacaagaaaaaatctgagcattcctcctgctttgacatgatgagatctctctcctaccatatcaaccatctttttttggagcttggtaaagcaatgctttttgcatctcgtcgggagaatagtcctgtaaacctatccccagccgttatatctgttgctaacaatattgcttctattgtgttggagcacctcaactttgaaggtcattcggccaccagtgagttgctcttcacaatgagcaggccaccgtcttcacctatggagacggatagtaaaaccggaaaggatggaaaggagatggattcttcatggatctatggtcccctcaccagttatggggcaattatggatcatcttgtgacctcatcttttattctctcttcatcaactagacaattacttgagcaacctatttttaatggatctgtaaggttccctcaagatgctgagacgttcatgaagttacttcagtcaaaggtgttgaagacagttcttcccatctgggcccatccccagttcccagaatgcaacatcgagctgattagttcagtcatgtccatcatgaggcatgtttgctctggggtggaagtgaaagacactgttggcaatggtggtgctcgtttggctggtccacctcctgatgagagtgcaatttcacttattgtagagatgggtttttctcgtgccagggctgaagaagcattaagacaagttggaacaaacagtgttgaaatagcaactgattggttattcgcacacccagaggaaccacaagaggaggatgatgaacttgctcgggcgcttgcaatgtctcttgggaattctgttacccctgcacaagagggagatagtaggtccaatgatcttgagctggaagaagcaacagttcagccgcctcctatagatgaaatgttacgttcatgtcttcagctacttcagagaaaggaagcattagctttctctgtcagggatatgcttgttactatcagctcacagaatgatggccaaaaccgagtaaaggtgcttacatatttgattgataatctgaaacaatgtgtggtggcatctgagccttcaaatgatactgcattgtctgctcttttacatgttcttgctttgattcttcatggagatactgctgcccgtgaagttgcctcaaaggcaggacttgtgaaggttgctttggatctgctgtgcagctgggaggtgcaaattagggaaagtagcatgattgaggttcctaattgggtaatttcctgtttcctttctgttgatcagatgctccagttggaaccaaagttgccagatgttacagagctacatgtcctgaaaagggataactcaaatataaaaacatcacttgtgattgatgacagcaagagaaaagattcagaatccttgccaaatgttgggttactagacatggaggaccagtttcaacttttgaagatctgttgtaagtgcataggaaaacagttaccttcggcttccatgcatgctattctccagctctctgcaacactgacaaaagtccatgcagctgctatttgtttccttgaatctggtggtttgaatgcattactatcactgccgacaagtagtttgttttctgggttcaacaatatggcttctacaataattcgtcacattttggaggaccctcacacccttcagcaagcaatggaattagagatacgtcacagtcttgttacagctgctaatcgacatgcaaatcccagggttacaccacgcaattttatccagaatttggcttttgtcgtgtatagggacccagtgatatttatgaaagctgcccagtctgtgtgccagattgagatggttggagataggccatatgttgttctgttaaaggatcgtgagaaggaaaggatcaaggagaaagataaggacaagtcagttgataaggataaagcaacagtcgcagtcactaaggtagtttctggggacacagctgcaggatctcctgcaaattctcatggaaaacagtctgatttgaattcaagaaacgtgaaatctcaccgcaagccaccacaaagttttgtcactgttatagagcatctcttagatctgctgatgtcctttgttccgccaccccgtccagaggatcaagttgatgtctctggtactgccttatcttcagacatggatattgactgcagttctgcaaaagggaaagggaaagctgtgtctgtcccacctgaagagagcaagcatgctatccaagagtctactgcatcccttgccaaaactgcatttttccttaagttgctgacagatgtattgttaacttacgcatcatccattcatgttgttcttcgtcatgatgctgagctgagtaacatgcacggtccaaatcgaacaagtgccagactaactagtggtggaatctttaaccatatcctgcagcatttccttcctcatgctacaaggcaaaagaaagagagaaaaaatgatggagattggatgtataaattggcaacaagggctaatcagttcttggtggcttcatctattcgttctgcagaggcccgaaaaaggattttctctgaaatctgcagtatatttcttgatttcactgactcgtctgcagggtacaatgccccagtaccaaggatgaatgtgtatgtcgatttactgaatgatattctgtcagcccgatcaccaactggctcctcgctgtcagcagaatctgcagttatatttgttgaagctggtcttgttcattcattatcgacaatgcttcaagttcttgatttggatcaccctgattctgcaaagattgttactgctgttgttaaggccttggaactcgtcagtaaggaacatattcattcagcagataatgcgaaaggagtgaactcgtcaaagattgcttctgacagcaacaacgtgaattcatcatctaatagattccaggctcttgacatgacttctcagcccacagagatggttactgatcacagggaaacgtttaatgctgtccgaacttcacaaatatcagattcagtggcagatgagatggatcatgatcgtgatatggatggcggctttgctcgtgatggtgaagatgattttatgcatgagatggctgaagatggaactggtgatggatctacaatggaaattagaattgaaattccacgcaatagagaggatgatatggcccctgctgctgatgacactgatgaagatatatctgccgaggatggtgaagatgatgaagacgaagatgaggagaacaacaatctggaggaagatgatgcccatcggatgtctcatcctgacacagatcaggaagaccgtgaaatggatgaagaggaatttgatgaggatctgctagaagaagacgatgaagatgaggatgaggaaggagtcatccttcgcctggaggaggggattaatggcattaatgtgttggaccatgttgaagtatttggtgggagcaacaatttgtctggggatacgctgcgtgtgatgcctctagacatttttggtacaagaaggcaaggccgaagtacctccatatacaatcttcttggtagggctagtgatcatggtgttcttgatcatccacttctcgaagagccttcttcaacaacgaatttttcagaccaagggcatccagagaatcttgttgagatggctttctctgatcgaaaccatgaaagtagctcctctcgtttggatgctatattccgcagcttgcgaagtggacgtaatggacaccgctttaatatgtggctagatgacggtccacaacgtaatggatctgctgcccctgcagtacctgaaggcattgaagaattgctgatctctcatctgagacggcccactcctcaacctgatggccagagaacacctgttggtggtgctcaagaaaatgaccagcccaaccatggatcagatgctgaggcaagggaagtagcaccagctcagcaaaatgagaacagtgaaagtacactgaatcctctagatctgtcagaatgtgctggccctgcacctcctgatagtgatgcacttcaaagagatgtgtccaatgcaagtgagcttgctacagagatgcagtatgaacgtagtgatgctataacacgtgacgttgaagcagtgagccaagcaagcagtggcagtggtgctactttaggggagagcctcagaagtttagaggttgaaataggaagtgttgaagggcatgatgatggtgaccggcatggaacttcaggcacctcagaacgtttacctttgggtgatattcaagcagctgctcgatcacggaggccatctggaaatgctgtgccagtaagcagtagagatatgtctctggagagtgttagtgaggttcctcaaaatccagaccaagaacctgatcagaatgctagtgaggggaatcaggagcctaccagagcggcaggtgctgactcaattgatcctacatttttggaggctcttcctgaggacttgcgagctgaagttctttcttcacgtcaaaatcaagtaactcagacttctaatgaccaacctcaggatgatggtgatattgatcctgaattccttgctgcacttccccctgatataagagaggaggtgctagctcagcaacgtactcaaaggatgcaacaacaatcacaagaattagaaggacaacctgttgaaatggatgctgtttcaattattgcaacattcccttcagaaatccgggaagaggtgcttttgacatctcctgacacactactagccacactcacgcctgcactagttgctgaggccaacatgttaagggagagatttgctcatcggtatcacagtagctccctttttggtatgaactccaggaacaggagaggtgagtcctcccgacgtgacataatggcagcaggacttgatagaaacacaggtgatccctccagatcaactagcaagccaattgagactgaaggtgctcctcttgtcgatgaagatggccttaaagctcttattcggttacttcgagttgttcagcctctatacaagggtcagctgcagaagctacttgtgaatctttgtactcatcggggtagcagacaggccttggttcaaattctagtggacatgcttatgcttgatctgcaggggttttcaaagaaatcaatagatgcacctgagccaccatttaggttgtatggttgccatgcaaatatcgcatattcacgccctcaatcttcggatggtcttcctccattagtctcacgtcgtgtgctcgaaacgctcacgaacttggcaagaagccatccaaatgttgctaaactcttgctctttcttgaattcccttgcccatcaagatgtttccccgaagcacatgatcataggcatggcaaggctgttctcctagatgatggtgaagaacagaaaacctttgcacttgttcttctgttaaatctgttggatcagccactttatatgagaagtgtagctcatcttgaacagttactaaaccttcttgacgttgtcatgcacaatgctgagaatgaaattaagcaagctaagctagaagcatcatctgagaagccatctgcacctgataatgcagtgcaagatggtaaaaataactccgacatttctgtatcatatggatcagagttgaatcctgaggatggcagcaaagcccctgctgttgacaacagaagtaacttgcaagctgttttgcgaagtcttcctcaaccagagcttagattgctatgttcattgcttgcgcatgatggattgtcggacagcgcttatctccttgtaggtgaagtgttgaaaaagattgtggctcttgcccctttcttctgttgccatttcataaatgagcttgcacgttcaatgcaaaacttgacacttcgtgcaatgaaggagcttcatttgtacgagaattctgaaaaggctcttcttagctcttcatcagccaatggtactgcagttcttagagtagtgcaggctttgagctctcttgtcaatactcttcaagagagaaaggatccagaacagcctgctgaaaaggaccattcggacgcagtttcccagatttctgaaattaacacagcattggattctctgtggttggaattgagcaactgcataagcaagatagaaagctcttcagagtatgcatcaaatctaagtcctgcttctgcaagtgcagctatgttaacaacaggagtagcacctccattgcctgcaggaactcaaaacttattaccatatatagaatcattttttgtgacatgtgagaagttgcgtcctgggcaacctgatgctgtacaagatgcttcaacttctgatatggaagatgcttcgacatctagtggtgggcagagatcatctgcttgtcaagctagtcttgatgaaaagcaaaatgcttttgtgaaattctcagagaagcacagaagattgctgaatgcattcatccgtcaaaactctggattgctggaaaagtcattctcgctgatgttgaaaattcctcgcctgattgattttgacaataaacgtgcatattttcggtctaaaatcaagcatcagtatgatcatcatcatcatagccctgttagaatttctgtgcgtcgtccatatattcttgaggactcctacaatcagcttaggatgcgatctcctcaggatttgaagggtaggctcactgtccaatttcaaggagaagaaggaattgatgctggtgggctgacaagggaatggtaccagtcgatatcacgagtcattgttgacaagagtgcccttctgtttacgacagtcgggaatgatttgacgtttcaaccgaatcctaattctgtgtatcaaactgagcacctctcatacttcaaatttgttggacgagtggttggcaaagctctcttcgatggtcagcttttagatgcccacttcactagatctttctacaaacacatacttggtgtcaaggttacataccatgacattgaagccatcgatccttcgtactacaaaaacttgaaatggatgcttgagaatgacataagtgatgttttggatctcacctttagcatggatgcagacgaagagaaactgatattgtacgagaaggcagaggtcactgattgtgagttgattcctggagggcgtaacatcagggttactgaggagaataagcatgaatatgtcgaccgggtagcagagcatagattgaccactgccatcaggcctcagattaatgccttcctggaagggtttaatgaactcattccacgggagctgatatctatcttcaacgacaaagagcttgagcttctgattagtggtcttccagatattgacttggacgatttgaaaacaaatacagaatattctggctacagcatagcctctccagtcgtccagtggttctgggaaatcgttcaggggttcagcaaggaagacaaagctcggttcctccagttcgtcactggcacttcaaaggtaccgttggaaggttttagtgaacttcaagggatctctgggccacaaaggtttcagatacacaaggcatacggcagcacgaaccatctgccttcagctcatacttgctttaaccaactagacttgcctgagtacacgtccaaagagcagctccaggagaggttactgttggcaatccacgaagcaaatgaaggtttcggatttggctaatcagtcatgctcgtttgtccgtgagagtctgtacagatactgagcattgcaatgggcgagcagcacgtgtgtgctgatccttaccacattctgaactccacgtgtttgatggccggggagaacatagaagaatctccgtgggagaggtactgatgagagagagcgactattttgtgttcataatattcattacctttttttagcttttttcggtcgttgccccgttcgtagtttttgccttacattggacttcgctccgattttttttctctgcttttccttcatagactggtgtaagatgtaaccgaacactatgtcaaatgcaaatcatcttagggccccttcgattattactgaatggaggcatggaataatttctagccgtactgtttctctactatattaaagcatcagttttagttacacgattgtcctgcatctataaaaaaactaaaattatacataattagct

SEQ ID NO: 15937 - DNA, 632 bp, Zea Mays
cgcctcgaatttgccctatttgacggcaaggaagaccccctccagtggctcaatcgatgcgaacaattctttgaaggtcagcgcacgctggaggatgagaaagtctggctcgcatcctatcacatgacaggaattgcccggacgtggtacacccagctgcagcgcgacgaaccttccatgtcatgggaactcttcaagcagcattgccaactccgctttgggcccccattacgcagcaatcctctcggcgaactggcacgccttccattccgcacgacagtggatgactaccaggagaggttttggaacctgctagcccaaacagctccactgtcacaggagcagaaggtacatctgtttacagctggacttccggagcgtatcaagatcgacgtggaactcatggcaccacgggatatcaatcacgcttgagtttggcgcgcgcatatgaacggaggtcacaagtgctcgatcaccagccgacatcaaccaccaacaagaccatgcgtcaaccccagcgcccgtctgtaccagtaccggcacctcaaccagcgattcctgcagctcccagtacaggacagcagcgaacattcaagaagttgacgcctgccgagatggctaagcggcgtcgc

SEQ ID NO: 15938 - DNA, 2704 bp, Zea Mays
tctcaagatttggaaccgctctgctttcctcatctggccatagaacccacgccagcagacatatatccaatccattgtagacagagactggtgataacaacatatatgagttgttaagcacttcaactttgtccagcattttatggtcaagatgaaacctttcaagccgttggcaagaaatataaggtgatttaagtgcctggatctggatctttaaattccatgtcattttttggacactcttttgtttcataatgtccgctattttttcccatcttctctgaaaattaccccacatttccttgatgttattgttgccagtagtgactagatcttttgggaagttgcagtagtatatgggagatttttcccaacagacagccaacccaaaaacttcaaaaaggttcaaagatggtttcatcgatctcttgataaaatgaacatcaaagaaaaaattactagctgtggaccattgatcaagaaaacaatcaaatccccctgggaagttatatgcatggacaggacctttttcagccacatctctactagatccatcagcaatttctgttgacaaagatgatgatgctccctgtctagtgatttgcacatttttagatagtcctgcattctctttcatttgaatggaaggagcaggacttgtgtcctttcttagactgtatgtagaagcccttggagtagcataatcagagcaagtattcatatttttatcatctctagaatgggtaccagaagctagcttatttaacttagcttggtctatggtatcgtgagttggatattcctcaatagctgcgagtggaggtgcagtgaactggggaacttccacaccaagtgacttgaaagctgagaatgctgctactctggcggcttctgcctcctccaggacaattttgcgggctccattttttattttttttgctacaccaaattgcattcgtcgtaaaccagaatcacctagtcaattcaacagattgacattagagtaggcttaaaacaaacaataaagtatctgcaagcttattactgaatatatccagaagtaactgagaaaccaatttgtgcatcttttcttttctcgaacaacgcaagagagatgcgcaacatttcattaaggtagaagaaaggcaggaatgccaaaaataaatacaagaacacctcacccacacccactgtacatcacgcctcccaccctggagacgctaaaacccaaacagaagagaaaaaagaaaggcggccagggaaaggaacctcaacaagctcctaatcccccagactgaacaccgtgaccatgagctcttggagcttttttgctccagcgctgcactagagactaccttcatccctaacagccctaaaaacttcctgaacattgggcctatgttgctcaaacaagcaagcattacaatgattccacagttcccaagcgaccaaaatgatcaaagaatttagacccttccgcattttcttaggaacagttgatattactgtccaccaccattttgaaaaacagattgttgaagcatatggtgccaaggcagtatggcccgactgaagaaagatgcttgctcatacttgtctagcaaaaacacagccggccaagagatggtgaatgtcttcatcatcttgatcacagagctggcacgcatcagggtggggcaagcctctcttagcaaggcgatcaaccgtccaacaccggttatggaacaccagccaaatgaaaaacttacagcgaggaggtgcccaactgttccatattcttctccatggcccaaatttgatggtgccaatgaaataagcactatatgctgacttactcgtgtaaatgtcggattgtgttaatttccacacaaaattggtccggcacatcttgctgcaaaaacagaccatccaccatgcgacaatctttagatactcgaatataacctggactgtgagtgctcctttgatgtcatccacccacctttggttttggagagcttgggctaccgtcctcctcttggctgtccgcttcgagacagcactaaataagctgggtgccacttcagatatggtatggccatccagccatctgtctgtccagaagagtgtttgctcaccgttcccaacaatgatgtccactgcaatgttgaagagggcctaagcattgcgagggacttgagcggggaggcctgcccaaagcctactaggatcagttttctcagcccacaaccagcgaatctgcaacgcgcagccaagcagatccagattatgaattccaagaccaccatattccagaggctgttgcaccctttcccaagagaccaaacagtgacctcccttagcttgttcctggcccttccagaggagacccctccttttgtcgatggcttttagaacccactttggtagatccatggcaatcaaaaggtaaataggagcagcagttaacactactcgaaccattaccaatctgcctgcacagttcattaaagaagccttccatcccagcaaaaattctgccaccttttcaattatggcagcaagacctcctttgtgggtttgccaattgtgagaggtagcccaagataagtacaaggaaaatccttgactgtacagaacaggatttcagctatagtatttatatcctcatcaaaacaagtactataaaaaagagtagtaaggaatcagaccatgaatacgtgaa

SEQ ID NO: 15939 - DNA, 3074 bp, Zea Mays
ggaaacacatgcatattaatcatataatcaataaaatcaaccatctaaaactatgtgagaatgctatattacctggcaaatagaatttactgcttgcctctgtgctttagctttctctttgctattgccagccgttatttttgtaagaacacgtcgccggcctaataaagtctcaacaaatctgaggagtgataacgaattagaaacttctttgatgtatgcctagctgtatcatcgatattgtggtcccttgttgcatttcgaaactagcctgcacaacttgttcaggactaaaagattcaaaggttctgttgtagtattctagtaggggagaaatcattagggacccaatcttctatctccactggccggtcccagacatacgacctctagtgccgcacagccttcacaaggccaatgagctcgcgctcttaggtggcaagtttggtaggctggggctccatccacagtctaaacaaggcgatcgggcaagagcacgccaaaaccaatgcccgaagaatcgcaatcgatgatggacgaagccgtgatgctcaacaactgcagcaccagtccataggtgagggccgccttgaaggcctcaaaggatgtagtcgccacatcagcacactggaaggcaacacgcttgagggatgttcatggtgtggtgatgatgtcgtagttgttgatgaagaagcggtagaagcccgtgaggccaggcaacccatgaagagtgcgatgagtccatggtgtcagctaggagtgctattcaattctcaagggggactagaatgatgttaacgcattcctcaagccaaacgacatgaccacgaactagtcatgttgttgtcaactgttgttgcgtggcctgaggcatgggcgcgcacggcgtttggccaccacggtcttgtggcccacatgtggggccaggccacatggtgactaactcggtccacgagttgtagatcaaaggctagggaaccatggccttgccttcaacgccaccgttgtcgcaacgacgacggtagctactaatagctgtcggcaccagtggagatgctaccggacggcgccgtgggtgggacaggggcgcagctaagcccccagaagaggggacgctaggggaagcagagctgccgaaaggccatggcacagcaacaagggcggctgctggtggcggtgttgatgtgttgtagtcaatctcctcgaggatgaggtcgttgcagacgaaggaaggtagcagcttggagtgcatgaaagtggaccttcatgtggtttaatttctcgttcaagctgtgtagcacgttgagaatgaggatgcggccacgaacaaccactccgagatcaccgagagcgtcagccatcccatttatcttatggcaatagtcaccgacagagaggtcaccatgcataaagacatagaatttggcgtcaagatgaagggcgcgagcttcacgattaccgaggaattgctcctcaacaacgatccaggtgtggtgtgttgtgccgccgggggtgcgagcgaactcaaactcagggagagcgtgcacaacacccatgacaagacgacgatgtccatgcgtcgataggatggcacaaatagggcgtcgaagaggacatggtcggcgacggcataccgctcgagggcgaggaggacgagatcccgcagcgactgtagtgggtggagaggatgtccagaaccacaggcacaagggcatggaggttctgtacgcccacggcctccacgtggaggttggaggcggtagcggcctcataattgaaatcttcactagcgtcggcgtcatcatcagggtcgtcgttgagaggagggaaggcagcgtcacgagcagcggccttagcacgcttgagaccggtagcagcctagcgttccctcgcgagagcgtcctgggttgtgcggccacgatcctaggcggcagtgacggccttgacagcctcatcggcagcaacgataaggatctagcaggccttctcctatgtggctgcatcctcggtatgttgttggtcaccggaaaacgggcagagggtcactaggtggcatgacggcacaacatcggggaggcgacgtgggcaagcaagtattaccaaaagcgagttctcacgggatcgtaacaatctcttgatgccataatagcgcgaaatgttgcttatattcaactaaatagcaggagaacaataggcctctaccagaacgtgctccacctgaattcgtggaaacaataatcggggagatgatctgggcgctaaaaggaaacagtcagggaggaaggaaccaattgtccacacctaatcaaggacagctacgtacggaggaaacaactgctggcacataatcagagaagaaatcctcgtaactagggaagaaaataaattgtctaacagatggaagttgtgagatagcaagggtttcacaagttaggccacaacaaactgaagaagggcgcagacattaattctgatcggcacaaaccaggtaaaaagaaaattgaatcatgagtgcatttgaaagttatctcaaaccctaatccatggctttagtaaccttggggtttcgtaagaccgctagtagtggatacgacaatatatatacaatctcatgagcaatatgggctacaagtgcatatgtcaacccaacagataaaggagctctgatcttaagtagtcgttatataaataacatgaccaaaagacagtaatccttatcatttactgtataaacttaacattcaaataaaatcaaattatcatgaagcatattcaccttagattattatgagaagcagctcgcatactaacattgaaagatatgataatacatgctcaaatatgaaatatctcaaaagttcagatatgaaataccacaaaagttaagactaacatatttttcacagagctcattcaatgttagcatcaaaaatcaaaggagcaatattatatgaaaagaaagactaaacagaaattgctaccaagtagactaaccctttttggcgacaggataacacaacttcatgtaaccatgaggaaacaccaggaaaaaatctcctaaagctttgaatttt

SEQ ID NO: 15940 - DNA, 507 bp, Zea Mays
ttactaaataaccatataacatactaataattatgtggacaaggattacaaatatgagggtgaaggtgaggtactggatagcctcgctagagctatcaagtaaaccatataacatacttgacaaggattacaaaatatgggtgctggttaggctttttttgtgtggcatggataccaacatttttatcaacatccaacttgtacaaaaaccaaccatcgcttgtccatagtgatatccatcaaaccaaatacaccttgaacctgtagttacaggatgaaatttcatctttgaataaaccccataatcggttttttagcgctgggcctagcaaaagaaaaatcaccatatactaggccctccaatttcttaagggtttatctaaaagattcgcagtataactaggaagacctttcaaatacaccttaaaccctttaacagcatctattggtgatatatatatgcttcttgcatgccacatggaatcataatgataatcaccagtccat

SEQ ID NO: 15941 - DNA, 4320 bp, Zea Mays
ccatgatacatgttccatctgttctggttctggatggaatttgactgcattctgctatccctgaaagaagggtagcacgcttaagaggccaggaaaaatgccactgtcaccctcaccaaggagatcaaggtctcctgcatgggagacttatcacaagaggaacaacagtttcgggaatgtgcttcctgtgaaatcgaaggatgatgaactcgctttgttctctgatatgcagaaagttgagacggagaacttcttactggaaccgtcagaagattttgacgactcaatcgcagcaaaactgagctatttcccagaagtaaaacttggtgttaacattcctgcccatggagaaagccacaatttgctaaatgcggacgacaataaaaatgattatgagtggttattaactcctccagaaactccgctttttcgatctttggatgatgaagaaaaccaatccatcactcaggtttctaggggcagagctcagagcaagcctgtacaaacttcaaggtcatccacgatggataatagtcaaagagctagtagaagcagtgcaagcccaagcaggcttagcccatctccacgctctatgggaaggacaagatcatctagttcagcttctcgctctagcccaccacttgctgttcaaacacaaatgccatcacaaagatcgtcagcccctccgattgctaagacattaacacctcctcgaaggtctccaagtcctgtctcaagaaggatgagtactggttcaagtcgcccaactttgaatgaaacaagaggagcttcaccagtgaaacctaatcacagatcttcacaaaagctgcatggatggcaatcaaacgttcctggtttcccttacgatgcgccttcgaaccttcgcacatctctaactgatcgtccagtatgccggtcaaggggtggatcaccttcatcttttagtggactagaaaaaggttcaagatctagaagacagtcaatgtctcctaccccacctagaagagccagttcatctcacagcattgaacgggaccgaatgagctcttacagcaaagcttctgcaacatcatctggtgaggatgatctggattctatgcagtctgtaccaattagctactccagtagcccagttgtgaaaaagagcttggttgtaatgaaaaccagaaccatggcaccatcaaagaatctgtccaaaaatttcacacctagttctgtcccaaagcggacatttgactctgcactttggttgatggatcaccgcaaagctccacaagataggttccgaccacttctatcaggtgcccctgccagcacatttggttctgggaatggaaatgatgtgcacaaacctatgttttcacacaattcctctttgacaactagcagcaatgcaagctcttatcatggtgccacttttggctcttatatgcatggcagccaagaacaacatgatttggttggtgaatgggaagcagatgatagttctcggggtcatgaggatatatttatgtttgataaattggatgagctcaataaagaagacattcattacaagagcacgggatctacggataattcactggtcatagtaaaacatctagtaagtagcagacatgacttggaaggaagcagtagacctaatcagtccttatgccattctgctgatagttctcaggttggcaatagtaaaaatgctaattgctctagatgtgggaagttttttgatgcgatggatgtggatgaagagggtgtctattgtgatgtatgtgcttcaatgattggaaatatcttaaccagtcctattgtacaacctataggagaagaaaaccagcaatttgataaaactacaaatttgaaacattgcatcgcatctgaccctcctatacccacaggttgtataggctatagcaaagaagtatctcttgatcatcaacttgtgaacagtgaatcgtacactgattgcctggaccaggtccctccaattcattcaatggggcacacacctcaggaaatgctactggggcgggaggaaaagattgacgcagagcatagaaagaaacatgttggggactcattaggaaatacaaatgatattgtcttccatcaatctaatgtgactgaatgtgaacaaatagaaccaacatctgtggggcatgaccttttcatcagagaccaaatggataaccataatcatggatcgtcccaatataatgaaactatctctgaaactgtgaccagtgacagttctcatcaaccaggatcaactacatatcaaaaccctaaacttgaaactactgagggtactgggatatcagtactattagtccctaagtcaaacagcaataaatggcctattgtagaagggagggccctggctgctacaaatatgttgtgttcagaaccctattatgcaagagatggtgtcagtatgatgaagcgtagctttggactggacagcacttcagctgcttcttccagtgatcttggatcttcaaggcaatcaatcatatgttttgagcgccttaggagtggtaagaggggtgacttcgagaagtctcagataagcagcactatgagtcgtcaaagcattgcttctgtgtcagatatgtcaatctgtagctcttcagcttcactttgccctcagattggtgctgtaggtgattcctgtttcccaattgacactttagaaagcagcacttcaagaacattgatctcttctgaagaaaatgatgctttttgtaaggatgctttgccaagtgatatggaatgtttgtctccacaggttattgctgatgatgacagtcatgttgacttgaaaattcagagctatttaagtgaggtaggagatacaacagttgagaatcatagtgctggcagaatgcctgacatggatcataccagtacaaatatgtattctttagatactgaaatgccaagtgatacccgagagtcatcaggcctagaggaaagttgcctgcctgaaactgaagaggatgcttacgccatcaatcagtgcaataaaggtagtgctcgagaacattcaagtgatgagaacaactttgatgatattcaaatgcagtctgaaatagttcagggtttagctgaggaaaacagattggacgattgttgcatgtctgccatctctgaggaggatgtgttgatttctggacgagaagccgacataagggaacttccgaatgatgaagaattttgtgcggaggtagaaggatcaaggaaacaaatccaaagatgctttacattggaagaagctgctgatacaattctcttctgtagttctattgtccacgaccttgcatacaaggctgcgactattgcattggaaaatgagaaggaatcagagtttgttgaccctattcgcccaactgttagaatagttggaggatctttctctaaggatgagagtttaccaaagctgactcacagacgaactccaaatcgtaaggtcaaaaggaaaagattggaaggtgaaacaactacaacggaaactacagagaaagatgctgttgcgaaagactcctcccctgtatgttccgcatcaggtattacaaggaattccgataatatgaaacctccaaagctggagtccaagtgcaactgtataatcatgtaagtaacttcacgtccaaggtcgaaggagttgtgatattggttgggacgaaaatccatgctttctggtttcatgtcacatgcaacttgaagcatgcctacctgcttggttaacccgctgtcagcagcaacgatggagttcaaggcagtggatcttccactagattattttgcagaggtgcatttgctgtgttttttaggtgacagaatgcactgcgagctattcttttgtaaagtcttttcttctctgttgtggaaattttctgcttgtcgtgaggtctattgcggtttgtccaaagtgtgaaagactactagagttgtgctgatagcgtatttacttgcaatgcacgtggctacttgtgaaaatgatggtcgtatactcctatgcacacggcccggatctcacttttttgattccacgatgcatctcttcattgtggagttgtgggtgttggttcttttgccccacaccaaatatggtggcgttctcagctctccgagttcattctttgagatttattttaacctggactgaaagtaatggctttattttcccacttttcctatccaccagttgcctgaaatctagactttgttaaggcgacatgttgcgcgtctgtttcgcttcaagacttgtgcgtcttctcctactgtcggatatgatccattataatttggactcgactcgtg

SEQ ID NO: 15942 - DNA, 4356 bp, Zea Mays
ccatgatacatgttccatctgttctggttctggatggaatttgactgcattctgctatccctgaaagaagggtagcacgcttaagaggccaggaaaaatgccactgtcaccctcaccaaggagatcaaggtctcctgcatgggagacttatcacaagaggaacaacagtttcgggaatgtgcttcctgtgaaatcgaaggatgatgaactcgctttgttctctgatatgcagaaagttgagacggagaacttcttactggaaccgtcagaagattttgacgactcaatcgcaaaactgagctatttcccagaagtaaaacttggtgttaacattcctgcccatggagaaagccacaatttgctaaatgcggacgacaataaaaatgattatgagtgggtaatgccttgaccttgagcaaattttcaaattatcaggttattaactcctccagaaactccgctttttcgatctttggatgatgaagaaaaccaatccatcactcaggtttctaggggcagagctcagagcaagcctgtacaaacttcaaggtcatccacgatggataatagtcaaagagctagtagaagcagtgcaagcccaagcaggcttagcccatctccacgctctatgggaaggacaagatcatctagttcagcttctcgctctagcccaccacttgctgttcaaacacaaatgccatcacaaagatcgtcagcccctccgattgctaagacattaacacctcctcgaaggtctccaagtcctgtctcaagaaggatgagtactggttcaagtcgcccaactttgaatgaaacaagaggagcttcaccagtgaaacctaatcacagatcttcacaaaagctgcatggatggcaatcaaacgttcctggtttcccttacgatgcgccttcgaaccttcgcacatctctaactgatcgtccagtatgccggtcaaggggtggatcaccttcatcttttagtggactagaaaaaggttcaagatctagaagacagtcaatgtctcctaccccacctagaagagccagttcatctcacagcattgaacgggaccgaatgagctcttacagcaaagcttctgcaacatcatctggtgaggatgatctggattctatgcagtctgtaccaattagctactccagtagcccagttgtgaaaaagagcttggttgtaatgaaaaccagaaccatggcaccatcaaagaatctgtccaaaaatttcacacctagttctgtcccaaagcggacatttgactctgcactttggttgatggatcaccgcaaagctccacaagataggttccgaccacttctatcaggtgcccctgccagcacatttggttctgggaatggaaatgatgtgcacaaacctatgttttcacacaattcctctttgacaactagcagcaatgcaagctcttatcatggtgccacttttggctcttatatgcatggcagccaagaacaacatgatttggttggtgaatgggaagcagatgatagttctcggggtcatgaggatatatttatgtttgataaattggatgagctcaataaagaagacattcattacaagagcacgggatctacggataattcactggtcatagtaaaacatctagtaagtagcagacatgacttggaaggaagcagtagacctaatcagtccttatgccattctgctgatagttctcaggttggcaatagtaaaaatgctaattgctctagatgtgggaagttttttgatgcgatggatgtggatgaagagggtgtctattgtgatgtatgtgcttcaatgattggaaatatcttaaccagtcctattgtacaacctataggagaagaaaaccagcaatttgataaaactacaaatttgaaacattgcatcgcatctgaccctcctatacccacaggttgtataggctatagcaaagaagtatctcttgatcatcaacttgtgaacagtgaatcgtacactgattgcctggaccaggtccctccaattcattcaatggggcacacacctcaggaaatgctactggggcgggaggaaaagattgacgcagagcatagaaagaaacatgttggggactcattaggaaatacaaatgatattgtcttccatcaatctaatgtgactgaatgtgaacaaatagaaccaacatctgtggggcatgaccttttcatcagagaccaaatggataaccataatcatggatcgtcccaatataatgaaactatctctgaaactgtgaccagtgacagttctcatcaaccaggatcaactacatatcaaaaccctaaacttgaaactactgagggtactgggatatcagtactattagtccctaagtcaaacagcaataaatggcctattgtagaagggagggccctggctgctacaaatatgttgtgttcagaaccctattatgcaagagatggtgtcagtatgatgaagcgtagctttggactggacagcacttcagctgcttcttccagtgatcttggatcttcaaggcaatcaatcatatgttttgagcgccttaggagtggtaagaggggtgacttcgagaagtctcagataagcagcactatgagtcgtcaaagcattgcttctgtgtcagatatgtcaatctgtagctcttcagcttcactttgccctcagattggtgctgtaggtgattcctgtttcccaattgacactttagaaagcagcacttcaagaacattgatctcttctgaagaaaatgatgctttttgtaaggatgctttgccaagtgatatggaatgtttgtctccacaggttattgctgatgatgacagtcatgttgacttgaaaattcagagctatttaagtgaggtaggagatacaacagttgagaatcatagtgctggcagaatgcctgacatggatcataccagtacaaatatgtattctttagatactgaaatgccaagtgatacccgagagtcatcaggcctagaggaaagttgcctgcctgaaactgaagaggatgcttacgccatcaatcagtgcaataaaggtagtgctcgagaacattcaagtgatgagaacaactttgatgatattcaaatgcagtctgaaatagttcagggtttagctgaggaaaacagattggacgattgttgcatgtctgccatctctgaggaggatgtgttgatttctggacgagaagccgacataagggaacttccgaatgatgaagaattttgtgcggaggtagaaggatcaaggaaacaaatccaaagatgctttacattggaagaagctgctgatacaattctcttctgtagttctattgtccacgaccttgcatacaaggctgcgactattgcattggaaaatgagaaggaatcagagtttgttgaccctattcgcccaactgttagaatagttggaggatctttctctaaggatgagagtttaccaaagctgactcacagacgaactccaaatcgtaaggtcaaaaggaaaagattggaaggtgaaacaactacaacggaaactacagagaaagatgctgttgcgaaagactcctcccctgtatgttccgcatcaggtattacaaggaattccgataatatgaaacctccaaagctggagtccaagtgcaactgtataatcatgtaagtaacttcacgtccaaggtcgaaggagttgtgatattggttgggacgaaaatccatgctttctggtttcatgtcacatgcaacttgaagcatgcctacctgcttggttaacccgctgtcagcagcaacgatggagttcaaggcagtggatcttccactagattattttgcagaggtgcatttgctgtgttttttaggtgacagaatgcactgcgagctattcttttgtaaagtcttttcttctctgttgtggaaattttctgcttgtcgtgaggtctattgcggtttgtccaaagtgtgaaagactactagagttgtgctgatagcgtatttacttgcaatgcacgtggctacttgtgaaaatgatggtcgtatactcctatgcacacggcccggatctcacttttttgattccacgatgcatctcttcattgtggagttgtgggtgttggttcttttgccccacaccaaatatggtggcgttctcagctctccgagttcattctttgagatttattttaacctggactgaaagtaatggctttattttcccacttttcctatccaccagttgcctgaaatctagactttgttaaggcgacatgttgcgcgtctgtttcgcttcaagacttgtgcgtcttctcctactgtcggatatgatccattataatttggactcgactcgtg

SEQ ID NO: 15943 - DNA, 4584 bp, Zea Mays
aaaaacaaaagccacttctcccccagtccaccgcctccctctctgctcctccagcgaagcgcacgcacgacgagcgcaggctgcaaggcaaccgaagctagcgagctcctttgcttctacccgcggcaactcttcaggcgctcgcgacgcatcgagcccttaaggccgaggcgagcgcgagttcgggagcggaggagagaagcgctccgcgagacgactgggacccccaccgcgctcgggtcggaagctggatctgcctcggggctcgtgcccgcggctggatatcgtggggcgcgggggccggagcggctggtggagcggactgccggcggacggagggcgccggtaatcgaaggcggcggtggaatgcgggccatgatacatgttccatctgttctggttctggatggaatttgactgcattctgctatccctgaaagaagggtagcacgcttaagaggccaggaaaaatgccactgtcaccctcaccaaggagatcaaggtctcctgcatgggagacttatcacaagaggaacaacagtttcgggaatgtgcttcctgtgaaatcgaaggatgatgaactcgctttgttctctgatatgcagaaagttgagacggagaacttcttactggaaccgtcagaagattttgacgactcaatcggttattaactcctccagaaactccgctttttcgatctttggatgatgaagaaaaccaatccatcactcaggtttctaggggcagagctcagagcaagcctgtacaaacttcaaggtcatccacgatggataatagtcaaagagctagtagaagcagtgcaagcccaagcaggcttagcccatctccacgctctatgggaaggacaagatcatctagttcagcttctcgctctagcccaccacttgctgttcaaacacaaatgccatcacaaagatcgtcagcccctccgattgctaagacattaacacctcctcgaaggtctccaagtcctgtctcaagaaggatgagtactggttcaagtcgcccaactttgaatgaaacaagaggagcttcaccagtgaaacctaatcacagatcttcacaaaagctgcatggatggcaatcaaacgttcctggtttcccttacgatgcgccttcgaaccttcgcacatctctaactgatcgtccagtatgccggtcaaggggtggatcaccttcatcttttagtggactagaaaaaggttcaagatctagaagacagtcaatgtctcctaccccacctagaagagccagttcatctcacagcattgaacgggaccgaatgagctcttacagcaaagcttctgcaacatcatctggtgaggatgatctggattctatgcagtctgtaccaattagctactccagtagcccagttgtgaaaaagagcttggttgtaatgaaaaccagaaccatggcaccatcaaagaatctgtccaaaaatttcacacctagttctgtcccaaagcggacatttgactctgcactttggttgatggatcaccgcaaagctccacaagataggttccgaccacttctatcaggtgcccctgccagcacatttggttctgggaatggaaatgatgtgcacaaacctatgttttcacacaattcctctttgacaactagcagcaatgcaagctcttatcatggtgccacttttggctcttatatgcatggcagccaagaacaacatgatttggttggtgaatgggaagcagatgatagttctcggggtcatgaggatatatttatgtttgataaattggatgagctcaataaagaagacattcattacaagagcacgggatctacggataattcactggtcatagtaaaacatctagtaagtagcagacatgacttggaaggaagcagtagacctaatcagtccttatgccattctgctgatagttctcaggttggcaatagtaaaaatgctaattgctctagatgtgggaagttttttgatgcgatggatgtggatgaagagggtgtctattgtgatgtatgtgcttcaatgattggaaatatcttaaccagtcctattgtacaacctataggagaagaaaaccagcaatttgataaaactacaaatttgaaacattgcatcgcatctgaccctcctatacccacaggttgtataggctatagcaaagaagtatctcttgatcatcaacttgtgaacagtgaatcgtacactgattgcctggaccaggtccctccaattcattcaatggggcacacacctcaggaaatgctactggggcgggaggaaaagattgacgcagagcatagaaagaaacatgttggggactcattaggaaatacaaatgatattgtcttccatcaatctaatgtgactgaatgtgaacaaatagaaccaacatctgtggggcatgaccttttcatcagagaccaaatggataaccataatcatggatcgtcccaatataatgaaactatctctgaaactgtgaccagtgacagttctcatcaaccaggatcaactacatatcaaaaccctaaacttgaaactactgagggtactgggatatcagtactattagtccctaagtcaaacagcaataaatggcctattgtagaagggagggccctggctgctacaaatatgttgtgttcagaaccctattatgcaagagatggtgtcagtatgatgaagcgtagctttggactggacagcacttcagctgcttcttccagtgatcttggatcttcaaggcaatcaatcatatgttttgagcgccttaggagtggtaagaggggtgacttcgagaagtctcagataagcagcactatgagtcgtcaaagcattgcttctgtgtcagatatgtcaatctgtagctcttcagcttcactttgccctcagattggtgctgtaggtgattcctgtttcccaattgacactttagaaagcagcacttcaagaacattgatctcttctgaagaaaatgatgctttttgtaaggatgctttgccaagtgatatggaatgtttgtctccacaggttattgctgatgatgacagtcatgttgacttgaaaattcagagctatttaagtgaggtaggagatacaacagttgagaatcatagtgctggcagaatgcctgacatggatcataccagtacaaatatgtattctttagatactgaaatgccaagtgatacccgagagtcatcaggcctagaggaaagttgcctgcctgaaactgaagaggatgcttacgccatcaatcagtgcaataaaggtagtgctcgagaacattcaagtgatgagaacaactttgatgatattcaaatgcagtctgaaatagttcagggtttagctgaggaaaacagattggacgattgttgcatgtctgccatctctgaggaggatgtgttgatttctggacgagaagccgacataagggaacttccgaatgatgaagaattttgtgcggaggtagaaggatcaaggaaacaaatccaaagatgctttacattggaagaagctgctgatacaattctcttctgtagttctattgtccacgaccttgcatacaaggctgcgactattgcattggaaaatgagaaggaatcagagtttgttgaccctattcgcccaactgttagaatagttggaggatctttctctaaggatgagagtttaccaaagctgactcacagacgaactccaaatcgtaaggtcaaaaggaaaagattggaaggtgaaacaactacaacggaaactacagagaaagatgctgttgcgaaagactcctcccctgtatgttccgcatcaggtattacaaggaattccgataatatgaaacctccaaagctggagtccaagtgcaactgtataatcatgtaagtaacttcacgtccaaggtcgaaggagttgtgatattggttgggacgaaaatccatgctttctggtttcatgtcacatgcaacttgaagcatgcctacctgcttggttaacccgctgtcagcagcaacgatggagttcaaggcagtggatcttccactagattattttgcagaggtgcatttgctgtgttttttaggtgacagaatgcactgcgagctattcttttgtaaagtcttttcttctctgttgtggaaattttctgcttgtcgtgaggtctattgcggtttgtccaaagtgtgaaagactactagagttgtgctgatagcgtatttacttgcaatgcacgtggctacttgtgaaaatgatggtcgtatactcctatgcacacggcccggatctcacttttttgattccacgatgcatctcttcattgtggagttgtgggtgttggttcttttgccccacaccaaatatggtggcgttctcagctctccgagttcattctttgagatttattttaacctggactgaaagtaatggctttattttcccacttttcctatccaccagttgcctgaaatctagactttgttaaggcgacatgttgcgcgtctgtttcgcttcaagacttgtgcgtcttctcctactgtcggatatgatccattataatttggactcgactcgtg

SEQ ID NO: 15944 - DNA, 4699 bp, Zea Mays
cgaaaatagaaaaacaaaagccacttctcccccagtccaccgcctccctctctgctcctccagcgaagcgcacgcacgacgagcgcaggctgcaaggcaaccgaagctagcgagctcctttgcttctacccgcggcaactcttcaggcgctcgcgacgcatcgagcccttaaggccgaggcgagcgcgagttcgggagcggaggagagaagcgctccgcgagacgactgggacccccaccgcgctcgggtcggaagctggatctgcctcggggctcgtgcccgcggctggatatcgtggggcgcgggggccggagcggctggtggagcggactgccggcggacggagggcgccggtaatcgaaggcggcggtggaatgcgggccatgatacatgttccatctgttctggttctggatggaatttgactgcattctgctatccctgaaagaagggtagcacgcttaagaggccaggaaaaatgccactgtcaccctcaccaaggagatcaaggtctcctgcatgggagacttatcacaagaggaacaacagtttcgggaatgtgcttcctgtgaaatcgaaggatgatgaactcgctttgttctctgatatgcagaaagttgagacggagaacttcttactggaaccgtcagaagattttgacgactcaatcgcaaaactgagctatttcccagaagtaaaacttggtgttaacattcctgcccatggagaaagccacaatttgctaaatgcggacgacaataaaaatgattatgagtggttattaactcctccagaaactccgctttttcgatctttggatgatgaagaaaaccaatccatcactcaggtttctaggggcagagctcagagcaagcctgtacaaacttcaaggtcatccacgatggataatagtcaaagagctagtagaagcagtgcaagcccaagcaggcttagcccatctccacgctctatgggaaggacaagatcatctagttcagcttctcgctctagcccaccacttgctgttcaaacacaaatgccatcacaaagatcgtcagcccctccgattgctaagacattaacacctcctcgaaggtctccaagtcctgtctcaagaaggatgagtactggttcaagtcgcccaactttgaatgaaacaagaggagcttcaccagtgaaacctaatcacagatcttcacaaaagctgcatggatggcaatcaaacgttcctggtttcccttacgatgcgccttcgaaccttcgcacatctctaactgatcgtccagtatgccggtcaaggggtggatcaccttcatcttttagtggactagaaaaaggttcaagatctagaagacagtcaatgtctcctaccccacctagaagagccagttcatctcacagcattgaacgggaccgaatgagctcttacagcaaagcttctgcaacatcatctggtgaggatgatctggattctatgcagtctgtaccaattagctactccagtagcccagttgtgaaaaagagcttggttgtaatgaaaaccagaaccatggcaccatcaaagaatctgtccaaaaatttcacacctagttctgtcccaaagcggacatttgactctgcactttggttgatggatcaccgcaaagctccacaagataggttccgaccacttctatcaggtgcccctgccagcacatttggttctgggaatggaaatgatgtgcacaaacctatgttttcacacaattcctctttgacaactagcagcaatgcaagctcttatcatggtgccacttttggctcttatatgcatggcagccaagaacaacatgatttggttggtgaatgggaagcagatgatagttctcggggtcatgaggatatatttatgtttgataaattggatgagctcaataaagaagacattcattacaagagcacgggatctacggataattcactggtcatagtaaaacatctagtaagtagcagacatgacttggaaggaagcagtagacctaatcagtccttatgccattctgctgatagttctcaggttggcaatagtaaaaatgctaattgctctagatgtgggaagttttttgatgcgatggatgtggatgaagagggtgtctattgtgatgtatgtgcttcaatgattggaaatatcttaaccagtcctattgtacaacctataggagaagaaaaccagcaatttgataaaactacaaatttgaaacattgcatcgcatctgaccctcctatacccacaggttgtataggctatagcaaagaagtatctcttgatcatcaacttgtgaacagtgaatcgtacactgattgcctggaccaggtccctccaattcattcaatggggcacacacctcaggaaatgctactggggcgggaggaaaagattgacgcagagcatagaaagaaacatgttggggactcattaggaaatacaaatgatattgtcttccatcaatctaatgtgactgaatgtgaacaaatagaaccaacatctgtggggcatgaccttttcatcagagaccaaatggataaccataatcatggatcgtcccaatataatgaaactatctctgaaactgtgaccagtgacagttctcatcaaccaggatcaactacatatcaaaaccctaaacttgaaactactgagggtactgggatatcagtactattagtccctaagtcaaacagcaataaatggcctattgtagaagggagggccctggctgctacaaatatgttgtgttcagaaccctattatgcaagagatggtgtcagtatgatgaagcgtagctttggactggacagcacttcagctgcttcttccagtgatcttggatcttcaaggcaatcaatcatatgttttgagcgccttaggagtggtaagaggggtgacttcgagaagtctcagataagcagcactatgagtcgtcaaagcattgcttctgtgtcagatatgtcaatctgtagctcttcagcttcactttgccctcagattggtgctgtaggtgattcctgtttcccaattgacactttagaaagcagcacttcaagaacattgatctcttctgaagaaaatgatgctttttgtaaggatgctttgccaagtgatatggaatgtttgtctccacaggttattgctgatgatgacagtcatgttgacttgaaaattcagagctatttaagtgaggtaggagatacaacagttgagaatcatagtgctggcagaatgcctgacatggatcataccagtacaaatatgtattctttagatactgaaatgccaagtgatacccgagagtcatcaggcctagaggaaagttgcctgcctgaaactgaagaggatgcttacgccatcaatcagtgcaataaaggtagtgctcgagaacattcaagtgatgagaacaactttgatgatattcaaatgcagtctgaaatagttcagggtttagctgaggaaaacagattggacgattgttgcatgtctgccatctctgaggaggatgtgttgatttctggacgagaagccgacataagggaacttccgaatgatgaagaattttgtgcggaggtagaaggatcaaggaaacaaatccaaagatgctttacattggaagaagctgctgatacaattctcttctgtagttctattgtccacgaccttgcatacaaggctgcgactattgcattggaaaatgagaaggaatcagagtttgttgaccctattcgcccaactgttagaatagttggaggatctttctctaaggatgagagtttaccaaagctgactcacagacgaactccaaatcgtaaggtcaaaaggaaaagattggaaggtgaaacaactacaacggaaactacagagaaagatgctgttgcgaaagactcctcccctgtatgttccgcatcaggtattacaaggaattccgataatatgaaacctccaaagctggagtccaagtgcaactgtataatcatgtaagtaacttcacgtccaaggtcgaaggagttgtgatattggttgggacgaaaatccatgctttctggtttcatgtcacatgcaacttgaagcatgcctacctgcttggttaacccgctgtcagcagcaacgatggagttcaaggcagtggatcttccactagattattttgcagaggtgcatttgctgtgttttttaggtgacagaatgcactgcgagctattcttttgtaaagtcttttcttctctgttgtggaaattttctgcttgtcgtgaggtctattgcggtttgtccaaagtgtgaaagactactagagttgtgctgatagcgtatttacttgcaatgcacgtggctacttgtgaaaatgatggtcgtatactcctatgcacacggcccggatctcacttttttgattccacgatgcatctcttcattgtggagttgtgggtgttggttcttttgccccacaccaaatatggtggcgttctcagctctccgagttcattctttgagatttattttaacctggactgaaagtaatggctttattttcccacttttcctatccaccagttgcctgaaatctagactttgttaaggcgacatgttgcgcgtctgtttcgcttcaagacttgtgcgtcttctcctactgtcggatatgatccattataatttggactcgactcgtg

SEQ ID NO: 15945 - DNA, 3241 bp, Zea Mays
ccatgatacatgttccatctgttctggttctggatggaatttgactgcattctgctatccctgaaagaagggtagcacgcttaagaggccaggaaaaatgccactgtcaccctcaccaaggagatcaaggtctcctgcatgggagacttatcacaagaggaacaacagtttcgggaatgtgcttcctgtgaaatcgaaggatgatgaactcgctttgttctctgatatgcagaaagttgagacggagaacttcttactggaaccgtcagaagattttgacgactcaatcgcaaaactgagctatttcccagaagtaaaacttggtgttaacattcctgcccatggagaaagccacaatttgctaaatgcggacgacaataaaaatgattatgagtggttattaactcctccagaaactccgctttttcgatctttggatgatgaagaaaaccaatccatcactcaggtttctaggggcagagctcagagcaagcctgtacaaacttcaaggtcatccacgatggataatagtcaaagagctagtagaagcagtgcaagcccaagcaggcttagcccatctccacgctctatgggaaggacaagatcatctagttcagcttctcgctctagcccaccacttgctgttcaaacacaaatgccatcacaaagatcgtcagcccctccgattgctaagacattaacacctcctcgaaggtctccaagtcctgtctcaagaaggatgagtactggttcaagtcgcccaactttgaatgaaacaagaggagcttcaccagtgaaacctaatcacagatcttcacaaaagctgcatggatggcaatcaaacgttcctggtttcccttacgatgcgccttcgaaccttcgcacatctctaactgatcgtccagtatgccggtcaaggggtggatcaccttcatcttttagtggactagaaaaaggttcaagatctagaagacagtcaatgtctcctaccccacctagaagagccagttcatctcacagcattgaacgggaccgaatgagctcttacagcaaagcttctgcaacatcatctggtgaggatgatctggattctatgcagtctgtaccaattagctactccagtagcccagttgtgaaaaagagcttggttgtaatgaaaaccagaaccatggcaccatcaaagaatctgtccaaaaatttcacacctagttctgtcccaaagcggacatttgactctgcactttggttgatggatcaccgcaaagctccacaagataggttccgaccacttctatcaggtgcccctgccagcacatttggttctgggaatggaaatgatgtgcacaaacctatgttttcacacaattcctctttgacaactagcagcaatgcaagctcttatcatggtgccacttttggctcttatatgcatggcagccaagaacaacatgatttggttggtgaatgggaagcagatgatagttctcggggtcatgaggatatatttatgtttgataaattggatgagctcaataaagaagacattcattacaagagcacgggatctacggataattcactggtcatagtaaaacatctagtaagtagcagacatgacttggaaggaagcagtagacctaatcagtccttatgccattctgctgatagttctcaggttggcaatagtaaaaatgctaattgctctagatgtgggaagttttttgatgcgatggatgtggatgaagagggtgtctattgtgatgtatgtgcttcaatgattggaaatatcttaaccagtcctattgtacaacctataggagaagaaaaccagcaatttgataaaactacaaatttgaaacattgcatcgcatctgaccctcctatacccacaggttgtataggctatagcaaagaagtatctcttgatcatcaacttgtgaacagtgaatcgtacactgattgcctggaccaggtccctccaattcattcaatggggcacacacctcaggaaatgctactggggcgggaggaaaagattgacgcagagcatagaaagaaacatgttggggactcattaggaaatacaaatgatattgtcttccatcaatctaatgtgactgaatgtgaacaaatagaaccaacatctgtggggcatgaccttttcatcagagaccaaatggataaccataatcatggatcgtcccaatataatgaaactatctctgaaactgtgaccagtgacagttctcatcaaccaggatcaactacatatcaaaaccctaaacttgaaactactgagggtactgggatatcagtactattagtccctaagtcaaacagcaataaatggcctattgtagaagggagggccctggctgctacaaatatgttgtgttcagaaccctattatgcaagagatggtgtcagtatgatgaagcgtagctttggactggacagcacttcagctgcttcttccagtgatcttggatcttcaaggcaatcaatcatatgttttgagcgccttaggagtggtaagaggggtgacttcgagaagtctcagataagcagcactatgagtcgtcaaagcattgcttctgtgtcagatatgtcaatctgtagctcttcagcttcactttgccctcagattggtgctgtaggtgattcctgtttcccaattgacactttagaaagcagcacttcaagaacattgatctcttctgaagaaaatgatgctttttgtaaggatgctttgccaagtgatatggaatgtttgtctccacaggttattgctgatgatgacagtcatgttgacttgaaaattcagagctatttaagtgaggtaggagatacaacagttgagaatcatagtgctggcagaatgcctgacatggatcataccagtacaaatatgtattctttagatactgaaatgccaagtgatacccgagagtcatcaggcctagaggaaagttgcctgcctgaaactgaagaggatgcttacgccatcaatcagtgcaataaaggtagtgctcgagaacattcaagtgatgagaacaactttgatgatattcaaatgcagtctgaaatagttcagggtttagctgaggaaaacagattggacgattgttgcatgtctgccatctctgaggaggatgtgttgatttctggacgagaagccgacataagggaacttccgaatgatgtttggctgagccaatgaaattatggccactctgtggag

SEQ ID NO: 15946 - DNA, 526 bp, Zea Mays
tcagaagccaagtgcatccacatgtgctctcccttggagaaggtagcgacgacgacagacggtttatctgtgtgaaccctgggaggttggcgaagggtattggcgggggcacatttgtggagctttactacaacgagggcatcgacaagaccaatgcctccatcatccgcatataggatcgctgaaactagggtgcgccgcagaaaatcacgtacgtagtttttgagctcggaaaatccatctcagcgtttgttatcccaggaagtgttgcttaacatgtggcatctccgctgcaaccgagtacctggactgaaatgttcatgttatcgtcaactaacaactgacctggtttacttcaggccctactgtataattacaggaattggttggtccatctttgctgttttccacagcattcttatggtaaaattattactgggagtttgttgtccagattaagctgtaatgcgccatacaacttccccgaatactggaatatgaagtgattgatgaacctaaactttgg

SEQ ID NO: 15947 - DNA, 812 bp, Zea Mays
ataatggttggaacatgtaaaacatatatggttttccttgtctattatctaataaattttggctgttgtacagtggacattctgaaacagctcagtggccaagaaatttctcgcaagccacctggcggaaagcctggagacaggattggtagacttgcctcacacatactaaagcagcaaagttactaccctctatatcctcctgcccccggtgtgccgttagacttgtcactcgctaaggaagcgctggagatcccatcagcgccagatgttctcctccttccttctgatctcgcaccatttgtgaaggtgctctcccttggagaaggtagcgacgacgacagacggtttatctgtgtgaaccctgggaggttggcgaagggtattggcgggggcacatttgtggagctttactacaacgagggcatcgacaagaccaatgcctccatcatccgcatataggatcgctgaaactagggtgcgccgcagaaaatcacgtacgtagtttttgagctcggaaaatccatctcagcgtttgttatcccaggaagtgttgcttaacatgtggcatctccgctgcaaccgagtacctggactgaaatgttcatgttatcgtcaactaacaactgacctggtttacttcaggccctactgtataattacaggaattggttggtccatctttgctgttttccacagcattcttatggtaaaattattactgggagtttgttgtccagattaagctgtaatgcgccatacaacttccccgaatactggaatatgaagtgattgatgaacctaaactttgg

SEQ ID NO: 15948 - DNA, 2258 bp, Zea Mays
cctgaaccttgtatgtccattgggctagcttttagcctttactaaagcaatatcaagttatgctgttgccactaagattctggatattttatgtagttgtcttggctcaatgtttatttttggttggagcataaaagaaaaactcaagctttgttgcatgtcttgataagtcattaaatcccatcaacatctaggcaattggatggcttaaagctcgaaagctcgtatcttgatggttttctgtcacaccttcaaaatgaagttaaagacaggataataaaagaagaagccaaccttcacatttactccagtaacgatgttgacatgctcttaagcaattcacatgtagatgaagcagcattccatgacacaccaggctatgaacaggaaaaggcacctgaaggatcatctatctctgagttaactcctctggcaagtgacagaccatcatccagcagagtggccaaaacaaatgctgatcgtattaccccttttgcaacacgagtaaataaatttacccaacagtatgttctcaatgctgataacgcagttggtgtgccaagtaaaagtgctgaaatcacagaagatgaaataattagaagagttcaacctagtcaaagatgttacttacaagttcagcgctcacagcctgaaccaggttgcagattcatgtatgacagaatggaagacagatttaattacttggaagatcggatacggaaatcggcgagcttgttttctgcatctggattttgtggacaacctgcagatgctacccttgcttcagaggagaaaatgtttgcagtcggtacagtagcctgtgacggggaaggtcatttgaatgaaaagtctatcttgctacagggcagtgttgaacactccagggggcagtgtgtgcgccttgacttgaaggatcttgatcacttctctttgtttcctgggcaggtggtgggtattgaaggccacaatcccagtggacactgttttgttgcatcaaaattatttgattccataccggtctctgtggatgctcaacttcccagtgctaagaaacaagctattgataatgaaagcaaccaaaattctgacgctggcactctgtcaagagcattgtcatcgatcatcgcagcaggtccctatacaacaaccgataatatgttgtttgagccacttcaagaacttctttcatatgcttgtcgaaagccgcctcagcttctcatattgatgggacccttcattgactctgatcatcctgacataaaaaagggaactattgaccagagctttcatgacatttttcattttgaagttctgagaaagattcaagactttacccagtatctggggaacaccgttcgtgtaattctcattccatctgtgcgagatgctcaccatgactttgttttccctcagcctgcatttgatttgaatttgctagaagataccacccatcagattacttctctggcaaatccatgtctcttcggttccaacgagataaattttggctgttgtacagtggacattctgaaacagctcagtggccaagaaatttctcgcaagccacctggcggaaagcctggagacaggattggtagacttgcctcacacatactaaagcagcaaagttactaccctctatatcctcctgcccccggtgtgccgttagacttgtcactcgctaaggaagcgctggagatcccatcagcgccagatgttctcctccttccttctgatctcgcaccatttgtgaaggtgctctcccttggagaaggtagcgacgacgacagacggtttatctgtgtgaaccctgggaggttggcgaagggtattggcgggggcacatttgtggagctttactacaacgagggcatcgacaagaccaatgcctccatcatccgcatataggatcgctgaaactagggtgcgccgcagaaaatcacgtacgtagtttttgagctcggaaaatccatctcagcgtttgttatcccaggaagtgttgcttaacatgtggcatctccgctgcaaccgagtacctggactgaaatgttcatgttatcgtcaactaacaactgacctggtttacttcaggccctactgtataattacaggaattggttggtccatctttgctgttttccacagcattcttatggtaaaattattactgggagtttgttgtccagattaagctgtaatgcgccatacaacttccccgaatactggaatatgaagtgattgatgaacctaaactttgg

SEQ ID NO: 15949 - DNA, 2348 bp, Zea Mays
acaggtctcgctagggttcttcggtcctccacccacctttgcccgcgaaatgtttcccgccatttcgtgtccgcatttcccgctacccgcctcgctctgctccccagatccctcgccccctcttccctctccgctcccccacgtcatctagtcgccgcccccgctcaccgattgtcctccgctgtggagcgagcaagcagcggcgaagcgatggaggaggagatccgaaaggagttccagagtaacggcttctccatcggaggagccggccccgaggacgccgcccagatcctctccacgctgctgacctactgcatcaactacaagatgagccccgcggatctcgtctcaaactgggaggtctactacctcaataggcaattggatggcttaaagctcgaaagctcgtatcttgatggttttctgtcacaccttcaaaatgaagttaaagacaggataataaaagaagaagccaaccttcacatttactccagtaacgatgttgacatgctcttaagcaattcacatgtagatgaagcagcattccatgacacaccaggctatgaacaggaaaaggcacctgaaggatcatctatctctgagttaactcctctgtatgttctcaatgctgataacgcagttggtgtgccaagtaaaagtgctgaaatcacagaagatgaaataattagaagagttcaacctagtcaaagatgttacttacaagttcagcgctcacagcctgaaccaggttgcagattcatgtatgacagaatggaagacagatttaattacttggaagatcggatacggaaatcggcgagcttgttttctgcatctggattttgtggacaacctgcagatgctacccttgcttcagaggagaaaatgtttgcagtcggtacagtagcctgtgacggggaaggtcatttgaatgaaaagtctatcttgctacagggcagtgttgaacactccagggggcagtgtgtgcgccttgacttgaaggatcttgatcacttctctttgtttcctgggcaggtggtgggtattgaaggccacaatcccagtggacactgttttgttgcatcaaaattatttgattccataccggtctctgtggatgctcaacttcccagtgctaagaaacaagctattgataatgaaagcaaccaaaattctgacgctggcactctgtcaagagcattgtcatcgatcatcgcagcaggtccctatacaacaaccgataatatgttgtttgagccacttcaagaacttctttcatatgcttgtcgaaagccgcctcagcttctcatattgatgggacccttcattgactctgatcatcctgacataaaaaagggaactattgaccagagctttcatgacatttttcattttgaagttctgagaaagattcaagactttacccagtatctggggaacaccgttcgtgtaattctcattccatctgtgcgagatgctcaccatgactttgttttccctcagcctgcatttgatttgaatttgctagaagataccacccatcagattacttctctggcaaatccatgtctcttcggttccaacgagataaattttggctgttgtacagtggacattctgaaacagctcagtggccaagaaatttctcgcaagccacctggcggaaagcctggagacaggattggtagacttgcctcacacatactaaagcagcaaagttactaccctctatatcctcctgcccccggtgtgccgttagacttgtcactcgctaaggaagcgctggagatcccatcagcgccagatgttctcctccttccttctgatctcgcaccatttgtgaaggtgctctcccttggagaaggtagcgacgacgacagacggtttatctgtgtgaaccctgggaggttggcgaagggtattggcgggggcacatttgtggagctttactacaacgagggcatcgacaagaccaatgcctccatcatccgcatataggatcgctgaaactagggtgcgccgcagaaaatcacgtacgtagtttttgagctcggaaaatccatctcagcgtttgttatcccaggaagtgttgcttaacatgtggcatctccgctgcaaccgagtacctggactgaaatgttcatgttatcgtcaactaacaactgacctggtttacttcaggccctactgtataattacaggaattggttggtccatctttgctgttttccacagcattcttatggtaaaattattactgggagtttgttgtccagattaagctgtaatgcgccatacaacttccccgaatactggaatatgaagtgattgatgaacctaaactttgg

SEQ ID NO: 15950 - DNA, 2435 bp, Zea Mays
acaggtctcgctagggttcttcggtcctccacccacctttgcccgcgaaatgtttcccgccatttcgtgtccgcatttcccgctacccgcctcgctctgctccccagatccctcgccccctcttccctctccgctcccccacgtcatctagtcgccgcccccgctcaccgattgtcctccgctgtggagcgagcaagcagcggcgaagcgatggaggaggagatccgaaaggagttccagagtaacggcttctccatcggaggagccggccccgaggacgccgcccagatcctctccacgctgctgacctactgcatcaactacaagatgagccccgcggatctcgtctcaaactgggaggtctactacctcaataggcaattggatggcttaaagctcgaaagctcgtatcttgatggttttctgtcacaccttcaaaatgaagttaaagacaggataataaaagaagaagccaaccttcacatttactccagtaacgatgttgacatgctcttaagcaattcacatgtagatgaagcagcattccatgacacaccaggctatgaacaggaaaaggcacctgaaggatcatctatctctgagttaactcctctggcaagtgacagaccatcatccagcagagtggccaaaacaaatgctgatcgtattaccccttttgcaacacgagtaaataaatttacccaacagtatgttctcaatgctgataacgcagttggtgtgccaagtaaaagtgctgaaatcacagaagatgaaataattagaagagttcaacctagtcaaagatgttacttacaagttcagcgctcacagcctgaaccaggttgcagattcatgtatgacagaatggaagacagatttaattacttggaagatcggatacggaaatcggcgagcttgttttctgcatctggattttgtggacaacctgcagatgctacccttgcttcagaggagaaaatgtttgcagtcggtacagtagcctgtgacggggaaggtcatttgaatgaaaagtctatcttgctacagggcaggtaagggcagccagttctaatgccatatacaccttctactgagtcaaattaacacaattttaaacaacaggtggtgggtattgaaggccacaatcccagtggacactgttttgttgcatcaaaattatttgattccataccggtctctgtggatgctcaacttcccagtgctaagaaacaagctattgataatgaaagcaaccaaaattctgacgctggcactctgtcaagagcattgtcatcgatcatcgcagcaggtccctatacaacaaccgataatatgttgtttgagccacttcaagaacttctttcatatgcttgtcgaaagccgcctcagcttctcatattgatgggacccttcattgactctgatcatcctgacataaaaaagggaactattgaccagagctttcatgacatttttcattttgaagttctgagaaagattcaagactttacccagtatctggggaacaccgttcgtgtaattctcattccatctgtgcgagatgctcaccatgactttgttttccctcagcctgcatttgatttgaatttgctagaagataccacccatcagattacttctctggcaaatccatgtctcttcggttccaacgagataaattttggctgttgtacagtggacattctgaaacagctcagtggccaagaaatttctcgcaagccacctggcggaaagcctggagacaggattggtagacttgcctcacacatactaaagcagcaaagttactaccctctatatcctcctgcccccggtgtgccgttagacttgtcactcgctaaggaagcgctggagatcccatcagcgccagatgttctcctccttccttctgatctcgcaccatttgtgaaggtgctctcccttggagaaggtagcgacgacgacagacggtttatctgtgtgaaccctgggaggttggcgaagggtattggcgggggcacatttgtggagctttactacaacgagggcatcgacaagaccaatgcctccatcatccgcatataggatcgctgaaactagggtgcgccgcagaaaatcacgtacgtagtttttgagctcggaaaatccatctcagcgtttgttatcccaggaagtgttgcttaacatgtggcatctccgctgcaaccgagtacctggactgaaatgttcatgttatcgtcaactaacaactgacctggtttacttcaggccctactgtataattacaggaattggttggtccatctttgctgttttccacagcattcttatggtaaaattattactgggagtttgttgtccagattaagctgtaatgcgccatacaacttccccgaatactggaatatgaagtgattgatgaacctaaactttgg

SEQ ID NO: 15951 - DNA, 2365 bp, Zea Mays
acaggtctcgctagggttcttcggtcctccacccacctttgcccgcgaaatgtttcccgccatttcgtgtccgcatttcccgctacccgcctcgctctgctccccagatccctcgccccctcttccctctccgctcccccacgtcatctagtcgccgcccccgctcaccgattgtcctccgctgtggagcgagcaagcagcggcgaagcgatggaggaggagatccgaaaggagttccagagtaacggcttctccatcggaggagccggccccgaggacgccgcccagatcctctccacgctgctgacctactgcatcaactacaagatgagccccgcggatctcgtctcaaactgggaggtctactacctcaataggcaattggatggcttaaagctcgaaagctcgtatcttgatggttttctgtcacaccttcaaaatgaagttaaagacaggataataaaagaagaagccaaccttcacatttactccagtaacgatgttgacatgctcttaagcaattcacatgtagatgaagcagcattccatgacacaccaggctatgaacaggaaaaggcacctgaaggatcatctatctctgagttaactcctctggcaagtgacagaccatcatccagcagagtggccaaaacaaatgctgatcgtattaccccttttgcaacacgagtaaataaatttacccaacagtatgttctcaatgctgataacgcagttggtgtgccaagtaaaagtgctgaaatcacagaagatgaaataattagaagagttcaacctagtcaaagatgttacttacaagttcagcgctcacagcctgaaccaggttgcagattcatgtatgacagaatggaagacagatttaattacttggaagatcggatacggaaatcggcgagcttgttttctgcatctggattttgtggacaacctgcagatgctacccttgcttcagaggagaaaatgtttgcagtcggtacagtagcctgtgacggggaaggtcatttgaatgaaaagtctatcttgctacagggcaggtggtgggtattgaaggccacaatcccagtggacactgttttgttgcatcaaaattatttgattccataccggtctctgtggatgctcaacttcccagtgctaagaaacaagctattgataatgaaagcaaccaaaattctgacgctggcactctgtcaagagcattgtcatcgatcatcgcagcaggtccctatacaacaaccgataatatgttgtttgagccacttcaagaacttctttcatatgcttgtcgaaagccgcctcagcttctcatattgatgggacccttcattgactctgatcatcctgacataaaaaagggaactattgaccagagctttcatgacatttttcattttgaagttctgagaaagattcaagactttacccagtatctggggaacaccgttcgtgtaattctcattccatctgtgcgagatgctcaccatgactttgttttccctcagcctgcatttgatttgaatttgctagaagataccacccatcagattacttctctggcaaatccatgtctcttcggttccaacgagataaattttggctgttgtacagtggacattctgaaacagctcagtggccaagaaatttctcgcaagccacctggcggaaagcctggagacaggattggtagacttgcctcacacatactaaagcagcaaagttactaccctctatatcctcctgcccccggtgtgccgttagacttgtcactcgctaaggaagcgctggagatcccatcagcgccagatgttctcctccttccttctgatctcgcaccatttgtgaaggtgctctcccttggagaaggtagcgacgacgacagacggtttatctgtgtgaaccctgggaggttggcgaagggtattggcgggggcacatttgtggagctttactacaacgagggcatcgacaagaccaatgcctccatcatccgcatataggatcgctgaaactagggtgcgccgcagaaaatcacgtacgtagtttttgagctcggaaaatccatctcagcgtttgttatcccaggaagtgttgcttaacatgtggcatctccgctgcaaccgagtacctggactgaaatgttcatgttatcgtcaactaacaactgacctggtttacttcaggccctactgtataattacaggaattggttggtccatctttgctgttttccacagcattcttatggtaaaattattactgggagtttgttgtccagattaagctgtaatgcgccatacaacttccccgaatactggaatatgaagtgattgatgaacctaaactttgg

SEQ ID NO: 15952 - DNA, 1648 bp, Zea Mays
gaaacaaagaaacaaacagaagcctcgccgctgttttacccgtgtcttcccctcgactgttcgatttcgttcgtttgcgatcgaggatacgggcacgcgcgcatggcgatggcagcagccaccggcacggtggtgctggtagacgcggccctggccccgtacgagcaccctgacctccggtggcttgtgcggaagcatgtcctcgccgtactccaggacttccccacgctgtcgccgtccgtcgacacctacaccagcgacagcggcgcgtccgccgtgctgctcaacgcgcggggcctcctcaccgtctcccccgccctgccaccggtccttctcaccctatggcttcccctggagtacccgtacctgccgccgctcgtctacgtcttccccgccgcgccgccggcttcgctcgcccgcgaccaccccttcgtggaccaccgcaccgggcgcgtccgccaaaccctgccctaccttgaggactgggccgtgccgcgctccagcgtcgccggactcgtgcggagcctcgttggtgccctgaggatgtgccacccgctgacgtcgcgcttcggctccgtcgtccacgccacggccacggccagagcgacgacgacgacgacgccgacgccggaggaggaggagcaggagcgcatgcacgcggcgctgctcgacgagctcgtctccaggctgggcagggacgcggccgccttccgcggccacgtggacgaggacatacatgccttgtcctccagccaaggcaacctccgagcgcgggccgacgccatggaccgcgccgtccgcgacctcgaaggcgagaggatgcggctggagcgcgccgtgacggccagccttagtcaccgcggcgagctgctgtcctggctgcacaagacgagctgcgcgcccgacgacgccggagcagcactactcctggcaccgcacggggcggcgggcggcgacgcgccaaggtggcttgagagcaaggcgtcggagctcgccatggacgacaccgtcgacgcccttggccgcgccctcgaggacggcgagcgcgtcatcggcttccacgagtacatcaagcgtgtcaaggtgcttgctcgggagcagtttttccattgctacgcagcatccacctcgatgagcaagcgttctccgccgccggacgccacctcccctttgatttagcgtctacagtacaactaccggtgacagttaagactgtccgcacagcggcggacgacggctgaaaataacaactaattttcgatggcctacgaaaccgccgaaaattacacgagaatttttggcggcccgaatttacagccgaaaacaagcactattttcgacggacagggactcgaccgccgaaactacgaattttatagggttccctgtctctcttctctgccaattcaaaatctagctctcctacctgattgagccgtcgccaaaccgcccaacgcccgaccacaccatggtgccgctcctcacacgcgaccgcaccgtgcgacccttctcacgcctggccccgccccgacgcccctgctcgagctacctgacgcctatatgtgatgatttgactcttgtggtgaatttaacatgttgtgatggatttgttatgaactatgatggattcttatgtatattatggtgg

SEQ ID NO: 15953 - DNA, 1603 bp, Zea Mays
ccgggcgttaccgaaacaaagaaacaaacagaagcctcgccgctgttttacccgtgtcttcccctcgactgttcgatttcgttcgtttgcgatcgaggatacgggcacgcgcgcatggcgatggcagcagccaccggcacggtggtgctggtagacgcggccctggccccgtacgagcaccctgacctccggtggcttgtgcggaagcatgtcctcgccgtactccaggacttccccacgctgtcgccgtccgtcgacacctacaccagcgacagcggcgcgtccgccgtgctgctcaacgcgcggggcctcctcaccgtctcccccgccctgccaccggtccttctcaccctatggcttcccctggagtacccgtacctgccgccgctcgtctacgtcttccccgccgcgccgccggcttcgctcgcccgcgaccaccccttcgtggaccaccgcaccgggcgcgtccgccaaaccctgccctaccttgaggactgggccgtgccgcgctccagcgtcgccggactcgtgcggagcctcgttggtgccctgaggatgtgccacccgctgacgtcgcgcttcggctccgtcgtccacgccacggccacggccagagcgacgacgacgacgacgccgacgccggaggaggaggagcaggagcgcatgcacgcggcgctgctcgacgagctcgtctccaggctgggcagggacgcggccgccttccgcggccacgtggacgaggacatacatgccttgtcctccagccaaggcaacctccgagcgcgggccgacgccatggaccgcgccgtccgcgacctcgaaggcgagaggatgcggctggagcgcgccgtgacggccagccttagtcaccgcggcgagctgctgtcctggctgcacaagacgagctgcgcgcccgacgacgccggagcagcactactcctggcaccgcacggggcggcgggcggcgacgcgccaaggtggcttgagagcaaggcgtcggagctcgccatggacgacaccgtcgacgcccttggccgcgccctcgaggacggcgagcgcgtcatcggcttccacgagtacatcaagcgtgtcaagcgttctccgccgccggacgccacctcccctttgatttagcgtctacagtacaactaccggtgacagttaagactgtccgcacagcggcggacgacggctgaaaataacaactaattttcgatggcctacgaaaccgccgaaaattacacgagaatttttggcggcccgaatttacagccgaaaacaagcactattttcgacggacagggactcgaccgccgaaactacgaattttatagggttccctgtctctcttctctgccaattcaaaatctagctctcctacctgattgagccgtcgccaaaccgcccaacgcccgaccacaccatggtgccgctcctcacacgcgaccgcaccgtgcgacccttctcacgcctggccccgccccgacgcccctgctcgagctacctgacgcctatatgtgatgatttgactcttgtggtgaatttaacatgttgtgatggatttgttatgaactatgatggattcttatgtatattatggtgg

SEQ ID NO: 15954 - DNA, 1731 bp, Zea Mays
aattaggcgtcttgagggtacccctaattatggtccccgacagctgcggccatggagggcgcccctgtagccgccatgcatgctacagggcaaggggagggggctcgcgcggcaacccgtgcggacagtctaaggctatgcacagctcatcccgccaggcgctccctccccttgtttagcgtgtgtagagcaacgctacatgctgtgcacagtaacccgccagaagggtaacactagtcactcctcttgcgtggttttatatacacgggagtatttattagatagagaaaaattgatagtagataaaaaataggtataggaaatgatattcttatggttgtagtggggtataggaagagaatatagggaaccgttgcggaagatgaaaaggtagaggatggaatattgatgatgtgacacaaaaaatagtatagaaggaaaaatttagagaaaactgttgcggatagcccaaaactgctacattggtagcgtgtgatacaaggattcaccagatctggggagcgagccggctccctaccctcgagcaacgtacgcagcactgtttttacgagaaaaaatattaatgatagtgatgtataagtagataaaataatattttatgatagtagtgaaatataggaagagaatttagagaaaatcactgtagggacaagaaaagtaagagatagactagctgcataatgcggtagcgcctagcggtttcaacggttccccgttcgtctctcctccctctcgttttaaggctaatagaaccactctaaacgctacaacggtagcatctatcgtccctcatttcgacgacaaccttcacgctacctctccccatggttgacagtgatgtctgtcccgccagcctgtcgtcagtccccgcagcttcgaccgccgtcggacttcgtccggagtggatccagcgccggcgaactgtggcaaacggtgtatccggcggcgctggactgacatgaagaggctgctcggttggcgcatggtgtgctgcacgaccccgccaatggaatctccgagctcggtttccatggatttacacctaaatcacaaaaaaaccacttttcctttgctctgtttgtggatctaaacttacttttttaatttaaggaggttttatctacacatgttcgagttatatgtactaatgtacgttcttgtgtaattcaaatttggttagttgaaaaaaaatgtatataataatagtatggtgaggtatagaggattaatttactgttgtagatgatataaatataggggaagagaacgctgacatagcatgtgagtgggatatatgcgaagaaatatagagtgaaccgtagaagatagtcttagtcactgcctccactgcgtcaccgtggcgtggtgggattttagggccccgagacaaaattcaaaaaagaggtccttctaattatatttatacataaatattaccaatataagctctcaatatacatctaaaaacatatcaaccaacaagtaaataaaaaaatacatattatagtgctacttcaaaatttcttctataatctaactatatatatacctagaattaggccctatagatttggggcctagggtggtgccccccttctgccccacccttaggaccgacactaggccacttcaacctagcctagccttctctaccgctcgctccgactccgaccgtgtcagggatacctctgcctcaacatcgtctcttcc

SEQ ID NO: 15955 - DNA, 2081 bp, Zea Mays
gaaacaaagaaacaaacagaagcctcgccgctgttttacccgtgtcttcccctcgactgttcgatttcgttcgtttgcgatcgaggatacgggcacgcgcgcatggcgatggcagcagccaccggcacggtggtgctggtagacgcggccctggccccgtacgagcaccctgacctccggtggcttgtgcggaagcatgtcctcgccgtactccaggacttccccacgctgtcgccgtccgtcgacacctacaccagcgacagcggcgcgtccgccgtgctgctcaacgcgcggggcctcctcaccgtctcccccgccctgccaccggtccttctcaccctatggcttcccctggagtacccgtacctgccgccgctcgtctacgtcttccccgccgcgccgccggcttcgctcgcccgcgaccaccccttcgtggaccaccgcaccgggcgcgtccgccaaaccctgccctaccttgaggactgggccgtgccgcgctccagcgtcgccggactcgtgcggagcctcgttggtgccctgaggatgtgccacccgctgacgtcgcgcttcggctccgtcgtccacgccacggccacggccagagcgacgacgacgacgacgccgacgccggaggaggaggagcaggagcgcatgcacgcggcgctgctcgacgagctcgtctccaggctgggcagggacgcggccgccttccgcggccacgtggacgaggacatacatgccttgtcctccagccaaggcaacctccgagcgcgggccgacgccatggaccgcgccgtccgcgacctcgaaggcgagaggatgcggctggagcgcgccgtgacggccagccttagtcaccgcggcgagctgctgtcctggctgcacaagacgagctgcgcgcccgacgacgccggagcagcactactcctggcaccgcacggggcggcgggcggcgacgcgccaaggtggcttgagagcaaggcgtcggagctcgccatggacgacaccgtcgacgcccttggccgcgccctcgaggacggcgagcgcgtcatcggcttccacgagtacatcaagcgtgtcaaggtgcttgctcgggagcagtttttccattgctacgcagcatccacctcgatgagcaagcgttctccgccgccggacgccacctcccctttgatttagcgtctacagtacaactaccggtgacagttaagactgtccgcacagcctgtcgtcagtccccgcagcttcgaccgccgtcggacttcgtccggagtggatccagcgccggcgaactgtggcaaacggtgtatccggcggcgctggactgacatgaagaggctgctcggttggcgcatggtgtgctgcacgaccccgccaatggaatctccgagctcggtttccatggatttacacctaaatcacaaaaaaaccacttttcctttgctctgtttgtggatctaaacttacttttttaatttaaggaggttttatctacacatgttcgagttatatgtactaatgtacgttcttgtgtaattcaaatttggttagttgaaaaaaaatgtatataataatagtatggtgaggtatagaggattaatttactgttgtagatgatataaatataggggaagagaacgctgacatagcatgtgagtgggatatatgcgaagaaatatagagtgaaccgtagaagatagtcttagtcactgcctccactgcgtcaccgtggcgtggtgggattttagggccccgagacaaaattcaaaaaagaggtccttctaattatatttatacataaatattaccaatataagctctcaatatacatctaaaaacatatcaaccaacaagtaaataaaaaaatacatattatagtgctacttcaaaatttcttctataatctaactatatatatacctagaattaggccctatagatttggggcctagggtggtgccccccttctgccccacccttaggaccgacactaggccacttcaacctagcctagccttctctaccgctcgctccgactccgaccgtgtcagggatacctctgcctcaacatcgtctcttcc

SEQ ID NO: 15956 - DNA, 2053 bp, Zea Mays
attttctgccggcctggccgggcgttaccgaaacaaagaaacaaacagaagcctcgccgctgttttacccgtgtcttcccctcgactgttcgatttcgttcgtttgcgatcgaggatacgggcacgcgcgcatggcgatggcagcagccaccggcacggtggtgctggtagacgcggccctggccccgtacgagcaccctgacctccggtggcttgtgcggaagcatgtcctcgccgtactccaggacttccccacgctgtcgccgtccgtcgacacctacaccagcgacagcggcgcgtccgccgtgctgctcaacgcgcggggcctcctcaccgtctcccccgccctgccaccggtccttctcaccctatggcttcccctggagtacccgtacctgccgccgctcgtctacgtcttccccgccgcgccgccggcttcgctcgcccgcgaccaccccttcgtggaccaccgcaccgggcgcgtccgccaaaccctgccctaccttgaggactgggccgtgccgcgctccagcgtcgccggactcgtgcggagcctcgttggtgccctgaggatgtgccacccgctgacgtcgcgcttcggctccgtcgtccacgccacggccacggccagagcgacgacgacgacgacgccgacgccggaggaggaggagcaggagcgcatgcacgcggcgctgctcgacgagctcgtctccaggctgggcagggacgcggccgccttccgcggccacgtggacgaggacatacatgccttgtcctccagccaaggcaacctccgagcgcgggccgacgccatggaccgcgccgtccgcgacctcgaaggcgagaggatgcggctggagcgcgccgtgacggccagccttagtcaccgcggcgagctgctgtcctggctgcacaagacgagctgcgcgcccgacgacgccggagcagcactactcctggcaccgcacggggcggcgggcggcgacgcgccaaggtggcttgagagcaaggcgtcggagctcgccatggacgacaccgtcgacgcccttggccgcgccctcgaggacggcgagcgcgtcatcggcttccacgagtacatcaagcgtgtcaagcgttctccgccgccggacgccacctcccctttgatttagcgtctacagtacaactaccggtgacagttaagactgtccgcacagcctgtcgtcagtccccgcagcttcgaccgccgtcggacttcgtccggagtggatccagcgccggcgaactgtggcaaacggtgtatccggcggcgctggactgacatgaagaggctgctcggttggcgcatggtgtgctgcacgaccccgccaatggaatctccgagctcggtttccatggatttacacctaaatcacaaaaaaaccacttttcctttgctctgtttgtggatctaaacttacttttttaatttaaggaggttttatctacacatgttcgagttatatgtactaatgtacgttcttgtgtaattcaaatttggttagttgaaaaaaaatgtatataataatagtatggtgaggtatagaggattaatttactgttgtagatgatataaatataggggaagagaacgctgacatagcatgtgagtgggatatatgcgaagaaatatagagtgaaccgtagaagatagtcttagtcactgcctccactgcgtcaccgtggcgtggtgggattttagggccccgagacaaaattcaaaaaagaggtccttctaattatatttatacataaatattaccaatataagctctcaatatacatctaaaaacatatcaaccaacaagtaaataaaaaaatacatattatagtgctacttcaaaatttcttctataatctaactatatatatacctagaattaggccctatagatttggggcctagggtggtgccccccttctgccccacccttaggaccgacactaggccacttcaacctagcctagccttctctaccgctcgctccgactccgaccgtgtcagggatacctctgcctcaacatcgtctcttcc

SEQ ID NO: 15957 - DNA, 1477 bp, Zea Mays
tgcatcgaacacactgtggttagttctagcctcccagccacccacgcttctctcgtccctcccctttgtcggtgtcttccccctctctcttctcttctctacaaatctctcttccgcatccgccgcaaaaccctaacctaagcggctcaaccctacgattaccgccgccgccgccccccgctcgcccacgcaagcttgggcgggcctccctcagctcggccaagagcccgaccccctgctccggcaccagcgccgccaccgccatggatatggaagtgtacgagcgcctcaccgccgaaaccagtcactaccgtggcacgcgtttcgatgcgctgatcgggctcgacgaggtggagcctagtgacgaggaagaggatgaggaggaagaagagcgagcggcgggtgccggggctggagacgagctgctctgcccgttctgcagcgaggagctggacgcggtggggctgtggtgccatatggacgacgagcaccgtgctgaggtgtgtccaatttgcacagataaggttgatatgaacttgattgtccacatcagctcacagcatcgaggtttcttgaaggataagtggagaaatcagcaaggttcatctggggtgcgttattcaacacttgccttattgaagaaagatctacatgagaggataagtggatcatctcgtgctgccccagtcagcacggtgcctgatcctctactgtcctcttttgttggtagcttttatgaagtcgatttgccaaaggatgctaaaaaagagtccttggttgagacagaagtgagaagtgataacatagagcagagagcagcggagagctttgatgagcctttgctccctgaggtgaaggaggagaaaaccaggaggagccaatttgtgcaggggcttgtcttgtccctgatgtttgatgacatcttatgaagagcacatcccaaaaggggaagggagaaggcatattttgctaccagcaaacgtttcgccggcacagctgttgtaacgattcgctgatttgccatcggaagatggtgacattgctctgggataatgggggagatgaactgtggatatggatgtttcgtagtactatgcatcatcattgcatgaataatagagtatatgtatgtatagtttgttagcatcatggtactggatattctggggctctgtatgtatattgggaggccgaaatggaccctacctatcataaatcagccatttgataatgtgcatgtggtgtttttctggaagcctgggatgtgcgtaggtaacaccagacacatctgcctgtggttgtcgtaccgacttttcaacaaatcctttatttcaaaaataaaatggcatggtttggttaaatttggacgaaaggattcacgttttttttgttcaaaaataaaacggcatggtttactttttttagtggtgtgatgtatcggcgttcggttcccatcatcgacaagtgtgaagagtaa

SEQ ID NO: 15958 - DNA, 1239 bp, Zea Mays
tcacttgtcaccaaatcaaccataaagtattgattaattcctctccatctttttatctctatgtctcatttacattgtatttcaagaagtcatacggagcgaacgttactatagcacacggaggacctttcgagagccacgctgtaaacctatgcacacaaaaaagaagaaaaaaataccacccttgctcttaagcttcgcgtcagccaccctccgctattcgttctatctccttctccactgggccaactccgctctactctccaatcccaggcgaatccctcgtcttcttcgaccgcgtgtcggagcttcatcttctctggtccgcctgccctgatttgccgctccgctctcccccccttccgccggaaaggggggaaattgatggcgaggctagtggctctggcatcgatggtggcagttctggtactcggcctcgcctgtgcagaggcggagccacagtgcacgcggcgccgcccgcccgcgccgccgcggccgcacagcgtgacgatcaccgagttcggggccgttggtgacggcgtcaccctcaacaccgtgtccttccagaacgccgtcttctacctgcgctccttcgccgacaagggcggcgcgcagctgtacattcccaggggccggtggctcaccggcagtttcaatctcaccagccaccttaccctcttcctggagagtggcgctgtcatcgttggcacgcaggacgtttcacagtggcctgttgtcgaacctttgccatcatatggacgaggaatggaccttccaggttcgaggcatcgaagcttaataaacgggcagaatctagttgatgttgtaattacgggaaacaatggaacaatcgatggccagggttctacatggtggaactggtttcgttcgaataagttgaactatagtcgccctcatcttgtggagtttgtggactctgagcaaatcgtcatttcgaacataacatttttaaattcccctgcttggagtatacatccagtgtattgcagcaatgtagtggtccatagtgtcacaattcagacttcattggatgctccacttaatcatggaatcgttccaggtgatgaatgtgagggactataaatgagaagatttgcagcaggaagcatagaattttttcccacataaaaatgcacaaatcgtcatattggtctggtcgattattcttaccctagtgttatcttaaacattaaacggtaaacagtcgatcatcctcta

SEQ ID NO: 15959 - DNA, 2201 bp, Zea Mays
tcacttgtcaccaaatcaaccataaagtattgattaattcctctccatctttttatctctatgtctcatttacattgtatttcaagaagtcatacggagcgaacgttactatagcacacggaggacctttcgagagccacgctgtaaacctatgcacacaaaaaagaagaaaaaaataccacccttgctcttaagcttcgcgtcagccaccctccgctattcgttctatctccttctccactgggccaactccgctctactctccaatcccaggcgaatccctcgtcttcttcgaccgcgtgtcggagcttcatcttctctggtccgcctgccctgatttgccgctccgctctcccccccttccgccggaaaggggggaaattgatggcgaggctagtggctctggcatcgatggtggcagttctggtactcggcctcgcctgtgcagaggcggagccacagtgcacgcggcgccgcccgcccgcgccgccgcggccgcacagcgtgacgatcaccgagttcggggccgttggtgacggcgtcaccctcaacaccgtgtccttccagaacgccgtcttctacctgcgctccttcgccgacaagggcggcgcgcagctgtacattcccaggggccggtggctcaccggcagtttcaatctcaccagccaccttaccctcttcctggagagtggcgctgtcatcgttggcacgcaggacgtttcacagtggcctgttgtcgaacctttgccatcatatggacgaggaatggaccttccaggttcgaggcatcgaagcttaataaacgggcagaatctagttgatgttgtaattacggggttctacatggtggaactggtttcgttcgaataagttgaactatagtcgccctcatcttgtggagtttgtggactctgagcaaatcgtcatttcgaacataacatttttaaattcccctgcttggagtatacatccagtgtattgcagcaatgtagtggtccatagtgtcacaattcagacttcattggatgctccacttaatcatggaatcgttccagattcatgctcaaatatgtgcatcgaggacagcagtatcagtgttagccacgacgccatatcactaaaaagcgggtgggacaagcaaggcattgctttcgggaggccaacctcagacatccacataagcagactggatctgcagtcctcactgggcgccgctctcgcgttcgggagcgagatgtcgggcgggatctcggacatccatgcggaccgcctcctcatccactcttcgtccagaggcgtcttcttcaagaccgcgccgggacgcggaggctatatcagagacaccgtgatctcagacgtccagatggaagacgtcgacgtcgccatcgcattcaccggtgactggccaagccacccagatgaccagttcgacccggccgcgctcccggtggtcagccacatcaccctgaagaacatgactggaacaagaatctcggtcgctggcgttttgtcaggaatcgccggcgacccgttcaccgacatctgcctctccaacatcaacttctcactggccgattcggccagtcccacctcccactggtcttgctccaacgtctccggatactccgagctggtcttccccgagccttgcctggatctgcagacccaatcctcagacgcttccgtctgctccaccctccctagcttccacgccgccgccattgcagcagcgtaaatgcacagagagtacaaagtgtccatcctttttcctgttcccggtcccctgtacacttcagaggatctctcaagccgccttttcctcccccgacaattctttgaagctataggcgcgcccctgtcgttgaagaaaagaatcgttcaccgtttttctccggccgtcggcttcgagggctcagctgcatcgcctttcttgcgggaggcaagcctggcggcggacggtcgacatcgagctgttaatttgcttgtacagttatgatttcttcattcaatctgtaagaaggaatttttgtggtagtagagggttgagtcgagtccagagagttgcttcatacgattgtcgatttggtgaataaaacacatgatgaattcatgatccagtggctctgtatacatcctgtcatccttgtgggtacatccatccatgatccatccaatctaacaaacaaccagtacaccaacac

SEQ ID NO: 15960 - DNA, 3039 bp, Zea Mays
aacgcccctttctcttcagccaccgctgatggcctccacaccgccggcgcccgccgtggcgccgtcactggtggacaccctcttccagcgctccctaaatgacctcgtcaagttcctccgcgccgacccgtcgtccaccggcgaggccgccgccgttgcccgcgctctctccgagatccaccgcgagatccgcgctcccgacgccgccaccaagtccgtcgcgctgcagaagctcacgtatctctcctcccttcacttcgcccccatcgcctcccacccgctcgccttcctcgccatcgagcttctggcctcgccgcacctcccccacaagcgcctcgcctacctcgccgcgtctctctcgctccacccggtctcgctctcgctgctcccgctcgccactcaccagctccacaaggacctctccccctccgctggcgtccaccatcacgtctccgcgctcgcgctccagctcctcgcctcgcccgccgcggctgccgcgcccgacctcccggtccacctcgcgcaagacctcgtgccacacctcgcccggggctgcccccgcgccatcgccgccgccgcgcgcgtcatagctgcatcgccatccgcggccgtgccggtcctcttcaagccgctggcagcgtgtctcgcctctcccgatcctcgggcgtccacggcggctgtggcagccttctgtgatctatcggcgccccctgctgacgcaactcctttcctgccactcgcgcccgacctatacaacctgctcaccacttcccgatccaactgggctctcatcaaggtgctcaagctgtttgcacgactggctcctctcgagtcccgcctggcagccagaattgtcgacccggtctgccagctcctcacccgatccgcggccatgtcactgacctttgagtgcatccgcacggtgctcactgcactgccagcacatgatgccgcagtacgccttgccattgggaaagccatggagttcattgctgctgctgatgattccaaccttcggtacctagggcttctggctcttggtatgcttggcccagcatatgcatccacggtgaatgattgtcgggaggctattgcgaagtccctgggtgatgccgacacgaacattcgccaagaggcattgcgtctcattatggggatggttaatgaaaacaacatcatggacattgctgctttgctgatcagtcatgttgctaagtcagacccagagttcgcaaatgacattcttggggctgttctagcagcatgtgggcataatgtgtatgagatggtggtggattttgattggtatgtttcgctccttgcacatatggcaaggaccctgcattgtgcccaaggggatgagattggtcggcagcttgttgatgtaggactcagagtgcaggatgcacggccagagcttgtccgttcagctcgaactctcctgattgatcctgcattgcttggaaatcacttcctcttccctgttctttcagcggctgcatggatttctggtgagtatgtagacttaacgaaggatcctgttgagcttgttgaagcgctcttgcaaccaaggaccagcctcctgccaatttcagtgagagctgtctacatccatgcagtatttaaagtgattacatggtgtttcagtgcatatattgggagattgggtgattcagacttggcaatggatgtcatgtttgacaggttagctgctgatgaaactgtcaatttggaaagcaatgctgcacttgggtctggtgatgagcaagatattggggccagcacagtgcaaaaggaccctttttcgcatgaatctatactttacatgattaacctgattcaaactacagttggtccactcattaactgcaatgaagtagaagtccaggagagagcacacaacctgattggttttgtccatttagtaagagagattcaagggttgaacaaaaggaaggttgctgatggtgacaagtctagcaggttaaaagagcttgttaagactatgcgggcagtattctgtcaagaattaggccctgtttatgtgaatgcacagatgaaagtgtcccctccagatggccttatcctgaatgaaaatcttgttgaacttgctggcatggtgagtgaagatgatactactccctcaacttcaatctttttctatcctcgcagtcgtcattctgtagataccagagatgagcctgcagtgtcaattggtttgtcttctctttctgagcatcgcaagaggcatgggctcttttatctccaaacagggaaagctgaggacgagccaaatgattaccctcaagctaacgattctctaccatcttctagcaataattctgctaatgatgacaagtggaagactgctgaacgtgtatttgctgggaaaaagtcgacagccacgaagaccagaccaaaagtagttaagttggataccgaggatttcctcagttctatgatgcctagtgcaattgtcccaaaagaagaccccttgtctggtgctctacgtgatgtgctcttgggtagtgatgctaaggcattgtcttcacaaaaggcttcggatatgaacctggaagtaatgctaaacaaagcaaacagtaacgaatctagctctcagcagatagagaatttaggaagccatcccgcttcacattctagaacaagtaagcaacaaaaccatgacaaagagaaagtcacagatcgtcctgaaagtgatggcaaagaaccaagaaagcacagaagctctggtagaagtggacatcgtcagggaaaaaataaacatagagaaaagtctagtgctcagcctgatattgtacctcaaactccagtcattcaagatttccttctatagcatctgagaggccgatttgtgttcttacggcgcctaggcgagcaagtgcaccagccaaccgccttagcgcctaggcggcgcctaggcgggtatggcgagcaaggcggccagttttgcccgggcgcctggacgcctaggcgtccctagggcgacgccttaagaacactgatcttgttgtatttgcc

SEQ ID NO: 15961 - DNA, 1484 bp, Zea Mays
ctgacctcatggaaggcccaggcggtaggaaaccctagaccgagaaatctacaaatagcaaagcaaccactcattttccgcatccggtaaatctagccgccgggtggacgctctcctcatccttcctcttcgtgatggttgtccctctacgagcatgattttttctattagccgagtccatttttttggtcttttctgtttttctggctatttgtttggttttctgatggatcgattgctctccgatgatgattaaaaattactttcgttcttctgaagttagcaatgtggaagaacaatttggagacctgaactgaggggagtttttctcggtctattcctggttttcttgtatatttatttgtctttcttgctggtttatccggttgaatcagcgctcttcggaaatccctgtgaagacctgtgatgttaaagtagtggactgatttacatctttgatgagcagtattattatcacgcagagggatctgagtctgatttattcttcttcagttttttttaatttttatgattcctgttattttttttcttttttgtgtcatcacccgatgaatgtacatgatttaagtttcagccttgtctgaataacaatcaatatgttgatactctacagatccatgttctgagggtgtttttgattgccttttctacctaaatttgattaaattcgatttgaagatttctatgtaagtagatcgatgtctgtctctggtgatgatcaaaatgcatactttcgttcttctgacgcgctttctcattgcgcactgcggaacaatcgagacctgaactgaagggacttatttagcgcgttgttgattttagctttgaagcatcgatatcttgcgcagaacaattgtaatgtcgttttgctttgttgcttcacgactggaagaatggcctgatcgactactgtcccgccattctgtagagggaagcatagattgaacaagcagccagaattaaacagcatgatgctcgtttccctgcatcattgttacctgtctcctggcataatactatgtgaaaatgaacatgatttgtttttgagtcttttgaaattaaatatccttttgtaaggactcgatttggttggaaacaattttcacctatgaactgagatttggaagcccagctcttgtgatcatgcggctgctgagaaaactagagtaggtcgagaaggattgattatagattgtttagaaggtattgccgtctaaggaacgaagagtttggccagaagcaacatgctctgagacagctataaacatctggattgtaatgactactattcttccagacttcatagacattttcataggaattactctttccattccagaaaacaggacgtataaatttttcacgaatattagtgcaggtatcgatgctcagtgataaaataatgtataagttttgtgcaaatttttctcgatcaatgacgggcaagtatggtgtgattgaca

SEQ ID NO: 15962 - DNA, 1090 bp, Zea Mays
gtcctttttcttgagaggatttagcgctcgtggaaaggagacgtctctgaaccgaggctgcgactgcgagggcatcagggcagcgaggcctcttgtcgcgtgaatcccctcgagagccgccggcggagccatggcgcggtccccagctgcctcctcctcctcctacacggatagcacgggatcctcctccgactcaggctccagctcatcgggaatcgaccgccgccgccgccgccaccgccatcggagcagccgccgcaaggagggcacgtcctcgtccgcgctgaaggcgcgcaaggaccggaggtcccgccacaagcgccgccgccacgagcgggagcggcggcggtccgcgtccgacgacgacagctacagcacaagctcttatgacagtgaccgtgaggtgtctggcagatctcggaaacataagaagagcagcagatcaagaaagtttagggagagggagcggagcaaagatagacatcatagacgagacaagagtaaacacaaagagaagaaagagagtgagcatgctgatggccctgtccagctttccaagtttcttggacgggacaaagaaaaggaagaaggtactcaacggagtgcaatctctggtaaaaagataatgatgaagcttgagaagacaaaggaagacaaggcagcagagagcaagcgaaacgaactgttgaagtttctgaatgccagttacgattgatgtgttcgaatcgctggcgcagaaagtgcagaatgcccttttttatcgtctttgcactggtgcttttggtgatacttaagttataaacgttttgtttcttgtctataacttggccaccaaagttttgttatgcttaactagtgactgagtgaaggtctacatgtaattgatttgaattctgtgttgccagtcatggatttgcagcttttaaacccatcctttttgtgattgctccttgtctttgtcaatgtcaaactgtttcactggcgattcattgttcttggcggcttactgccgtggatataaccattttgactcgagtgccactgcctgccacaagccgaggttctaaaaaattgctatggggcaacgtca

SEQ ID NO: 15963 - DNA, 2919 bp, Zea Mays
ccgaccggcatcacctatccacatctttctccctctctctctctctcctcttccgtccctcctctctccctctctacgccacgcctccacctccacacctgcacgcctctcgctctctctcctcacctgtcgagctgcccacagcccgtacgtacctgcccccagtcccagtccccgccgccccgcctgcccgacccgcggcttatccaccacgtccgccgctgggctggatcgatcgggaccggtatcgcgccgccgccgctgccctcggcactcgcgggatcctgttcctaccatgcagcagcgctgcgcccttgcccgaccgcgccggcccgccgaaccgcgcgttccgctccccgacgatcactccctcgtcgccgtcttctccttcctcttcatccccacctaaatcaacctcctcgccgcgaaattctgctacaatttcttcatcttcccttcccgccgggagcggacggatcgccgcttcctcggccggcgggatgagccgggaggcgcagaaactcgactgcgccgccggcgccggggggatcggggtcctgtcgctggacctactgggccaggtgctggaacacctgcgggagccccgggaccgcaagacgtgccgcctcgtcagccgcgccttcgagcgcgccgaggccgcgcaccgccgcgcgcttcgggtgctccgacgcgagccgctcccgcgcctgctccgcgcgttcccggcgctcgagcggctcgacctctccgcctgcgcctcgctcgacgacgcctccctcgccgcggccgtcgccgacgccggcggagggctcgccggcctccgcagcgtgtgcctcgcgcgggccaatggtgtcggctggcgcggcctcgaggcgctcgtcgcggcctgccccaagctcgcggccgtcgacctgtcgcactgcgtcaccgccggggaccgcgaggccgccgcgttggcggcggcgtccgagctcagggacctgaggctggacaaatgccttgccgtcaccgacatggggctcgccaaggtggctgttgggtgccccaagctggagaagctcagcctcaagtggtgccgtgagatctctgacattggaattgatctgctggccaagaagtgccctgagctccgcagcctcaacatatcctacctcaaggtgggcaatggatcccttggatcaatttcgtcacttgagaggcttgaggaattggcaatggtttgttgttcaggtatagatgacgaaggcttggaattgctgagcaaggggagcgattcgctgcagagtgttgatgtgtcaagatgtgatcatgtgacttccgaggggttagcttcactcatagatggtcgcaattttcttcagaagttatatgctgcagattgtttgcattttgttgaaattatattgataggagataggacagcgttttctatccaagttggcaagactgaaggaaaccttgacattgctgaaactcgacggtcttgaggtctcggactctcttcttcaagccattggtgaaagctgtaacaaattggttgagattgggcttagcaaatgcagtggtgttactgatggaggaatctcatctcttgtagctcggtgtagtgacctaagaacaattgatctcacatgctgcaatctcattaccaacaatgcgcttgattcaatagctgacaactgtaagatgcttgaatgtttgcggttggaatcatgctctttgataaatgagaagggactagagcgaattacaacttgttgccccaaccttaaggagatagacctcactgactgcggagtagatgatgcagcattgcagcacttggctaaatgctctgaattgcgaatattgaaattaggcctatgctcaagtatttctgacagaggcattgcatttatcagttcgaattgtggaaagctcgtggagcttgatctctaccggtgcaactctattactgatgatgggttggcagctttagcaaatgggtgcaagaggattaagttactgaacttgtgttactgcaacaagatcactgatactggtttgggtcacctaggctccctggaggagctcacaaaccttgaactgaggtgcttggtccgcgtaacaggcattgggatctcctcagttgcaatcggatgcaagaacctgatagagctggacttgaaacgatgctattcggttgatgacgctggcctgtgggcccttgctcgttatgctttgaaccttagacagcttacgatatcgtactgccaagtcacggggttgggcctgtgccacctgctgagctccctgcgatgcctccaggacattaagatggtgcacctctcatgggtctcaatagaagggtttgagatggctctgcgagcagcctgcgggaggctgaagaagctgaagatgctctgcgggctgaagaccgtgctctcccctgagctcctccagatgctgcaggcttgtggctgccgaataagatgggtcaacaagcctcttgtctacaaggactagacagactcgtgttcctcattgtgtgtgcagtgtcagcatcagcatgtattgtcaagatcttgcaggtttgccctggctcacgttgtgagtccgcaataatcgttgggggcgtaagctcccgtcccccagatgtggttatggtgcctttggggcacttcttgcgccatttgtcactctctgctccggtgtatctgtgtatgcaaacggaggcaccggtaatgttcatgtgtatatagcgtgcagtagaatgatcccattttatgggattagttagtgtgtaattgttacctcatttcgcatgattcgaatcttgagatgaaagaatcataaggggtatgatcgatgcattgcattcaccggttcttacttttgactggcattatcttatttgacaatatgtacatgctgttctgc

SEQ ID NO: 15964 - DNA, 2817 bp, Zea Mays
ttcgaccctcacccgaggcaggcggtattccgaccggcatcacctatccacatctttctccctctctctctctctcctcttccgtccctcctctctccctctctacgccacgcctccacctccacacctgcacgcctctcgctctctctcctcacctgtcgagctgcccacagcccgtacgtacctgcccccagtcccagtccccgccgccccgcctgcccgacccgcggcttatccaccacgtccgccgctgggctggatcgatcgggaccggtatcgcgccgccgccgctgccctcggcactcgcgggatcctgttcctaccatgcagcagcgctgcgcccttgcccgaccgcgccggcccgccgaaccgcgcgttccgctccccgacgatcactccctcgtcgccgtcttctccttcctcttcatccccacctaaatcaacctcctcgccgcgaaattctgctacaatttcttcatcttcccttcccgccgggagcggacggatcgccgcttcctcggccggcgggatgagccgggaggcgcagaaactcgactgcgccgccggcgccggggggatcggggtcctgtcgctggacctactgggccaggtgctggaacacctgcgggagccccgggaccgcaagacgtgccgcctcgtcagccgcgccttcgagcgcgccgaggccgcgcaccgccgcgcgcttcgggtgctccgacgcgagccgctcccgcgcctgctccgcgcgttcccggcgctcgagcggctcgacctctccgcctgcgcctcgctcgacgacgcctccctcgccgcggccgtcgccgacgccggcggagggctcgccggcctccgcagcgtgtgcctcgcgcgggccaatggtgtcggctggcgcggcctcgaggcgctcgtcgcggcctgccccaagctcgcggccgtcgacctgtcgcactgcgtcaccgccggggaccgcgaggccgccgcgttggcggcggcgtccgagctcagggacctgaggctggacaaatgccttgccgtcaccgacatggggctcgccaaggtggctgttgggtgccccaagctggagaagctcagcctcaagtggtgccgtgagatctctgacattggaattgatctgctggccaagaagtgccctgagctccgcagcctcaacatatcctacctcaaggtgggcaatggatcccttggatcaatttcgtcacttgagaggcttgaggaattggcaatggtttgttgttcaggtatagatgacgaaggcttggaattgctgagcaaggggagcgattcgctgcagagtgttgatgtgtcaagatgtgatcatgtgacttccgaggggttagcttcactcatagatggtcgcaattttcttcagaagttatatgctgcagattgtttgcatgagataggacagcgttttctatccaagttggcaagactgaaggaaaccttgacattgctgaaactcgacggtcttgagctcggtgtagtgacctaagaacaattgatctcacatgctgcaatctcattaccaacaatgcgcttgattcaatagctgacaactgtaagatgcttgaatgtttgcggttggaatcatgctctttgataaatgagaagggactagagcgaattacaacttgttgccccaaccttaaggagatagacctcactgactgcggagtagatgatgcagcattgcagcacttggctaaatgctctgaattgcgaatattgaaattaggcctatgctcaagtatttctgacagaggcattgcatttatcagttcgaattgtggaaagctcgtggagcttgatctctaccggtgcaactctattactgatgatgggttggcagctttagcaaatgggtgcaagaggattaagttactgaacttgtgttactgcaacaagatcactgatactggtttgggtcacctaggctccctggaggagctcacaaaccttgaactgaggtgcttggtccgcgtaacaggcattgggatctcctcagttgcaatcggatgcaagaacctgatagagctggacttgaaacgatgctattcggttgatgacgctggcctgtgggcccttgctcgttatgctttgaaccttagacagcttacgatatcgtactgccaagtcacggggttgggcctgtgccacctgctgagctccctgcgatgcctccaggacattaagatggtgcacctctcatgggtctcaatagaagggtttgagatggctctgcgagcagcctgcgggaggctgaagaagctgaagatgctctgcgggctgaagaccgtgctctcccctgagctcctccagatgctgcaggcttgtggctgccgaataagatgggtcaacaagcctcttgtctacaaggactagacagactcgtgttcctcattgtgtgtgcagtgtcagcatcagcatgtattgtcaagatcttgcaggtttgccctggctcacgttgtgagtccgcaataatcgttgggggcgtaagctcccgtcccccagatgtggttatggtgcctttggggcacttcttgcgccatttgtcactctctgctccggtgtatctgtgtatgcaaacggaggcaccggtaatgttcatgtgtatatagcgtgcagtagaatgatcccattttatgggattagttagtgtgtaattgttacctcatttcgcatgattcgaatcttgagatgaaagaatcataaggggtatgatcgatgcattgcattcaccggttcttacttttgactggcattatcttatttgacaatatgtacatgctgttctgc

SEQ ID NO: 15965 - DNA, 1919 bp, Zea Mays
aaaaaaaaataaaaacttggtggggacagagtagttggagtcggagaattttggggtaacaggtgggttggcttcctggctgttaaaaggaaggacgcctttgtgctgttctcctaatccaaaagtcgcgtgctgtgctctgctctgctctcgcctcgcacggactcgtggtaaaggatggagaccatgtcggctctcgcgaggacggcgccgccccttgctgggaccattcgccggccctcatgcgcgctgaggccgacggcgtccctctccttcgccgccgcttcaacgacgccccgcggccggctcgggctggggctgagcacggcgccggcggggagcgggagggcggccagggctcgcgccgtcccgcggcgcatcgtcgcctcctcggaggttgagcaaagctacattatgatcaaaccagatggtgttcagcgtggtctggtatgcattcccaagttccctacacccatacttttttttaaagagcaaaaacctcagcttttaagaaagcagtaatgagtacaatgctggggtataccagttccaaggaaagatcaaaacagaacaagccctattacaagtttagatcttgtagacatcaacattcaacacattcgggctaaaagcaaatcatccaacaaacaaccttgtccttctcttggagtagacgctccatgtgcccttcatttaacaacaaactccatttctgcaacaaggatagagcaacatagattacatcagttggagcttttgagaatcttttctatgtggccatcttgttcctagtggtccaaagagcccaagcaaaacccgcaaaaagaaacttgactaaacgaatcggtaagggccacttgccctgaagccagacatcggagaactcctttatagacattggaacagatgccaaattaagcaccactttcagaattgctcagatcaatgtagctaaggcacatttaaagaaaatatgaccaaccgattcaggaactccacatatacagcaatttctattacccctccaacccctctactaattagagtttgcgctacttgaagtttgttattgaaaacttgccaaaggaagaattaaattttcagagtgatcttacactttcaaataataccaactctactaggcatccccctgctggatagaatcatgtacaaagatatagtaatgaaatgcctgtgcttatccagagcccacatcacaaagtcatcacacccacacttttgccagttggagagattatttctcgctttgagaagaaagggtttttgttgaaaggcttaaaacttttccagtgccccaaggacttggcgcaggagcattacaaggatttgaaggataaacctttctttcctaagctgatcgattacataacttctggccctgttgtctgcatggcctgggagggtgatggtgttgttgcatcagctcggaaattaataggagctactaacccccttcaagctgaaccagggactataaggggtgatcttgcagttcaaactggaaggaacgttgtccatggaagtgatagtcctgataatggcaagcgtgaaattgaactgtggttcaaagaaggcgaggtctgccaatgggaatcagttcaagcaccgtggcttatagaataactattgctaatcatttccagagttgtattcaatgtttttttttgtgttcgtcttgattcaaggagccatgcaagagtgtatgagtttagttcggctaagtaattagctcatgagggcttgaattatcggttctttttgaggattgaggatttgtgcaactgaaacctttgatcagttgctcatgttgagaagctaatttcttgtcatatttacatgtaataaagtccctctactacagtaataaattagtatttcctctggtccaattaattaat

SEQ ID NO: 15966 - DNA, 1067 bp, Zea Mays
aaaaaaaaataaaaacttggtggggacagagtagttggagtcggagaattttggggtaacaggtgggttggcttcctggctgttaaaaggaaggacgcctttgtgctgttctcctaatccaaaagtcgcgtgctgtgctctgctctgctctcgcctcgcacggactcgtggtaaaggatggagaccatgtcggctctcgcgaggacggcgccgccccttgctgggaccattcgccggccctcatgcgcgctgaggccgacggcgtccctctccttcgccgccgcttcaacgacgccccgcggccggctcgggctggggctgagcacggcgccggcggggagcgggagggcggccagggctcgcgccgtcccgcggcgcatcgtcgcctcctcggttggagagattatttctcgctttgagaagaaagggtttttgttgaaaggcttaaaacttttccagtgccccaaggacttggcgcaggagcattacaaggatttgaaggataaacctttctttcctaagctgatcgattacataacttctggccctgttgtctgcatggcctgggagggtgatggtgttgttgcatcagctcggaaattaataggagctactaacccccttcaagctgaaccagggactataaggggtgatcttgcagttcaaactggaaggaacgttgtccatggaagtgatagtcctgataatggcaagcgtgaaattgaactgtggttcaaagaaggcgaggtctgccaatgggaatcagttcaagcaccgtggcttatagaataactattgctaatcatttccagagttgtattcaatgtttttttttgtgttcgtcttgattcaaggagccatgcaagagtgtatgagtttagttcggctaagtaattagctcatgagggcttgaattatcggttctttttgaggattgaggatttgtgcaactgaaacctttgatcagttgctcatgttgagaagctaatttcttgtcatatttacatgtaataaagtccctctactacagtaataaattagtatttcctctggtccaattaattaat

SEQ ID NO: 15967 - DNA, 1055 bp, Zea Mays
aaaaaaaaataaaaacttggtggggacagagtagttggagtcggagaattttggggtaacaggtgggttggcttcctggctgttaaaaggaaggacgcctttgtgctgttctcctaatccaaaagtcgcgtgctgtgctctgctctgctctcgcctcgcacggactcgtggtaaaggatggagaccatgtcggctctcgcgaggacggcgccgccccttgctgggaccattcgccggccctcatgcgcgctgaggccgacggcgtccctctccttcgccgccgcttcaacgacgccccgcggccggctcgggctggggctgagcacggcgccggcggggagcgggagggcggccagggctcgcgccgtcccgcggcgcatcgtcgcctcctcggaggttgagcaaagctacattatgatcaaaccagatggtgttcagcgtggtctgtgccccaaggacttggcgcaggagcattacaaggatttgaaggataaacctttctttcctaagctgatcgattacataacttctggccctgttgtctgcatggcctgggagggtgatggtgttgttgcatcagctcggaaattaataggagctactaacccccttcaagctgaaccagggactataaggggtgatcttgcagttcaaactggaaggaacgttgtccatggaagtgatagtcctgataatggcaagcgtgaaattgaactgtggttcaaagaaggcgaggtctgccaatgggaatcagttcaagcaccgtggcttatagaataactattgctaatcatttccagagttgtattcaatgtttttttttgtgttcgtcttgattcaaggagccatgcaagagtgtatgagtttagttcggctaagtaattagctcatgagggcttgaattatcggttctttttgaggattgaggatttgtgcaactgaaacctttgatcagttgctcatgttgagaagctaatttcttgtcatatttacatgtaataaagtccctctactacagtaataaattagtatttcctctggtccaattaattaat

SEQ ID NO: 15968 - DNA, 806 bp, Zea Mays
gccgccttaccgccgtaacaaccatgatactcaaagttctttggccagaatgtggatggcaacctgtatcccttaccgatttgatcactgctgctgctgttaaaaaagtgtacagaaaagcaacgttgtgtatccatcctgacaaggtgcagcaaaagggtgcaaatctccaacagaaatatatcgctgagaaggtttttgatctccttaaggcgtggaacaaattcaactctgaagagctcttctaaacagcctcatgactgaacatagcatgacccatcagggtctgcacaaggtactctgggaaggaactcacaagctggagcagcctgaggttggtcgggggggaaggggaaccatgaagcgaccaagcgaaacctgaactatggttataatcacagttgttttgtttcactcccccaattttctttcccaactatctgttgattggatgacaactcacagcgacatgtggcagctgcccaagctgaacctcatccagtaggtgcacattagtgccctgttttgtactgtttgtcctcggctgtatgtaccgtcagagctgaggcttctgaggtcagcgttgtgattttggattaggtacagggcttatttaccatggagagaatgaaaacaatagagatgacccataataatagattgattgattagagagatctatctatatttttatataaatatataggggagatttcgtggcttatgaaaacagaaccaaacgagatatttccttatctctgtaaccgtatataagggctggccggctatatctattatgtacatat

SEQ ID NO: 15969 - DNA, 3457 bp, Zea Mays
cagtcaccggcgtgtgggagagaagagagagagaccacctcctccgctctctctctcttactctgactcgcccgctccggttcgccgctccgccatcgccggcgatcactccactccggcaacgccgcgtctccgacgatcccaccgacgccgggccccgcgaccccattcctccgattgcctcctcacgtcttgcggttctcccccggcgagggtacgtgctcttgcccagatccgccccgcctccccgcgccccgccacgcgcgccgatcggcaagctgcgtaggcttcgctaccgctgctgcgcgagcgagcgtcgcagccgtcgatccgcgcgcccgccatggacgacttccagggcctgctggcccgcgacttcggcctccgcccgcaggggaaggccgcgcccatgtcggccgcccgctcctcgagtccctccggatccgcctggaccaataccagatccgccgtggggtccgccgctccctccgcgccctcctacgacgagctcttcgggtccgccccgccgccgccgcccaaggccacgccgtcgctcgataacatcttcaactcgttcaaggagcccgcttccaccgcgccgccgcctaagccgaagcactcttccgcgccggtgttcgacaagccggtctacgatgatgacctgctcggtggatttggtaagagctcacaggtgagggaagaggtggatgacaagaggaaaccagaggcacctacggctgtggcggctactgggttcgattatttgatcccaagctttggcgggagaagctccccgcggcaaagggatgctattggtgcaaaacaaaagaaagtttccatgtcgacatctaagcaatcagctagcttaagcgaccccttcgttgttctcgaaacaacttcatcctcagcccatccattcgcagatcccttggatgaatccggtaaagctgcaaaatatcaagggaaaaaccgtgaaagtactagcgttgggagcagtctgtttgaggattcaagcactttcaaccaggctccaaaatttgaacctttttttaccccagaggtggacaatggatcgaaagataggaatgagtcaagcagagcccaaaactcaaaccctgtacaggatttttctaaaagaaactcctcccaacaaccttctgttgaggattttgaaaatatctttcctaagtcacagtctgccagatattctgatgtccatgttgacattggctcagagaaatatagtgggaatggtataaatgatcagtcacctagatctgatgaatccgaagatgagatatggcttacagcttctgagattcccctcttcacacagccaactagtgccccaccaccttcaaggccaccgccacctcttgcagttaagcaaaaacatggatcaagatcaacaagaaaagatgaacatctgcggcggtctaggaaaaacaatgaccatcaaaggagtttctcaaatcaggctggtgtttctacagtagatggactagaagattttaccatgggtaagtctcagaatgtgcatacgtttaatgaggaagaatttgagagaagtacggcagcagcggctatgaaagaggctatggataaagctgaggcaaagttcaaacatgccaaggaagtacgagagagagagcgtgatgcaaagcttagaaatagagaacaacaggaacgagataatgtaataaggtcgtatgcccaggatcgtgaggacaaagagagaaatgaaagactagaacaagaaagagagatgaagcaaaaagaggaaaaggaaagagagcaacgaagacttgaagaggagagagaacttgagcgacatagagaaagagaaagagctaggcaagcagtggagagggctacaaaggaggcacgagaaagggcagcttctgaagctcgtgcaaaagcagagagggaggcacggaaacgttcagaacgtgctgctgtgcaaagagcccaacaggaagcacgtgagagggcagcagcggatgctaaagatcgagcagagagggctactgcagaagcaaacgaaagggctgctactgaagctaaggagaaagctgctagtcaagcgagggatagggctgcagcagaaaaagctgctgtggagagagctcagcaagaagtgaggaagagagctgaacgagcagcagtggaaagggctgctgctgaggctcgggaaagacaggctgctgctgctgcagctgcaagagaaaaaacaagcaaaccagatgatctagaatccttatttggtatgggtgcccgagctaatagtgctccgaagcaaagggctccaactgtggattctatgtttgattctcaaacgcaaaatagagggacttccacttcgacatcaatgaaaaaggcatcatcaacagcaaatgttgctgatgacttgtctgcattatttggaggagctcctacgtcatcaaatgaatttcaagaagttgatggggagagcgaagaaagaagacgtgctaggttggaacggcatcaaagaactcgtgaacgagcggcaaaggctttggctgagaagaatgaacgtgacatgcagcaacaaagggaccaggctgagagacataggcttgcggaaacactggacttcgagattaagcgctgggctgctggaaaagaaggcaatttgcgtgcattgctatcaactttacaatatgttctttggccagaatgtggatggcaacctgtatcccttaccgatttgatcactgctgctgctgttaaaaaagtgtacagaaaagcaacgttgtgtatccatcctgacaaggtgcagcaaaagggtgcaaatctccaacagaaatatatcgctgagaaggtttttgatctccttaaggaggcgtggaacaaattcaactctgaagagctcttctaaacagcctcatgactgaacatagcatgacccatcagggtctgcacaaggtactctgggaaggaactcacaagctggagcagcctgaggttggtcgggggggaaggggaaccatgaagcgaccaagcgaaacctgaactatggttataatcacagttgttttgtttcactcccccaattttctttcccaactatctgttgattggatgacaactcacagcgacatgtggcagctgcccaagctgaacctcatccagtaggtgcacattagtgccctgttttgtactgtttgtcctcggctgtatgtaccgtcagagctgaggcttctgaggtcagcgttgtgattttggattaggtacagggcttatttaccatggagagaatgaaaacaatagagatgacccataataatagattgattgattagagagatctatctatatttttatataaatatataggggagatttcgtggcttatgaaaacagaaccaaacgagatatttccttatctctgtaaccgtatataagggctggccggctatatctattatgtacatat

SEQ ID NO: 15970 - DNA, 3422 bp, Zea Mays
cagtcaccggcgtgtgggagagaagagagagagaccacctcctccgctctctctctcttactctgactcgcccgctccggttcgccgctccgccatcgccggcgatcactccactccggcaacgccgcgtctccgacgatcccaccgacgccgggccccgcgaccccattcctccgattgcctcctcacgtcttgcggttctcccccggcgagggtacgtgctcttgcccagatccgccccgcctccccgcgccccgccacgcgcgccgatcggcaagctgcgtaggcttcgctaccgctgctgcgcgagcgagcgtcgcagccgtcgatccgcgcgcccgccatggacgacttccagggcctgctggcccgcgacttcggcctccgcccgcaggggaaggccgcgcccatgtcggccgcccgctcctcgagtccctccggatccgcctggaccaataccagatccgccgtggggtccgccgctccctccgcgccctcctacgacgagctcttcgggtccgccccgccgccgccgcccaaggccacgccgtcgctcgataacatcttcaactcgttcaaggagcccgcttccaccgcgccgccgcctaagccgaagcactcttccgcgccggtgttcgacaagccggtctacgatgatgacctgctcggtggatttggtaagagctcacaggtgagggaagaggtggatgacaagaggaaaccagaggcacctacggctgtggcggctactgggttcgattatttgatcccaagctttggcgggagaagctccccgcggcaaagggatgctattggtgcaaaacaaaagaaagtttccatgtcgacatctaagcaatcagctagcttaagcgaccccttcgttgttctcgaaacaacttcatcctcagcccatccattcgcagatcccttggatgaatccggtaaagctgcaaaatatcaagggaaaaaccgtgaaagtactagcgttgggagcagtctgtttgaggattcaagcactttcaaccaggctccaaaatttgaacctttttttaccccagaggtggacaatggatcgaaagataggaatgagtcaagcagagcccaaaactcaaaccctgtacaggatttttctaaaagaaactcctcccaacaaccttctgttgaggattttgaaaatatctttcctaagtcacagtctgccagatattctgatgtccatgttgacattggctcagagaaatatagtgggaatggtataaatgatcagtcacctagatctgatgaatccgaagatgagatatggcttacagcttctgagattcccctcttcacacagccaactagtgccccaccaccttcaaggccaccgccacctcttgcagttaagcaaaaacatggatcaagatcaacaagaaaagatgaacatctgcggcggtctaggaaaaacaatgaccatcaaaggagtttctcaaatcaggctggtgtttctacagtagatggactagaagattttaccatgggtaagtctcagaatgtgcatacgtttaatgaggaagaatttgagagaagtacggcagcagcggctatgaaagaggctatggataaagctgaggcaaagttcaaacatgccaaggaagtacgagagagagagcgtgatgcaaagcttagaaatagagaacaacaggaacgagataatgtaataaggtcgtatgcccaggatcgtgaggacaaagagagaaatgaaagactagaacaagaaagagagatgaagcaaaaagaggaaaaggaaagagagcaacgaagacttgaagaggagagagaacttgagcgacatagagaaagagaaagagctaggcaagcagtggagagggctacaaaggaggcacgagaaagggcagcttctgaagctcgtgcaaaagcagagagggaggcacggaaacgttcagaacgtgctgctgtgcaaagagcccaacaggaagcacgtgagagggcagcagcggatgctaaagatcgagcagagagggctactgcagaagcaaacgaaagggctgctactgaagctaaggagaaagctgctagtcaagcgagggatagggctgcagcagaaaaagctgctgtggagagagctcagcaagaagtgaggaagagagctgaacgagcagcagtggaaagggctgctgctgaggctcgggaaagacaggctgctgctgctgcagctgcaagagaaaaaacaagcaaaccagatgatctagaatccttatttggtatgggtgcccgagctaatagtgctccgaagcaaagggctccaactgtggattctatgtttgattctcaaacgcaaaatagagggacttccacttcgacatcaatgaaaaaggcatcatcaacagcaaatgttgctgatgacttgtctgcattatttggaggagctcctacgtcatcaaatgaatttcaagaagttgatggggagagcgaagaaagaagacgtgctaggttggaacggcatcaaagaactcgtgaacgagcggcaaaggctttggctgagaagaatgaacgtgacatgcagcaacaaagggaccaggctgagagacataggcttgcggaaacactggacttcgagattaagcgctgggctgctggaaaagaaggttctttggccagaatgtggatggcaacctgtatcccttaccgatttgatcactgctgctgctgttaaaaaagtgtacagaaaagcaacgttgtgtatccatcctgacaaggtgcagcaaaagggtgcaaatctccaacagaaatatatcgctgagaaggtttttgatctccttaaggaggcgtggaacaaattcaactctgaagagctcttctaaacagcctcatgactgaacatagcatgacccatcagggtctgcacaaggtactctgggaaggaactcacaagctggagcagcctgaggttggtcgggggggaaggggaaccatgaagcgaccaagcgaaacctgaactatggttataatcacagttgttttgtttcactcccccaattttctttcccaactatctgttgattggatgacaactcacagcgacatgtggcagctgcccaagctgaacctcatccagtaggtgcacattagtgccctgttttgtactgtttgtcctcggctgtatgtaccgtcagagctgaggcttctgaggtcagcgttgtgattttggattaggtacagggcttatttaccatggagagaatgaaaacaatagagatgacccataataatagattgattgattagagagatctatctatatttttatataaatatataggggagatttcgtggcttatgaaaacagaaccaaacgagatatttccttatctctgtaaccgtatataagggctggccggctatatctattatgtacatat

SEQ ID NO: 15971 - DNA, 3131 bp, Zea Mays
cagtcaccggcgtgtgggagagaagagagagagaccacctcctccgctctctctctcttactctgactcgcccgctccggttcgccgctccgccatcgccggcgatcactccactccggcaacgccgcgtctccgacgatcccaccgacgccgggccccgcgaccccattcctccgattgcctcctcacgtcttgcggttctcccccggcgagggtacgtgctcttgcccagatccgccccgcctccccgcgccccgccacgcgcgccgatcggcaagctgcgtaggcttcgctaccgctgctgcgcgagcgagcgtcgcagccgtcgatccgcgcgcccgccatggacgacttccagggcctgctggcccgcgacttcggcctccgcccgcaggggaaggccgcgcccatgtcggccgcccgctcctcgagtccctccggatccgcctggaccaataccagatccgccgtggggtccgccgctccctccgcgccctcctacgacgagctcttcgggtccgccccgccgccgccgcccaaggccacgccgtcgctcgataacatcttcaactcgttcaaggagcccgcttccaccgcgccgccgcctaagccgaagcactcttccgcgccggtgttcgacaagccggtctacgatgatgacctgctcggtggatttggtaagagctcacaggtgagggaagaggtggatgacaagaggaaaccagaggcacctacggctgtggcggctactgggttcgattatttgatcccaagctttggcgggagaagctccccgcggcaaagggatgctattggtgcaaaacaaaagaaagtttccatgtcgacatctaagcaatcagctagcttaagcgaccccttcgttgttctcgaaacaacttcatcctcagcccatccattcgcagatcccttggatgaatccggtaaagctgcaaaatatcaagggaaaaaccgtgaaagtactagcgttgggagcagtctgtttgaggattcaagcactttcaaccaggctccaaaatttgaacctttttttaccccagaggtggacaatggatcgaaagataggaatgagtcaagcagagcccaaaactcaaaccctgtacaggatttttctaaaagaaactcctcccaacaaccttctgttgaggattttgaaaatatctttcctaagtcacagtctgccagatattctgatgtccatgttgacattggctcagagaaatatagtgggaatggtataaatgatcagtcacctagatctgatgaatccgaagatgagatatggcttacagcttctgagattcccctcttcacacagccaactagtgccccaccaccttcaaggccaccgccacctcttgcagttaagcaaaaacatggatcaagatcaacaagaaaagatgaacatctgcggcggtctaggaaaaacaatgaccatcaaaggagtttctcaaatcaggctggtgtttctacagtagatggactagaagattttaccatgggtaagtctcagaatgtgcatacgtttaatgaggaagaatttgagagaagtacggcagcagcggctatgaaagaggctatggataaagctgaggcaaagttcaaacatgccaaggaagtacgagagagagagcgtgatgcaaagcttagaaatagagaacaacaggaacgagataatgtaataaggtcgtatgcccaggatcgtgaggacaaagagagaaatgaaagactagaacaagaaagagagatgaagcaaaaagaggaaaaggaaagagagcaacgaagacttgaagaggagagagaacttgagcgacatagagaaagagaaagagctaggcaagcagtggagagggctacaaaggaggcacgagaaagggcagcttctgaagctcgtgcaaaagcagagagggaggcacggaaacgttcagaacgtgctgctgtgcaaagagcccaacaggaagcacgtgagagggcagcagcggatgctaaagatcgagcagagagggctactgcagaagcaaacgaaagggctgctactgaagctaaggagaaagctgctagtcaagcgagggatagggctgcagcagaaaaagctgctgtggagagagctcagcaagaagtgaggaagagagctgaacgagcagcagtggaaagggctgctgctgaggctcgggaaagacaggctgctgctgctgcagctgcaagagaaaaaacaagcaaaccagatgatctagaatccttatttggtatgggtgcccgagctaatagtgctccgaagcaaagggctccaactgtggattctatgtttgattctcaaacgcaaaatagagggacttccacttcgacatcaatgaaaaaggcatcatcaacagcaaatgttgctgatgacttgtctgcattatttggaggagctcctacgtcatcaaatgaatttcaagaagttgatggggagagcgaagaaagaagacgtgctaggttggaacggcatcaaagaactcgtgaacgagcggcaaaggctttggctgagaagaatgaacgtgacatgcagcaacaaagggaccaggctgagagacataggcttgcggaaacactggacttcgagattaagcgctgggctgctggaaaagaaggcaatttgcgtgcattgctatcaactttacaatatgttctttggccagaatgtggatggcaacctgtatcccttaccgatttgatcactgctgctgctgttaaaaaagtgtacagaaaagcaacgttgtgtatccatcctgacaaggtgcagcaaaagggtgcaaatctccaacagaaatatatcgctgagaaggtttttgatctccttaagttgaaatatccaactaagagcatctacaagagtttccaaaacccacttttgatctagattttttgtcaagattgaaaaaaaaactgctctccaaccactccctgtctcaactcccaatctttccgcacttggaaaaaccgacctcgctgcatggatatgtacgcgtgcataacttcaccccaatccgaaggtggaaagaggtgggaaagaataagtatgacagggtttctgatgcaaatatggaagacagaaggtatagaagtggttgagg

SEQ ID NO: 15972 - DNA, 3066 bp, Zea Mays
cagtcaccggcgtgtgggagagaagagagagagaccacctcctccgctctctctctcttactctgactcgcccgctccggttcgccgctccgccatcgccggcgatcactccactccggcaacgccgcgtctccgacgatcccaccgacgccgggccccgcgaccccattcctccgattgcctcctcacgtcttgcggttctcccccggcgagggtacgtgctcttgcccagatccgccccgcctccccgcgccccgccacgcgcgccgatcggcaagctgcgtaggcttcgctaccgctgctgcgcgagcgagcgtcgcagccgtcgatccgcgcgcccgccatggacgacttccagggcctgctggcccgcgacttcggcctccgcccgcaggggaaggccgcgcccatgtcggccgcccgctcctcgagtccctccggatccgcctggaccaataccagatccgccgtggggtccgccgctccctccgcgccctcctacgacgagctcttcgggtccgccccgccgccgccgcccaaggccacgccgtcgctcgataacatcttcaactcgttcaaggagcccgcttccaccgcgccgccgcctaagccgaagcactcttccgcgccggtgttcgacaagccggtctacgatgatgacctgctcggtggatttggtaagagctcacaggtgagggaagaggtggatgacaagaggaaaccagaggcacctacggctgtggcggctactgggttcgattatttgatcccaagctttggcgggagaagctccccgcggcaaagggatgctattggtgcaaaacaaaagaaagtttccatgtcgacatctaagcaatcagctagcttaagcgaccccttcgttgttctcgaaacaacttcatcctcagcccatccattcgcagatcccttggatgaatccggtaaagctgcaaaatatcaagggaaaaaccgtgaaagtactagcgttgggagcagtctgtttgaggattcaagcactttcaaccaggctccaaaatttgaacctttttttaccccagaggtggacaatggatcgaaagataggaatgagtcaagcagagcccaaaactcaaaccctgtacaggatttttctaaaagaaactcctcccaacaaccttctgttgaggattttgaaaatatctttcctaagtcacagtctgccagatattctgatgtccatgttgacattggctcagagaaatatagtgggaatggtataaatgatcagtcacctagatctgatgaatccgaagatgagatatggcttacagcttctgagattcccctcttcacacagccaactagtgccccaccaccttcaaggccaccgccacctcttgcagttaagcaaaaacatggatcaagatcaacaagaaaagatgaacatctgcggcggtctaggaaaaacaatgaccatcaaaggagtttctcaaatcaggctggtgtttctacagtagatggactagaagattttaccatgggtaagtctcagaatgtgcatacgtttaatgaggaagaatttgagagaagtacggcagcagcggctatgaaagaggctatggataaagctgaggcaaagttcaaacatgccaaggaagtacgagagagagagcgtgatgcaaagcttagaaatagagaacaacaggaacgagataatgtaataaggtcgtatgcccaggatcgtgaggacaaagagagaaatgaaagactagaacaagaaagagagatgaagcaaaaagaggaaaaggaaagagagcaacgaagacttgaagaggagagagaacttgagcgacatagagaaagagaaagagctaggcaagcagtggagagggctacaaaggaggcacgagaaagggcagcttctgaagctcgtgcaaaagcagagagggaggcacggaaacgttcagaacgtgctgctgtgcaaagagcccaacaggaagcacgtgagagggcagcagcggatgctaaagatcgagcagagagggctactgcagaagcaaacgaaagggctgctactgaagctaaggagaaagctgctagtcaagcgagggatagggctgcagcagaaaaagctgctgtggagagagctcagcaagaagtgaggaagagagctgaacgagcagcagtggaaagggctgctgctgaggctcgggaaagacaggctgctgctgctgcagctgcaagagaaaaaacaagcaaaccagatgatctagaatccttatttggtatgggtgcccgagctaatagtgctccgaagcaaagggctccaactgtggattctatgtttgattctcaaacgcaaaatagagggacttccacttcgacatcaatgaaaaaggcatcatcaacagcaaatgttgctgatgacttgtctgcattatttggaggagctcctacgtcatcaaatgaatttcaagaagttgatggggagagcgaagaaagaagacgtgctaggttggaacggcatcaaagaactcgtgaacgagcggcaaaggctttggctgagaagaatgaacgtgacatgcagcaacaaagggaccaggctgagagacataggcttgcggaaacactggacttcgagattaagcgctgggctgctggaaaagaaggcaatttgcgtgcattgctatcaactttacaatatgttctttggccagaatgtggatggcaacctgtatcccttaccgatttgatcactgctgctgctgttaaaaaagtgtacagaaaagcaacgttgtgtatccatcctgacaaggtgcagcaaaagggtgcaaatctccaacagaaatatatcgctgagaaggtttttgatctccttaaggtgtgtattgccctcaaaacatttgttgcagcttactgcttacatgccaacatggtttcaagacagcaaaaacttctctttttctgacatcaagaaaacatatgagctagataggtgtcacctgttttgctgaacacaggtcttttcacatttactgttgagcttctcttaatatttccaattattgcatgcgtggtccatggaag

SEQ ID NO: 15973 - DNA, 4071 bp, Zea Mays
tagtccttccccccatctccagtcgagtgctctctccagtccccacgcccgatctcgcccccatcccatggacgccgatgagatggacctcgactccccatcctcggcctcccccgcgcccgcctccggctccctccccaccgtcctctctgagctcgccgccctccaccgccgcgcgtcttcctcctccgtcacctccccgcccttgtccctgccctccatcacattcctctcctccagccccgcagccgtcgcgtccatcttccctcgcctcgccgaggccggcgtccccgcatcctccttgctgcccccgctcgaggcctcgctctccgcgcacccgctccccgcagccgtcgcctacctccgcctcctcctcgccccggcctccccgcttctcaccctcttctccccgcttccattcctctccctcctcctcgtcatccgcaaggccgcctcctccttctccggagccggcagcgccgcctccaaccctagctccgtttccggcggcgccgccaacccccgcaagcgcaagaaccagcgccaaaagccagcagcggctccgccggcggcgccgtcgctgctcccgaaggcgctctccctgctggcggacgccgcggggaggctgccgctcggggcccacccggacgcgcggcggtcgctcgtcgataccgccgcggagctcacggcgtttgacgtcctcaccgctgtccttggatccgactaccacgccggggcggtgcaggacgtgatacgagcgctggcccctgtggtgctctcggccgcgaaatccgcagcacgggtggctgcggtgcagttcattgtgaggaacttggtgcctttgggcgccgaggaaggagaggaagcagttaggaaggcagtggggtaccttcctaggtacttggccgtaaaggcaccggacaaggcggaggccagggcactggcggtggaagcgatagtcgaggtggtgcgggcattggaggcagatggaagggagggatttgcagggtatgttgtggccatggcaaggggcaaggcaaagggacgactgcttgctgtggatttggtccttgccttgctgccagtgctgttaccatttgaaggggatgcctgtgatatggaggagggctcttgggggctgaagtgtctgcgggtgttggtggagaagtgctcagatagtgtgggaggggttcgagctcgggcattaataaatgcagcccaggcgcttgatattttgtctgagagaggtgtggaggttgaccggttgcaggaggtgatgaggattggggacatgaagcttggggaattgctgagacgacgctgcaccgatgataaggctgctgtgaggaaggctgcgcttgtgctcatcacaaaggcgattggtttgattgggagacccatagatgactctcttctttgtgcaatgggtgctgcatgctctgatccattagtcagcatccgcaaggctgctcttgctgccatctcagaggtgtttaggaaatttcctgatgagaaagtgatgaaagagtggcttcaatctgtgcctccactggtgattgatagtgagacaagcatccaggaggaatgtgaaaacttgtttcttgaactggtgcttaacaggatctgccaagctgccaatgtgagcttagatgatgatttcatcaccttggaggaagttttccctgaagggacactagatttgctgaaaagcatctgtgatggagaggttgctccatgcataaagaagatatgtgcaagccttggcaagaagaggaagctgaaaccactacttgctagttctctgcagaacatcataacactatctgaatccttgtggttgagacgttgtaagccaatcgaaaattggactgcacctattgggtcctggtggcttctttccgaggtctcatcattcgcgccaaaatcagttaactggaagttcctctcccaccactggaaactccttgacaatgttggcaaagacgaaagaggtaaagcttgttctcaggtggaaccaaactctgcgctctgggcagttaatcgtgtatcactcttgcaaaccatttcaaatgtctccatggagctgccagtggaacctgctgcagaattggcacacagcttgctcacaaggatcgaggattttgatatgaaccttagtgaggttgatgcacatgtaaaatcactgaaaactttgtgtaaaaggaaagcaaaaacagctaaggaaggtgatgcactgatcctgaagtgggcgcagcaacttatccgtagtgcttttgacatccttgaccagtacataaaagaggcatcagaatcagccaggggtcacagtttcattactcctatgactggtaaatgcaagggaatgaaacagacatctgcatcgaagtcaacatcacaagcagttgttgctgtgttcactgttggatcactgatcctagcttgccctattgccaatgtgaaggacatcacccctttgctacacacaatcgtaacttctggaaattctgagccaaggccaaaaaaccttgttggcgggaccatttctttcaaagagttagctccatcattatatatacaatcctgggatacattagcaaaaatatgccttgtagatgaaaaagtggccaaacggtatattccaatttttgttcaggagcttgagaggagtgatatggctacccttcgtaataatatcatgattgcgatggcagacttctatgtccgttatactgcattggttgactgagggactatgtaaagtggagaggggttctcttccttcgatttctgccatctttagttgatgagtctgagaagattaggcatttggcggactacctcttcgggaacatcttaaaagctaaagcgccacttcttgcatacaatagtttcattgaagctatatatgttctaaacgattgcactggacatggtgtatatagcgactctcagtctcagggaagtttagacagaagacctgccctttttgcaattcgtggcactgatgaaagcacgaggtcaaagagaatgcacatttatgtctctttgctgaaacaaatggcaccagagcatcttttagccacgtcggccaagttatgtgctgagatcttggcagctgtttgcgatggcttgctcagtgttgatgatgctggtggaagggctgtacttcaggatgctctgcagatactggcttgcaaggagatgcgcatccaccccaacatcttatcagagaattccgagatggacgaggaaggcggtgagggcggaggaacagccagcgcgctcctggcggccaaagggagggcggtgacccaggtcgctaagaagaacctgatccagatcgccgtcccgatcttcatcgagctgaagcggctgctggagagcaagaacagcccgctgatcgggtgcctgatggagtgcctgcgcgcgctgctcaaggactacaagaacgagatggaggagatcctggtggcggacaagcagctccagcgtgagctcctctacgacatgcacaagtacgaggcaggcaaggggaagggcaaggctgcggcgcaggccgaggccgaggccggggccggggccggtcttagcggcatcggcaggtccccggctgtcaggtcggtgctgaaggaggtgaaccggaagacgacgccgacgcaaccgctgcactcgatgagtgtgcccaaggtgaagtccattctggggagcgccgggccgggctctggtcgccccgatgtcctccagtcggtcaggcggcttcagccgtttgaatcggacgatgagagttagcctgcccccacttcgatggcagtttatttcggctgttgcacttgggcacgtctgctctagaggtctggtctggtccggtaagctcattctctcaatgaggttttcgccgatttgcagtgtatataattacatattctgtaaacgaacaacgagaagaactactcttctatgtcctcagatataatgggtccagagtttcagatttgtaccaaggtacaatatattctagatccttactcttctctcttgtgtttttaacaaaaatactctcttgactttttt

SEQ ID NO: 15974 - DNA, 4137 bp, Zea Mays
tagtccttccccccatctccagtcgagtgctctctccagtccccacgcccgatctcgcccccatcccatggacgccgatgagatggacctcgactccccatcctcggcctcccccgcgcccgcctccggctccctccccaccgtcctctctgagctcgccgccctccaccgccgcgcgtcttcctcctccgtcacctccccgcccttgtccctgccctccatcacattcctctcctccagccccgcagccgtcgcgtccatcttccctcgcctcgccgaggccggcgtccccgcatcctccttgctgcccccgctcgaggcctcgctctccgcgcacccgctccccgcagccgtcgcctacctccgcctcctcctcgccccggcctccccgcttctcaccctcttctccccgcttccattcctctccctcctcctcgtcatccgcaaggccgcctcctccttctccggagccggcagcgccgcctccaaccctagctccgtttccggcggcgccgccaacccccgcaagcgcaagaaccagcgccaaaagccagcagcggctccgccggcggcgccgtcgctgctcccgaaggcgctctccctgctggcggacgccgcggggaggctgccgctcggggcccacccggacgcgcggcggtcgctcgtcgataccgccgcggagctcacggcgtttgacgtcctcaccgctgtccttggatccgactaccacgccggggcggtgcaggacgtgatacgagcgctggcccctgtggtgctctcggccgcgaaatccgcagcacgggtggctgcggtgcagttcattgtgaggaacttggtgcctttgggcgccgaggaaggagaggaagcagttaggaaggcagtggggtaccttcctaggtacttggccgtaaaggcaccggacaaggcggaggccagggcactggcggtggaagcgatagtcgaggtggtgcgggcattggaggcagatggaagggagggatttgcagggtatgttgtggccatggcaaggggcaaggcaaagggacgactgcttgctgtggatttggtccttgccttgctgccagtgctgttaccatttgaaggggatgcctgtgatatggaggagggctcttgggggctgaagtgtctgcgggtgttggtggagaagtgctcagatagtgtgggaggggttcgagctcgggcattaataaatgcagcccaggcgcttgatattttgtctgagagaggtgtggaggttgaccggttgcaggaggtgatgaggattggggacatgaagcttggggaattgctgagacgacgctgcaccgatgataaggctgctgtgaggaaggctgcgcttgtgctcatcacaaaggcgattggtttgattgggagacccatagatgactctcttctttgtgcaatgggtgctgcatgctctgatccattagtcagcatccgcaaggctgctcttgctgccatctcagaggtgtttaggaaatttcctgatgagaaagtgatgaaagagtggcttcaatctgtgcctccactggtgattgatagtgagacaagcatccaggaggaatgtgaaaacttgtttcttgaactggtgcttaacaggatctgccaagctgccaatgtgagcttagatgatgatttcatcaccttggaggaagttttccctgaagggacactagatttgctgaaaagcatctgtgatggagaggttgctccatgcataaagaagatatgtgcaagccttggcaagaagaggaagctgaaaccactacttgctagttctctgcagaacatcataacactatctgaatccttgtggttgagacgttgtaagccaatcgaaaattggactgcacctattgggtcctggtggcttctttccgaggtctcatcattcgcgccaaaatcagttaactggaagttcctctcccaccactggaaactccttgacaatgttggcaaagacgaaagaggtaaagcttgttctcaggtggaaccaaactctgcgctctgggcagttaatcgtgtatcactcttgcaaaccatttcaaatgtctccatggagctgccagtggaacctgctgcagaattggcacacagcttgctcacaaggatcgaggattttgatatgaaccttagtgaggttgatgcacatgtaaaatcactgaaaactttgtgtaaaaggaaagcaaaaacagctaaggaaggtgatgcactgatcctgaagtgggcgcagcaacttatccgtagtgcttttgacatccttgaccagtacataaaagaggcatcagaatcagccaggggtcacagtttcattactcctatgactggtaaatgcaagggaatgaaacagacatctgcatcgaagtcaacatcacaagcagttgttgctgtgttcactgttggatcactgatcctagcttgccctattgccaatgtgaaggacatcacccctttgctacacacaatcgtaacttctggaaattctgagccaaggccaaaaaaccttgttggcgggaccatttctttcaaagagttagctccatcattatatatacaatcctgggatacattagcaaaaatatgccttgtagatgaaaaagtggccaaacggagcttgagaggagtgatatggctacccttcgtaataatatcatgattgcgatggcagacttctatgtccgttatactgcattggttgactgttatatgccaaaaataacaaaatcactacgtgatccctgtgaagtagtacggagacaaacatttatcctactctctaagttattgcagagggactatgtaaagtggagaggggttctcttccttcgatttctgccatctttagttgatgagtctgagaagattaggcatttggcggactacctcttcgggaacatcttaaaagctaaagcgccacttcttgcatacaatagtttcattgaagctatatatgttctaaacgattgcactggacatggtgtatatagcgactctcagtctcagggaagtttagacagaagacctgccctttttgcaattcgtggcactgatgaaagcacgaggtcaaagagaatgcacatttatgtctctttgctgaaacaaatggcaccagagcatcttttagccacgtcggccaagttatgtgctgagatcttggcagctgtttgcgatggcttgctcagtgttgatgatgctggtggaagggctgtacttcaggatgctctgcagatactggcttgcaaggagatgcgcatccaccccaacatcttatcagagaattccgagatggacgaggaaggcggtgagggcggaggaacagccagcgcgctcctggcggccaaagggagggcggtgacccaggtcgctaagaagaacctgatccagatcgccgtcccgatcttcatcgagctgaagcggctgctggagagcaagaacagcccgctgatcgggtgcctgatggagtgcctgcgcgcgctgctcaaggactacaagaacgagatggaggagatcctggtggcggacaagcagctccagcgtgagctcctctacgacatgcacaagtacgaggcaggcaaggggaagggcaaggctgcggcgcaggccgaggccgaggccggggccggggccggtcttagcggcatcggcaggtccccggctgtcaggtcggtgctgaaggaggtgaaccggaagacgacgccgacgcaaccgctgcactcgatgagtgtgcccaaggtgaagtccattctggggagcgccgggccgggctctggtcgccccgatgtcctccagtcggtcaggcggcttcagccgtttgaatcggacgatgagagttagcctgcccccacttcgatggcagtttatttcggctgttgcacttgggcacgtctgctctagaggtctggtctggtccggtaagctcattctctcaatgaggttttcgccgatttgcagtgtatataattacatattctgtaaacgaacaacgagaagaactactcttctatgtcctcagatataatgggtccagagtttcagatttgtaccaaggtacaatatattctagatccttactcttctctcttgtgtttttaacaaaaatactctcttgactttttt

SEQ ID NO: 15975 - DNA, 4144 bp, Zea Mays
tagtccttccccccatctccagtcgagtgctctctccagtccccacgcccgatctcgcccccatcccatggacgccgatgagatggacctcgactccccatcctcggcctcccccgcgcccgcctccggctccctccccaccgtcctctctgagctcgccgccctccaccgccgcgcgtcttcctcctccgtcacctccccgcccttgtccctgccctccatcacattcctctcctccagccccgcagccgtcgcgtccatcttccctcgcctcgccgaggccggcgtccccgcatcctccttgctgcccccgctcgaggcctcgctctccgcgcacccgctccccgcagccgtcgcctacctccgcctcctcctcgccccggcctccccgcttctcaccctcttctccccgcttccattcctctccctcctcctcgtcatccgcaaggccgcctcctccttctccggagccggcagcgccgcctccaaccctagctccgtttccggcggcgccgccaacccccgcaagcgcaagaaccagcgccaaaagccagcagcggctccgccggcggcgccgtcgctgctcccgaaggcgctctccctgctggcggacgccgcggggaggctgccgctcggggcccacccggacgcgcggcggtcgctcgtcgataccgccgcggagctcacggcgtttgacgtcctcaccgctgtccttggatccgactaccacgccggggcggtgcaggacgtgatacgagcgctggcccctgtggtgctctcggccgcgaaatccgcagcacgggtggctgcggtgcagttcattgtgaggaacttggtgcctttgggcgccgaggaaggagaggaagcagttaggaaggcagtggggtaccttcctaggtacttggccgtaaaggcaccggacaaggcggaggccagggcactggcggtggaagcgatagtcgaggtggtgcgggcattggaggcagatggaagggagggatttgcagggtatgttgtggccatggcaaggggcaaggcaaagggacgactgcttgctgtggatttggtccttgccttgctgccagtgctgttaccatttgaaggggatgcctgtgatatggaggagggctcttgggggctgaagtgtctgcgggtgttggtggagaagtgctcagatagtgtgggaggggttcgagctcgggcattaataaatgcagcccaggcgcttgatattttgtctgagagaggtgtggaggttgaccggttgcaggaggtgatgaggattggggacatgaagcttggggaattgctgagacgacgctgcaccgatgataaggctgctgtgaggaaggctgcgcttgtgctcatcacaaaggcgattggtttgattgggagacccatagatgactctcttctttgtgcaatgggtgctgcatgctctgatccattagtcagcatccgcaaggctgctcttgctgccatctcagaggtgtttaggaaatttcctgatgagaaagtgatgaaagagtggcttcaatctgtgcctccactggtgattgatagtgagacaagcatccaggaggaatgtgaaaacttgtttcttgaactggtgcttaacaggatctgccaagctgccaatgtgagcttagatgatgatttcatcaccttggaggaagttttccctgaagggacactagatttgctgaaaagcatctgtgatggagaggttgctccatgcataaagaagatatgtgcaagccttggcaagaagaggaagctgaaaccactacttgctagttctctgcagaacatcataacactatctgaatccttgtggttgagacgttgtaagccaatcgaaaattggactgcacctattgggtcctggtggcttctttccgaggtctcatcattcgcgccaaaatcagttaactggaagttcctctcccaccactggaaactccttgacaatgttggcaaagacgaaagaggtaaagcttgttctcaggtggaaccaaactctgcgctctgggcagttaatcgtgtatcactcttgcaaaccatttcaaatgtctccatggagctgccagtggaacctgctgcagaattggcacacagcttgctcacaaggatcgaggattttgatatgaaccttagtgaggttgatgcacatgtaaaatcactgaaaactttgtgtaaaaggaaagcaaaaacagctaaggaaggtgatgcactgatcctgaagtgggcgcagcaacttatccgtagtgcttttgacatccttgaccagtacataaaagaggcatcagaatcagccaggggtcacagtttcattactcctatgactggtaaatgcaagggaatgaaacagacatctgcatcgaagtcaacatcacaagcagttgttgctgtgttcactgttggatcactgatcctagcttgccctattgccaatgtgaaggacatcacccctttgctacacacaatcgtaacttctggaaattctgagccaaggccaaaaaaccttgttggcgggaccatttctttcaaagagttagctccatcattatatatacaatcctgggatacattagcaaaaatatgccttgtagatgaaaaagtggccaaacggtatattccaatttttgttcaggagcttgagaggagtgatatggctacccttcgtaataatatcatgattgcgatggcagacttctatgtccgttatactgcattggttgactgttatatgccaaaaataacaaaatcactacgtgatccctgtgaagtagtacggagacaaacatttatcctactctctaagttattgcagtggagaggggttctcttccttcgatttctgccatctttagttgatgagtctgagaagattaggcatttggcggactacctcttcgggaacatcttaaaagctaaagcgccacttcttgcatacaatagtttcattgaagctatatatgttctaaacgattgcactggacatggtgtatatagcgactctcagtctcagggaagtttagacagaagacctgccctttttgcaattcgtggcactgatgaaagcacgaggtcaaagagaatgcacatttatgtctctttgctgaaacaaatggcaccagagcatcttttagccacgtcggccaagttatgtgctgagatcttggcagctgtttgcgatggcttgctcagtgttgatgatgctggtggaagggctgtacttcaggatgctctgcagatactggcttgcaaggagatgcgcatccaccccaacatcttatcagagaattccgagatggacgaggaaggcggtgagggcggaggaacagccagcgcgctcctggcggccaaagggagggcggtgacccaggtcgctaagaagaacctgatccagatcgccgtcccgatcttcatcgagctgaagcggctgctggagagcaagaacagcccgctgatcgggtgcctgatggagtgcctgcgcgcgctgctcaaggactacaagaacgagatggaggagatcctggtggcggacaagcagctccagcgtgagctcctctacgacatgcacaagtacgaggcaggcaaggggaagggcaaggctgcggcgcaggccgaggccgaggccggggccggggccggtcttagcggcatcggcaggtccccggctgtcaggtcggtgctgaaggaggtgaaccggaagacgacgccgacgcaaccgctgcactcgatgagtgtgcccaaggtgaagtccattctggggagcgccgggccgggctctggtcgccccgatgtcctccagtcggtcaggcggcttcagccgtttgaatcggacgatgagagttagcctgcccccacttcgatggcagtttatttcggctgttgcacttgggcacgtctgctctagaggtctggtctggtccggtaagctcattctctcaatgaggttttcgccgatttgcagtgtatataattacatattctgtaaacgaacaacgagaagaactactcttctatgtcctcagatataatgggtccagagtttcagatttgtaccaaggtacaatatattctagatccttactcttctctcttgtgtttttaacaaaaatactctcttgactttttt

SEQ ID NO: 15976 - DNA, 4160 bp, Zea Mays
ctagtccttccccccatctccagtcgagtgctctctccagtccccacgcccgatctcgcccccatcccatggacgccgatgagatggacctcgactccccatcctcggcctcccccgcgcccgcctccggctccctccccaccgtcctctctgagctcgccgccctccaccgccgcgcgtcttcctcctccgtcacctccccgcccttgtccctgccctccatcacattcctctcctccagccccgcagccgtcgcgtccatcttccctcgcctcgccgaggccggcgtccccgcatcctccttgctgcccccgctcgaggcctcgctctccgcgcacccgctccccgcagccgtcgcctacctccgcctcctcctcgccccggcctccccgcttctcaccctcttctccccgcttccattcctctccctcctcctcgtcatccgcaaggccgcctcctccttctccggagccggcagcgccgcctccaaccctagctccgtttccggcggcgccgccaacccccgcaagcgcaagaaccagcgccaaaagccagcagcggctccgccggcggcgccgtcgctgctcccgaaggcgctctccctgctggcggacgccgcggggaggctgccgctcggggcccacccggacgcgcggcggtcgctcgtcgataccgccgcggagctcacggcgtttgacgtcctcaccgctgtccttggatccgactaccacgccggggcggtgcaggacgtgatacgagcgctggcccctgtggtgctctcggccgcgaaatccgcagcacgggtggctgcggtgcagttcattgtgaggaacttggtgcctttgggcgccgaggaaggagaggaagcagttaggaaggcagtggggtaccttcctaggtacttggccgtaaaggcaccggacaaggcggaggccagggcactggcggtggaagcgatagtcgaggtggtgcgggcattggaggcagatggaagggagggatttgcagggtatgttgtggccatggcaaggggcaaggcaaagggacgactgcttgctgtggatttggtccttgccttgctgccagtgctgttaccatttgaaggggatgcctgtgatatggaggagggctcttgggggctgaagtgtctgcgggtgttggtggagaagtgctcagatagtgtgggaggggttcgagctcgggcattaataaatgcagcccaggcgcttgatattttgtctgagagaggtgtggaggttgaccggttgcaggaggtgatgaggattggggacatgaagcttggggaattgctgagacgacgctgcaccgatgataaggctgctgtgaggaaggctgcgcttgtgctcatcacaaaggcgattggtttgattgggagacccatagatgactctcttctttgtgcaatgggtgctgcatgctctgatccattagtcagcatccgcaaggctgctcttgctgccatctcagaggtgtttaggaaatttcctgatgagaaagtgatgaaagagtggcttcaatctgtgcctccactggtgattgatagtgagacaagcatccaggaggaatgtgaaaacttgtttcttgaactggtgcttaacaggatctgccaagctgccaatgtgagcttagatgatgatttcatcaccttggaggaagttttccctgaagggacactagatttgctgaaaagcatctgtgatggagaggttgctccatgcataaagaagatatgtgcaagccttggcaagaagaggaagctgaaaccactacttgctagttctctgcagaacatcataacactatctgaatccttgtggttgagacgttgtaagccaatcgaaaattggactgcacctattgggtcctggtggcttctttccgaggtctcatcattcgcgccaaaatcagttaactggaagttcctctcccaccactggaaactccttgacaatgttggcaaagacgaaagaggtaaagcttgttctcaggtggaaccaaactctgcgctctgggcagttaatcgtgtatcactcttgcaaaccatttcaaatgtctccatggagctgccagtggaacctgctgcagaattggcacacagcttgctcacaaggatcgaggattttgatatgaaccttagtgaggttgatgcacatgtaaaatcactgaaaactttgtgtaaaaggaaagcaaaaacagctaaggaaggtgatgcactgatcctgaagtgggcgcagcaacttatccgtagtgcttttgacatccttgaccagtacataaaagaggcatcagaatcagccaggggtcacagtttcattactcctatgactggtaaatgcaagggaatgaaacagacatctgcatcgaagtcaacatcacaagcagttgttgctgtgttcactgttggatcactgatcctagcttgccctattgccaatgtgaaggacatcacccctttgctacacacaatcgtaacttctggaaattctgagccaaggccaaaaaaccttgttggcgggaccatttctttcaaagagttagctccatcattatatatacaatcctgggatacattagcaaaaatatgccttgtagatgaaaaagtggccaaacggtatattccaatttttgttcaggagcttgagaggagtgatatggctacccttcgtaataatatcatgattgcgatggcagacttctatgtccgttatactgcattggttgactgttatatgccaaaaataacaaaatcactacgtgatccctgtgaagtagtacggagacaaacatttatcctactctctaagttattgcagagggactatgtaaagtggagaggggttctcttccttcgatttctgccatctttagttgatgagtctgagaagattaggcatttggcggactacctcttcgggaacatcttaaaagctaaagcgccacttcttgcatacaatagtttcattgaagctatatatgttctaaacgattgcactggacatggtgtatatagcgactctcagtctcagggaagtttagacagaagacctgccctttttgcaattcgtggcactgatgaaagcacgaggtcaaagagaatgcacatttatgtctctttgctgaaacaaatggcaccagagcatcttttagccacgtcggccaagttatgtgctgagatcttggcagctgtttgcgatggcttgctcagtgttgatgatgctggtggaagggctgtacttcaggatgctctgcagatactggcttgcaaggagatgcgcatccaccccaacatcttatcagagaattccgagatggacgaggaaggcggtgagggcggaggaacagccagcgcgctcctggcggccaaagggagggcggtgacccaggtcgctaagaagaacctgatccagatcgccgtcccgatcttcatcgagctgaagcggctgctggagagcaagaacagcccgctgatcgggtgcctgatggagtgcctgcgcgcgctgctcaaggactacaagaacgagatggaggagatcctggtggcggacaagcagctccagcgtgagctcctctacgacatgcacaagtacgaggcaggcaaggggaagggcaaggctgcggcgcaggccgaggccgaggccggggccggggccggtcttagcggcatcggcaggtccccggctgtcaggtcggtgctgaaggaggtgaaccggaagacgacgccgacgcaaccgctgcactcgatgagtgtgcccaaggtgaagtccattctggggagcgccgggccgggctctggtcgccccgatgtcctccagtcggtcaggcggcttcagccgtttgaatcggacgatgagagttagcctgcccccacttcgatggcagtttatttcggctgttgcacttgggcacgtctgctctagaggtctggtctggtccggtaagctcattctctcaatgaggttttcgccgatttgcagtgtatataattacatattctgtaaacgaacaacgagaagaactactcttctatgtcctcagatataatgggtccagagtttcagatttgtaccaaggtacaatatattctagatccttactcttctctcttgtgtttttaacaaaaatactctcttgactttttt

SEQ ID NO: 15977 - DNA, 2851 bp, Zea Mays
tagtccttccccccatctccagtcgagtgctctctccagtccccacgcccgatctcgcccccatcccatggacgccgatgagatggacctcgactccccatcctcggcctcccccgcgcccgcctccggctccctccccaccgtcctctctgagctcgccgccctccaccgccgcgcgtcttcctcctccgtcacctccccgcccttgtccctgccctccatcacattcctctcctccagccccgcagccgtcgcgtccatcttccctcgcctcgccgaggccggcgtccccgcatcctccttgctgcccccgctcgaggcctcgctctccgcgcacccgctccccgcagccgtcgcctacctccgcctcctcctcgccccggcctccccgcttctcaccctcttctccccgcttccattcctctccctcctcctcgtcatccgcaaggccgcctcctccttctccggagccggcagcgccgcctccaaccctagctccgtttccggcggcgccgccaacccccgcaagcgcaagaaccagcgccaaaagccagcagcggctccgccggcggcgccgtcgctgctcccgaaggcgctctccctgctggcggacgccgcggggaggctgccgctcggggcccacccggacgcgcggcggtcgctcgtcgataccgccgcggagctcacggcgtttgacgtcctcaccgctgtccttggatccgactaccacgccggggcggtgcaggacgtgatacgagcgctggcccctgtggtgctctcggccgcgaaatccgcagcacgggtggctgcggtgcagttcattgtgaggaacttggtgcctttgggcgccgaggaaggagaggaagcagttaggaaggcagtggggtaccttcctaggtacttggccgtaaaggcaccggacaaggcggaggccagggcactggcggtggaagcgatagtcgaggtggtgcgggcattggaggcagatggaagggagggatttgcagggtatgttgtggccatggcaaggggcaaggcaaagggacgactgcttgctgtggatttggtccttgccttgctgccagtgctgttaccatttgaaggggatgcctgtgatatggaggagggctcttgggggctgaagtgtctgcgggtgttggtggagaagtgctcagatagtgtgggaggggttcgagctcgggcattaataaatgcagcccaggcgcttgatattttgtctgagagaggtgtggaggttgaccggttgcaggaggtgatgaggattggggacatgaagcttggggaattgctgagacgacgctgcaccgatgataaggctgctgtgaggaaggctgcgcttgtgctcatcacaaaggcgattggtttgattgggagacccatagatgactctcttctttgtgcaatgggtgctgcatgctctgatccattagtcagcatccgcaaggctgctcttgctgccatctcagaggtgtttaggaaatttcctgatgagaaagtgatgaaagagtggcttcaatctgtgcctccactggtgattgatagtgagacaagcatccaggaggaatgtgaaaacttgtttcttgaactggtgcttaacaggatctgccaagctgccaatgtgagcttagatgatgatttcatcaccttggaggaagttttccctgaagggacactagatttgctgaaaagcatctgtgatggagaggttgctccatgcataaagaagatatgtgcaagccttggcaagaagaggaagctgaaaccactacttgctagttctctgcagaacatcataacactatctgaatccttgtggttgagacgttgtaagccaatcgaaaattggactgcacctattgggtcctggtggcttctttccgaggtctcatcattcgcgccaaaatcagttaactggaagttcctctcccaccactggaaactccttgacaatgttggcaaagacgaaagaggtaaagcttgttctcaggtggaaccaaactctgcgctctgggcagttaatcgtgtatcactcttgcaaaccatttcaaatgtctccatggagctgccagtggaacctgctgcagaattggcacacagcttgctcacaaggatcgaggattttgatatgaaccttagtgaggttgatgcacatgtaaaatcactgaaaactttgtgtaaaaggaaagcaaaaacagctaaggaaggtgatgcactgatcctgaagtgggcgcagcaacttatccgtagtgcttttgacatccttgaccagtacataaaagaggcatcagaatcagccaggggtcacagtttcattactcctatgactggtaaatgcaagggaatgaaacagacatctgcatcgaagtcaacatcacaagcagttgttgctgtgttcactgttggatcactgatcctagcttgccctattgccaatgtgaaggacatcacccctttgctacacacaatcgtaacttctggaaattctgagccaaggccaaaaaaccttgttggcgggaccatttctttcaaagagttagctccatcattatatatacaatcctgggatacattagcaaaaatatgccttgtagatgaaaaagtggccaaacggtatattccaatttttgttcaggagcttgagaggagtgatatggctacccttcgtaataatatcatgattgcgatggcagacttctatgtccgttatactgcattggttgactgatggattaatttagcacaattggcatagttcgcgagccggctcggctcatttcaccgaagagtccaaaaaacaggctcgtcttgctcgaggctcgcgagcctcgag

SEQ ID NO: 15978 - DNA, 441 bp, Zea Mays
ccgtgctcctgctccgcgcggaagacgttgtggctcacgctcaaccacccgcgccgaactcgccggggcctatcttcttccctgcgttctcggtaacagacgcggcgccagtagataaatgaagaccctgcgcttccgccattaacgcagtgaggaaaaaaaatccagttcgccgccatcgctggaaccgagagccaacgccaaatcgaggggagaactgtgagcagagagtaccaccaacgtcgccctcggcctcagcttgcagtcggggttccacagggggtctgggggcttcaatacgttgcttggggggcgctcgtggccggagaaggagggaatgaccgttggggcggccagaatttcatcaccgggcacaagatccatcgcgcgccgtgtgtggagttcgtagcgatttgaatcactgtcaagagcaggtaccgc

SEQ ID NO: 15979 - DNA, 579 bp, Zea Mays
ccgtgctcctgctccgcgcggaagacgttgtggctcacgctcaaccacccgcgccgaactcgccggggcctatcttcttccctgcgttctcggtaacagacgcggcgccagtagataaatgaagaccctgcgcttccgccattaacgcagtgaggaaaaaaaatccagttcgccgccatcgctggaaccgagagccaacgccaaatcgaggggagaactgtgagcagagagtaccaccaacgtcgccctcggcctcagcttgcagtcggggttccacagggggtctgggggcttcaatacgttgcttggggggcgctcgtggccggagaaggagggaatgaccgttggggcggccagaatttcatcaccgggcacaagatccatcgcgcgccgtgtgtggagttcgtagcgatttgaatcactcgcgaggtttcgaggatctgaagaatcaccctggtaattggaatctcaagtgtcaggcaagttgtgcccttgatcacttctttttacccactcatgttctaattaatcataatgatctttataggttaattttgatgggacccaataggttaccct

SEQ ID NO: 15980 - DNA, 1884 bp, Zea Mays
gctggacctggatagaaaactaagcatggttactggtggacaggaatcagcaccctcggtatcagctgatgttcttgaatggactgagacccgtttacacaatgacaaagctagaaccagatgacggaaaggcgctgaaggtagctgtagtcgaaaggctcgaaaacggtcggacggacatcgtcagatacggccctctttcttctgctagggttgaagtcgtagctctccatggcaacttcaacgctaaagacgaggaatcctggagccctgaggagtttcagaagcacatcgtgtccggtcgagagaaaagcgcccagctcctcactggcaacctggcactcaagctcagtggaggcgaggctgtccttgagaatgcaaccttcaccgataactccagcttcaccagcaccaagatgttcaggctggggctgaggcttgtcggttcttctggagagagagttctcgaaggtgtcaccaagccttttcgcgtgaaagagcgcagggtagaaggattcgaaaagcactaccctccaatgctggacgacgaagtgtggcgtttgaaaaagattggtaaaatcggcgcttaccaccaggcattgtcagacaatggaatcgattcggtgcaagagttcttacgggcttacatgaaggatgaacagaagctcataaagattttcaacaagatgccacagtcgacatggaaatccatcgtagagcacgccatgacgtgcagagttggcgacagtctttacctctacgaagctcaggacaaggatgcgggtcttttctttgatgagttataccagctcgttggggcgaagtttggtgactgttacaagcccattgaccagcttaatgaaatagagaagaatctagtggaagccctgaagcatggggcctaccagaatatagatggcctgcagcctaactacaagatggtgaacaactaccctgtgctcagcagtttccctgctgctcagggtacttccctgtttagcgctcttcatccaaatcagcaggcactcagctatggtgacagctcgactggtgtagggtttggaacaaggccttcaagggagactttcaacacatcccttggatccagtaatgagccacaaacttccaactatatggagttaagacatgagcaaacaataaacagggttctaccatatgatccaagcaatggaaccttgttacccagaccgagaatcacccagttgcagataccaaactctgagagaacattttttggtcctcctgctgttattccaaacaacattctggttggtcacggtgttgcgctctctgaaggatcacacagtggttttcctgtccacagtttatcgtctacggatgtggtcatgtcactgatgcaatccccattccagcttccgacaaacaatttctaacagtggaggggcatctacgccactttcaccccgcaaatgggtcaagatcagagctgcgttgaagctggcatctgtagggaggctctcaaggaggggtccgcattgcaacccaccaaggccaaggcttgtaccgataccatgagcactcttaagaggcatcgatagttttttttttttgtaaaatatacaatctaggatcaaagatccatcaagatattgaactctatagtattgttaaatagatactccagagaaatctgtttaacttggagtagaatggatgttgtcgaacaattaggtatttgcacgtaaaggagctagtagtagtactttacatttataagtttagggtatttgcatgctgaagaatccatgtatctttgttactaactatgaaagtatgaattcaggataatgtagagcctatatcgtttcttcatctctgttagaaattgagatttcacacata

SEQ ID NO: 15981 - DNA, 2298 bp, Zea Mays
cgcacgactttcattggcaggccggctggaacagcggaacgcaggaagattcccagctcgttcctgccactttcccgccatcttctcgcccggcatctataacagcgcgtactcctcccgttgctttgttcttgttcatcacccgtcttcccccaatggctccgccttcctccgccaggcgcttcccatggtcagggacgaccgacgacactggcggcagcgagctctccctgccccgcaggcgctggcagtcagttgggctgcaggttaggagaacgaggaggaagccgacggaggggctgtttggattcagacggatcatggaggcggagttcatgggcatgttcctcccggtctttgggtcgatgcttcggagagtggtctcagaggaggtagagaaagcaatgttcagacaattcagtgcacaaccagcacctcgaaggttactggtggacaggaatcagcaccctcggtatcagctgatgttcttgaatggactgagacccgtttacacaatgacaaagctagaaccagatgacggaaaggcgctgaaggtagctgtagtcgaaaggctcgaaaacggtcggacggacatcgtcagatacggccctctttcttctgctagggttgaagtcgtagctctccatggcaacttcaacgctaaagacgaggaatcctggagccctgaggagtttcagaagcacatcgtgtccggtcgagagaaaagcgcccagctcctcactggcaacctggcactcaagctcagtggaggcgaggctgtccttgagaatgcaaccttcaccgataactccagcttcaccagcaccaagatgttcaggctggggctgaggcttgtcggttcttctggagagagagttctcgaaggtgtcaccaagccttttcgcgtgaaagagcgcagggtagaaggattcgaaaagcactaccctccaatgctggacgacgaagtgtggcgtttgaaaaagattggtaaaatcggcgcttaccaccaggcattgtcagacaatggaatcgattcggtgcaagagttcttacgggcttacatgaaggatgaacagaagctcataaagattttcaacaagatgccacagtcgacatggaaatccatcgtagagcacgccatgacgtgcagagttggcgacagtctttacctctacgaagctcaggacaaggatgcgggtcttttctttgatgagttataccagctcgttggggcgaagtttggtgactgttacaagcccattgaccagcttaatgaaatagagaagaatctagtggaagccctgaagcatggggcctaccagaatatagatggcctgcagcctaactacaagatggtgaacaactaccctgtgctcagcagtttccctgctgctcagggtacttccctgtttagcgctcttcatccaaatcagcaggcactcagctatggtgacagctcgactggtgtagggtttggaacaaggccttcaagggagactttcaacacatcccttggatccagtaatgagccacaaacttccaactatatggagttaagacatgagcaaacaataaacagggttctaccatatgatccaagcaatggaaccttgttacccagaccgagaatcacccagttgcagataccaaactctgagagaacattttttggtcctcctgctgttattccaaacaacattctggttggtcacggtgttgcgctctctgaaggatcacacagtggttttcctgtccacagtttatcgtctacggatgtggtcatgtcactgatgcaatccccattccagcttccgacaaacaatttctaacagtggaggggcatctacgccactttcaccccgcaaatgggtcaagatcagagctgcgttgaagctggcatctgtagggaggctctcaaggaggggtccgcattgcaacccaccaaggccaaggcttgtaccgataccatgagcactcttaagaggcatcgatagttttttttttttgtaaaatatacaatctaggatcaaagatccatcaagatattgaactctatagtattgttaaatagatactccagagaaatctgtttaacttggagtagaatggatgttgtcgaacaattaggtatttgcacgtaaaggagctagtagtagtactttacatttataagtttagggtatttgcatgctgaagaatccatgtatctttgttactaactatgaaagtatgaattcaggataatgtagagcctatatcgtttcttcatctctgttagaaattgagatttcacacata

SEQ ID NO: 15982 - DNA, 851 bp, Zea Mays
cctaacttatgctatttggttacctgcatccggatttgaaatctagtagttactagtgtaacctagtggtgtgttcgggaacgtttccgcgggcgggcggcggcccccagtggcgaagatgatccgactaccgacgtacgcagcaggaggcgtccgttgccatcttcttctcctttgagtatatgatactagcaacatccacagtatcaacattcgtgaagtatatattctatgttagtgacatgctaatggaagattatgtgcgctacagaaagatcacttccaacatgaatgaacgctttccagatgctacatcagaagagctcgatgtgagtaatgctacatgtattatttgtcgtgaggaaatggctacagcaaagaaactgctcgatgggcatctgttccatgtgcattgtctaagagaaataggagaacaggctgaagaagaggttcctctacggcttctccatgggagcttcagctccacaggaaggatcctctctactgggactgtgccgtgctgcttgccccaatgtgcaagccaacagtagtgtcgaaggagcacaagatgatgtgtgagcacaaagtggccagcaagaatggagtcatggaacatcgacaggaggggtgcgacagcggcaaccgatgtatcgatcccttggacaatctggttttgacatgatgcaaatcaatctgctgtacattgtattctgcacttgcacagattgtttggctaattacatgattatctcaatgttttggtttggatttagagtacacttatgtatgaaatatttattggtactcatctatattatattaattatattattattaaatatatgtgtgtg

SEQ ID NO: 15983 - DNA, 1043 bp, Zea Mays
gcctaatccaatctccaggcccaggaaaaacaaccccggaccgcgtgcgtttcgcttccgcccctgctgtttctgtttcttggcattcaccccctctttctctcgtggcgacgacggcgaccgtcgccttcccctacgcgctaggtgccagggtccgtcgggtccttcgctggcgacgagcaactaccaggtaacctagtggtgtgttcgggaacgtttccgcgggcgggcggcggcccccagtggcgaagatgatccgactaccgacgtacgcagcaggaggcgtccgttgccatcttcttctcctttgagtatatgatactagcaacatccacagtatcaacattcgtgaagtatatattctatgttagtgacatgctaatggaagattatgtgcgctacagaaagatcacttccaacatgaatgaacgctttccagatgctacatcagaagagctcgatgtgagtaatgctacatgtattatttgtcgtgaggaaatggctacagcaaagaaactgctcgatgggcatctgttccatgtgcattgtctaagagaaataggagaacaggctgaagaagaggttcctctacggcttctccatgggagcttcagctccacaggaaggatcctctctactgggactgtgccgtgctgcttgccccaatgtgcaaggccacattttgcaattaaccatgaagatctgacactgttatttccaaatatgtactatgccaacagtagtgtcgaaggagcacaagatgatgtgtgagcacaaagtggccagcaagaatggagtcatggaacatcgacaggaggggtgcgacagcggcaaccgatgtatcgatcccttggacaatctggttttgacatgatgcaaatcaatctgctgtacattgtattctgcacttgcacagattgtttggctaattacatgattatctcaatgttttggtttggatttagagtacacttatgtatgaaatatttattggtactcatctatattatattaattatattattattaaatatatgtgtgtg

SEQ ID NO: 15984 - DNA, 3762 bp, Zea Mays
ggcacctcgtagctggacgcctggactgctgctgcacaagcacaagcacagctaccaaatccagtcctgggccctactggtaaccaagttgtgttgtgtgtagttgtgtacgtgccctattgcattgcagctctatttgcgttgtctatctatactatatatatatcctccacgatccacacgtctcagcggcagcgctcagaggtcacagcacacagacagcattcattctttcttctccgtcagttccctccactgccttcttggagctgaagctctgcacccttctcctctccccacaattggatcacgccctatctgtccgtccatccggcctcaagattccacggcgctgcgcaaggtgaggctgtccctgctcttttttctcaccttctgttgtcaccttccacaaatctgttatggccgtcgtcggtccagtccacccatggtggaaagtgatagcaaatcccgcagagaatatgaatatggcgccatttctcctcttgccgctacgaccttccatccattgccatgtcgtcaaaccagaacgagagcggcggcggcggcggcgcgggaccgccgctgccgacggcgttcaagagcccgtccacggacggcaagagcggcagccgccggagcacgcggttcaaggacgaggacgagtacgtggaggtcacgctcgacgtccgggacggcggcggcggcggcgacgacgtcgccgtcctggccatcaaggacgacgtccgcgacgacacgcaggacgccgcgtcgctcctggaccgcccggcgcccggcggggcggggggcggcctgtcctccaagctcagggcagcgcgcgcgcgcctcggccgcatcgcgtcggggaagcgcgccgcggtgccgctctcggcgctgctccgccgcgaccccgaccgcgccaggctcgacaggagcgtcgtcaccgcgctcaggggcctccagttcctcaaccaggccgccgtcaccgagggctggcccgaggtcgagaagcgcttccaccgcctcgccgtcgacggcttcctcctccgctcgcgattcggccagtgcatcgggatggtcggatccgaggagtttgcggcgcagatcttcgacgccctggcacggcgaagggggatcacggcaatggtgctcaccaaggatcaggtccgggagttctgggagcagctctctgatccaggattcgatgccaagcttcagaccttctttgacatggttgacaagaatgccgatggtcagatcactgaggaggagctcaaggaggtcctcactctgactgcctctgcgaacaagctgtccaagatcctggagcgtgtggacgagtacacggcgctgatcatggaggagctcgatcctgacagccttggctacatcgagatcgcgaacctggagtcgctgctgctgcagccgccgtcgcaggcgccgacgaggttggtgacgcacagctccaacatcagccagctgatcagccagaggctggcgccagcgcgcgacgacggcccgctccggcgcggcgccagggccgtgctctacttcgcggaggacaactggaagcgcgtctgggtgatggcgctctggctggccatcaacgccggactcttcacctggaagttcctcgcgtaccggcgccaccccacgttcgacgtcatgggctactgcgtctgcgtcgccaagggcggcgccgagaccaccaagttcaacatggcgctcatcctgctccccgtgtgccggaacaccatcacgtggctgcggtcccggaccaggctcggcgccgccgtcccgttcaacgacaacatcaacttccacaaggtggtcgccggcggcgtggcggtcggcgtggcgctgcacgccgtgacgcacctcacgtgcgacttcccgcggctgctgcacgccagcgccgccgcgtacgagcccatgaaggcgtacttcggccagcgccggatccccaactactggtggttcgtcaggggcgtggaggggatcaccggcgtcatcatggtcgtgctcatggccgtcgcctacacgctggcgcacccgtggttccgccgggggaagctcagcgagggcaacccgctgcgccggctcagcggcttcaacatgttctggtactcgcaccacctcttcgtcatcgtctacgtcgccttcgtcgtccacggcgtctgcctctacatcaacaggacgtggtacaaacagacgacatggatgtacctcgccattcccatccttctctacgccggcgagcggcttctccgggcgctgaggtcccatggcctcaccaccgtgaggatcgagaaggttgccctgtaccccgggaatgtcatcgccattcacatgagcaagccgcatgggttcagctacaagagcgggcagtacatctacgtcaactgcggcgaggtctcgcccttcgagtggcacccgttcaccatcacctcggcgcccggcgacgactacctgagcatgcacatccggtgccgcggcgactggacggccagcttcagggcgctcttcgcgcaggtgtgccggccgcccgccgccggccagagcggcctcctgcgggccgacttcgcgtcctccacggcggccggcggcggcgggaagctgccgaagctgctgatcgacgggccctacggcgcccccgcgcaggactaccgcaagtacgacgtgctcctcctcatcggtctcggcatcggcgccaccccgctcatcagcatcgtcaaggacgtgctcaacaacatctcggacaacaaagacgaagagcagccggcggagttcatgacgcggcgcgtgtacttctactggtgcacgcgggaggagggctccttcgagtggttccgcggcgtgatgaacgaggtggcggagcgcgacgcccgcggcgacgtggtggagctccacaaccactgcaccagcgtgtacgaggaaggcgacgcgcggtcggcgctgctggtgatgctgcaagcgctgcaccacgccaagagcggcgtcgacgtggtgtccgggacgcgggtgcgcacgcacttcgcgcggcccaactggcgggacgtcttcaagcgggtggcctgcaaccaccagggccagcgcgtcggcgtcttctactgcggcgaccagaaggtcacgccggagctccgacgcctgtcgcaggacttctcgcacaagaccaccaccaagttcgtcttccacaaggagaacttctgatgtggaccaccacgaagcaggacatgatagtttcattcgtgaagcaagttattcctggtgtgttttagggtaggacaaaaacgcttgacatatgtatatgtggataataacgtatgtagtatctagtaattaagcagcttttgtttttatcttttgcgttttggaaaaaatagataggagtatacagtacagcattgttcattagtgatgttcaaagtatatactgcccgcaagtacaaaatacaaagcaaaaaaatgacttaattttggtggaattgtttgatttccttaacaaacttagcacaaacctaccgtcaacaatttttcaaatgtagggtccaattacattcaaactcggcacaataaagctccaaattacgtatagaaaaaacatgaataaaaaattaaaacaatgttttagtttaaattctttcgtcgtctctttttcaacggtcttgttcgatactcgaggtaacagagctccgttaaacaccgaaggtagcgtaaagatatgtacaatcctgacacttgacattgttgtatggtacttcaaat

SEQ ID NO: 15985 - DNA, 3705 bp, Zea Mays
gtcgtccgtccctttggccttttgccgtctgtccctcacccagcagctctagaaaactgtcccggtgacccagacccgtccaagtccccatccatggcacctcgtagctggacgcctggactgctgctgcacaagcacaagcacagctaccaaatccagtcctgggccctactggtaaccaagttgtgttgtgtgtagttgtgtacgtgccctattgcattgcagctctatttgcgttgtctatctatactatatatatatcctccacgatccacacgtctcagcggcagcgctcagaggtcacagcacacagacagcattcattctttcttctccgtcagttccctccactgccttcttggagctgaagctctgcacccttctcctctccccacaattggatcacgccctatctgtccgtccatccggcctcaagattccacggcgctgcgcaaggaccttccatccattgccatgtcgtcaaaccagaacgagagcggcggcggcggcggcgcgggaccgccgctgccgacggcgttcaagagcccgtccacggacggcaagagcggcagccgccggagcacgcggttcaaggacgaggacgagtacgtggaggtcacgctcgacgtccgggacggcggcggcggcggcgacgacgtcgccgtcctggccatcaaggacgacgtccgcgacgacacgcaggacgccgcgtcgctcctggaccgcccggcgcccggcggggcggggggcggcctgtcctccaagctcagggcagcgcgcgcgcgcctcggccgcatcgcgtcggggaagcgcgccgcggtgccgctctcggcgctgctccgccgcgaccccgaccgcgccaggctcgacaggagcgtcgtcaccgcgctcaggggcctccagttcctcaaccaggccgccgtcaccgagggctggcccgaggtcgagaagcgcttccaccgcctcgccgtcgacggcttcctcctccgctcgcgattcggccagtgcatcgggatggtcggatccgaggagtttgcggcgcagatcttcgacgccctggcacggcgaagggggatcacggcaatggtgctcaccaaggatcaggtccgggagttctgggagcagctctctgatccaggattcgatgccaagcttcagaccttctttgacatggttgacaagaatgccgatggtcagatcactgaggaggagctcaaggaggtcctcactctgactgcctctgcgaacaagctgtccaagatcctggagcgtgtggacgagtacacggcgctgatcatggaggagctcgatcctgacagccttggctacatcgagatcgcgaacctggagtcgctgctgctgcagccgccgtcgcaggcgccgacgaggttggtgacgcacagctccaacatcagccagctgatcagccagaggctggcgccagcgcgcgacgacggcccgctccggcgcggcgccagggccgtgctctacttcgcggaggacaactggaagcgcgtctgggtgatggcgctctggctggccatcaacgccggactcttcacctggaagttcctcgcgtaccggcgccaccccacgttcgacgtcatgggctactgcgtctgcgtcgccaagggcggcgccgagaccaccaagttcaacatggcgctcatcctgctccccgtgtgccggaacaccatcacgtggctgcggtcccggaccaggctcggcgccgccgtcccgttcaacgacaacatcaacttccacaaggtggtcgccggcggcgtggcggtcggcgtggcgctgcacgccgtgacgcacctcacgtgcgacttcccgcggctgctgcacgccagcgccgccgcgtacgagcccatgaaggcgtacttcggccagcgccggatccccaactactggtggttcgtcaggggcgtggaggggatcaccggcgtcatcatggtcgtgctcatggccgtcgcctacacgctggcgcacccgtggttccgccgggggaagctcagcgagggcaacccgctgcgccggctcagcggcttcaacatgttctggtactcgcaccacctcttcgtcatcgtctacgtcgccttcgtcgtccacggcgtctgcctctacatcaacaggacgtggtacaaacagacgacatggatgtacctcgccattcccatccttctctacgccggcgagcggcttctccgggcgctgaggtcccatggcctcaccaccgtgaggatcgagaaggttgccctgtaccccgggaatgtcatcgccattcacatgagcaagccgcatgggttcagctacaagagcgggcagtacatctacgtcaactgcggcgaggtctcgcccttcgagtggcacccgttcaccatcacctcggcgcccggcgacgactacctgagcatgcacatccggtgccgcggcgactggacggccagcttcagggcgctcttcgcgcaggtgtgccggccgcccgccgccggccagagcggcctcctgcgggccgacttcgcgtcctccacggcggccggcggcggcgggaagctgccgaagctgctgatcgacgggccctacggcgcccccgcgcaggactaccgcaagtacgacgtgctcctcctcatcggtctcggcatcggcgccaccccgctcatcagcatcgtcaaggacgtgctcaacaacatctcggacaacaaagacgaagagcagccggcggagttcatgacgcggcgcgtgtacttctactggtgcacgcgggaggagggctccttcgagtggttccgcggcgtgatgaacgaggtggcggagcgcgacgcccgcggcgacgtggtggagctccacaaccactgcaccagcgtgtacgaggaaggcgacgcgcggtcggcgctgctggtgatgctgcaagcgctgcaccacgccaagagcggcgtcgacgtggtgtccgggacgcgggtgcgcacgcacttcgcgcggcccaactggcgggacgtcttcaagcgggtggcctgcaaccaccagggccagcgcgtcggcgtcttctactgcggcgaccagaaggtcacgccggagctccgacgcctgtcgcaggacttctcgcacaagaccaccaccaagttcgtcttccacaaggagaacttctgatgtggaccaccacgaagcaggacatgatagtttcattcgtgaagcaagttattcctggtgtgttttagggtaggacaaaaacgcttgacatatgtatatgtggataataacgtatgtagtatctagtaattaagcagcttttgtttttatcttttgcgttttggaaaaaatagataggagtatacagtacagcattgttcattagtgatgttcaaagtatatactgcccgcaagtacaaaatacaaagcaaaaaaatgacttaattttggtggaattgtttgatttccttaacaaacttagcacaaacctaccgtcaacaatttttcaaatgtagggtccaattacattcaaactcggcacaataaagctccaaattacgtatagaaaaaacatgaataaaaaattaaaacaatgttttagtttaaattctttcgtcgtctctttttcaacggtcttgttcgatactcgaggtaacagagctccgttaaacaccgaaggtagcgtaaagatatgtacaatcctgacacttgacattgttgtatggtacttcaaat

SEQ ID NO: 15986 - DNA, 1028 bp, Zea Mays
gtcgacgccgactccaactcagtagtctatccccaccgcgaaccgccgcaggaatctctgacgatggccccgccggccgctgcggttgccgccgtccgccaccacagcccgcacctgctcctccgccgcgggggcgggggtctcctatcatcgccttcgggccccgccacgctccctttcgcctcgcggggtgcggcctccgcgcccgcgcgcctgcgcctgccgccgccgcagttctctctctcccccgtcccgaagagcctctccgccgcctcctcctcccacgtcattgtacggtccctcttcaccggcattgtcgaggaggtcggccgcgtgcgccgcctcggcccgccgctcgcgccgtctgggggtggcggcggcgaggctcttggccttgacttggaggtcgagaccaaggacctcctcgccggtactcagctcggtgacagtgtggcggtcgacggcgcctgcctcaccgttgcggcgatcgacccggccgcgtccacgctcaccttcggagtggccccggagacgctccgccggacgtccctgggagagcgcgccccaggcgacggcgtcaacctcgagcgcgcactcactccgtcgtcccgcatgggcgggcacttcgtgcagggccacgtcgacgggaccggggagatcgttgcgttccggccggacggggactcgctctgggtcaccgtgcgcgccccgccggagatcctccggctgctcgtgcccaagggcttcgtcgccgttgacggcactagcctcactgttgtcagtgtggacgacgagggcggctggtttgacttcatgctcgtcaggtacacgcaggacaacatcgtgctgccgaccaagaaggtcggagacaaggtgaacctagaggcggatatactgggtaagtacgtcgagaagctcctcgctgggagggttgaggccatggcgaaggttgattcttgatctaccattgctgagctgctggatcaatggtcattctacagtactaagactacatggatggttctatc

SEQ ID NO: 15987 - DNA, 2177 bp, Zea Mays
caacacttagcaaacttgttagacctttaaatgtgttgttatccaaatcaccaaaactcacaaaagggatgaatgcactttcaggaacgtgtttggatggcggcattacaccttgaaggcattgctgtagagtggtattatactctggagcacgaccatggcattctctcgtggtcccgtttgaccaacttcgttaatatgagattcggaccaccctacgcacaaacgtcctggccgaattgaaggatctctgacgtacgagattggtggacgactacatacgacaattctcggtgctcctgtgtcgctgcgatgatctttccacattgcagcatgtgaatctcttcatcgcagggctgggcgaaccattgcgcaaagacatggagcttcagtccccattgctcccacagacaaccatgagtttgacacgagcctatgaacgccgggacgcggacccaacaagatggacaaagccacaaaggccaacaccaagccaacgatatcaacattcaagttcggcacacaaacagtactagcaaagtcggcctagaccaaccatccacagtttaaacggatgtcagcagaggagcttgcagccaaacgagctagtggtgaattatatcactgcaacgagaagttcacacccgagcacaaatgcgcatccacaggggtgttcttattagcactagacgacgatgaggaagaagatattgcggctgctaatttgggtatcttacatgccctcgttggaattgatgttggtgtcacgatgtggctgaaggtgtgcatcagctctgcatctctggtggcacttgtggattccgagtccatgcattcctttctccaggaggacatcacatgagatctcagcctccaaatcacaccacactcaggcctctcagtgaaggtggcaaatggcgacggggttgccagtcccggtgcctgccccaagcttcgtttccatgtgtacaccaaggtattctaccacatctgctatgttttaccaattgccggctttgacatagtgctaggagtttagtggctccactctcttggtctcatactatggaattttgatgctcgagccatgacaatttagtgtaatggacacattgtgacgtggactaggctaggcgctccactgcctcactgctcagccttgacaagggaccgcgaccttctatagcccctattggattcttgctccgacatctttgcagaaccacacggtcttccaccacaacgccgccatgaccaccacatcaggttgacgcctggatcaacaccaatggtggtgtggccataccactacccacaactgttgaagaatgaaattgaacggcaatgtgagaacatgttgcagcagggtaccatcagggagtgcacatcagcgttctcatcaccggtgttgctggagacggctcgtgacgtttctgcattgactaccgctagctgaacgctattacagccgaggacatgtttctgatccctgtcatcaacgagctacacggcaccacattctccaccaagcttgaccttcacagcggctaccactaggtgcgaatgcacctgaacgacatcgacaagacggcgttccgcacccatcacggacactatgagttcttggtaatgccgtccggtctcacgaatgcaccatccaccttccagtcactgatgaatgacatcctcaagcccttcatcataaatccattctggtttttatgctattctggtcctcagtaccacttgggtagcacaccttcaccatatgaaacatgcatggttcttaaggcggtaacgcgaggcaaggcgttggaccactgcctggaggcctaggcaacgcttagatgcttactaaggcgagcaaggcgacaccttaccaattagagaaacaacagaacaacaacatagatgatgaagaaaaagaacaaggaaaaagaaggaaggggtaggagatgtataagaaattgcccagcccaccagccagcccatatatccttcccctggtggtggttagggttgcacctgatcttgtctctgcgtgtcgctcgccccctgtcttagcgccgccgctcctgctcccccatgctttgtgccaccgctccctgagtctctgcaccgccgctctcgctcccctaagtctctactgggcttattggttgatctccttccgttct

SEQ ID NO: 15988 - DNA, 1025 bp, Zea Mays
gtcgacgccgactccaactcagtagtctatccccaccgcgaaccgccgcaggaatctctgacgatggccccgccggccgctgcggttgccgccgtccgccaccacagcccgcacctgctcctccgccgcgggggcgggggtctcctatcatcgccttcgggccccgccacgctccctttcgcctcgcggggtgcggcctccgcgcccgcgcgcctgcgcctgccgccgccgcagttctctctctcccccgtcccgaagagcctctccgccgcctcctcctcccacgtcattgtacggtccctcttcaccggcattgtcgaggaggtcggccgcgtgcgccgcctcggcccgccgctcgcgccgtctgggggtggcggcggcgaggctcttggccttgacttggaggtcgagaccaaggacctcctcgccggtactcagctcggtgacagtgtggcggtcgacggcgcctgcctcaccgttgcggcgatcgacccggccgcgtccacgctcaccttcggagtggccccggagacgctccgccggacgtccctgggagagcgcgccccaggcgacggcgtcaacctcgagcgcgcactcactccgtcgtcccgcatgggcgggcacttcgtgcagggccacgtcgacgggaccggggagatcgttgcgttccggccggacggggactcgctctgggtcaccgtgcgcgccccgccggagatcctccggctgctcgtgcccaagggcttcgtcgccgttgacggcactagcctcactgttgtcagtgtggacgacgagggcggctggtttgacttcatgctcgtcaggtacacgcaggacaacatcgtgctgccgaccaagaaggtcggagacaaggtgaacctagaggcggatatactgggtaagtacgtcgagaagctcctcgctgggagggttgaggccatggcgaaggttgattcttgatctaccattgctgagctgctggatcaatggtcattctacaggaacgtgtttggatggcggcatta

SEQ ID NO: 15989 - DNA, 2783 bp, Zea Mays
cccgggccgaagccgaagaggacgaaaaggcagcctgctgccgccgccgccgctgttgcagttgcagatcacacacactaccctttccgcgacccttctttctgcatccatccaccctccccctttgtcctgtctctctccctcccacgcacacagacacatcacacagctggagagcaggtgcttctctcacacacacctcggcccacgccgccgttgccagccaagagcagtcgcggggcagcgctgaatcctgattaggtgaaaaagagggtggcgaccatcgttttcgctgctgattctggctgcggctcatctgccccagtgctgtgctcctgcaccgtaccgcaaacccagcccaagactgcaagaggtggcataggctcatgtcctgcccagcggttcgcttcaaatttctgagctgaacgcagctggagagaccgcgcagtcctgaatatgtttggtttctcgcggcgccgggtgaaacttggaaggtcgaagggtgacccaagtgatcctttgaacagctccaggagttctgttggtcccagtaaacacctcagtctgcccaatgggaatgacgcgactatgacgtcagtaagtggccacgcagatgatctttcctaccgttgctcgtccgatacgtttgatccccaaggacgcactttcgatatttcagaaaattggactgtgctgtccacagagggagacaaacctattcctcgtttctatcatgcagcagccattgtaagtagcaagatggtagtgtttggtggtgattctggtaatcgcttattagatgacacaaagatattgaatctagagaagcttacttgggattctgcgcctcctaaagtttgcccatcaccaaacggatgttcgatgaagttgccagcctgcaaaggttccttggggaaatagtgtcatccttgtcggaggtaaaactgagcctgcttctgatcatttatcagtatggactttcaatacagaaacagagctttggtcacttattgaagccaagggtgatatccctgcagctcgaagcggacacacggtgattagagctggtgctacattgatactttttggcggtgaggacacaaaaggaaagaaacggcatgaccttcacatgtttgatctgaagtcatcaacatggcttccattgaactataaaggcactggaccttctccaagatccaatcatattgctacactgtatgatgatagggtccttttaatttttggaggccactcaaaatctaagacacttaatgacttgtattctttggatttcgatacaatggtttggtcaagagtgaagacccatggtcctcacccatcacctcgagctggttgcagcggaactctctgtggaactaagtggtacatagctggcggcgcaagcaagaaaaaacgacatgctgaaacttgggtttttgatgttctacaatgtaaatggtctgtttgtgtagtgccccctagttcatcgattactacaaaaaaaggttttagcatggttcctttctaccacaaggacaagattgctcttattgcatttggaggaaacaaaaaagagccatgcaacaaggttgaagtattagtggtactgcaaaatgagcattcttttagttggcgctcagccccagaagtggacaccatggtgtatgagtattctccaagcaataaggagcttgctgatcatctccacaaatgtgcccccttgtactctaatagttccatcgcaaggcatagtctcacttctgtgatagaacaccctcctagaagggaacccctctctgagtcattgttgaagcagtccagtttgggcacttcactccatacgcagttggatcacgcagaagagtgcagcctaggtcagaaactgcagaaaccaatcgatgatgacagatatgatgacgtagatgactcttcttcatgccaagatagcactccaaaagggccctacagcaaaaggacagggcctggttttcagaatggcgcggaaaacatggtgactggaggatcaaaagtgagaaggatagctagatgctcttcagatgttggccagagccacttgtacaacacaaaaatagcagacttgatcagaagaaacaccacgctcgaagaccagcttgcgaccgcactggcaagcaaagatcagctagacaagagcttagcatcggtcattcacagcagaggacagctggagaagatgcttgccaacaaagataaggaggctgagatgctgaaagagaagatagcatgcttagagctggcgcaagaagagtcgaacagcctctcgaacacagtgcacgctgataatgtgcgcctggagcgtgaagtggcgttcctgaaggccgtcacaggcgaaacccagaaggagctgcattccactcgtagagttttagcaggggaacagtcgcgcgcgttccagctccaggttgaagtgttccatctcaagcagaggctgcagatactggagggaagatcaggaacacccaacaaacaaccgctataggctatagtggtcacatttctacatttctgcacatcgatcgttgcaagtttgcaaccccccaccccccaatgtaaatgattgtgtggcgagctttatggtaccatgttagtacatgcgctgatgttgatctgtaatttgcagggtatggtaaaactataaatagctgacggattgaaccatgctaatatgtgtagatattgatctgtaatttgcagggacatggtaaaaaaataaaaatgtgcaagctctacctgaatgtgtcaaa

SEQ ID NO: 15990 - DNA, 2825 bp, Zea Mays
cccgggccgaagccgaagaggacgaaaaggcagcctgctgccgccgccgccgctgttgcagttgcagatcacacacactaccctttccgcgacccttctttctgcatccatccaccctccccctttgtcctgtctctctccctcccacgcacacagacacatcacacagctggagagcaggtgcttctctcacacacacctcggcccacgccgccgttgccagccaagagcagtcgcggggcagcgctgaatcctgattaggtgaaaaagagggtggcgaccatcgttttcgctgctgattctggctgcggctcatctgccccagtgctgtgctcctgcaccgtaccgcaaacccagcccaagactgcaagaggtggcataggctcatgtcctgcccagcggttcgcttcaaatttctgagctgaacgcagctggagagaccgcgcagtcctgaatatgtttggtttctcgcggcgccgggtgaaacttggaaggtcgaagggtgacccaagtgatcctttgaacagctccaggagttctgttggtcccagtaaacacctcagtctgcccaatgggaatgacgcgactatgacgtcagtaagtggccacgcagatgatctttcctaccgttgctcgtccgatacgtttgatccccaaggacgcactttcgatatttcagaaaattggactgtgctgtccacagagggagacaaacctattcctcgtttctatcatgcagcagccattgtaagtagcaagatggtagtgtttggtggtgattctggtaatcgcttattagatgacacaaagatattgaatctagagaagcttacttgggattctgcgcctcctaaagtttgcccatcaccaaacggatgttcgatgaagttgccagcctgcaaaggtcattgcctgttagattgctgcttgtcctttggatgttttggttccttggggaaatagtgtcatccttgtcggaggtaaaactgagcctgcttctgatcatttatcagtatggactttcaatacagaaacagagctttggtcacttattgaagccaagggtgatatccctgcagctcgaagcggacacacggtgattagagctggtgctacattgatactttttggcggtgaggacacaaaaggaaagaaacggcatgaccttcacatgtttgatctgaagtcatcaacatggcttccattgaactataaaggcactggaccttctccaagatccaatcatattgctacactgtatgatgatagggtccttttaatttttggaggccactcaaaatctaagacacttaatgacttgtattctttggatttcgatacaatggtttggtcaagagtgaagacccatggtcctcacccatcacctcgagctggttgcagcggaactctctgtggaactaagtggtacatagctggcggcgcaagcaagaaaaaacgacatgctgaaacttgggtttttgatgttctacaatgtaaatggtctgtttgtgtagtgccccctagttcatcgattactacaaaaaaaggttttagcatggttcctttctaccacaaggacaagattgctcttattgcatttggaggaaacaaaaaagagccatgcaacaaggttgaagtattagtggtactgcaaaatgagcattcttttagttggcgctcagccccagaagtggacaccatggtgtatgagtattctccaagcaataaggagcttgctgatcatctccacaaatgtgcccccttgtactctaatagttccatcgcaaggcatagtctcacttctgtgatagaacaccctcctagaagggaacccctctctgagtcattgttgaagcagtccagtttgggcacttcactccatacgcagttggatcacgcagaagagtgcagcctaggtcagaaactgcagaaaccaatcgatgatgacagatatgatgacgtagatgactcttcttcatgccaagatagcactccaaaagggccctacagcaaaaggacagggcctggttttcagaatggcgcggaaaacatggtgactggaggatcaaaagtgagaaggatagctagatgctcttcagatgttggccagagccacttgtacaacacaaaaatagcagacttgatcagaagaaacaccacgctcgaagaccagcttgcgaccgcactggcaagcaaagatcagctagacaagagcttagcatcggtcattcacagcagaggacagctggagaagatgcttgccaacaaagataaggaggctgagatgctgaaagagaagatagcatgcttagagctggcgcaagaagagtcgaacagcctctcgaacacagtgcacgctgataatgtgcgcctggagcgtgaagtggcgttcctgaaggccgtcacaggcgaaacccagaaggagctgcattccactcgtagagttttagcaggggaacagtcgcgcgcgttccagctccaggttgaagtgttccatctcaagcagaggctgcagatactggagggaagatcaggaacacccaacaaacaaccgctataggctatagtggtcacatttctacatttctgcacatcgatcgttgcaagtttgcaaccccccaccccccaatgtaaatgattgtgtggcgagctttatggtaccatgttagtacatgcgctgatgttgatctgtaatttgcagggtatggtaaaactataaatagctgacggattgaaccatgctaatatgtgtagatattgatctgtaatttgcagggacatggtaaaaaaataaaaatgtgcaagctctacctgaatgtgtcaaa

SEQ ID NO: 15991 - DNA, 2660 bp, Zea Mays
agagaagctacggttgacaagcttgctgaatcatcctcatccccgggccgaagccgaagaggacgaaaaggcagcctgctgccgccgccgccgctgttgcagttgcagatcacacacactaccctttccgcgacccttctttctgcatccatccaccctccccctttgtcctgtctctctccctcccacgcacacagacacatcacacagctggagagcaggtgcttctctcacacacacctcggcccacgccgccgttgccagccaagagcagtcgcggggcagcgctgaatcctgattaggtgaaaaagagggtggcgaccatcgttttcgctgctgattctggctgcggctcatctgccccagtgctgtgctcctgcaccgtaccgcaaacccagcccaagactgcaagaggtggcataggctcatgtcctgcccagcggttcgcttcaaatttctgagctgaacgcagctggagagaccgcgcagtcctgaatatgtttggtttctcgcggcgccgggtgaaacttggaaggtcgaagggtgacccaagtgatcctttgaacagctccaggagttctgttggtcccagtaaacacctcagtctgcccaatgggaatgacgcgactatgacgtcagtaagtggccacgcagatgatctttcctaccgttgctcgtccgatacgtttgatccccaaggacgcactttcgatatttcagaaaattggactgtgctgtccacagagggagacaaacctattcctcgtttctatcatgcagcagccattgtaagtagcaagatggtagtgtttggtggtgattctggtaatcgcttattagatgacacaaagatattgaatctagagaagcttacttgggattctgcgcctcctaaagtttgcccatcaccaaacggatgttcgatgaagttgccagcctgcaaaggtcattgcctggttccttggggaaatagtgtcatccttgtcggaggtaaaactgagcctgcttctgatcatttatcagtatggactttcaatacagaaacagagctttggtcacttattgaagccaagggtgatatccctctcgaagcggacacacggtgattagagctggtgctacattgatactttttggcggtgaggacacaaaaggaaagaaacggcatgaccttcacatgtttgatctgaagtcatcaacatggcttccattgaactataaaggcactggaccttctccaagatccaatcatattgctacactgtatgatgatagggtccttttaatttttggaggccactcaaaatctaagacacttaatgacttgtattctttggatttcgatacaatggtttggtcaagagtgaagacccatggtcctcacccatcacctcgagctggttgcagcggaactctctgtggaactaagtggtacatagctggcggcgcaagcaagaaaaaacgacatgctgaaacttgggtttttgatgttctacaatgtaaatggtctgtttgtgtagtgccccctagttcatcgattactacaaaaaaaggttttagcatggttcctttctaccacaaggacaagattgctcttattgcatttggaggaaacaaaaaagagccatgcaacaaggttgaagtattagtggtactgcaaaatgagcattcttttagttggcgctcagccccagaagtggacaccatggtgtatgagtattctccaagcaataaggagcttgctgatcatctccacaaatgtgcccccttgtactctaatagttccatcgcaagttggatcacgcagaagagtgcagcctaggtcagaaactgcagaaaccaatcgatgatgacagatatgatgacgtagatgactcttcttcatgccaagatagcactccaaaagggccctacagcaaaaggacagggcctggttttcagaatggcgcggaaaacatggtgactggaggatcaaaagtgagaaggatagctagatgctcttcagatgttggccagagccacttgtacaacacaaaaatagcagacttgatcagaagaaacaccacgctcgaagaccagcttgcgaccgcactggcaagcaaagatcagctagacaagagcttagcatcggtcattcacagcagaggacagctggagaagatgcttgccaacaaagataaggaggctgagatgctgaaagagaagatagcatgcttagagctggcgcaagaagagtcgaacagcctctcgaacacagtgcacgctgataatgtgcgcctggagcgtgaagtggcgttcctgaaggccgtcacaggcgaaacccagaaggagctgcattccactcgtagagttttagcaggggaacagtcgcgcgcgttccagctccaggttgaagtgttccatctcaagcagaggctgcagatactggagggaagatcaggaacacccaacaaacaaccgctataggctatagtggtcacatttctacatttctgcacatcgatcgttgcaagtttgcaaccccccaccccccaatggtatggtaaaactataaatagctgacggattgaaccatgctaatatgtgtagatattgatctgtaatttgcagggacatggtaaaaaaataaaaatgtgcaagctctacctgaatgtgtcaaa

SEQ ID NO: 15992 - DNA, 675 bp, Zea Mays
ctttccggtatttgggtgctttgcaacgattgcaacaaggtctcagaggtgaactttcacgtgattggccacaagtgcagccactgcagatcgtacaacacccgaacaacatcgcgccctgcagatttatccggaagcagctcaccttcaacagactcatccgacaacaacatatagagaagaaaccattgacagagccaatatgattgaagaaccggaggaggaaacattgtttcggggcgtgcgtgcttgccaaacttgaagactcccagccgtttattggccctcatcttgtctagattcagttcattccatgagtctttgctgttgtggcaacttccagcttgcgcatcgctgggtcaacaacccacatggccggcgtagctgtccctttgaatcttgttcgcagccgtgattttatcactgtggatgaaacgtaatcacatacttactgtaatctactatggttgaagatgtgtgcccccctgactcatgccttgtgtgcttgtgctgaactgtttatgaattcccatgctgttccgtaacactatattgccatttgtgtttccttatctgtcaagtaccgccaagtgtgcggtgaaattgtaattatttgcaatgaatagaatcttatatctatacctaataataaagactcaacatttctacggtgtt

SEQ ID NO: 15993 - DNA, 1583 bp, Zea Mays
aggaaactaatttctctgctgcaatggcattggaagaagggcacagttagcaatcaaagcggtgggcctccacgcctccatgtcccatgacgtcgctactcttccgggatggaccaataacattttatatctggacgccccttatcgccctcgttatttacatctctgccaccctcctctccgccgtcgccgccgccgccggggatggggggagcgcaattccccggcgacaacgacgtcgcggaagtagacgcggcccgcgacggagaggtggaccgccgtgacgtgggcaagatgaagcacgggtgcgagcattaccggcggaggtgcaagatcgtggcaccgtgctgcaaccaggtgttcccctgccgccactgccacaacgaggctacggcttccggagataggcatacaatatgtcgtcaggatgttgaaaagtagtttgcctactctgtgaaacaaaacagccggtgtcacaagtgtgcataagctgtggagtcaatatgggagagtacttttgtgatatatgcaaattttatgatgatgatacagacaaagggcagtaccattgcatcgattgtggcatatgcagggttggtggcaaggaaaacttcttccactgtgtgaagtgtggatcctgctattctgttatactccgtgataaccatcagtgtgtggagaactcaatgaggcagaattgcccaatctgttatgagtatctatttgactcattacaaggaacaagagttcttaactgtggacacacaatgcacttgacatgttttgaagaaatggtggcgcataacaaatacacttgtccaatatgctctaaaacagctcttgatttgacacatcattgggaaatgttggatcaagagatcgaagccacgatcatgcctcttgtgtatcgctacaagatttgggtgctttgcaacgattgcaacaaggtctcagaggtgaactttcacgtgattggccacaagtgcagccactgcagatcgtacaacacccgaacaacatcgcgccctgcagatttatccggaagcagctcaccttcaacagactcatccgacaacaacatatagagaagaaaccattgacagagccaatatgattgaagaaccggaggaggaaacattgtttcggggcgtgcgtgcttgccaaacttgaagactcccagccgtttattggccctcatcttgtctagattcagttcattccatgagtctttgctgttgtggcaacttccagcttgcgcatcgctgggtcaacaacccacatggccggcgtagctgtccctttgaatcttgttcgcagccgtgattttatcactgtggatgaaacgtaatcacatacttactgtaatctactatggttgaagatgtgtgcccccctgactcatgccttgtgtgcttgtgctgaactgtttatgaattcccatgctgttccgtaacactatattgccatttgtgtttccttatctgtcaagtaccgccaagtgtgcggtgaaattgtaattatttgcaatgaatagaatcttatatctatacctaataataaagactcaacatttctacggtgtt

SEQ ID NO: 15994 - DNA, 5816 bp, Zea Mays
catccagtaaatttggttcgtgtgcatcaaacagttgcttctgtaggacctgtgcagcagtcatctcatggatcacgtcatctgccaaaagtgacagagcaaattcttttcatgctcaaacgcccaacaagaagaatcatctcagtaccagacccaatattttgttcactcaagagagacaaaaagaaactcaaggaataaaatatggataacgatcaaatgatcaatgatcaaccataagctatccatgcacatgtgaccgaaaaacatcacaatcattttttgctttgcatgcatatgatgagaatctgaaggttatcaaagtaccagtaaaccaagataatatgaacacaataattatatatgtttttaaagtggattaataagaacattgatattgcactatacaggccacattatcaacattttgtaaaaaccaaggttcgaaaaaacacaattaaacggagattaatctcgattaaacgctaacgaaggtctagtgtctcgtttatggactaggcgcagtattaggcgctgggcgcgcctagacacggtgtgcacgcgctaggcgccgtgtagttaatatctagttatttacttatcctaatgtgtgtggaccataaaacaattattgtgtgctgtactgctatttaatttgtggaccattaaggcatgtgatgaactgtgagtgttttctgtatttcttgtgatcctttgacttgtgatgttgccctgttgtttgcaagcttggctgtgcatgtacaatattgagctgcccctcagatgagtttctactctttccaaattatctgattgtatagttttcagattattaacttgtctctctttgatgatcagctgctgttggaagcaacttgcaagaagccaaggaggaaagcaacttatgtaaaaaataaatgtgcggaacagtaaaaggtaggttcactagtatcactacttagtagttgtgttattattacttagtacttagttactcactgctgatcttgctttctgcagcacaaaaattaaaaaacaaacgattaatcacgcttaatctacgtttaatcttcctagacgctagtcagtaggataacgtgtgactagcgcctaggttttcttgaaccttggtaaaaacaaatccagaaacctgaaagcagtaaaagacaaagtatttatggccctacaaaggcatttctacttcagaacataaaataaacatgatactgaaaacagtacatacctgcactgaggagctgaatcaaatataatgaaatccagtaacagattaaacggtcttttcaatccatagaaggtttgtatataaataatatttcatttcaaagctcccttgtattgtattattcttttctagattttattatttctccttctctttgcaaggatctagtaatatttattatttttgcaacatatccaagttacaaataagaatatatagaagttgcactgtgttctagtaaaataaaagataaggtgcaccattctataatttatcaattttattgatggatatcaaatttccatcctaactgacaactgtgcaatataattttctctttatttactctggacacaggtctcaaagcctctattaaagtattatccatgaaagtcacaggctaaatggaaagtcaaaagaggttaaaatcttaactatactttacctggtgttgcgtgattttccatcattacaagcttcaacacagaagacattttaaaattccccaccatgcaaaccattttggaaatgaacctacaatgcagtcacctgtgttacatggcataagtgacatataatcaaaacatctatagtagtaggatctaagttacattattgccaggcctaattgttatcacataatacagaatggaaatgacatagctaccaaaattctttgcaaacatgcaattgctaaaatgtcaaccaaaaatctctacccatatggctttattattacagccaatgtcaattgcatctctcttttttctgttttgagagcggcctctcattttgactattgaaagcagatgcatctaaaaccaaaccaattaggaccttatgttctgtgaaaagaaagatacattatgattaaaaaaatcataaggcctcataatacaatataaggggaggagagagactaatagcgtgttggttcgaggaatgatcgaatgatgtagtctatcattttctcactcatcacttttttgtttggtttgtggaatggaatgagttgatccatcactatttcattccacataggctaataattagtaataatatgagtaatgtgttcattccaccaaatttgtgaaatgaactaaatttgtggaatggactcatgatgcaccagcactacatcatctagaatagattgactcttcaaaccaaacacccaccaaataacagcctgcatgaatataactatctctgcccattaaggttttaatgattgatcccaatgataccctactgtgaggtttggagaagaccatgcagcaatattctttcgagcatttgccacgacaaacgagcaaccatcaacataaactccatgcagctgcaacacaaattgataatcatgtgcacacaaattgcaaaattaaaataatccatgcaaatttgaatgtaacctaaccccaaaactcaaataacaagcagtcaagcatagctgcacacaaatgttacagcttgacactacagaatactacagttcctcaacatcataatgaaatatgtgacctgccccagaaaagacctgtgctctgggcccacttgtgacccagtgattataaatgtttattttgaatggcacatcaggccctcaattcaatctcttcaagccttgaaagcgaaaccagtaaagtacctaaacaactgctgaaacaatggctgttcaaccaccacattctaaactccagcatttgtattaccacaaattaaacagcacaaatctgacatagcattggtactgcaagttgtgatattagtattacccatacactacggagcgtccccgaattcaaaaccagttatattttagagttaaaaaaaacaatgctgtgcacattactaaccagtaatccaccgtcacaaacaaatgctaccatttaccattaggcaaacacaccctatgtccactataacatgaaaaaacatttctgaatagacttcacattcctaaccaaaaaaatggggaaaaaggtctagaggcattgcaaagattccacaaatcagcacctcgacagcagattcccactggcccaaaaaattagatcgaataatgacagacaccgacgggaaaaacaccgaaaattatgtttacaagtgtctcacctggagcgcgcgcttccctcggaaaaaaatccagacaaaacaatctcgaaatccagttaaccaatcaaccccacgccgccgccggctgcgcctcgttggcctcgccccacgtcacatgccaaattccgcggcgagaggaagccccgagcaggaggccacgcgacgagcaggcgggacgcgcgggaggaagggagacacagaggagggagcgagaacctccggcgtccggcctcgtcggctccccagcgatcaccggcggcgagggggcgcggcgatcggacggagcaggggggcggagggcggagccgagcgagcgccaagcgttgcagatttgggggccgggcctcgggctcgcccggttcttgtagtgaccaaaccggcccgtgaaccctgtgcccgggcccgacccgcggctgaaccagcacgcggcagaggcatctcgtaagcagcagcagagagctgaaattgagagaggcgaggggcctttgcggcggctgcggagacggcgatggcaggcgcggaggggagaggtccgaggcggagccgcgtggcgttcgtgctggtggacgggatcggggacgtgagcgttccgtcgctgggcgggcgtacgccactggaggcggcgtgcacgccgcggctggacgcggtggcggcggtcggggtgaccgggctcatggaccccgtggagccggggctcgcctgcggcagcgatacggcgcacctatcgctcctcgggtacgaccctcgggtgtactaccgcggccgcggcgcgttcgagtccatgggcgccgggctcgccatggcgcccggcgacatcgccttcaagtcaaacttcgctacactggatgagagcactggagttatcatcagcaggagggcggatcggcattttgaagaggaaggccctatcctctgtgcggcgttggatgggatgaggcttccgtcatttcctgaatatgaaattagaatatgctactgagcacagatgtggtgtggttgtcaaaggaccaaagctgagtgggaacatttctggaaccgatcccttgaaggacaaccgcttgcatctgaaggctgaaccgttggatgactcgcaagaagctaaaaacagtgcagctgtgatcaatgagctttctaaagagataacgcacatactggtttctcaccccatcaatgcacagcgtgcagctgaggggaagaacatcgcaaacgttgtgctgttgcgaggctgtggtattcggattgaggttagtgtgaaaattttgatagtagacctatatgatactgcagtagcaatatgaaagattagtttttgactttcaagaactttcacaaatgcattctctggatttggcatgcttcgtaaggtgcctgcctttgaaaccaagcatggacttgcaccttgcatggttgctcctactaagatcatagctggcttggggttgtcactggggattgatatccttgaagcacctggagcaactggagattaccgtactctcttaacttctaaagctaaagctatagccaaggcattatcttcccctatgggtacaccacctcgtgtttttgtgcctggagaggatgaatacaaagctggaaaagaaaatggatatgactttgggttcctgcacataaaggccattgatgatgctggtcatgataaggctgtcaagttaaaggtacggggtctagaagctgttgatcgagcttttggtcagcttgcaaggcttctttgggaagctgaaaatgccggacactaccagtactttctgtgtgtcactggagaccattctactcctgttgaatatggtgaccatagcttcgaacccgtcccatttgcaatatgcagactgagagattatgcaggagccgttggggttgataatattataaatacacagcttgatgctttccccctcccttcagtaaaatccggagaagatttgcttgacaatatagaatcacttgatcacaagcctgatcaacttaaagctttcagtggtgacactgtgtgtgagttcaacgagattgccactgcgaggggctgccttggacgattccctgggagtgagatgatgggcattattaaaaagtttatcaaggcgaagaatgattaatgctggttgaagtgctaaccttttgcgtgatctgtagaccataaggcttttctatgtaataaacttgttggcgcttgtttggacaaacactaaccatccctaggtcgccctcgtagtgagtccggaccttgaagatgatccctaggtttcgcccacagatggtcgagaggagggagataataaataatatgtaagacaaataacactacctcgaatgtgatcttgaaagaaaaccttggaaccaagagtatgattacttgatgtaaaaaaactcgacctgtgaggggtaagacagcccccgagaattgtaacaagaagacattctcacatagaccaagaaa

SEQ ID NO: 15995 - DNA, 5696 bp, Zea Mays
catccagtaaatttggttcgtgtgcatcaaacagttgcttctgtaggacctgtgcagcagtcatctcatggatcacgtcatctgccaaaagtgacagagcaaattcttttcatgctcaaacgcccaacaagaagaatcatctcagtaccagacccaatattttgttcactcaagagagacaaaaagaaactcaaggaataaaatatggataacgatcaaatgatcaatgatcaaccataagctatccatgcacatgtgaccgaaaaacatcacaatcattttttgctttgcatgcatatgatgagaatctgaaggttatcaaagtaccagtaaaccaagataatatgaacacaataattatatatgtttttaaagtggattaataagaacattgatattgcactatacaggccacattatcaacattttgtaaaaaccaaggttcgaaaaaacacaattaaacggagattaatctcgattaaacgctaacgaaggtctagtgtctcgtttatggactaggcgcagtattaggcgctgggcgcgcctagacacggtgtgcacgcgctaggcgccgtgtagttaatatctagttatttacttatcctaatgtgtgtggaccataaaacaattattgtgtgctgtactgctatttaatttgtggaccattaaggcatgtgatgaactgtgagtgttttctgtatttcttgtgatcctttgacttgtgatgttgccctgttgtttgcaagcttggctgtgcatgtacaatattgagctgcccctcagatgagtttctactctttccaaattatctgattgtatagttttcagattattaacttgtctctctttgatgatcagctgctgttggaagcaacttgcaagaagccaaggaggaaagcaacttatgtaaaaaataaatgtgcggaacagtaaaaggtaggttcactagtatcactacttagtagttgtgttattattacttagtacttagttactcactgctgatcttgctttctgcagcacaaaaattaaaaaacaaacgattaatcacgcttaatctacgtttaatcttcctagacgctagtcagtaggataacgtgtgactagcgcctaggttttcttgaaccttggtaaaaacaaatccagaaacctgaaagcagtaaaagacaaagtatttatggccctacaaaggcatttctacttcagaacataaaataaacatgatactgaaaacagtacatacctgcactgaggagctgaatcaaatataatgaaatccagtaacagattaaacggtcttttcaatccatagaaggtttgtatataaataatatttcatttcaaagctcccttgtattgtattattcttttctagattttattatttctccttctctttgcaaggatctagtaatatttattatttttgcaacatatccaagttacaaataagaatatatagaagttgcactgtgttctagtaaaataaaagataaggtgcaccattctataatttatcaattttattgatggatatcaaatttccatcctaactgacaactgtgcaatataattttctctttatttactctggacacaggtctcaaagcctctattaaagtattatccatgaaagtcacaggctaaatggaaagtcaaaagaggttaaaatcttaactatactttacctggtgttgcgtgattttccatcattacaagcttcaacacagaagacattttaaaattccccaccatgcaaaccattttggaaatgaacctacaatgcagtcacctgtgttacatggcataagtgacatataatcaaaacatctatagtagtaggatctaagttacattattgccaggcctaattgttatcacataatacagaatggaaatgacatagctaccaaaattctttgcaaacatgcaattgctaaaatgtcaaccaaaaatctctacccatatggctttattattacagccaatgtcaattgcatctctcttttttctgttttgagagcggcctctcattttgactattgaaagcagatgcatctaaaaccaaaccaattaggaccttatgttctgtgaaaagaaagatacattatgattaaaaaaatcataaggcctcataatacaatataaggggaggagagagactaatagcgtgttggttcgaggaatgatcgaatgatgtagtctatcattttctcactcatcacttttttgtttggtttgtggaatggaatgagttgatccatcactatttcattccacataggctaataattagtaataatatgagtaatgtgttcattccaccaaatttgtgaaatgaactaaatttgtggaatggactcatgatgcaccagcactacatcatctagaatagattgactcttcaaaccaaacacccaccaaataacagcctgcatgaatataactatctctgcccattaaggttttaatgattgatcccaatgataccctactgtgaggtttggagaagaccatgcagcaatattctttcgagcatttgccacgacaaacgagcaaccatcaacataaactccatgcagctgcaacacaaattgataatcatgtgcacacaaattgcaaaattaaaataatccatgcaaatttgaatgtaacctaaccccaaaactcaaataacaagcagtcaagcatagctgcacacaaatgttacagcttgacactacagaatactacagttcctcaacatcataatgaaatatgtgacctgccccagaaaagacctgtgctctgggcccacttgtgacccagtgattataaatgtttattttgaatggcacatcaggccctcaattcaatctcttcaagccttgaaagcgaaaccagtaaagtacctaaacaactgctgaaacaatggctgttcaaccaccacattctaaactccagcatttgtattaccacaaattaaacagcacaaatctgacatagcattggtactgcaagttgtgatattagtattacccatacactacggagcgtccccgaattcaaaaccagttatattttagagttaaaaaaaacaatgctgtgcacattactaaccagtaatccaccgtcacaaacaaatgctaccatttaccattaggcaaacacaccctatgtccactataacatgaaaaaacatttctgaatagacttcacattcctaaccaaaaaaatggggaaaaaggtctagaggcattgcaaagattccacaaatcagcacctcgacagcagattcccactggcccaaaaaattagatcgaataatgacagacaccgacgggaaaaacaccgaaaattatgtttacaagtgtctcacctggagcgcgcgcttccctcggaaaaaaatccagacaaaacaatctcgaaatccagttaaccaatcaaccccacgccgccgccggctgcgcctcgttggcctcgccccacgtcacatgccaaattccgcggcgagaggaagccccgagcaggaggccacgcgacgagcaggcgggacgcgcgggaggaagggagacacagaggagggagcgagaacctccggcgtccggcctcgtcggctccccagcgatcaccggcggcgagggggcgcggcgatcggacggagcaggggggcggagggcggagccgagcgagcgccaagcgttgcagatttgggggccgggcctcgggctcgcccggttcttgtagtgaccaaaccggcccgtgaaccctgtgcccgggcccgacccgcggctgaaccagcacgcggcagaggcatctcgtaagcagcagcagagagctgaaattgagagaggcgaggggcctttgcggcggctgcggagacggcgatggcaggcgcggaggggagaggtccgaggcggagccgcgtggcgttcgtgctggtggacgggatcggggacgtgagcgttccgtcgctgggcgggcgtacgccactggaggcggcgtgcacgccgcggctggacgcggtggcggcggtcggggtgaccgggctcatggaccccgtggagccggggctcgcctgcggcagcgatacggcgcacctatcgctcctcgggtacgaccctcgggtgtactaccgcggccgcggcgcgttcgagtccatgggcgccgggctcgccatggcgcccggcgacatcgccttcaagtcaaacttcgctacactggatgagagcactggagttatcatcagcaggagggcggatcggcattttgaagaggaaggccctatcctctgtgcggcgttggatgggatgaggcttccgtcatttcctgaatatgaaattagaatatgctactgagcacagatgtggtgtggttgtcaaaggaccaaagctgagtgggaacatttctggaaccgatcccttgaaggacaaccgcttgcatctgaaggctgaaccgttggatgactcgcaagaagctaaaaacagtgcagctgtgatcaatgagctttctaaagagataacgcacatactggtttctcaccccatcaatgcacagcgtgcagctgaggggaagaacatcgcaaacgttgtgctgttgcgaggctgtggtattcggattgaggtgcctgcctttgaaaccaagcatggacttgcaccttgcatggttgctcctactaagatcatagctggcttggggttgtcactggggattgatatccttgaagcacctggagcaactggagattaccgtactctcttaacttctaaagctaaagctatagccaaggcattatcttcccctatgggtacaccacctcgtgtttttgtgcctggagaggatgaatacaaagctggaaaagaaaatggatatgactttgggttcctgcacataaaggccattgatgatgctggtcatgataaggctgtcaagttaaaggtacggggtctagaagctgttgatcgagcttttggtcagcttgcaaggcttctttgggaagctgaaaatgccggacactaccagtactttctgtgtgtcactggagaccattctactcctgttgaatatggtgaccatagcttcgaacccgtcccatttgcaatatgcagactgagagattatgcaggagccgttggggttgataatattataaatacacagcttgatgctttccccctcccttcagtaaaatccggagaagatttgcttgacaatatagaatcacttgatcacaagcctgatcaacttaaagctttcagtggtgacactgtgtgtgagttcaacgagattgccactgcgaggggctgccttggacgattccctgggagtgagatgatgggcattattaaaaagtttatcaaggcgaagaatgattaatgctggttgaagtgctaaccttttgcgtgatctgtagaccataaggcttttctatgtaataaacttgttggcgcttgtttggacaaacactaaccatccctaggtcgccctcgtagtgagtccggaccttgaagatgatccctaggtttcgcccacagatggtcgagaggagggagataataaataatatgtaagacaaataacactacctcgaatgtgatcttgaaagaaaaccttggaaccaagagtatgattacttgatgtaaaaaaactcgacctgtgaggggtaagacagcccccgagaattgtaacaagaagacattctcacatagaccaagaaa

SEQ ID NO: 15996 - DNA, 2385 bp, Zea Mays
tgagtgtcctattcatccttcttggagctgttccgaggggttgcccgttgaggaggggttaggcttcgtcatgtcgaagtcggacctggatgatctgcttcttcaggctgccggccggacggggaagaaccagtcccggccgagcaatccgcggtggaactctggggggagcggctccgacggcttcgacgacgacgacgacgacgactctgacgccgcgccgacctactcgaggaagaagccttcgtcgcaggtaccgctcaagaagcggcacaagccggagaagggcggccggcgtggcggtggtgggtggaacgacgaggatgatgaggacgaggatgggcgtcggagtggcggggaggactcggacagcgccccttcagtggggagtgacctatacaaggatgaagacgacaaggagcgtctggagaacatgtctgagttgcaaagggagttgatcctagctgagcggggcacccgcctcgacgactacaagctcaagcagcgggcacgtgcgtcctcctccaagacggacaaggtgggtgcgccaaaggatagcagcccacccccaccgcctagccggatgcggtcttctacccgaactgacaagtctgggtccgccgctaagagcgcgctggacgagctgcgggcaaagcagcggatgcggcaacaagctccggaggcacgcaggatcacggacctactcccacatagtggctcatccattaggcgcagggctgggagcccaccaagtgatgggagcaacgatggcaataacagggggaggatgaatgaccatgggaggattgctggtgatggcagggatgatgaatttgatgaatcgccgagtaggcttgatccactcaagtttgatgatgtgaagagtattaccctcaggaggtcaaaactggtgaaatggttcatggagccattctttgatgatctaatttctggttgttttgtgcggctaggtattggtaagacaaagaatgggacccccagttacaggctgtgcatagtgaggaacgtggatgcaagcgatccagatcggaattacaaactggaaaactactcgacatgcaaatatctcaatgttgtgtgggatagtgaggctaatgctgctcggtggcagatgactcaggtatcggactccccacccaacgaagaagagttcaaggactggctgcaagcggcagagaagaatggtgcacgcataccgactcggcaggaagtcctggataagaaagaagccattcagaatgcctataactttgtgtattcagcagcaactgtacaacagatgctgcaagagaaatcagctgtgagacgacctatcaatattgctgctgagaaggatcggttgaggagtgaattggagatggctcttagccgtaggaacgaacatgaagctgagaggattcgtacgaagctgaaaaatctgcaaaacagggcacaaccagtgtcaaaagataataaggctgcaaagttggaggctatgaaccggaagaaccgcgctgataacttcaagaacgcttcagaactgaaacctgtaaatacatctttgaaggcaggagaagctggttatgaccctttctcgaggaggtggacaaggtcaagaaattattatgcatcgaagccaggaggaaataatgttgaagaaactgccaatgggtccagtagtaatgtagcgcctagcaatgaagatacaaagagcaaggctcaaactggtacagcagccacaacagcagctcaagtggcagcagctgatgccgggaagctcattgataccaatgcaccagtggatctgggaacagaatcaaatatgctgcatacatttgagcttcctatatcattgtctgctctgcaagaatttggtggagccaagggcctgtttgatggttacatggcaaggaggcagaagatagaagctacaatggggtacaaagtgcctgacaacgatggaaggaggcatgctttaaccctgagtgtgagtgattacaaaaggcgacggggtctcctctgaagtgtatctgtgattgtgctgggtgctcagcggattcaaatatctgcctggcttcagcgcctctgcattgctgtgacaattgtccagatcatctgcattttgccttatcttcctataagtaacataaaacatgcgataaaacatgcggagtatacaatttctttcataaatattacctgatgtatgactgattatgttactgacatcatgtttatatccgtggattgtgtcgttgtcatcatcatcatcgtatccttgttagctgcaaaaactggattccataattagttcaattaaaataaatgcagctttcatttttcggattcatgttttacatggttggatgtgtgtgtgatcatctt

SEQ ID NO: 15997 - DNA, 2240 bp, Zea Mays
taataattgtcttctcccacttcgaggcggctagggccagcgcatccttctcctcttctgtccaggcggcgtctctgtcgatcaattgtgcgccgccttcgcctgcatagcccggagagagccgtcatccttacctgcgccgaccgacgcctctgcagcttctccaggggttgcccgttgaggaggggttaggcttcgtcatgtcgaagtcggacctggatgatctgcttcttcaggctgccggccggacggggaagaaccagtcccggccgagcaatccgcggtggaactctggggggagcggctccgacggcttcgacgacgacgacgacgacgactctgacgccgcgccgacctactcgaggaagaagccttcgtcgcaggtaccgctcaagaagcggcacaagccggagaagggcggccggcgtggcggtggtgggtggaacgacgaggatgatgaggacgaggatgggcgtcggagtggcggggaggactcggacagcgccccttcagtggggagtgacctatacaaggatgaagacgacaaggagcgtctggagaacatgtctgagttgcaaagggagttgatcctagctgagcggggcacccgcctcgacgactacaagctcaagcagcgggcacgtgcgtcctcctccaagacggacaaggtgggtgcgccaaaggatagcagcccacccccaccgcctagccggatgcggtcttctacccgaactgacaagtctgggtccgccgctaagagcgcgctggacgagctgcgggcaaagcagcggatgcggcaacaagctccggaggcacgcaggatcacggacctactcccacatagtggctcatccattaggcgcagggctgggagcccaccaagtgatgggagcaacgatggcaataacagggggaggatgaatgaccatgggaggattgctggtgatggcagggatgatgaatttgatgaatcgccgagtaggcttgatccactcaagtttgatgatgtgaagagtattaccctcaggaggtcaaaactggtgaaatggttcatggagccattctttgatgatctaatttctggttgttttgtgcggctaggtattggtaagacaaagaatgggacccccagttacaggctgtgctgtacaacagatgctgcaagagaaatcagctgtgagacgacctatcaatattgctgctgagaaggatcggttgaggagtgaattggagatggctcttagccgtaggaacgaacatgaagctgagaggattcgtacgaagctgaaaaatctgcaaaacagggcacaaccagtgtcaaaagataataaggctgcaaagttggaggctatgaaccggaagaaccgcgctgataacttcaagaacgcttcagaactgaaacctgtaaatacatctttgaaggcaggagaagctggttatgaccctttctcgaggaggtggacaaggtcaagaaattattatgcatcgaagccaggaggaaataatgttgaagaaactgccaatgggtccagtagtaatgtagcgcctagcaatgaagatacaaagagcaaggctcaaactggtacagcagccacaacagcagctcaagtggcagcagctgatgccgggaagctcattgataccaatgcaccagtggatctgggaacagaatcaaatatgctgcatacatttgagcttcctatatcattgtctgctctgcaagaatttggtggagccaagggcctgtttgatggttacatggcaaggaggcagaagatagaagctacaatggggtacaaagtgcctgacaacgatggaaggaggcatgctttaaccctgagtgtgagtgattacaaaaggcgacggggtctcctctgaagtgtatctgtgattgtgctgggtgctcagcggattcaaatatctgcctggcttcagcgcctctgcattgctgtgacaattgtccagatcatctgcattttgccttatcttcctataagtaacataaaacatgcgataaaacatgcggagtatacaatttctttcataaatattacctgatgtatgactgattatgttactgacatcatgtttatatccgtggattgtgtcgttgtcatcatcatcatcgtatccttgttagctgcaaaaactggattccataattagttcaattaaaataaatgcagctttcatttttcggattcatgttttacatggttggatgtgtgtgtgatcatctt

SEQ ID NO: 15998 - DNA, 2318 bp, Zea Mays
atgagcttctcgataaggtccgcagcgtcctgcactgttgcgatgtcctgtgcgcttgtttcgtcgactgttatgttgaacgcctcctcgaggcccatcacaatctcgaccttatccagcgaatcagcgccaagttcagcgaattttgattcggcagtgatggcggtcccatcgggaagagccagctgctccttcactatactgcaaaccttgtccactgtctctttcttagccgaacagcaaatcttaaacccaagagacctttgtcttgagcggatggatacagaagtcatcctgtggctctggaaggaaaccgaggtccagcttggaatcacatttgtgacctgaaataattggattgttcatatgcacagaacaacatagagtacaatattgagagaatggcaattgacactgaaacaagattgacatagcgcatgtagtgcaaatacccttttctaaaaaaaacttcaaagctgctcctactctcatgctggatgttcaatgaaatcaaaaccaaacaacagatttgggacgggaagtccttcagaaattgaaaataaatactaaaatgtgtacattaagacagcatatatagtgaagccaacacatcgcacatattatatcagtaacatgatctaagtctgtgattcctatgaagtatgttcacctaaactgagagcaagctggtcgctatttcaggtatcatacattatgtttttttatatttaagaaaaatatagatatatatatagacaaactatgagttgaaaaaacttctacaaaattaactgcattgcctcctggcaaggaactagcaccagaacttctgaggaactgatctggtcagggattttgaaatgcctaaactaggacatcagttcagtaatatacaaggatcaagatgtagtatagcttttgaaaccaggtctaaaatccagatttaagtgtgtggagcccagctatgcgttttgaaatcccatgacatgatgcaggacattcagaccaggcaagaaaacacatggcaacatacgcttgtaacaagaaagctggcattttctattgggctagcacatcaacatcgatgtacagaagtaaagcactggtaaagaaatgctccttaattaacttgagcaagatctgaggcatgtgctgtcgcttgctgtgctagtgtcacccctggacggccggacctctcctgctccttttgggatccagcaaaattcactaccagagggcagatgttcatttttaaaataaaccatatgaaccaccgagctgggtcggcgcccgtttctttagtcacaacagttttggaatctttgcaggttgcactaaaatatgcgaaactgcccccatctgttcatcattcatcgtgatagatggtacccatagctttgtatgctcaacaagtactaatcataggcaaaatttgccaaaaagaacaaggcaactttgttcgttcaaaaaagattacggggcgtttggatcccttcattttagaggaattagaattcatttaataaaataacttatttagtttggaatttgatattccaccacttttccaagttcagatataagcatatctcaaattcaaggggtagagggtgggaaatgattttatgcattattagaattgatttctaatctataacttacatgacactcatcgcctcactcctctataataaaaatgtagcacataaatatttccgatatcttgctaataatagtatacaaatatattttgcataaaaccgaattagcttaattgatatatgcctaaattactagtattagaatggaattaaattccaatgatccaaacggggcgttagggaacttttacaaaagaagatccccctgaatcaagcacggaagaaatgctcacagagaagttcttaagctgttgagtgagctcgaatctaatcacagtcaagcaactgaatcgaaaccaacaaagcatcccagcatcaccagaaactacggctacggcatcagtgatcagtccatccatccatgatcccatctaagcgagccagcccaaaaacccgacaaatcacaaaccaaacgccacgaatcactgacggcggcacgctcctcgcatcaggtttcaagaaacagtggcagcctcgtagaccaagctagctaccaggtcaaggcaagaataagtccaagaaatgcggacctggcgccgggcggcggccggcgagaaggaggcggcgagagagtgcgccatgctcgctctcggatcgggggtgacggcgggagtaagaaggctagctgaagcttgtgggagtggaaggcggccgtga

SEQ ID NO: 15999 - DNA, 1358 bp, Zea Mays
tgactatgttggtgctatatctgctattgaggatggaataaaagaatcagaaccaacagatccagacaaatcaccactggctggaaggctttttgttgttataggggctggtggtgcgggaaaagcactagcatatggggcaaaagagaaaggagcaagagttgtaattgcaaaccgtacctttgcacgagcacaagaacttgccaacttaattggtgggcctgcattgactcttgcggatttggaaaactaccatccagaggaagggatgattcttgcaaatacaacagccattggaatgcatccaaatgtgaatgaaactcctctatctaagcaagcactcagatcttatgctgttgtgtttgatgcggtctacacaccaaaagagaccagacttctccgagaagctgcagaatgtggagccacagttgttagtggtctggagatgtttatacgccaagctatgggccagtttgagcatttcacgggcatgccagctccagatagcttgatgcgtgatattgttctgacaaagacatagtgaggtttgtccaaagagcaagcttcccttccatcgtaatttctgcgcaattgattccagttgtgtcccctcctcgtccttcccgcatcttcctcaacctgtagaatccacatttttttttatctcaggtgtggacataggtttcatcttataacatgtttcttattacctaccaagattcagtttcattctctttgaagtatttgaatgttgtttattcagcaaacaatacaccatttcaacaatgtttaagagttcttactcctctcatcaaggctgcaaggattgttagatctttgatttgtgcaaacagtgtgtgacgcagtcagttttacgtggccaaagtatgcgcatccactgactaatcataatgaatggcagctacttctacttaatagttcttcccttactttcagtggacgattacaaattccgagcaattgcaagttcattggacaatcctaacaccatgaagcctcgtctgtgagagattcatccatgcccacaaacttccttgtttttcctttttagattcggattcagtgatcagtttgcctctcagccattgtaaattaatttgatgttccgagctgaaacattttggtgtgccttatttgtatcagcatgaacagcagtcatcgtgggtttgaatcagtctcttagcatttgcgttccaagacttgtctcgatttgtcccttttctaggtatcactaaggacttatttagttgtgtctggatcaaaacgatcaaaacgcggattgaatttccttctatttaattttgatttagaccccgttcggcaagctaagattcaag

SEQ ID NO: 16000 - DNA, 963 bp, Zea Mays
cttgttggctataatactgactatgttggtgctatatctgctattgaggatggaataaaagaatcagaaccaacagatccagacaaatcaccactggctggaaggctttttgttgttataggggctggtggtgcgggaaaagcactagcatatggggcaaaagagaaaggagcaagagttgtaattgcaaaccgtacctttgcacgagcacaagaacttgccaacttaattggtgggcctgcattgactcttgcggatttggaaaactaccatccagaggaagggatgattcttgcaaatacaacagccattggaatgcatccaaatgtgaatgaaactcctctatctaagcaagcactcagatcttatgctgttgtgtttgatgcggtctacacaccaaaagagaccagacttctccgagaagctgcagaatgtggagccacagttgttagtggtctggagatgtttatacgccaagctatgggccagtttgagcatttcacgggcatgccagctccagatagcttgatgcgtgatattgttctgacaaagacatagtgagtggacgattacaaattccgagcaattgcaagttcattggacaatcctaacaccatgaagcctcgtctgtgagagattcatccatgcccacaaacttccttgtttttcctttttagattcggattcagtgatcagtttgcctctcagccattgtaaattaatttgatgttccgagctgaaacattttggtgtgccttatttgtatcagcatgaacagcagtcatcgtgggtttgaatcagtctcttagcatttgcgttccaagacttgtctcgatttgtcccttttctaggtatcactaaggacttatttagttgtgtctggatcaaaacgatcaaaacgcggattgaatttccttctatttaattttgatttagaccccgttcggcaagctaagattcaag

SEQ ID NO: 16001 - DNA, 962 bp, Zea Mays
gaaagcttgttggctataatactgactatgttggtgctatatctgctattgaggatggaataaaagaaccaacagatccagacaaatcaccactggctggaaggctttttgttgttataggggctggtggtgcgggaaaagcactagcatatggggcaaaagagaaaggagcaagagttgtaattgcaaaccgtacctttgcacgagcacaagaacttgccaacttaattggtgggcctgcattgactcttgcggatttggaaaactaccatccagaggaagggatgattcttgcaaatacaacagccattggaatgcatccaaatgtgaatgaaactcctctatctaagcaagcactcagatcttatgctgttgtgtttgatgcggtctacacaccaaaagagaccagacttctccgagaagctgcagaatgtggagccacagttgttagtggtctggagatgtttatacgccaagctatgggccagtttgagcatttcacgggcatgccagctccagatagcttgatgcgtgatattgttctgacaaagacatagtgagtggacgattacaaattccgagcaattgcaagttcattggacaatcctaacaccatgaagcctcgtctgtgagagattcatccatgcccacaaacttccttgtttttcctttttagattcggattcagtgatcagtttgcctctcagccattgtaaattaatttgatgttccgagctgaaacattttggtgtgccttatttgtatcagcatgaacagcagtcatcgtgggtttgaatcagtctcttagcatttgcgttccaagacttgtctcgatttgtcccttttctaggtatcactaaggacttatttagttgtgtctggatcaaaacgatcaaaacgcggattgaatttccttctatttaattttgatttagaccccgttcggcaagctaagattcaag

SEQ ID NO: 16002 - DNA, 1144 bp, Zea Mays
cccgttgccagggacattggagctgttaacacaattgttagaagacctgatggaaagcttgttggctataatactgactatgttggtgctatatctgctattgaggatggaataaaagaatcagaaccaacagatccagacaaatcaccactggctggaaggctttttgttgttataggggctggtggtgcgggaaaagcactagcatatggggcaaaagagaaaggagcaagagttgtaattgcaaaccgtacctttgcacgagcacaagaacttgccaacttaattggtgggcctgcattgactcttgcggatttggaaaactaccatccagaggaagggatgattcttgcaaatacaacagccattggaatgcatccaaatgtgaatgaaactcctctatctaagcaagcactcagatcttatgctgttgtgtttgatgcggtctacacaccaaaagagaccagacttctccgagaagctgcagaatgtggagccacagttgttagtggtctggagatgtttatacgccaagctatgggccagtttgagcatttcacgggcatgccagctccagatagcttgatgcgtgatattgttctgacaaagacatagtgaggtttgtccaaagagcaagcttcccttccatcgtaatttctgcgcaattgattccagttgtgtcccctcctcgtccttcccgcatcttcctcaacctgtagaatccacatttttttttatctcagtggacgattacaaattccgagcaattgcaagttcattggacaatcctaacaccatgaagcctcgtctgtgagagattcatccatgcccacaaacttccttgtttttcctttttagattcggattcagtgatcagtttgcctctcagccattgtaaattaatttgatgttccgagctgaaacattttggtgtgccttatttgtatcagcatgaacagcagtcatcgtgggtttgaatcagtctcttagcatttgcgttccaagacttgtctcgatttgtcccttttctaggtatcactaaggacttatttagttgtgtctggatcaaaacgatcaaaacgcggattgaatttccttctatttaattttgatttagaccccgttcggcaagctaagattcaag

SEQ ID NO: 16003 - DNA, 1408 bp, Zea Mays
aaccattatgctagaggtcctttcgcaagaaaagcaggtgccaatcattgggctggtgatgaacgacagaggttttatttctcgggttctttgcccaaaatatggtggattccttacttttgggtcactcaagaaaggaaaagagtctgcacctgcacagccaactgctgcagacttgataaatctgtacaatattaggcagatagggccagacactaaggtctttggtataattggtaaaccagttggccatagcaaaagcccaattttgcataatgaagctttcagatctgtgggtttcaacgctgtgtatgtgccatttttggtggatgacttggctaaatttcttgatacatactcttcaccagactttgctggcttcagttgcacaattccacacaaagaagctgctgttaggtgctgtgacgaggtcgatcccgttgccagggacattggagctgttaacacaattgttagaagacctgatggaaagcttgttggctataatactgactatgttggtgctatatctgctattgaggatggaataaaagaatcagaaccaacagatccagacaaatcaccactggctggaaggctttttgttgttataggggctggtggtgcgggaaaagcactagcatatggggcaaaagagaaaggagcaagagttgtaattgcaaaccgtacctttgcacgagcacaagaacttgccaacttaattggtgggcctgcattgactcttgcggatttggaaaactaccatccagaggaagggatgattcttgcaaatacaacagccattggaatgcatccaaatgtgaatgaaactcctctatctaagcaagcactcagatcttatgctgttgtgtttgatgcggtctacacaccaaaagagaccagacttctccgagaagctgcagaatgtggagccacagttgttagtggtctggagatgtttatacgccaagctatgggccagtttgagcatttcacgggcatgccagtggacgattacaaattccgagcaattgcaagttcattggacaatcctaacaccatgaagcctcgtctgtgagagattcatccatgcccacaaacttccttgtttttcctttttagattcggattcagtgatcagtttgcctctcagccattgtaaattaatttgatgttccgagctgaaacattttggtgtgccttatttgtatcagcatgaacagcagtcatcgtgggtttgaatcagtctcttagcatttgcgttccaagacttgtctcgatttgtcccttttctaggtatcactaaggacttatttagttgtgtctggatcaaaacgatcaaaacgcggattgaatttccttctatttaattttgatttagaccccgttcggcaagctaagattcaag

SEQ ID NO: 16004 - DNA, 1414 bp, Zea Mays
aaccattatgctagaggtcctttcgcaagaaaagcaggtgccaatcattgggctggtgatgaacgacagaggttttatttctcgggttctttgcccaaaatatggtggattccttacttttgggtcactcaagaaaggaaaagagtctgcacctgcacagccaactgctgcagacttgataaatctgtacaatattaggcagatagggccagacactaaggtctttggtataattggtaaaccagttggccatagcaaaagcccaattttgcataatgaagctttcagatctgtgggtttcaacgctgtgtatgtgccatttttggtggatgacttggctaaatttcttgatacatactcttcaccagactttgctggcttcagttgcacaattccacacaaagaagctgctgttaggtgctgtgacgaggtcgatcccgttgccagggacattggagctgttaacacaattgttagaagacctgatggaaagcttgttggctataatactgactatgttggtgctatatctgctattgaggatggaataaaagcatcagaatcagaaccaacagatccagacaaatcaccactggctggaaggctttttgttgttataggggctggtggtgcgggaaaagcactagcatatggggcaaaagagaaaggagcaagagttgtaattgcaaaccgtacctttgcacgagcacaagaacttgccaacttaattggtgggcctgcattgactcttgcggatttggaaaactaccatccagaggaagggatgattcttgcaaatacaacagccattggaatgcatccaaatgtgaatgaaactcctctatctaagcaagcactcagatcttatgctgttgtgtttgatgcggtctacacaccaaaagagaccagacttctccgagaagctgcagaatgtggagccacagttgttagtggtctggagatgtttatacgccaagctatgggccagtttgagcatttcacgggcatgccagtggacgattacaaattccgagcaattgcaagttcattggacaatcctaacaccatgaagcctcgtctgtgagagattcatccatgcccacaaacttccttgtttttcctttttagattcggattcagtgatcagtttgcctctcagccattgtaaattaatttgatgttccgagctgaaacattttggtgtgccttatttgtatcagcatgaacagcagtcatcgtgggtttgaatcagtctcttagcatttgcgttccaagacttgtctcgatttgtcccttttctaggtatcactaaggacttatttagttgtgtctggatcaaaacgatcaaaacgcggattgaatttccttctatttaattttgatttagaccccgttcggcaagctaagattcaag

SEQ ID NO: 16005 - DNA, 2167 bp, Zea Mays
caccaaggcaccaacccgacgcaaagccgccggctttccccgatggcgacggcgatgtcagtttcggcggtgtccccgcccgccgcggcggtcacgcggccgcggacgatggtctgcgtgccggcgacggcgcgggcgccgcgggagatggcggcggagctggccgccgccgccgcgctcggcgctgacgtggcggagcttcgcctcgactgcctcgccgggttcgcgccgcgcagggacctgcccgtcatcctcgccaagccccgcccgctccccgccctcgtcacctacaggcccaagtgggaaggaggcgaatacgaaggcgatgacgaatcacggtttgaggctctgctattggcaatggagctgggagctgaatatgtggatgtcgagcttaaggtggctgacaaatttatgaaacttatttctgggaggaaacctgataactgtaaacttatagtttcatcccacaactatgagaccactccatcgtccgaggaacttgcaaatttggtggctcagattcaagcaacgggggctgatatcgtgaaaatagctacaaccgctactgaaattgttgatgtggcaaaaatgtttcaaatacttgttcactgccaggtgccaatcattgggctggtgatgaacgacagaggttttatttctcgggttctttgcccaaaatatggtggattccttacttttgggtcactcaagaaaggaaaagagtctgcacctgcacagccaactgctgcagacttgataaatctgtacaatattaggcagatagggccagacactaaggtctttggtataattggtaaaccagttggccatagcaaaagcccaattttgcataatgaagctttcagatctgtgggtttcaacgctgtgtatgtgccatttttggtggatgacttggctaaatttcttgatacatactcttcaccagactttgctggcttcagttgcacaattccacacaaagaagctgctgttaggtgctgtgacgaggtcgatcccgttgccagggacattggagctgttaacacaattgttagaagacctgatggaaagcttgttggctataatactgactatgttggtgctatatctgctattgaggatggaataaaagcatcagaatcagaaccaacagatccagacaaatcaccactggctggaaggctttttgttgttataggggctggtggtgcgggaaaagcactagcatatggggcaaaagagaaaggagcaagagttgtaattgcaaaccgtacctttgcacgagcacaagaacttgccaacttaattggtgggcctgcattgactcttgcggatttggaaaactaccatccagaggaagggatgattcttgcaaatacaacagccattggaatgcatccaaatgtgaatgaaactcctctatctaagcaagcactcagatcttatgctgttgtgtttgatgcggtctacacaccaaaagagaccagacttctccgagaagctgcagaatgtggagccacagttgttagtggtctggagatgtttatacgccaagctatgggccagtttgagcatttcacgggcatgccagctccagatagcttgatgcgtgatattgttctgacaaagacatagtgaggtttgtccaaagagcaagcttcccttccatcgtaatttctgcgcaattgattccagttgtgtcccctcctcgtccttcccgcatcttcctcaacctgtagaatccacatttttttttatctcagtggacgattacaaattccgagcaattgcaagttcattggacaatcctaacaccatgaagcctcgtctgtgagagattcatccatgcccacaaacttccttgtttttcctttttagattcggattcagtgatcagtttgcctctcagccattgtaaattaatttgatgttccgagctgaaacattttggtgtgccttatttgtatcagcatgaacagcagtcatcgtgggtttgaatcagtctcttagcatttgcgttccaagacttgtctcgatttgtcccttttctaggtatcactaaggacttatttagttgtgtctggatcaaaacgatcaaaacgcggattgaatttccttctatttaattttgatttagaccccgttcggcaagctaagattcaag

SEQ ID NO: 16006 - DNA, 2289 bp, Zea Mays
caccaaggcaccaacccgacgcaaagccgccggctttccccgatggcgacggcgatgtcagtttcggcggtgtccccgcccgccgcggcggtcacgcggccgcggacgatggtctgcgtgccggcgacggcgcgggcgccgcgggagatggcggcggagctggccgccgccgccgcgctcggcgctgacgtggcggagcttcgcctcgactgcctcgccgggttcgcgccgcgcagggacctgcccgtcatcctcgccaagccccgcccgctccccgccctcgtcacctacaggcccaagtgggaaggaggcgaatacgaaggcgatgacgaatcacggtttgaggctctgctattggcaatggagctgggagctgaatatgtggatgtcgagcttaaggtggctgacaaatttatgaaacttatttctgggaggaaacctgataactgtaaacttatagtttcatcccacaactatgagaccactccatcgtccgaggaacttgcaaatttggtggctcagattcaagcaacgggggctgatatcgtgaaaatagctacaaccgctactgaaattgttgatgtggcaaaaatgtttcaaatacttgttcactgccaggtgccaatcattgggctggtgatgaacgacagaggttttatttctcgggttctttgcccaaaatatggtggattccttacttttgggtcactcaagaaaggaaaagagtctgcacctgcacagccaactgctgcagacttgataaatctgtacaatattaggcagatagggccagacactaaggtctttggtataattggtaaaccagttggccatagcaaaagcccaattttgcataatgaagctttcagatctgtgggtttcaacgctgtgtatgtgccatttttggtggatgacttggctaaatttcttgatacatactcttcaccagactttgctggcttcagttgcacaattccacacaaagaagctgctgttaggtgctgtgacgaggtcgatcccgttgccagggacattggagctgttaacacaattgttagaagacctgatggaaagcttgttggctataatactgactatgttggtgctatatctgctattgaggatggaataaaagcatcagaatcagaaccaacagatccagacaaatcaccactggctggaaggctttttgttgttataggggctggtggtgcgggaaaagcactagcatatggggcaaaagagaaaggagcaagagttgtaattgcaaaccgtacctttgcacgagcacaagaacttgccaacttaattggtgggcctgcattgactcttgcggatttggaaaactaccatccagaggaagggatgattcttgcaaatacaacagccattggaatgcatccaaatgtgaatgaaactcctctatctaagcaagcactcagatcttatgctgttgtgtttgatgcggtctacacaccaaaagagaccagacttctccgagaagctgcagaatgtggagccacagttgttagtggtctggagatgtttatacgccaagctatgggccagtttgagcatttcacgggcatgccagctccagatagcttgatgcgtgatattgttctgacaaagacatagtgaggtttgtccaaagagcaagcttcccttccatcgtaatttctgcgcaattgattccagttgtgtcccctcctcgtccttcccgcatcttcctcaacctgtagaatccacatttttttttatctcagcaaacaatacaccatttcaacaatgtttaagagttcttactcctctcatcaaggctgcaaggattgttagatctttgatttgtgcaaacagtgtgtgacgcagtcagttttacgtggccaaatggacgattacaaattccgagcaattgcaagttcattggacaatcctaacaccatgaagcctcgtctgtgagagattcatccatgcccacaaacttccttgtttttcctttttagattcggattcagtgatcagtttgcctctcagccattgtaaattaatttgatgttccgagctgaaacattttggtgtgccttatttgtatcagcatgaacagcagtcatcgtgggtttgaatcagtctcttagcatttgcgttccaagacttgtctcgatttgtcccttttctaggtatcactaaggacttatttagttgtgtctggatcaaaacgatcaaaacgcggattgaatttccttctatttaattttgatttagaccccgttcggcaagctaagattcaag

SEQ ID NO: 16007 - DNA, 2043 bp, Zea Mays
caccaaggcaccaacccgacgcaaagccgccggctttccccgatggcgacggcgatgtcagtttcggcggtgtccccgcccgccgcggcggtcacgcggccgcggacgatggtctgcgtgccggcgacggcgcgggcgccgcgggagatggcggcggagctggccgccgccgccgcgctcggcgctgacgtggcggagcttcgcctcgactgcctcgccgggttcgcgccgcgcagggacctgcccgtcatcctcgccaagccccgcccgctccccgccctcgtcacctacaggcccaagtgggaaggaggcgaatacgaaggcgatgacgaatcacggtttgaggctctgctattggcaatggagctgggagctgaatatgtggatgtcgagcttaaggtggctgacaaatttatgaaacttatttctgggaggaaacctgataactgtaaacttatagtttcatcccacaactatgagaccactccatcgtccgaggaacttgcaaatttggtggctcagattcaagcaacgggggctgatatcgtgaaaatagctacaaccgctactgaaattgttgatgtggcaaaaatgtttcaaatacttgttcactgccaggtgccaatcattgggctggtgatgaacgacagaggttttatttctcgggttctttgcccaaaatatggtggattccttacttttgggtcactcaagaaaggaaaagagtctgcacctgcacagccaactgctgcagacttgataaatctgtacaatattaggcagatagggccagacactaaggtctttggtataattggtaaaccagttggccatagcaaaagcccaattttgcataatgaagctttcagatctgtgggtttcaacgctgtgtatgtgccatttttggtggatgacttggctaaatttcttgatacatactcttcaccagactttgctggcttcagttgcacaattccacacaaagaagctgctgttaggtgctgtgacgaggtcgatcccgttgccagggacattggagctgttaacacaattgttagaagacctgatggaaagcttgttggctataatactgactatgttggtgctatatctgctattgaggatggaataaaagcatcagaatcagaaccaacagatccagacaaatcaccactggctggaaggctttttgttgttataggggctggtggtgcgggaaaagcactagcatatggggcaaaagagaaaggagcaagagttgtaattgcaaaccgtacctttgcacgagcacaagaacttgccaacttaattggtgggcctgcattgactcttgcggatttggaaaactaccatccagaggaagggatgattcttgcaaatacaacagccattggaatgcatccaaatgtgaatgaaactcctctatctaagcaagcactcagatcttatgctgttgtgtttgatgcggtctacacaccaaaagagaccagacttctccgagaagctgcagaatgtggagccacagttgttagtggtctggagatgtttatacgccaagctatgggccagtttgagcatttcacgggcatgccagctccagatagcttgatgcgtgatattgttctgacaaagacatagtgagtggacgattacaaattccgagcaattgcaagttcattggacaatcctaacaccatgaagcctcgtctgtgagagattcatccatgcccacaaacttccttgtttttcctttttagattcggattcagtgatcagtttgcctctcagccattgtaaattaatttgatgttccgagctgaaacattttggtgtgccttatttgtatcagcatgaacagcagtcatcgtgggtttgaatcagtctcttagcatttgcgttccaagacttgtctcgatttgtcccttttctaggtatcactaaggacttatttagttgtgtctggatcaaaacgatcaaaacgcggattgaatttccttctatttaattttgatttagaccccgttcggcaagctaagattcaag

SEQ ID NO: 16008 - DNA, 2352 bp, Zea Mays
cgatagtccacctccaccagtactaccaccaaccaaaacctccactcttcctcccaccaaggcaccaacccgacgcaaagccgccggctttccccgatggcgacggcgatgtcagtttcggcggtgtccccgcccgccgcggcggtcacgcggccgcggacgatggtctgcgtgccggcgacggcgcgggcgccgcgggagatggcggcggagctggccgccgccgccgcgctcggcgctgacgtggcggagcttcgcctcgactgcctcgccgggttcgcgccgcgcagggacctgcccgtcatcctcgccaagccccgcccgctccccgccctcgtcacctacaggcccaagtgggaaggaggcgaatacgaaggcgatgacgaatcacggtttgaggctctgctattggcaatggagctgggagctgaatatgtggatgtcgagcttaaggtggctgacaaatttatgaaacttatttctgggaggaaacctgataactgtaaacttatagtttcatcccacaactatgagaccactccatcgtccgaggaacttgcaaatttggtggctcagattcaagcaacgggggctgatatcgtgaaaatagctacaaccgctactgaaattgttgatgtggcaaaaatgtttcaaatacttgttcactgccaggaaaagcaggtgccaatcattgggctggtgatgaacgacagaggttttatttctcgggttctttgcccaaaatatggtggattccttacttttgggtcactcaagaaaggaaaagagtctgcacctgcacagccaactgctgcagacttgataaatctgtacaatattaggcagatagggccagacactaaggtctttggtataattggtaaaccagttggccatagcaaaagcccaattttgcataatgaagctttcagatctgtgggtttcaacgctgtgtatgtgccatttttggtggatgacttggctaaatttcttgatacatactcttcaccagactttgctggcttcagttgcacaattccacacaaagaagctgctgttaggtgctgtgacgaggtcgatcccgttgccagggacattggagctgttaacacaattgttagaagacctgatggaaagcttgttggctataatactgactatgttggtgctatatctgctattgaggatggaataaaagcatcagaatcagaaccaacagatccagacaaatcaccactggctggaaggctttttgttgttataggggctggtggtgcgggaaaagcactagcatatggggcaaaagagaaaggagcaagagttgtaattgcaaaccgtacctttgcacgagcacaagaacttgccaacttaattggtgggcctgcattgactcttgcggatttggaaaactaccatccagaggaagggatgattcttgcaaatacaacagccattggaatgcatccaaatgtgaatgaaactcctctatctaagcaagcactcagatcttatgctgttgtgtttgatgcggtctacacaccaaaagagaccagacttctccgagaagctgcagaatgtggagccacagttgttagtggtctggagatgtttatacgccaagctatgggccagtttgagcatttcacgggcatgccagctccagatagcttgatgcgtgatattgttctgacaaagacatagtgaggtttgtccaaagagcaagcttcccttccatcgtaatttctgcgcaattgattccagttgtgtcccctcctcgtccttcccgcatcttcctcaacctgtagaatccacatttttttttatctcagcaaacaatacaccatttcaacaatgtttaagagttcttactcctctcatcaaggctgcaaggattgttagatctttgatttgtgcaaacagtgtgtgacgcagtcagttttacgtggccaaatggacgattacaaattccgagcaattgcaagttcattggacaatcctaacaccatgaagcctcgtctgtgagagattcatccatgcccacaaacttccttgtttttcctttttagattcggattcagtgatcagtttgcctctcagccattgtaaattaatttgatgttccgagctgaaacattttggtgtgccttatttgtatcagcatgaacagcagtcatcgtgggtttgaatcagtctcttagcatttgcgttccaagacttgtctcgatttgtcccttttctaggtatcactaaggacttatttagttgtgtctggatcaaaacgatcaaaacgcggattgaatttccttctatttaattttgatttagaccccgttcggcaagctaagattcaag

SEQ ID NO: 16009 - DNA, 2215 bp, Zea Mays
cgatagtccacctccaccagtactaccaccaaccaaaacctccactcttcctcccaccaaggcaccaacccgacgcaaagccgccggctttccccgatggcgacggcgatgtcagtttcggcggtgtccccgcccgccgcggcggtcacgcggccgcggacgatggtctgcgtgccggcgacggcgcgggcgccgcgggagatggcggcggagctggccgccgccgccgcgctcggcgctgacgtggcggagcttcgcctcgactgcctcgccgggttcgcgccgcgcagggacctgcccgtcatcctcgccaagccccgcccgctccccgccctcgtcacctacaggcccaagtgggaaggaggcgaatacgaaggcgatgacgaatcacggtttgaggctctgctattggcaatggagctgggagctgaatatgtggatgtcgagcttaaggtggctgacaaatttatgaaacttatttctgggaggaaacctgataactgtaaacttatagtttcatcccacaactatgagaccactccatcgtccgaggaacttgcaaatttggtggctcagattcaagcaacgggggctgatatcgtgaaaatagctacaaccgctactgaaattgttgatgtggcaaaaatgtttcaaatacttgttcactgccaggtgccaatcattgggctggtgatgaacgacagaggttttatttctcgggttctttgcccaaaatatggtggattccttacttttgggtcactcaagaaaggaaaagagtctgcacctgcacagccaactgctgcagacttgataaatctgtacaatattaggcagatagggccagacactaaggtctttggtataattggtaaaccagttggccatagcaaaagcccaattttgcataatgaagctttcagatctgtgggtttcaacgctgtgtatgtgccatttttggtggatgacttggctaaatttcttgatacatactcttcaccagactttgctggcttcagttgcacaattccacacaaagaagctgctgttaggtgctgtgacgaggtcgatcccgttgccagggacattggagctgttaacacaattgttagaagacctgatggaaagcttgttggctataatactgactatgttggtgctatatctgctattgaggatggaataaaagcatcagaatcagaaccaacagatccagacaaatcaccactggctggaaggctttttgttgttataggggctggtggtgcgggaaaagcactagcatatggggcaaaagagaaaggagcaagagttgtaattgcaaaccgtacctttgcacgagcacaagaacttgccaacttaattggtgggcctgcattgactcttgcggatttggaaaactaccatccagaggaagggatgattcttgcaaatacaacagccattggaatgcatccaaatgtgaatgaaactcctctatctaagcaagcactcagatcttatgctgttgtgtttgatgcggtctacacaccaaaagagaccagacttctccgagaagctgcagaatgtggagccacagttgttagtggtctggagatgtttatacgccaagctatgggccagtttgagcatttcacgggcatgccagatagcttgatgcgtgatattgttctgacaaagacatagtgaggtttgtccaaagagcaagcttcccttccatcgtaatttctgcgcaattgattccagttgtgtcccctcctcgtccttcccgcatcttcctcaacctgtagaatccacatttttttttatctcagtggacgattacaaattccgagcaattgcaagttcattggacaatcctaacaccatgaagcctcgtctgtgagagattcatccatgcccacaaacttccttgtttttcctttttagattcggattcagtgatcagtttgcctctcagccattgtaaattaatttgatgttccgagctgaaacattttggtgtgccttatttgtatcagcatgaacagcagtcatcgtgggtttgaatcagtctcttagcatttgcgttccaagacttgtctcgatttgtcccttttctaggtatcactaaggacttatttagttgtgtctggatcaaaacgatcaaaacgcggattgaatttccttctatttaattttgatttagaccccgttcggcaagctaagattcaag

SEQ ID NO: 16010 - DNA, 2265 bp, Zea Mays
gggccacgtcgtattccgccgcccagcagtgcgaacgatagtccacctccaccagtactaccaccaaccaaaacctccactcttcctcccaccaaggcaccaacccgacgcaaagccgccggctttccccgatggcgacggcgatgtcagtttcggcggtgtccccgcccgccgcggcggtcacgcggccgcggacgatggtctgcgtgccggcgacggcgcgggcgccgcgggagatggcggcggagctggccgccgccgccgcgctcggcgctgacgtggcggagcttcgcctcgactgcctcgccgggttcgcgccgcgcagggacctgcccgtcatcctcgccaagccccgcccgctccccgccctcgtcacctacaggcccaagtgggaaggaggcgaatacgaaggcgatgacgaatcacggtttgaggctctgctattggcaatggagctgggagctgaatatgtggatgtcgagcttaaggtggctgacaaatttatgaaacttatttctgggaggaaacctgataactgtaaacttatagtttcatcccacaactatgagaccactccatcgtccgaggaacttgcaaatttggtggctcagattcaagcaacgggggctgatatcgtgaaaatagctacaaccgctactgaaattgttgatgtggcaaaaatgtttcaaatacttgttcactgccaggaaaagcaggtgccaatcattgggctggtgatgaacgacagaggttttatttctcgggttctttgcccaaaatatggtggattccttacttttgggtcactcaagaaaggaaaagagtctgcacctgcacagccaactgctgcagacttgataaatctgtacaatattaggcagatagggccagacactaaggtctttggtataattggtaaaccagttggccatagcaaaagcccaattttgcataatgaagctttcagatctgtgggtttcaacgctgtgtatgtgccatttttggtggatgacttggctaaatttcttgatacatactcttcaccagactttgctggcttcagttgcacaattccacacaaagaagctgctgttaggtgctgtgacgaggtcgatcccgttgccagggacattggagctgttaacacaattgttagaagacctgatggaaagcttgttggctataatactgactatgttggtgctatatctgctattgaggatggaataaaagcatcagaatcagaaccaacagatccagacaaatcaccactggctggaaggctttttgttgttataggggctggtggtgcgggaaaagcactagcatatggggcaaaagagaaaggagcaagagttgtaattgcaaaccgtacctttgcacgagcacaagaacttgccaacttaattggtgggcctgcattgactcttgcggatttggaaaactaccatccagaggaagggatgattcttgcaaatacaacagccattggaatgcatccaaatgtgaatgaaactcctctatctaagcaagcactcagatcttatgctgttgtgtttgatgcggtctacacaccaaaagagaccagacttctccgagaagctgcagaatgtggagccacagttgttagtggtctggagatgtttatacgccaagctatgggccagtttgagcatttcacgggcatgccagctccagatagcttgatgcgtgatattgttctgacaaagacatagtgaggtttgtccaaagagcaagcttcccttccatcgtaatttctgcgcaattgattccagttgtgtcccctcctcgtccttcccgcatcttcctcaacctgtagaatccacatttttttttatctcagtggacgattacaaattccgagcaattgcaagttcattggacaatcctaacaccatgaagcctcgtctgtgagagattcatccatgcccacaaacttccttgtttttcctttttagattcggattcagtgatcagtttgcctctcagccattgtaaattaatttgatgttccgagctgaaacattttggtgtgccttatttgtatcagcatgaacagcagtcatcgtgggtttgaatcagtctcttagcatttgcgttccaagacttgtctcgatttgtcccttttctaggtatcactaaggacttatttagttgtgtctggatcaaaacgatcaaaacgcggattgaatttccttctatttaattttgatttagaccccgttcggcaagctaagattcaag

SEQ ID NO: 16011 - DNA, 2098 bp, Zea Mays
aaaccagtcaagacgggccacgtcgtattccgccgcccagcagtgcgaacgatagtccacctccaccagtactaccaccaaccaaaacctccactcttcctcccaccaaggcaccaacccgacgcaaagccgccggctttccccgatggcgacggcgatgtcagtttcggcggtgtccccgcccgccgcggcggtcacgcggccgcggacgatggtctgcgtgccggcgacggcgcgggcgccgcgggagatggcggcggagctggccgccgccgccgcgctcggcgctgacgtggcggagcttcgcctcgactgcctcgccgggttcgcgccgcgcagggacctgcccgtcatcctcgccaagccccgcccgctccccgccctcgtcacctacaggcccaagtgggaaggaggcgaatacgaaggcgatgacgaatcacggtttgaggctctgctattggcaatggagctgggagctgaatatgtggatgtcgagcttaaggtggctgacaaatttatgaaacttatttctgggaggaaacctgataactgtaaacttatagtttcatcccacaactatgagaccactccatcgtccgaggaacttgcaaatttggtggctcagattcaagcaacgggggctgatatcgtgaaaatagctacaaccgctactgaaattgttgatgtggcaaaaatgtttcaaatacttgttcactgccaggtgccaatcattgggctggtgatgaacgacagaggttttatttctcgggttctttgcccaaaatatggtggattccttacttttgggtcactcaagaaaggaaaagagtctgcacctgcacagccaactgctgcagacttgataaatctgtacaatattaggcagatagggccagacactaaggtctttggtataattggtaaaccagttggccatagcaaaagcccaattttgcataatgaagctttcagatctgtgggtttcaacgctgtgtatgtgccatttttggtggatgacttggctaaatttcttgatacatactcttcaccagactttgctggcttcagttgcacaattccacacaaagaagctgctgttaggtgctgtgacgaggtcgatcccgttgccagggacattggagctgttaacacaattgttagaagacctgatggaaagcttgttggctataatactgactatgttggtgctatatctgctattgaggatggaataaaagcatcagaatcagaaccaacagatccagacaaatcaccactggctggaaggctttttgttgttataggggctggtggtgcgggaaaagcactagcatatggggcaaaagagaaaggagcaagagttgtaattgcaaaccgtacctttgcacgagcacaagaacttgccaacttaattggtgggcctgcattgactcttgcggatttggaaaactaccatccagaggaagggatgattcttgcaaatacaacagccattggaatgcatccaaatgtgaatgaaactcctctatctaagcaagcactcagatcttatgctgttgtgtttgatgcggtctacacaccaaaagagaccagacttctccgagaagctgcagaatgtggagccacagttgttagtggtctggagatgtttatacgccaagctatgggccagtttgagcatttcacgggcatgccagtggacgattacaaattccgagcaattgcaagttcattggacaatcctaacaccatgaagcctcgtctgtgagagattcatccatgcccacaaacttccttgtttttcctttttagattcggattcagtgatcagtttgcctctcagccattgtaaattaatttgatgttccgagctgaaacattttggtgtgccttatttgtatcagcatgaacagcagtcatcgtgggtttgaatcagtctcttagcatttgcgttccaagacttgtctcgatttgtcccttttctaggtatcactaaggacttatttagttgtgtctggatcaaaacgatcaaaacgcggattgaatttccttctatttaattttgatttagaccccgttcggcaagctaagattcaag

SEQ ID NO: 16012 - DNA, 3577 bp, Zea Mays
catttggcgtgtacgacgtccaccccacaagctcccacggcgctccccatggaccccatcccctcccccatggccgatgagctcgttcgtcgccccatatatggagtgaggttcggctcaccctatccggccatttccatgaggaagatcctccacatccagggcgggcagtgcggcaaccagattggggcgatctgcgacgagcacggggtcggcgccacgggccgctacgtggggaattcggacctccagtttgagcgcatcaacgtctactacaacgaagccagcagcggccatttcgtccctcgtgccgacctcatggatctcgagtccgagaccatggactctgtgcgctccagccccttcggccagatcttccaccccgacaacttcgtcttcggacagtccggcgccggcatcaactgtgccaaggggcacgacaccgagggcgcggagctcatcgactctgtcctcgacgtcgtctgcaatgaggccgtgaactgcgactgcctcagggcttttgacattacagctccaggaggtgacgtgatctctggtggttttgacgactctgctagttggaacaacaacatggtttgggttgttgacaacagcgacgatggccatggttgccacaactgcgttccagttctgattgaaagtatggactctctggtgttcaacgaaatgccgctggagagtgtgatttgggatgaggaagccaagcatggagatgtggtgaacctggaagggaagggtgaccagacgcacaacaattgcgagcagggtgttgttcctaatgctccatggaagttgggtgatccgttgttcagtaaagtgggtctaaaagtggcatgggatggggagatgcaatttgaatctcatacgcatgaagggttattgctcaaggtggagaagtcttagatgaatcggctgagaaggagggtgaggtggtagatgagaccagcaggtctgatgtactgagtgaggcagctgctatggttatgcatggtggaagcatggaggagcttcttcctgctagtgctggcagtgtgatagaggatagcctggagaaggagcagaatgataccagtgaagaagaggggaaatatcttgcagtatctaaagaaggggctgagaatgaggtgttgcagtttcagttagcagacgatgaaataagggaggataaagataaccaaactgaagcgagaaaagggaatactgctaataccttgcagtgtgacctgttagacagtgcgctcggcctggaggaaaagcatggcgatgaagatgcatcaaaatcacagacatccaactctgatagaataggattcttcattcctgtcatgtcttttatgggacacaatggtgaggaaggaattaatagcacaccaactaagggacatatatctgaggtagatccttcggaagtatcaggaacaacatctccaaaattgccttcaaattcggaagaagtccatgtagcagaagaaaagcttgatagctctaccgagacacctgcatctaaggttggtgatgctgaatcatcagaagtatcacaatctacaggacatccttcaacagtagaagacatccaggtccatcaagttagcaaacatcctggtcctagtgatgaagtagagccaaatcagcttagagggtctgttggagacttacctgagggtagtgcctcgtcggcgactaccaaaatacatcaatcaggtgacaccgagacaagggaatctattcatacaagaatgggattggaagatacatctgataggaatattttgcaggcacaactagcagagtctgcattagaacctgctgaacctgaagaatctttagcaatagaagaggttcttgtaactacaagcaatgaggcggataaagaatcagctgctgtcattgaggctgtaccagccttgtgtgagacaactggtcccaaggaggctgctgctactgaaaaagcagtgaaagaggttgacaacattgtgaaatctttggatgaattcaccttcgaggagggagaatcaaaggagatgcaaaagaagcagccgcaagattatgtttctgttgatattgttgataatagattactgcctcatttgccacacgggttttcacaaaacagtgagcaatataaggtggagcagtccccacagattatatgtgaacaaggttctacgcatccgggccagtatgatgaggatacatctttatctttaacagatattcacatgggtgtatccttccagaacttactgattcaaaggcaccacttggatttctattcaccaatcaacgtaatttttgaagcctatgcagcaaagttcgattcatctagcggttcttttgcacaaaggaattccaaattgctgaaggaaactgtgaacatgcaacctgagcaggctgactattatgtcgttcgcaatcacattgtagtgctctggtgttctagtccttgcactaatgctgatgagtatcacgccattgttgttgctgctgattttggagacatcgttttcaaccagtttttggacaaagtttgtcggttgagacaggtggttgtagatgttgcaccacatggtgttgaagtgacgttaggcatggcacttgcagcattccgggcagcacgtggtgttgcagctaagcatgaagcgaaattgtttctggactggcatttggaaaatctcgtgtatgctattgctgcctcccttactgatctctccatggccttatggggatctgtatgatccatacgaagtgagcagagaccactgctatgttcctggtggcagttctcattttgttcgtgcatttactaatggaatcttgatagtctacgggcagaacgtaccaaggaaacaatatggaggtgatgagttgtgggtgcacggtgataagatggcattccatggtgatatggtcctacggtccctcttggcatgcttcttctttggataactagaccttgggatccaggcattttgtctgcattgcatgtcagtgttgcttggggacaagcaacgctttgacggggcggtaatgtaacatccggccaatgttagagattgcacatacaagtactagtgagtacgtatttgaatttgtaatggtggtgggccgtaccgggccgtagtgggctatacccatgacattagtataagtatgttgtaagacttgaggaaggggcatccaagaaataccagaaaccaaaacgaatcaaccttccggttgttatcgtattcatcgatcacctgagattgctcatctgctcacgtcggtgacgccgcgccggccaagggccatgagcccgtgatagaggacggtggtggccacggtcctggagcgactcggtgacgggatctggaagttggcacagaggagcgaggaaaggccgagcccgagaagcatcgtcgaggacacaaccggcatgtggtggtctttttggtcggcggcgtcgtgggcagctggttgttgccgtcgaagctcgaaagaagcctcgattcgtcgaaaggttgcaaagtggacatcccctatttctatagtttcatgtttcatgcatatgatggtc

SEQ ID NO: 16013 - DNA, 1128 bp, Zea Mays
tcgatttgagacagtttcttgcgacttcgcgacagaaacaactcactggtgagagacataagccgaatgcagcagcgcaactacgggagggaaggattctcgcatataactgtcacaggtgctcttgctcacgggacgaaggaggtggaagtgtggctacaaacatttggtccaggtcaaaggaccccaatccacaggcattcttgtgaagaggttttcattgtcctcaaggggaaaggcacgctcttactcgggtcgagctcgctgaagtacccaggacagccgcaggaagttcctgtctttcagaataccacattttcgatccctgtaaatgatccacatcaggtctggaattctaatgagcacgaagatttgcaagttcttgtgatcatatcgcgcccaccggtcaagatatttatatacgatgattggagtatgcctcatacagctgcaaagctgaaattcccctacttctgggatgaggactgcttgccagcaccaaaagatgaactctaggttaagtggttcctgcaatttgtcagcttcgtgttcatccacaatcctggtggactacgactcacatctacaagttgaaaaccattagtgtactcttcatgtgtagttttgtgttgtgactctgggaaatccatattgacaacgtttataaaattaagcacttctggagctgagctactgtggtctatattctagatttttgaagcagtattggtttgtttcgacaaaagatttctgctctttattgtgatatcccagtgttaatcatatgggttttaagtaatcattcattctaagcattcaaatgtagggcttccgtatagtattattgtattaagaaaaacctttatgaacaggttttatgtcaaatagataagtgaacctgaaattctgaagtaatctctactatataaagtaccagttttcataattctatagtcgccgtgcatcaatccttctcatctcgctttatataaaaataagataaaattatatacaagtgagggttcgaacatgaattgttggctccacattcatatctaactaatcattatctctatctctactcatataaagcatcaatttcataggtctggcgtcacaggtgaaact

SEQ ID NO: 16014 - DNA, 780 bp, Zea Mays
aaagacgcctctagtatacagaaaaaagcaacacagcagtaacattcacagtccgcaggccgcagcagctgaatttcgaaggagactgtttcataaacaggagccaggcaccggactttccaggaggataccacctcccgaacatggtgcgtcgacgacccgccaccggggcagccccgagaccccacctcgccgccgtcggtcgcgggctgctcctcgcgtccgtcctcgcggccgctgcctcctccctcccagtagccgagtcgtcctgcccgcgagacaactcactggtgagagacataagccgaatgcagcagcgcaactacgggagggaaggattctcgcatataactgtcacaggtgctcttgctcacgggacgaaggaggtggaagtgtggctacaaacatttggtccaggtcaaaggaccccaatccacaggcattcttgtgaagaggttttcattgtcctcaaggggaaaggcacgctcttactcgggtcgagctcgctgaagtacccaggacagccgcaggaagttcctgtctttcagaataccacattttcgatccctgtaaatgatccacatcaggtctggaattctaatgagcacgaagatttgcaagttcttgtgatcatatcgcgcccaccggtcaagatatttatatacgatgattggagtatgcctcatacagctgcaaagctgaaattcccctacttctgggatgaggactgcttgccagcaccaaaagatgaactctaggtctggcgtcacaggtgaaact

SEQ ID NO: 16015 - DNA, 682 bp, Zea Mays
aaagacgcctctagtatacagaaaaaagcaacacagcagtaacattcacagtccgcaggccgcagcagctgaatttcgaaggagactgtttcataaacaggagccaggcaccggactttccaggaggataccacctcccgaacatggtgcgtcgacgacccgccaccggggcagccccgagaccccacctcgccgccgtcggtcgcgggctgctcctcgcgtccgtcctcgcggccgctgcctcctccctcccagtagccgagtcgtcctgcccgcgagacaactcactggtgagagacataagccgaatgcagcagcgcaactacgggagggaaggattctcgcatataactgtcacaggtgctcttgctcacgggacgaaggaggtggaagtgtggctacaaacatttggtccaggtcaaaggaccccaatccacaggcattcttgtgaagaggttttcattgtcctcaaggggaaaggcacgctcttactcgggtcgagctcgctgaagtacccaggacagccgcaggaagttcctgtctttcagaataccacattttcgatccctgtaaatgatccacatcaggtctggaattctaatgagcacgaagatttgcaagttcttgtgatcatatcgcgcccaccggtcaagatcaatttcgattgtacagtgaataattc

SEQ ID NO: 16016 - DNA, 693 bp, Zea Mays
aaagacgcctctagtatacagaaaaaagcaacacagcagtaacattcacagtccgcaggccgcagcagctgaatttcgaaggagactgtttcataaacaggagccaggcaccggactttccaggaggataccacctcccgaacatggtgcgtcgacgacccgccaccggggcagccccgagaccccacctcgccgccgtcggtcgcgggctgctcctcgcgtccgtcctcgcggccgctgcctcctccctcccagtagccgagtcgtcctgcccgcgagacaactcactggtgagagacataagccgaatgcagcagcgcaactacgggagggaaggattctcgcatataactgtcacaggtgctcttgctcacgggacgaaggaggtggaagtgtggctacaaacatttggtccaggtcaaaggaccccaatccacaggcattcttgtgaagaggttttcattgtcctcaaggggaaaggcacgctcttactcgggtcgagctcgctgaagtacccaggacagccgcaggaagttcctgtctttcagaataccacattttcgatccctgtaaatgatccacatcaggtctggaattctaatgagcacgaagatttgcaagttcttgtgatcatatcgcgcccaccggtcaagatttgacatcatcatcgtctttatcagtaccatattttct

SEQ ID NO: 16017 - DNA, 6603 bp, Zea Mays
catttggcgtgtacgacgtccaccccacaagctcccacggcgctccccatggaccccatcccctcccccatggccgatgagctcgttcgtcgccccatatatggagtgaggttcggctcaccctatccggccatttccatgaggaagatcctccacatccagggcgggcagtgcggcaaccagattggggcgatctgcgacgagcacggggtcggcgccacgggccgctacgtggggaattcggacctccagtttgagcgcatcaacgtctactacaacgaagccagcagcggccatttcgtccctcgtgccgacctcatggatctcgagtccgagaccatggactctgtgcgctccagccccttcggccagatcttccaccccgacaacttcgtcttcggacagtccggcgccggcatcaactgtgccaaggggcacgacaccgagggcgcggagctcatcgactctgtcctcgacgtcgtctgcaatgaggccgtgaactgcgactgcctcagggcttttgacattacagctccaggaggtgacgtgatctctggtggttttgacgactctgctagttggaacaacaacatggtttgggttgttgacaacagcgacgatggccatggttgccacaactgcgttccagttctgattgaaagtatggactctctggtgttcaacgaaatgccgctggagagtgtgatttgggatgaggaagccaagcatggagatgtggtgaacctggaagggaagggtgaccagacgcacaacaattgcgagcagggtgttgttcctaatgctccatggaagttgggtgatccgttgttcagtaaagtgggtctaaaagtggcatgggatggggagatgcaatttgaatctcatacgcatgaagggttattgctcaaggtggagaagtcttagatgaatcggctgagaaggagggtgaggtggtagatgagaccagcaggtctgatgtactgagtgaggcagctgctatggttatgcatggtggaagcatggaggagcttcttcctgctagtgctggcagtgtgatagaggatagcctggagaaggagcagaatgataccagtgaagaagaggggaaatatcttgcagtatctaaagaaggggctgagaatgaggtgttgcagtttcagttagcagacgatgaaataagggaggataaagataaccaaactgaagcgagaaaagggaatactgctaataccttgcagtgtgacctgttagacagtgcgctcggcctggaggaaaagcatggcgatgaagatgcatcaaaatcacagacatccaactctgatagaataggattcttcattcctgtcatgtcttttatgggacacaatggtgaggaaggaattaatagcacaccaactaagggacatatatctgaggtagatccttcggaagtatcaggaacaacatctccaaaattgccttcaaattcggaagaagtccatgtagcagaagaaaagcttgatagctctaccgagacacctgcatctaaggttggtgatgctgaatcatcagaagtatcacaatctacaggacatccttcaacagtagaagacatccaggtccatcaagttagcaaacatcctggtcctagtgatgaagtagagccaaatcagcttagagggtctgttggagacttacctgagggtagtgcctcgtcggcgactaccaaaatacatcaatcaggtgacaccgagacaagggaatctattcatacaagaatgggattggaagatacatctgataggaatattttgcaggcacaactagcagagtctgcattagaacctgctgaacctgaagaatctttagcaatagaagaggttcttgtaactacaagcaatgaggcggataaagaatcagctgctgtcattgaggctgtaccagccttgtgtgagacaactggtcccaaggaggctgctgctactgaaaaagcagtgaaagaggttgacaacattgtgaaatctttggatgaattcaccttcgaggagggagaatcaaaggagatgcaaaagaagcagccgcaagattatgtttctgttgatattgttgataatagattactgcctcatttgccacacgggttttcacaaaacagtgagcaatataaggtggagcagtccccacagattatatgtgaacaaggttctacgcatccgggccagtatgatgaggatacatctttatctttaacagatattcacatgggtgtatccttccagaacttactgattcaaaggcaccacttggatttctattcaccaatcaacgtaatttttgaagcctatgcagcaaagttcgattcatctagcggttcttttgcacaaaggaattccaaattgctgaaggaaactgtgaacatgcaacctgagcaggctgactattatgtcgttcgcaatcacattgtagtgctctggtgttctagtccttgcactaatgctgatgagtatcacgccattgttgttgctgctgattttggagacatcgttttcaaccagtttttggacaaagtttgtcggttgagacaggtggttgtagatgttgcaccacatggtgttgaagtgacgttaggcatggcacttgcagcattccgggcagcacgtggtgttgcagctaagcatgaagcgaaattgtttctggactggcatttggaaaatctcgtgtatgctattgctgcctcccttactgatctctccatggccttatggggatctgtatgatccatacgaagtgagcagagaccactgctatgttcctggtggcagttctcattttgttcgtgcatttactaatggaatcttgatagtctacgggcagaacgtaccaaggaaacaatatggaggtgatgagttgtgggtgcacggtgataagatggcattccatggtgatatggtcctacggtccctcttggcatgcttcttctttggataactagaccttgggatccaggcattttgtctgcattgcatgtcagtgttgcttggggacaagcaacgctttgacggggcggtaatgtaacatccggccaatgttagagattgcacatacaagtactagtgagtacgtatttgaatttgtaatggtggtgggccgtaccgggccgtagtgggctatacccatgacattagtataagtatgttgtaagacttgaggaaggggcatccaagaaataccagaaaccaaaacgaatcaaccttccggttgttatcgtattcatcgatcacctgagattgctcatctgctcacgtcggtgacgccgcgccggccaagggccatgagcccgtgatagaggacggtggtggccacggtcctggagcgactcggtgacgggatctggaagttggcacagaggagcgaggaaaggccgagcccgagaagcatcgtcgaggacacaaccggcatgtggtggtctttttggtcggcggcgtcgtgggcagctggttgttgccgtcgaagctcgaaagaagcctcgattcgtcgaaaggttgcaaagtggacatcccctatttctatagtttcatgtttcatgcatatgatggtcagacttgtgtccaatatattttgcaaacctgaaatgtcaactgcattttggagacatccgtcaagaatagcacagcatcctgttaggtgtcttcagaaactggaatgcagacacactgcccatagttgttggatacttggggcttgtggtagtaatggcaacttttagatgacttatttttttcatacgatgtctaaatacttgcagacacactgtccattgtttgaggttttagagatgttagcaaaacagttttttcctcaatgagttgggctctgtttcggactcctactgttctgttacctcaagtctgttatgtgctagttgtttaagtgcctttactgaatgtcgagtttaactgcctgaaatcctgcagtttctaaagaaattagaaaactgaccccatgcatactttagaaactgttgcaaaaagtacataaaagtataaaatacacttgcgaaactgttgtccaagcactgttgcaaaaagtacataaaagttgccttgcgaattgcgatccatgaggtgtcgttcgtttctttcttcatccttctgcattctactgattcattcttgccacagagattcttcacctttttcaatgttcttatatcaaacaaaacctatatgtacccatccctcttccccagcgacactccatctctccctgcatccacactccatcccttgtctctccccacgtttcttccctctggctcatggagtcatggacactttatcctcagacctcagctgaggcagcttcaggcttcagcaggtctgcaggtgtatatatattcctctgctccgggactggtgcacagcaaagcgtcttccatttctcagaagagtgtgtgacaacagcgacaaccgacagacatgtcttcgccgacatcgccttggtttgcggatctcttcgcagatgacagggtgaggaccctatcgcaccaggtctccacacttggggacagggtgtgggaactggagcacaaaattacccagctgatgggcgagaaggccaagctggagaagcaactggaggaggcaaaggcgatctcaagccacaaggaagaggtggggagaagcttgaaggctgaaaatgataagcttcagtcggaggttttggttgcggaggaaaagtgtagcaagtctgcagcggaggttgagaggctgacgaaggaattaggcgcgctggcggaggcaaaagaggcagctgccaaggaattcaacgacgagaaagagaaaatcacgctggaatcggaggatctcaagatgaggctggaggaaatgctggccatcaaggatttgacagagagcgagaatgacaagcttcggtccgaggctttgatcgcagctgaaaagcaaaacatgtctgaagcagagattgagaggctcaagaaggaactgagtgggttgttggaggcgaaggaggcggctgccaaggctttcgacgtacaaaaagcagaaatcaccaatgaattagaggaactacagaggaagctgaaggaaatcgaagctaataaggatttagtggagggagaaaacagtaagcttcagtctgagattctcacagcacaggagaaatatagacagtctgaagcagaggttaagtgcattaaacaagtagtgtgttcagtggtggaggcgaaggaggcagctgcaagggcatctgaagctgagaaggcagaaatcatggaggaaatggacaaccttaagaggacaatcgaggagatcaaggccaacagggatttggtagagagtcagaaccaggagcttcggtcaaagatttcgagtgcagagcaagagcgtagcctatttgaaggagagattaagagcgtcaggatggaattgggggcagtagaggaggccaagcagatccttacgagggagttcgatgctgagaaggcagagatcctgaaggaactggatgaccttgagaagaagctagaggaattgcagaccaacaagggtttgctggaggctgaaaacgacaagcttcagctggaggttttgaccgcacagcacaaacaaagcatgtccgaagcagaggctgagagccttaagatggaactgggagcattggtggaggcaaaggaggcggctacaaaagcatttggtgccgagaaagcaaagaccacgaaggaactggaggatcttaagaggaaggtggaggaaatccaaaccaagaaggatctggtggagggcgaaaaggataagctccgtttggagattttaatagcggagcagaggcatgccatggctgaattagaggttaagcgcctcaagatggacttggctgcatcggcagaggcgagggagacagttgtgaggtcatgtgacgctgagaaggccaagttcatggcagaaatagagaacctcaggaggaagatagaggaaatccacgccagcaaggaagcggccgagaaagcagcgcgcaacaaagatgcagaggctgacaggctgaaggatgagctggcgaggatccggctctctgtgtcacagctgcaagcgtcctgcgacgaacttgatgccaagcagtcgcgcctgaacgacgagaagaactctgtccagaaagcactagtgtccgagaaggtcgaaggtaacaagctcaagttaaaaatcgaggaactcgagaatcacattgctggcaaggacggtgagaaagggaaactgaaggcggcgttggaggaaaagatgactgagatcaatgctctcagcaaagacaacgcgatgctacatcgcacaattctcgaggcgcaagagaagaataaaggtagcattttatcgttcttgtcaccgtgcggctccaagtaacttggttgtaatgtgttgcattactaatgcaatggtgaaggtaccatgcaatgaaataaaaatttcagtttgctctgtgacatgtgatgtcttcttgttacattcattgggatgtagtttgtggcgcctcacttttttttttgcactttaggtcttgttcgtttgtgccggattggtgggccggaacgattcttaaccggattccttctct

SEQ ID NO: 16018 - DNA, 738 bp, Zea Mays
gtcgaagcccacgcctacacctccatttcgtcgaaaccagttctgccgtgtttcataatctcaataatctctcgaggaggataccacctcccgaacatggtgcgtcgacgacccgccaccggggcagcccagagaccccaactcgccgccgtcggtcgcgggctgctcctcgcgtccgtcctcgcggccgctgcctcctccctcccagtagccgagtcgtcctgcccgcgagacaactcactggtgagagacataagccgaatgcagcagagcaactacgggagggaaggattctcgcatataactgtcacaggtgctcttgctcacgggacgaaggaggtggaagtgtggctacaaacatttggtccaggtcaaaggaccccaatccacaggcattcttgtgaagaggttttcattgtcctcaaggggaaaggcacgctcttactcgggtcgagctcgctgaagtacccaggacagccgcaggaagttcccgtctttcagaataccacattttcgatccctgtaaatgatccacatcaggtctggaattctaatgagcacgaagatttgcaagttcttgtgatcatatcacgcccaccggtcaagatatttatatatgatgattggagtatgcctcatacagctgcaaagctgaaattcccctacttctgggatgaggactgcttgccagcaccaaaagatgaactctaggttgcaaagtggacatcccctatttct

SEQ ID NO: 16019 - DNA, 3732 bp, Zea Mays
catttggcgtgtacgacgtccaccccacaagctcccacggcgctccccatggaccccatcccctcccccatggccgatgagctcgttcgtcgccccatatatggagtgaggttcggctcaccctatccggccatttccatgaggaagatcctccacatccagggcgggcagtgcggcaaccagattggggcgatctgcgacgagcacggggtcggcgccacgggccgctacgtggggaattcggacctccagtttgagcgcatcaacgtctactacaacgaagccagcagcggccatttcgtccctcgtgccgacctcatggatctcgagtccgagaccatggactctgtgcgctccagccccttcggccagatcttccaccccgacaacttcgtcttcggacagtccggcgccggcatcaactgtgccaaggggcacgacaccgagggcgcggagctcatcgactctgtcctcgacgtcgtctgcaatgaggccgtgaactgcgactgcctcagggcttttgacattacagctccaggaggtgacgtgatctctggtggttttgacgactctgctagttggaacaacaacatggtttgggttgttgacaacagcgacgatggccatggttgccacaactgcgttccagttctgattgaaagtatggactctctggtgttcaacgaaatgccgctggagagtgtgatttgggatgaggaagccaagcatggagatgtggtgaacctggaagggaagggtgaccagacgcacaacaattgcgagcagggtgttgttcctaatgctccatggaagttgggtgatccgttgttcagtaaagtgggtctaaaagtggcatgggatggggagatgcaatttgaatctcatacgcatgaagggttattgctcaaggtggagaagtcttagatgaatcggctgagaaggagggtgaggtggtagatgagaccagcaggtctgatgtactgagtgaggcagctgctatggttatgcatggtggaagcatggaggagcttcttcctgctagtgctggcagtgtgatagaggatagcctggagaaggagcagaatgataccagtgaagaagaggggaaatatcttgcagtatctaaagaaggggctgagaatgaggtgttgcagtttcagttagcagacgatgaaataagggaggataaagataaccaaactgaagcgagaaaagggaatactgctaataccttgcagtgtgacctgttagacagtgcgctcggcctggaggaaaagcatggcgatgaagatgcatcaaaatcacagacatccaactctgatagaataggattcttcattcctgtcatgtcttttatgggacacaatggtgaggaaggaattaatagcacaccaactaagggacatatatctgaggtagatccttcggaagtatcaggaacaacatctccaaaattgccttcaaattcggaagaagtccatgtagcagaagaaaagcttgatagctctaccgagacacctgcatctaaggttggtgatgctgaatcatcagaagtatcacaatctacaggacatccttcaacagtagaagacatccaggtccatcaagttagcaaacatcctggtcctagtgatgaagtagagccaaatcagcttagagggtctgttggagacttacctgagggtagtgcctcgtcggcgactaccaaaatacatcaatcaggtgacaccgagacaagggaatctattcatacaagaatgggattggaagatacatctgataggaatattttgcaggcacaactagcagagtctgcattagaacctgctgaacctgaagaatctttagcaatagaagaggttcttgtaactacaagcaatgaggcggataaagaatcagctgctgtcattgaggctgtaccagccttgtgtgagacaactggtcccaaggaggctgctgctactgaaaaagcagtgaaagaggttgacaacattgtgaaatctttggatgaattcaccttcgaggagggagaatcaaaggagatgcaaaagaagcagccgcaagattatgtttctgttgatattgttgataatagattactgcctcatttgccacacgggttttcacaaaacagtgagcaatataaggtggagcagtccccacagattatatgtgaacaaggttctacgcatccgggccagtatgatgaggatacatctttatctttaacagatattcacatgggtgtatccttccagaacttactgattcaaaggcaccacttggatttctattcaccaatcaacgtaatttttgaagcctatgcagcaaagttcgattcatctagcggttcttttgcacaaaggaattccaaattgctgaaggaaactgtgaacatgcaacctgagcaggctgactattatgtcgttcgcaatcacattgtagtgctctggtgttctagtccttgcactaatgctgatgagtatcacgccattgttgttgctgctgattttggagacatcgttttcaaccagtttttggacaaagtttgtcggttgagacaggtggttgtagatgttgcaccacatggtgttgaagtgacgttaggcatggcacttgcagcattccgggcagcacgtggtgttgcagctaagcatgaagcgaaattgtttctggactggcatttggaaaatctcgtgtatgctattgctgcctcccttactgatctctccatggccttatggggatctgtatgatccatacgaagtgagcagagaccactgctatgttcctggtggcagttctcattttgttcgtgcatttactaatggaatcttgatagtctacgggcagaacgtaccaaggaaacaatatggaggtgatgagttgtgggtgcacggtgataagatggcattccatggtgatatggtcctacggtccctcttggcatgcttcttctttggataactagaccttgggatccaggcattttgtctgcattgcatgtcagtgttgcttggggacaagcaacgctttgacggggcggtaatgtaacatccggccaatgttagagattgcacatacaagtactagtgagtacgtatttgaatttgtaatggtggtgggccgtaccgggccgtagtgggctatacccatgacattagtataagtatgttgtaagacttgaggaaggggcatccaagaaataccagaaaccaaaacgaatcaaccttccggttgttatcgtattcatcgatcacctgagattgctcatctgctcacgtcggtgacgccgcgccggccaagggccatgagcccgtgatagaggacggtggtggccacggtcctggagcgactcggtgacgggatctggaagttggcacagaggagcgaggaaaggccgagcccgagaagcatcgtcgaggacacaaccggcatgtggtggtctttttggtcggcggcgtcgtgggcagctggttgttgccgtcgaagctcgaaagaagcctcgattcgtcgaaaggttcatcagcttgttcccatttcttttcagcatgcatagatctgtgacatgttttgtttccgttgcttgaatccaatggctatgctgctgccatgaatatttaggagtccctggtttaggatttgttgtctaaatctgacgaactgtattcctgtttatccaccagcgatggccttcaaacaagttgtaaatataaatttgggttacaaatt

SEQ ID NO: 16020 - DNA, 823 bp, Zea Mays
ccaccgacgactgcaagaggttgccgacagcgagcatcgtcagcgacggcgtgagacaactcactggtgagagacataagccgaatgcagcagagcaactacgggagggaaggattctcgcatataactgtcacaggtgctcttgctcacgggacgaaggaggtggaagtgtggctacaaacatttggtccaggtcaaaggaccccaatccacaggcattcttgtgaagaggttttcattgtcctcaaggggaaaggcacgctcttactcgggtcgagctcgctgaagtacccaggacagccgcaggaagttcccgtctttcagaataccacattttcgatccctgtaaatgatccacatcaggtctggaattctaatgagcacgaagatttgcaagttcttgtgatcatatcacgcccaccggtcaagatatttatatatgatgattggagtatgcctcatacagctgcaaagctgaaattcccctacttctgggatgaggactgcttgccagcaccaaaagatgaactctaggttaagtggttcctgcaatttatcaacttcgtgttcgtccacaatcctggtggactacgattcacatctacaagttgaaaaccattagtgtactcttcatgtgtagttttgtgttgtgactctgggaaatccatattgacaacgtttataaaattaagcacttctggagctgagctactgtggtctatattctagatttttgaagcagtattggtttgtttcgacaaaagatttctgctctttattgtgatatcccagtgttaatcatatgggttttaggtaatcattc

SEQ ID NO: 16021 - DNA, 532 bp, Zea Mays
gtcgaagcccacgcctacacctccatttcgtcgaaaccagttctgccgtgtttcataatctcaataatctctcgaggaggataccacctcccgaacatggtgcgtcgacgacccgccaccggggcagcccagagaccccaactcgccgccgtcggtcgcgggctgctcctcgcgtccgtcctcgcggccgctgcctcctccctcccagtagccgagtcgtcctgcccgcgaggtggaagtgtggctacaaacatttggtccaggtcaaaggaccccaatccacaggcattcttgtgaagaggttttcattgtcctcaaggggaaaggcacgctcttactcgggtcgagctcgctgaagtacccaggacagccgcaggaagttcccgtctttcagaataccacattttcgatccctgtaaatgatccacatcaggtctggaattctaatgagcacgaagatttgcaagttcttgtgatcatatcacgcccaccggtcaagatcaatttcgattgtacagcgaataattcattg

SEQ ID NO: 16022 - DNA, 639 bp, Zea Mays
gtcgaagcccacgcctacacctccatttcgtcgaaaccagttctgccgtgtttcataatctcaataatctctcgaggaggataccacctcccgaacatggtgcgtcgacgacccgccaccggggcagcccagagaccccaactcgccgccgtcggtcgcgggctgctcctcgcgtccgtcctcgcggccgctgcctcctccctcccagtagccgagtcgtcctgcccgcgagacaactcactggtgagagacataagccgaatgcagcagagcaactacgggagggaaggattctcgcatataactgtcacaggtgctcttgctcacgggacgaaggaggtggaagtgtggctacaaacatttggtccaggtcaaaggaccccaatccacaggcattcttgtgaagaggttttcattgtcctcaaggggaaaggcacgctcttactcgggtcgagctcgctgaagtacccaggacagccgcaggaagttcccgtctttcagaataccacattttcgatccctgtaaatgatccacatcaggtctggaattctaatgagcacgaagatttgcaagttcttgtgatcatatcacgcccaccggtcaagatcaatttcgattgtacagcgaataattcattg

SEQ ID NO: 16023 - DNA, 625 bp, Zea Mays
gtcgaagcccacgcctacacctccatttcgtcgaaaccagttctgccgtgtttcataatctcaataatctctcgaggaggataccacctcccgaacatggtgcgtcgacgacccgccaccggggcagcccagagaccccaactcgccgccgtcggtcgcgggctgctcctcgcgtccgtcctcgcggccgctgcctcctccctcccagtagccgagtcgtcctgcccgcgagacaactcactggtgagagacataagccgaatgcagcagagcaactacgggagggaaggattctcgcatataactgtcacaggtgctcttgctcacgggacgaaggaggtggaagtgtggctacaaacatttggtccaggtcaaaggaccccaatccacaggcattcttgtgaagaggttttcattgtcctcaaggggaaaggcacgctcttactcgggtcgagctcgctgaagtacccaggacagccgcaggaagttcccgtctttcagaataccacattttcgatccctgtaaatgatccacatcaggtctggaattctaatgagcacgaagatttgcaagttcttgtgatcatatcacgcccaccggtcaagatttgacatcgtcatcgtc

SEQ ID NO: 16024 - DNA, 2759 bp, Zea Mays
gtcactgagcatcagtgggtacacaccgccatgacattgataatgctgtttacagaaggagatgaagacgagtgggatcgagaggatcaaggaaatgctgctgtcaaggttatgtgccgtttatgcttttcaggagaaaatgagggcagcacgaaagctgccaaaatgcttccttgcaaactctgcagcaaacgatatcatagaaactgtttgaaaagctggggagaacatagagaccttttccactggagctcatgggtctgtccttcttgccgcagttgtgaggtgtgccgacgtcctggcgaccccaacaagttgatgttctgtaaaaggtgtgatgacccttatcactgttattgtcagcaaccatcgcacaagaatgttacccatgggccatatttatgtccaaaacatacaaggtgccacagctgtggatctggtgtgcctggtagtggccatagcacaaggtggtttttggggtacacatgctgtgatgcgtgtggacgattgtttgtgaaaggaaattactgtccagtttgcttgaaggtttatagagactctgaagtgatacctatggtttgctgcgatgtttgtgaaaagtgggtgcatattgagtgtgatggcatcagtgaggaaaagtaccaacaattccaagctgatcaaaaccttcagtatacatgtgcagcatgccgtggcgaatgctcccagatcagggacactgaggatgcaatccgggagctttggaagaggagggatgttgctgatcatgagctcatgattactttgcgggctgctgctaaactgccttctcttgaagatgtgtcaccgctttatccaaactcggatgatgagaaacttggtgcatacgtattgaaaagtgagagtagaaatacactaaaattttcattaaaaagtaacagtagtaagcctccaccggatacacctgagcaagagaaggttgtttttaagagctctggatcaaataaaaagccttccaaaaagaaaggtggtcagggtaataaaacaaatgatggccatgatgaaatatttctggagaggaggcatgatgttaaatcatcaaatagccgtttgggagatcaaagtatagatggcaatcatgatatgagcccttttaagaatgatgataatgcctatatttcatcttcaactcgaagttcagaaaagaatttgaaatctccatccatgaaagctgtgacaaacaatgctgatatgatacccaaagtcaagattaaaggcagtaaggtttcgagtttgcattacaaagatggtgaagaaaatacttccaaggctgacactggaaaagctaccaagttggttatccatcttggttcacggcataaaactaggagtggctctcctaagtcggagctgtccaattatcaaagagagcaagatttaggatcaatacatggacggaaattagatgtcacaagccagctgaaaggttcaagaagcgaggtaaaagagagaagtgtaatgaagttagttagagagactggggtacaacaaagaaatagccttttgggtgatcttggtacctcaaaaaagcatgcaactgggaaaaggagcaatgctctaatttctggaatggagaatggaaatgaaactggtactagaaaccggccatttgcacagaaacaatctcattctagtcaggtggacgagaaccagggaactgctgactctcctgataacttgaagccatcattgctcaaactcaagtttaagcgtccacattatgagcagctaaacacccaggcctctcaaccagaggagccgacctcctgggtttctcagcaagaagaccagttcaatgttgctaaaggccagagatcaaagaggaagaggccttcgatggagaaggcagatggtttggatggtacgactccagccaagaggcatcatcagagcactgatgatgaagtgatggacgcaaattggatcctacgcaagttgggcaaggatgctatcggaaagaggattgaagtccatctaacttctgatggcaaatggcatcaagggatggtgtcgaatgtcatgggtggcacactgtgtattcagttagacaatggcaggtctgagaacgtggagctggggaagcaggccatccgcttgattgcttcaagatcaaagggccggaagcgatgaaacctttttccccatgtgcagcttaggacctgttctcgctcaacccattgccgtgattatggcaggtagagttctccccttgaggtttgacatccgctgaagcacagcagtgaccacctgctgttcatgtggggaaacgcgctgcctctcagcctttgctgctgactggacgagataccgagcgcaacgtcatctgttgcgccatgtttcgctagcctagcgtgtaacagactttgttgccggaagcccatttgctttccattagaatctgctagggtagggaaaccgaggaggttttagattaccttggatgtaaaagaagcaggtaacgccgctgtatctggggtgttttgtacatgtggttttcggacgagtttctgaacaactcgttattgacttatttggtggcgttatttgctggccactggccgggattttgttgtcttgttacatatactgacagtaataatttgtctacatatataagctggcgcgaaacgggggctttgttggaggcgaatgcgacgaggacaaaggcgactcagcatcattattgtaataccatggtttcaaagggaatttcaggaagg

SEQ ID NO: 16025 - DNA, 2694 bp, Zea Mays
ctcacatccacgtcactgagcatcagtgggtacacaccgccatgacattgataatgctgtttacaggaggcagaaggagatgaagacgagtgggatcgagaggatcaaggaaatgctgctgtcaaggttatgtgccgtttatgcttttcaggagaaaatgagggcagcacgaaagctgccaaaatgcttccttgcaaactctgcagcaaacgatatcatagaaactgtttgaaaagctggggagaacatagagaccttttccactggagctcatgggtctgtccttcttgccgcagttgtgaggtgtgccgacgtcctggcgaccccaacaagttgatgttctgtaaaaggtgtgatgacccttatcactgttattgtcagcaaccatcgcacaagaatgttacccatgggccatatttatgtccaaaacatacaaggtgccacagctgtggatctggtgtgcctggtagtggccatagcacaaggtggtttttggggtacacatgctgtgatgcgtgtggacgattgtttgtgaaaggaaattactgtccagtttgcttgaagtgaggaaaagtaccaacaattccaagctgatcaaaaccttcagtatacatgtgcagcatgccgtggcgaatgctcccagatcagggacactgaggatgcaatccgggagctttggaagaggagggatgttgctgatcatgagctcatgattactttgcgggctgctgctaaactgccttctcttgaagatgtgtcaccgctttatccaaactcggatgatgagaaacttggtgcatacgtattgaaaagtgagagtagaaatacactaaaattttcattaaaaagtaacagtagtaagcctccaccggatacacctgagcaagagaaggttgtttttaagagctctggatcaaataaaaagccttccaaaaagaaaggtggtcagggtaataaaacaaatgatggccatgatgaaatatttctggagaggaggcatgatgttaaatcatcaaatagccgtttgggagatcaaagtatagatggcaatcatgatatgagcccttttaagaatgatgataatgcctatatttcatcttcaactcgaagttcagaaaagaatttgaaatctccatccatgaaagctgtgacaaacaatgctgatatgatacccaaagtcaagattaaaggcagtaaggtttcgagtttgcattacaaagatggtgaagaaaatacttccaaggctgacactggaaaagctaccaagttggttatccatcttggttcacggcataaaactaggagtggctctcctaagtcggagctgtccaattatcaaagagagcaagatttaggatcaatacatggacggaaattagatgtcacaagccagctgaaaggttcaagaagcgaggtaaaagagagaagtgtaatgaagttagttagagagactggggtacaacaaagaaatagccttttgggtgatcttggtacctcaaaaaagcatgcaactgggaaaaggagcaatgctctaatttctggaatggagaatggaaatgaaactggtactagaaaccggccatttgcacagaaacaatctcattctagtcaggtggacgagaaccagggaactgctgactctcctgataacttgaagccatcattgctcaaactcaagtttaagcgtccacattatgagcagctaaacacccaggcctctcaaccagaggagccgacctcctgggtttctcagcaagaagaccagttcaatgttgctaaaggccagagatcaaagaggaagaggccttcgatggagaaggcagatggtttggatggtacgactccagccaagaggcatcatcagagcactgatgatgaagtgatggacgcaaattggatcctacgcaagttgggcaaggatgctatcggaaagaggattgaagtccatctaacttctgatggcaaatggcatcaagggatggtgtcgaatgtcatgggtggcacactgtgtattcagttagacaatggcaggtctgagaacgtggagctggggaagcaggccatccgcttgattgcttcaagatcaaagggccggaagcgatgaaacctttttccccatgtgcagcttaggacctgttctcgctcaacccattgccgtgattatggcaggtagagttctccccttgaggtttgacatccgctgaagcacagcagtgaccacctgctgttcatgtggggaaacgcgctgcctctcagcctttgctgctgactggacgagataccgagcgcaacgtcatctgttgcgccatgtttcgctagcctagcgtgtaacagactttgttgccggaagcccatttgctttccattagaatctgctagggtagggaaaccgaggaggttttagattaccttggatgtaaaagaagcaggtaacgccgctgtatctggggtgttttgtacatgtggttttcggacgagtttctgaacaactcgttattgacttatttggtggcgttatttgctggccactggccgggattttgttgtcttgttacatatactgacagtaataatttgtctacatatataagctggcgcgaaacgggggctttgttggaggcgaatgcgacgaggacaaaggcgactcagcatcattattgtaataccatggtttcaaagggaatttcaggaagg

SEQ ID NO: 16026 - DNA, 2868 bp, Zea Mays
cttttattttgaggcttataggagtgcagtcgatgaaagactgttccttttgggaattctgaggcatcctagcactgggactctgttggcgctcacatccacgtcactgagcatcagtgggtacacaccgccatgacattgataatgctgtttacaggaggcagaaggagatgaagacgagtgggatcgagaggatcaaggaaatgctgctgtcaaggttatgtgccgtttatgcttttcaggagaaaatgagggcagcacgaaagctgccaaaatgcttccttgcaaactctgcagcaaacgatatcatagaaactgtttgaaaagctggggagaacatagagaccttttccactggagctcatgggtctgtccttcttgccgcagttgtgaggtgtgccgacgtcctggcgaccccaacaagttgatgttctgtaaaaggtgtgatgacccttatcactgttattgtcagcaaccatcgcacaagaatgttacccatgggccatatttatgtccaaaacatacaaggtgccacagctgtggatctggtgtgcctggtagtggccatagcacaaggtggtttttggggtacacatgctgtgatgcgtgtggacgattgtttgtgaaaggaaattactgtccagtttgcttgaaggtttatagagactctgaagtgatacctatggtttgctgcgatgtttgtgaaaagtgggtgcatattgagtgtgatggcatcagtgaggaaaagtaccaacaattccaagctgatcaaaaccttcagtatacatgtgcagcatgccgtggcgaatgctcccagatcagggacactgaggatgcaatccgggagctttggaagaggagggatgttgctgatcatgagctcatgattactttgcgggctgctgctaaactgccttctcttgaagatgtgtcaccgctttatccaaactcggatgatgagaaacttggtgcatacgtattgaaaagtgagagtagaaatacactaaaattttcattaaaaagtaacagtagtaagcctccaccggatacacctgagcaagagaaggttgtttttaagagctctggatcaaataaaaagccttccaaaaagaaaggtggtcagggtaataaaacaaatgatggccatgatgaaatatttctggagaggaggcatgatgttaaatcatcaaatagccgtttgggagatcaaagtatagatggcaatcatgatatgagcccttttaagaatgatgataatgcctatatttcatcttcaactcgaagttcagaaaagaatttgaaatctccatccatgaaagctgtgacaaacaatgctgatatgatacccaaagtcaagattaaaggcagtaaggtttcgagtttgcattacaaagatggtgaagaaaatacttccaaggctgacactggaaaagctaccaagttggttatccatcttggttcacggcataaaactaggagtggctctcctaagtcggagctgtccaattatcaaagagagcaagatttaggatcaatacatggacggaaattagatgtcacaagccagctgaaaggttcaagaagcgaggtaaaagagagaagtgtaatgaagttagttagagagactggggtacaacaaagaaatagccttttgggtgatcttggtacctcaaaaaagcatgcaactgggaaaaggagcaatgctctaatttctggaatggagaatggaaatgaaactggtactagaaaccggccatttgcacagaaacaatctcattctagtcaggtggacgagaaccagggaactgctgactctcctgataacttgaagccatcattgctcaaactcaagtttaagcgtccacattatgagcagctaaacacccaggcctctcaaccagaggagccgacctcctgggtttctcagcaagaagaccagttcaatgttgctaaaggccagagatcaaagaggaagaggccttcgatggagaaggcagatggtttggatggtacgactccagccaagaggcatcatcagagcactgatgatgaagtgatggacgcaaattggatcctacgcaagttgggcaaggatgctatcggaaagaggattgaagtccatctaacttctgatggcaaatggcatcaagggatggtgtcgaatgtcatgggtggcacactgtgtattcagttagacaatggcaggtctgagaacgtggagctggggaagcaggccatccgcttgattgcttcaagatcaaagggccggaagcgatgaaacctttttccccatgtgcagcttaggacctgttctcgctcaacccattgccgtgattatggcaggtagagttctccccttgaggtttgacatccgctgaagcacagcagtgaccacctgctgttcatgtggggaaacgcgctgcctctcagcctttgctgctgactggacgagataccgagcgcaacgtcatctgttgcgccatgtttcgctagcctagcgtgtaacagactttgttgccggaagcccatttgctttccattagaatctgctagggtagggaaaccgaggaggttttagattaccttggatgtaaaagaagcaggtaacgccgctgtatctggggtgttttgtacatgtggttttcggacgagtttctgaacaactcgttattgacttatttggtggcgttatttgctggccactggccgggattttgttgtcttgttacatatactgacagtaataatttgtctacatatataagctggcgcgaaacgggggctttgttggaggcgaatgcgacgaggacaaaggcgactcagcatcattattgtaataccatggtttcaaagggaatttcaggaagg

SEQ ID NO: 16027 - DNA, 3104 bp, Zea Mays
atcagactgacgcgaccacccatctgggctctggccgcctcggcccccatcgcctccctcccatggcgtttcacgtcgcgtgccccatcacttgcaggagggtgtgcgactgcgagctagggttcggcgcgtcggcgtcgaggaagggaggaggtggcgcgttggcggcggtatgggcgggcacggcggcggctctcgaggattttctcgcggatccgtggttgctgcggccggcaggggccgttgacgcggatgcggcgacggtgcaggtggaggtgccgccccttgagccggcccctgaggatggggaggacgaggcccgccgggcggcagcgcagcgcggcgccgccgcggcagaggacctcgccaggcgcttcgagagcggcgcctacggatcgccggaggcagaaggagatgaagacgagtgggatcgagaggatcaaggaaatgctgctgtcaaggttatgtgccgtttatgcttttcaggagaaaatgagggcagcacgaaagctgccaaaatgcttccttgcaaactctgcagcaaacgatatcatagaaactgtttgaaaagctggggagaacatagagaccttttccactggagctcatgggtctgtccttcttgccgcagttgtgaggtgtgccgacgtcctggcgaccccaacaagttgatgttctgtaaaaggtgtgatgacccttatcactgttattgtcagcaaccatcgcacaagaatgttacccatgggccatatttatgtccaaaacatacaaggtgccacagctgtggatctggtgtgcctggtagtggccatagcacaaggtggtttttggggtacacatgctgtgatgcgtgtggacgattgtttgtgaaaggaaattactgtccagtttgcttgaagagactctgaagtgatacctatggtttgctgcgatgtttgtgaaaagtgggtgcatattgagtgtgatggcatcagtgaggaaaagtaccaacaattccaagctgatcaaaaccttcagtatacatgtgcagcatgccgtggcgaatgctcccagatcagggacactgaggatgcaatccgggagctttggaagaggagggatgttgctgatcatgagctcatgattactttgcgggctgctgctaaactgccttctcttgaagatgtgtcaccgctttatccaaactcggatgatgagaaacttggtgcatacgtattgaaaagtgagagtagaaatacactaaaattttcattaaaaagtaacagtagtaagcctccaccggatacacctgagcaagagaaggttgtttttaagagctctggatcaaataaaaagccttccaaaaagaaaggtggtcagggtaataaaacaaatgatggccatgatgaaatatttctggagaggaggcatgatgttaaatcatcaaatagccgtttgggagatcaaagtatagatggcaatcatgatatgagcccttttaagaatgatgataatgcctatatttcatcttcaactcgaagttcagaaaagaatttgaaatctccatccatgaaagctgtgacaaacaatgctgatatgatacccaaagtcaagattaaaggcagtaaggtttcgagtttgcattacaaagatggtgaagaaaatacttccaaggctgacactggaaaagctaccaagttggttatccatcttggttcacggcataaaactaggagtggctctcctaagtcggagctgtccaattatcaaagagagcaagatttaggatcaatacatggacggaaattagatgtcacaagccagctgaaaggttcaagaagcgaggtaaaagagagaagtgtaatgaagttagttagagagactggggtacaacaaagaaatagccttttgggtgatcttggtacctcaaaaaagcatgcaactgggaaaaggagcaatgctctaatttctggaatggagaatggaaatgaaactggtactagaaaccggccatttgcacagaaacaatctcattctagtcaggtggacgagaaccagggaactgctgactctcctgataacttgaagccatcattgctcaaactcaagtttaagcgtccacattatgagcagctaaacacccaggcctctcaaccagaggagccgacctcctgggtttctcagcaagaagaccagttcaatgttgctaaaggccagagatcaaagaggaagaggccttcgatggagaaggcagatggtttggatggtacgactccagccaagaggcatcatcagagcactgatgatgaagtgatggacgcaaattggatcctacgcaagttgggcaaggatgctatcggaaagaggattgaagtccatctaacttctgatggcaaatggcatcaagggatggtgtcgaatgtcatgggtggcacactgtgtattcagttagacaatggcaggtctgagaacgtggagctggggaagcaggccatccgcttgattgcttcaagatcaaagggccggaagcgatgaaacctttttccccatgtgcagcttaggacctgttctcgctcaacccattgccgtgattatggcaggtagagttctccccttgaggtttgacatccgctgaagcacagcagtgaccacctgctgttcatgtggggaaacgcgctgcctctcagcctttgctgctgactggacgagataccgagcgcaacgtcatctgttgcgccatgtttcgctagcctagcgtgtaacagactttgttgccggaagcccatttgctttccattagaatctgctagggtagggaaaccgaggaggttttagattaccttggatgtaaaagaagcaggtaacgccgctgtatctggggtgttttgtacatgtggttttcggacgagtttctgaacaactcgttattgacttatttggtggcgttatttgctggccactggccgggattttgttgtcttgttacatatactgacagtaataatttgtctacatatataagctggcgcgaaacgggggctttgttggaggcgaatgcgacgaggacaaaggcgactcagcatcattattgtaataccatggtttcaaagggaatttcaggaagg

SEQ ID NO: 16028 - DNA, 3063 bp, Zea Mays
caaaccccaccccttccgcccgaattcatttcgaatcagactgacgcgaccacccatctgggctctggccgcctcggcccccatcgcctccctcccatggcgtttcacgtcgcgtgccccatcacttgcaggagggtgtgcgactgcgagctagggttcggcgcgtcggcgtcgaggaagggaggaggtggcgcgttggcggcggtatgggcgggcacggcggcggctctcgaggattttctcgcggatccgtggttgctgcggccggcaggggccgttgacgcggatgcggcgacggtgcaggtggaggtgccgccccttgagccggcccctgaggatggggaggacgaggcccgccgggcggcagcgcagcgcggcgccgccgcggcagaggacctcgccaggcgcttcgagagcggcgcctacggatcgccggaggcagaaggagatgaagacgagtgggatcgagaggatcaaggaaatgctgctgtcaaggttatgtgccgtttatgcttttcaggagaaaatgagggcagcacgaaagctgccaaaatgcttccttgcaaactctgcagcaaacgatatcatagaaactgtttgaaaagctggggagaacatagagaccttttccactggagctcatgggtctgtccttcttgccgcagttgtgaggtgtgccgacgtcctggcgaccccaacaagttgatgttctgtaaaaggtgtgatgacccttatcactgttattgtcagcaaccatcgcacaagaatgttacccatgggccatatttatgtccaaaacatacaaggtgccacagctgtggatctggtgtgcctggtagtggccatagcacaaggtggtttttggggtacacatgctgtgatgcgtgtggacgattgtttgtgaaaggaaattactgtccagtttgcttgaagtgaggaaaagtaccaacaattccaagctgatcaaaaccttcagtatacatgtgcagcatgccgtggcgaatgctcccagatcagggacactgaggatgcaatccgggagctttggaagaggagggatgttgctgatcatgagctcatgattactttgcgggctgctgctaaactgccttctcttgaagatgtgtcaccgctttatccaaactcggatgatgagaaacttggtgcatacgtattgaaaagtgagagtagaaatacactaaaattttcattaaaaagtaacagtagtaagcctccaccggatacacctgagcaagagaaggttgtttttaagagctctggatcaaataaaaagccttccaaaaagaaaggtggtcagggtaataaaacaaatgatggccatgatgaaatatttctggagaggaggcatgatgttaaatcatcaaatagccgtttgggagatcaaagtatagatggcaatcatgatatgagcccttttaagaatgatgataatgcctatatttcatcttcaactcgaagttcagaaaagaatttgaaatctccatccatgaaagctgtgacaaacaatgctgatatgatacccaaagtcaagattaaaggcagtaaggtttcgagtttgcattacaaagatggtgaagaaaatacttccaaggctgacactggaaaagctaccaagttggttatccatcttggttcacggcataaaactaggagtggctctcctaagtcggagctgtccaattatcaaagagagcaagatttaggatcaatacatggacggaaattagatgtcacaagccagctgaaaggttcaagaagcgaggtaaaagagagaagtgtaatgaagttagttagagagactggggtacaacaaagaaatagccttttgggtgatcttggtacctcaaaaaagcatgcaactgggaaaaggagcaatgctctaatttctggaatggagaatggaaatgaaactggtactagaaaccggccatttgcacagaaacaatctcattctagtcaggtggacgagaaccagggaactgctgactctcctgataacttgaagccatcattgctcaaactcaagtttaagcgtccacattatgagcagctaaacacccaggcctctcaaccagaggagccgacctcctgggtttctcagcaagaagaccagttcaatgttgctaaaggccagagatcaaagaggaagaggccttcgatggagaaggcagatggtttggatggtacgactccagccaagaggcatcatcagagcactgatgatgaagtgatggacgcaaattggatcctacgcaagttgggcaaggatgctatcggaaagaggattgaagtccatctaacttctgatggcaaatggcatcaagggatggtgtcgaatgtcatgggtggcacactgtgtattcagttagacaatggcaggtctgagaacgtggagctggggaagcaggccatccgcttgattgcttcaagatcaaagggccggaagcgatgaaacctttttccccatgtgcagcttaggacctgttctcgctcaacccattgccgtgattatggcaggtagagttctccccttgaggtttgacatccgctgaagcacagcagtgaccacctgctgttcatgtggggaaacgcgctgcctctcagcctttgctgctgactggacgagataccgagcgcaacgtcatctgttgcgccatgtttcgctagcctagcgtgtaacagactttgttgccggaagcccatttgctttccattagaatctgctagggtagggaaaccgaggaggttttagattaccttggatgtaaaagaagcaggtaacgccgctgtatctggggtgttttgtacatgtggttttcggacgagtttctgaacaactcgttattgacttatttggtggcgttatttgctggccactggccgggattttgttgtcttgttacatatactgacagtaataatttgtctacatatataagctggcgcgaaacgggggctttgttggaggcgaatgcgacgaggacaaaggcgactcagcatcattattgtaataccatggtttcaaagggaatttcaggaagg

SEQ ID NO: 16029 - DNA, 1720 bp, Zea Mays
gttcctccctctcccggatccggctgggccctcatagagcctccgctcgatctgcccccggatcggattggccgccgcgcatctcatgggtgaggaagctgtccacttcagcgtcgtcgacgccaaggactgcaaacagagtgcctttgaagtcggcgataagacgtatgttatttgtagatcagatgatgatttgaaaacatctgctgttaaaattcacgacaagctcactcagacttggctctcacccacaatacttggggaacagccacttctaaccaagtcacagtctgtgattcctgtcagtgatgagaagatattagttatcgagaagggtgttcccttgaatgagtccatctggttccttgagatagacaccccctttgttaagcaacaacggaaaatcaaggaaacagaagttgtttcttggagcaagggagtaatcggcgttggccaaaaaccagttgtgattagtggtccttctggtgttggtaaagggacattgattgcaaagttgatgaaagactatccatcgaagtttggtttttctgttagccacactacaagatctccaagggaaaaggaaatagatggtgttcactaccacttcacagaacgaatcaagatagagaaagatataagcgagggcaaatttcttgaattcgctcatgttcatggaaatgtgtatggcacaagtatcgaagcagtcgaatctgtaactgatgagggaaagaggtgtattctcgacattgatgtccaaggagctcgatccgtgagggcttcttctcttgaagcaatattcatctttgtatgccctccatcgttcgaggaactagagaagcgccttcgggcacggggtactgaaacagaggagcaaatccagaaacgactcagaaatgctcaggctgaacttgatcagtccaatgaaccaggtctctttcatcatcttttggtcaacgatgaccttgagacatgctatgagaatttgaagaagttgctttctctggatgatgaccaagaagattcagatgatttttttaacaaggaggacaaagaaactgcaagttactctatcgtgtccaaaactgactcagaaattttgttgcaatctgagactaacgaaggcaaaaatggagccatacacttgctggcacttgatttgtcgtctctctcaggcggtgcgcctggacgaacaaggggccttaagattggctcagttaactccttttgacaagggcttatattggcgttttagatgacccaaagcattcttcaaaatgatacagcagaagcactgacttgaattttggatcaattcccatgagctgatatcttcaaaaacatcttagttaggaaaaagaaggaaacgaaaatggaatttatttccatttgttatttgtttgggtgccacaaggaggcaaaatcatagcaaggaattgtaccttattttttttagggattgtgtacttttctgctgttgagaggtatttggtggttggataatgtgatggagcctatctaaatgttctttcatagtggtctgaataacattgagctcattgctggattatgttgtgattctttcaactcttgggtcatgttgcacagaactaactcgtagttctgaccaaagagaaatgtttttttatgttaagtacgccctgccgtaagcaagtgtaaactttggggacaaattgcttttcatgtatttgagtttgat

SEQ ID NO: 16030 - DNA, 1607 bp, Zea Mays
gtggaaccccagggttcctccctctcccggatccggctgggccctcatagagcctccgctcgatctgcccccggatcggattggccgccgcgcatctcatgggtgaggaagctgtccacttcagcgtcgtcgacgccaaggactgcaaacagagtgcctttgaagtcggcgataagacgtatgttatttgtagatcagatgatgatttgaaaacatctgctgttaaaattcacgacaagctcactcagacttggctctcacccacaatacttggggaacagccacttctaaccaagtcacagtctgtgattcctgtcagtgatgagaagatattagttatcgagaagggtgttcccttgaatgagtccatctggttccttgagacaccccctttgttaagcaacaacggaaaatcaaggaaacagaagttgtttcttggagcaagggagtaatcggcgttggccaaaaaccagttgtgattagtggtccttctggtgttggtaaagggacattgattgcaaagttgatgaaagactatccatcgaagtttggtttttctgttagccacactacaagatctccaagggaaaaggaaatagatggtgttcactaccacttcacagaacgaatcaagatagagaaagatataagcgagggcaaatttcttgaattcgctcatgttcatggaaatgtgtatggcacaagtatcgaagcagtcgaatctgtaactgatgagggaaaggggtactgaaacagaggagcaaatccagaaacgactcagaaatgctcaggctgaacttgatcagtccaatgaaccaggtctctttcatcatcttttggtcaacgatgaccttgagacatgctatgagaatttgaagaagttgctttctctggatgatgaccaagaagattcagatgatttttttaacaaggaggacaaagaaactgcaagttactctatcgtgtccaaaactgactcagaaattttgttgcaatctgagactaacgaaggcaaaaatggagccatacacttgctggcacttgatttgtcgtctctctcaggcggtgcgcctggacgaacaaggggccttaagattggctcagttaactccttttgacaagggcttatattggcgttttagatgacccaaagcattcttcaaaatgatacagcagaagcactgacttgaattttggatcaattcccatgagctgatatcttcaaaaacatcttagttaggaaaaagaaggaaacgaaaatggaatttatttccatttgttatttgtttgggtgccacaaggaggcaaaatcatagcaaggaattgtaccttattttttttagggattgtgtacttttctgctgttgagaggtatttggtggttggataatgtgatggagcctatctaaatgttctttcatagtggtctgaataacattgagctcattgctggattatgttgtgattctttcaactcttgggtcatgttgcacagaactaactcgtagttctgaccaaagagaaatgtttttttatgttaagtacgccctgccgtaagcaagtgtaaactttggggacaaattgcttttcatgtatttgagtttgat

SEQ ID NO: 16031 - DNA, 1605 bp, Zea Mays
ctcgcgccgagccggaatccgcccggttgccggggccctcatagagcctccgctcgatctgcccccggatcggattggccgccgcgcatctcatgggtgaggaagctgtccacttcagcgtcgtcgacgccaaggactgcaaacagagtgcctttgaagtcggcgataagacgtatgttatttgtagatcagatgatgatttgaaaacatctgctgttaaaattcacgacaagctcactcagacttggctctcacccacaatacttggggaacagccacttctaaccaagtcacagtctgtgattcctgtcagtgatgagaagatattagttatcgagaagggtgttcccttgaatgagtccatctggttccttgagatagacaccccctttgttaagcaacaacggaaaatcaaggaaacagaagttgtttcttggagcaagggagtaatcggcgttggccaaaaaccagttgtgattagtggtccttctggtgttggtaaagggacattgattgcaaagttgatgaaagactatccatcgaagtttggtttttctgttagccacactacaagatctccaagggaaaaggaaatagatggtgttcactaccacttcacagaacgaatcaagatagagaaagatataagcgagggcaaatttcttgaattcgctcatgttcatggaaatgtgtatggcacaagtatcgaagcagtcgaatctgtaactgatgagggaaaggggtactgaaacagaggagcaaatccagaaacgactcagaaatgctcaggctgaacttgatcagtccaatgaaccaggtctctttcatcatcttttggtcaacgatgaccttgagacatgctatgagaatttgaagaagttgctttctctggatgatgaccaagaagattcagatgatttttttaacaaggaggacaaagaaactgcaagttactctatcgtgtccaaaactgactcagaaattttgttgcaatctgagactaacgaaggcaaaaatggagccatacacttgctggcacttgatttgtcgtctctctcaggcggtgcgcctggacgaacaaggggccttaagattggctcagttaactccttttgacaagggcttatattggcgttttagatgacccaaagcattcttcaaaatgatacagcagaagcactgacttgaattttggatcaattcccatgagctgatatcttcaaaaacatcttagttaggaaaaagaaggaaacgaaaatggaatttatttccatttgttatttgtttgggtgccacaaggaggcaaaatcatagcaaggaattgtaccttattttttttagggattgtgtacttttctgctgttgagaggtatttggtggttggataatgtgatggagcctatctaaatgttctttcatagtggtctgaataacattgagctcattgctggattatgttgtgattctttcaactcttgggtcatgttgcacagaactaactcgtagttctgaccaaagagaaatgtttttttatgttaagtacgccctgccgtaagcaagtgtaaactttggggacaaattgcttttcatgtatttgagtttgat

SEQ ID NO: 16032 - DNA, 1908 bp, Zea Mays
gcaaaagtcgtataaagacaccgggacctcgtcgtcgcttccccccactgattccgagtccatctttccccgccgccggccgtgatccctcctcgccgctgaccgccccgcctgccccggcattctcccgctccagatccagggccctcatagagcctccgctcgatctgcccccggatcggattggccgccgcgcatctcatggtgagtttgattagctgctggtgctacatctatgagcttgcaaggtgaggaagctgtccacttcagcgtcgtcgacgccaaggactgcaaacagagtgcctttgaagtcggcgataagacgtatgttatttgtagatcagatgatgatttgaaaacatctgctgttaaaattcacgacaagctcactcagacttggctctcacccacaatacttggggaacagccacttctaaccaagtcacagtctgtgattcctgtcagtgatgagaagatattagttatcgagaagggtgttcccttgaatgagtccatctggttccttgagatagacaccccctttgttaagcaacaacggaaaatcaaggaaacagaagttgtttcttggagcaagggagtaatcggcgttggccaaaaaccagttgtgattagtggtccttctggtgttggtaaagggacattgattgcaaagttgatgaaagactatccatcgaagtttggtttttctgttagccacactacaagatctccaagggaaaaggaaatagatggtgttcactaccacttcacagaacgaatcaagatagagaaagatataagcgagggcaaatttcttgaattcgctcatgttcatggaaatgtgtatggcacaagtatcgaagcagtcgaatctgtaactgatgagggaaaggtaagattaatacaatctttaataaaactttctgaaaggtgaactgcttcatctttccattgctttttcgttgaagaggtgtattctcgacattgatgtccaaggagctcgatccgtgagggcttcttctcttgaagcaatattcatctttgggtactgaaacagaggagcaaatccagaaacgactcagaaatgctcaggctgaacttgatcagtccaatgaaccaggtctctttcatcatcttttggtcaacgatgaccttgagacatgctatgagaatttgaagaagttgctttctctggatgatgaccaagaagattcagatgatttttttaacaaggaggacaaagaaactgcaagttactctatcgtgtccaaaactgactcagaaattttgttgcaatctgagactaacgaaggcaaaaatggagccatacacttgctggcacttgatttgtcgtctctctcaggcggtgcgcctggacgaacaaggggccttaagattggctcagttaactccttttgacaagggcttatattggcgttttagatgacccaaagcattcttcaaaatgatacagcagaagcactgacttgaattttggatcaattcccatgagctgatatcttcaaaaacatcttagttaggaaaaagaaggaaacgaaaatggaatttatttccatttgttatttgtttgggtgccacaaggaggcaaaatcatagcaaggaattgtaccttattttttttagggattgtgtacttttctgctgttgagaggtatttggtggttggataatgtgatggagcctatctaaatgttctttcatagtggtctgaataacattgagctcattgctggattatgttgtgattctttcaactcttgggtcatgttgcacagaactaactcgtagttctgaccaaagagaaatgtttttttatgttaagtacgccctgccgtaagcaagtgtaaactttggggacaaattgcttttcatgtatttgagtttgat

SEQ ID NO: 16033 - DNA, 1893 bp, Zea Mays
gcaaaagtcgtataaagacaccgggacctcgtcgtcgcttccccccactgattccgagtccatctttccccgccgccggccgtgatccctcctcgccgctgaccgccccgcctgccccggcattctcccgctccagatccagcccgcgccgccggcgccacctgggctcgcgccgagccggaatccgcccggttgccggggccctcatagagcctccgctcgatctgcccccggatcggattggccgccgcgcatctcatgggtgaggaagctgtccacttcagcgtcgtcgacgccaaggactgcaaacagagtgcctttgaagtcggcgataagacgtatgttatttgtagatcagatgatgatttgaaaacatctgctgttaaaattcacgacaagctcactcagacttggctctcacccacaatacttggggaacagccacttctaaccaagtcacagtctgtgattcctgtcagtgatgagaagatattagttatcgagaagggtgttcccttgaatgagtccatctggttccttgagatagacaccccctttgttaagcaacaacggaaaatcaaggaaacagaagttgtttcttggagcaagggagtaatcggcgttggccaaaaaccagttgtgattagtggtccttctggtgttggtaaagggacattgattgcaaagttgatgaaagactatccatcgaagtttggtttttctgttagccacactacaagatctccaagggaaaaggaaatagatggtgttcactaccacttcacagaacgaatcaagatagagaaagatataagcgagggcaaatttcttgaattcgctcatgttcatggaaatgtgtatggcacaagtatcgaagcagtcgaatctgtaactgatgagggaaagaggtgtattctcgacattgatgtccaaggagctcgatccgtgagggcttcttctcttgaagcaatattcatctttgtatgccctccatcgttcgaggaactagagaagcgccttcgggcacggggtactgaaacagaggagcaaatccagaaacgactcagaaatgctcaggctgaacttgatcagtccaatgaaccaggtctctttcatcatcttttggtcaacgatgaccttgagacatgctatgagaatttgaagaagttgctttctctggatgatgaccaagaagattcagatgatttttttaacaaggaggacaaagaaactgcaagttactctatcgtgtccaaaactgactcagaaattttgttgcaatctgagactaacgaaggcaaaaatggagccatacacttgctggcacttgatttgtcgtctctctcaggcggtgcgcctggacgaacaaggggccttaagattggctcagttaactccttttgacaagggcttatattggcgttttagatgacccaaagcattcttcaaaatgatacagcagaagcactgacttgaattttggatcaattcccatgagctgatatcttcaaaaacatcttagttaggaaaaagaaggaaacgaaaatggaatttatttccatttgttatttgtttgggtgccacaaggaggcaaaatcatagcaaggaattgtaccttattttttttagggattgtgtacttttctgctgttgagaggtatttggtggttggataatgtgatggagcctatctaaatgttctttcatagtggtctgaataacattgagctcattgctggattatgttgtgattctttcaactcttgggtcatgttgcacagaactaactcgtagttctgaccaaagagaaatgtttttttatgttaagtacgccctgccgtaagcaagtgtaaactttggggacaaattgcttttcatgtatttgagtttgat

SEQ ID NO: 16034 - DNA, 1881 bp, Zea Mays
gcaaaagtcgtataaagacaccgggacctcgtcgtcgcttccccccactgattccgagtccatctttccccgccgccggccgtgatccctcctcgccgctgaccgccccgcctgccccggcattctcccgctccagatccagggccctcatagagcctccgctcgatctgcccccggatcggattggccgccgcgcatctcatggtgagtttgattagctgctggtgctacatctatgagcttgcaaggtgaggaagctgtccacttcagcgtcgtcgacgccaaggactgcaaacagagtgcctttgaagtcggcgataagacggctctcacccacaatacttggggaacagccacttctaaccaagtcacagtctgtgattcctgtcagtgatgagaagatattagttatcgagaagggtgttcccttgaatgagtccatctggttccttgagatagacaccccctttgttaagcaacaacggaaaatcaaggaaacagaagttgtttcttggagcaagggagtaatcggcgttggccaaaaaccagttgtgattagtggtccttctggtgttggtaaagggacattgattgcaaagttgatgaaagactatccatcgaagtttggtttttctgttagccacactacaagatctccaagggaaaaggaaatagatggtgttcactaccacttcacagaacgaatcaagatagagaaagatataagcgagggcaaatttcttgaattcgctcatgttcatggaaatgtgtatggcacaagtatcgaagcagtcgaatctgtaactgatgagggaaaggtaagattaatacaatctttaataaaactttctgaaaggtgaactgcttcatctttccattgctttttcgttgaagaggtgtattctcgacattgatgtccaaggagctcgatccgtgagggcttcttctcttgaagcaatattcatctttgtatgccctccatcgttcgaggaactagagaagcgccttcgggcacggggtactgaaacagaggagcaaatccagaaacgactcagaaatgctcaggctgaacttgatcagtccaatgaaccaggtctctttcatcatcttttggtcaacgatgaccttgagacatgctatgagaatttgaagaagttgctttctctggatgatgaccaagaagattcagatgatttttttaacaaggaggacaaagaaactgcaagttactctatcgtgtccaaaactgactcagaaattttgttgcaatctgagactaacgaaggcaaaaatggagccatacacttgctggcacttgatttgtcgtctctctcaggcggtgcgcctggacgaacaaggggccttaagattggctcagttaactccttttgacaagggcttatattggcgttttagatgacccaaagcattcttcaaaatgatacagcagaagcactgacttgaattttggatcaattcccatgagctgatatcttcaaaaacatcttagttaggaaaaagaaggaaacgaaaatggaatttatttccatttgttatttgtttgggtgccacaaggaggcaaaatcatagcaaggaattgtaccttattttttttagggattgtgtacttttctgctgttgagaggtatttggtggttggataatgtgatggagcctatctaaatgttctttcatagtggtctgaataacattgagctcattgctggattatgttgtgattctttcaactcttgggtcatgttgcacagaactaactcgtagttctgaccaaagagaaatgtttttttatgttaagtacgccctgccgtaagcaagtgtaaactttggggacaaattgcttttcatgtatttgagtttgat

SEQ ID NO: 16035 - DNA, 876 bp, Zea Mays
atagaggacataggatcagattatttggatgaactattagatagtggtttccttataaaaggagatgataatttttatgtaatgcatgatttgctccatgatctttcgcgggttgtttcattagaagattgtgcctatatcagttgttctagtttcgaggcaaataacatcccaaagtctattcgctacttatccatttttatgaatgatactaattttaaaaattttgaggaagagatgggtaaactaaaggaaaggatagacattaaaaatttgcgaacattgatgatttttggagaatatagtaggttacacctgatcaatattttaagggacacatttaaggatgtaaaacgtcttcgtgttctatctatattcatgaactcccatagttccttgccaaacaacttttcagagcttcttcatcttcgctacttaaaacttttgtcacctcgttactcagaaatgtctttgccaaacacagtctcaaggttttatcacctgaaatttctagatcttaaacaatggggaagggatcgttctttgcctaaggacattagccgccttgaaaatctacgccatttcattgcttcaaaagagttccataccaatgttcctgaggtggggaaaatgaaatttttacaagaactgaaagaattccatgttaagaaagagagtgttggatttgagctaggagagttggggaaactagcagagcttggaggggagctcaatatacttggtcttgaaaaggtgagaaccgagcaagaagcaaaagataccaaactgatgtcaaagaggaatttagttgagttgagattagtttggaacacgaaacaagagtccactgtggatgatatcctagaaaaattcgaa

SEQ ID NO: 16036 - DNA, 204 bp, Zea Mays
ggggaaagcataccgcacagaagacagaaggtagcgatttgtcccggcggcgatgagccgaggattcgctatgccctggctcgaatcaacggtcgattggtgacgctcccagttccggcaccaagtgagagtgttacgcccgacctccctgcaccaaagcggtcacctcgatgcgagtgttggtgagtgaggacacgtgtaatc

SEQ ID NO: 16037 - DNA, 710 bp, Zea Mays
cacctgacactgacatgcttcctttatggccctgaaaacctttttctctcttatatgacaccagtttgttggagggcttggcatgtcatggcaactctcattcggtgtgctggtgctgctgtacttctactcgcactatttctttgccagtggtgccgcacacatcggagcaatgttcaccgcgttcctgtcggtggcgagtgccctgggcaccccgtcgcttttcgctgccatggttctttcattcctctcgaacctcatgggcgggaccacccactacggcatcggctctgctcccgtcttctacggcgccgggtatgtcccattggctcagtggtggggctatgggtttgtcatctccgttgtaaacatcatcatctggctcggggtgggcggcttctggtggaagataatcgggctgtggtgagcagagagcagcacattaactgcgacatcccttttgtttttctgttgtttttttgtcgagtggggggaggaaaactatttcctgaatttgcggtgctacagatgccgctgtccacagttttgtcgtcgacatgatcgcaatgcaacccattcttttttagttggtatcgatacatttgttcgaaccttccggtggctaattgcgaggccagggtgcagtttttaacgcgcaaaatttgttatatagagtttgtgctcaatggttcttggagatccctatatat

SEQ ID NO: 16038 - DNA, 552 bp, Zea Mays
caccggctcgctgctgcttctacttgcaaagtggacaagggacggcgttgtctataccgttgcgattcgtttgtacccatgtgttcaggtctccatcagacggggacattgtttttgtttggaaacagggacacgggcgatggaacgaatccgagccaggcaaggaacggaaggccaggacgcgcagccaatccactcccggccccgtcggcgagatctggccgccacaacgccgaggcacggatatcctggcctgcgtgggcacggtgtataggcttgccctgacggacctgcccttctctctctccatcggtatatgaaatgccatcagctgcgcattgcgatttcagtctaggcatccctaggtgttggatcgtcggcggcggcggcggcgtagaaaataaaacctgcagattgcgatagttgtgctttggaacagcctcttgtcctccgacattgtactacgtgacaggcgaaagcctctgttattattctttccatttcatgtggaggttaacttgaaaacgatgcgtacgcgattttactattttc

SEQ ID NO: 16039 - DNA, 952 bp, Zea Mays
gaagcagctggaagcggtggagcgccgggcgaccgtcgaggcctttcttgtccctcgtggatctcgcgatgtccgcgttgcagaagcacgccactgacactctcgccgtgtccctgctccggttagccaccacccggtgctccacgctcttgaaccgcccgttgctgaccagctggagaaggtctccgacgttcaccaggagcgcgccggccaccggaggcacgtccagccacctggatgcgaggagcgcctgcaggccgccctgcgcatgcgagtcctgcagcagcacggtcaggaagctggggtccgagtgcctgctgcagcccagggagctcgctgggaacgccgtggttcaccagctggaagaaccccaccgtctcggctgcagccttcaactgggcgaccacctcctcccgtgcgactgcgtccgccgccgagaggtcgatgaccgggataatgctaagactagtactgctgctactgctagaggacgataccttcggcccttcctgaaggagatggccgcggaagatggcagggatggtcgtgacgccagcgtccacgaggcccttgacgccggccttgctgtcgtcgaacgccttcagctcgctcaagcggtcatagtcgtcgccaccaccaccagcggcttcttccgtgggggacatggctaccggccggcgatcgaggcaaagctggatggatcaagatgagatgtcagtgtggttgtttgggtgattcatcactttgtcggcacagcttggagcctcggactaatgacctgttctgtttggttcctttagtcattagactataaattttagtgactaaagtttagtcgctaaagtgttccgtttgttttcaatgactaaaccggactaaagagcattaattgctgtgaataatgactgttttaccattattaattaatgaatgtttgctataagaagaaagt

SEQ ID NO: 16040 - DNA, 644 bp, Zea Mays
gtttagtagcctgctctttgagaaaactacgtggaaaagatgatggagtcgcaggctgttgcactggccttgctctgagctttccaggtgcaccacaaactctgattcagagctgcttgacctttgggactttctcttacatcattgagaagctaaacaagcagcaacctgcgctggcgctcctgcctgcgacaggtgtgatggatccgaaggctggacaaagcgttcttccttccttcacacttcctcctctggataccatggacgaattttctaagttccaaaactttttgtcatccaaatttcggggaaactgagttatcctggtggagtgacgcctagttatctactctggaacgtgtccttgtaaatgcgtcaatggtcaatctgagttttttttccccttgtttattcttcgccaatgtatgtttccaaattccaaggtagtgttttggtagtgttgatgattctaccttgacatatcgaacacaatttgtaaataaggcgagcagcttgtcctttgttcaactgattggatcttcggagttttacccacagaccgtgccccgtaagaaggaagaacatgcaccttgattcttacgagtgtgtcctttgtcatcttgccataggggaatcttcagaac

SEQ ID NO: 16041 - DNA, 2341 bp, Zea Mays
ctaatttgtagtctttaatctttattgtacagttctgggtctactcttaggaactgcttacattttttggtctataattgcaccatttagagctttcttttgttagattaatgctatgttatctaagtttctacagattgtgcagaagatctgattcgggtgggatattttaagttacatgcatgtgtgttttcagctctattttaaccatgggaacgggactatttggtttcaataaatgtctggatttgaaatgtgggggtgaaaatttctctgatatattcactttattttggcactggctcctgactcctgatttctgaccatgtaaccacacagaggtttagtactaaacatgactaaaccttgattcctacagtcagactgctaatctgctgtattgggctgagactctaagcctgaaaaagcttcacttgcatgggtatttgtgttatctttatagctaatatatctttaatctgttttcaaatttatgtatgcccatagttgattagttagttggtgatttggatggttctggagtatttggcttgtagcatatctgtttttttaatgaaagagaaggtatggtggtgtgtttgggacaattacctgcctttcatgggtgaggattagtttgattcgcaaaattgggtctcttacaaccctatgcaagtgggggtctacattagtgattaaattggacaaaggtgagctgcaaaagtgaaattaaggttaagtaggtggattaatgcaggttaaattctaatgtcataaccttgtaaagcacacatcatggaaaccagacggcatcttgtattcttagttcatcctgcattcctgcatcacacacagctgaccaaacagaacactgacttgtatcttctcttgttcaaaccagtttgggttgaggctgtattttactggagtcactgctacaagtagaaattgaaagatagctattttatatagaagaacaggataggaaaccagaggtgcttgtaccaaataggaaatactactgatattaccgaagttacaattcacttgagtaatacataaattatccatgaagttatatcccaaaacctgatctagcccttcaaatgcatatatggttcaacatgagcattgcacacctaatctgagtcctcacatataaaagaaaaagatttgtcatgggacttgcaggccgggagcacactgccaaacaacttctacattgatttgtgaagaagaaaaaaaaaccaagactgagatatgaagatcttaatcctttttctctgatattacaggcatcaccatattgaatgaaattgccaccatgaagcgctttctagaaaatgattttgcttttatttatgttggcacttgtagtggatcagaaccatatattctttgctgtagctgtatttaatgctctttcatagagggttaacaactattcaatcgcctagtcggtagggatcccctgtatcacttcctggattagggagcacaagatcctatattttaactgacacagtgttctaaaaaagggctaagtgggctcctggtgctgtctaccaccagattgtgtttctgttatccttttttggtcttttgctgtgaagcctacatgtataatcggatagctccacttttctattttctttaatgtttcaggtaaaggtttggttatgatgaaggggattaaaggatcatttgctgatgctgcgtcatctgctaaggaatcaatgcaggagtcgcaggctgttgcactggccttgctctgagctttccaggtgcaccacaaactctgattcagagctgcttgacctttgggactttctcttacatcattgagaagctaaacaagcagcaacctgcgctggcgctcctgcctgcgacaggtgtgatggatccgaaggctggacaaagcgttcttccttccttcacacttcctcctctggataccatggacgaattttctaagttccaaaactttttgtcatccaaatttcggggaaactgagttatcctggtggagtgacgcctagttatctactctggaacgtgtccttgtaaatgcgtcaatggtcaatctgagttttttttccccttgtttattcttcgccaatgtatgtttccaaattccaaggtagtgttttggtagtgttgatgattctaccttgacatatcgaacacaatttgtaaataaggcgagcagcttgtcctttgttcaactgattggatcttcggagttttacccacagaccgtgccccgtaagaaggaagaacatgcaccttgattcttacgagtgtgtcctttgtcatcttgccataggggaatcttcagaac

SEQ ID NO: 16042 - DNA, 2402 bp, Zea Mays
ctaatttgtagtctttaatctttattgtacagttctgggtctactcttaggaactgcttacattttttggtctataattgcaccatttagagctttcttttgttagattaatgctatgttatctaagtttctacagattgtgcagaagatctgattcgggtgggatattttaagttacatgcatgtgtgttttcagctctattttaaccatgggaacgggactatttggtttcaataaatgtctggatttgaaatgtgggggtgaaaatttctctgatatattcactttattttggcactggctcctgactcctgatttctgaccatgtaaccacacagaggtttagtactaaacatgactaaaccttgattcctacagtcagactgctaatctgctgtattgggctgagactctaagcctgaaaaagcttcacttgcatgggtatttgtgttatctttatagctaatatatctttaatctgttttcaaatttatgtatgcccatagttgattagttagttggtgatttggatggttctggagtatttggcttgtagcatatctgtttttttaatgaaagagaaggtatggtggtgtgtttgggacaattacctgcctttcatgggtgaggattagtttgattcgcaaaattgggtctcttacaaccctatgcaagtgggggtctacattagtgattaaattggacaaaggtgagctgcaaaagtgaaattaaggttaagtaggtggattaatgcaggttaaattctaatgtcataaccttgtaaagcacacatcatggaaaccagacggcatcttgtattcttagttcatcctgcattcctgcatcacacacagctgaccaaacagaacactgacttgtatcttctcttgttcaaaccagtttgggttgaggctgtattttactggagtcactgctacaagtagaaattgaaagatagctattttatatagaagaacaggataggaaaccagaggtgcttgtaccaaataggaaatactactgatattaccgaagttacaattcacttgagtaatacataaattatccatgaagttatatcccaaaacctgatctagcccttcaaatgcatatatggttcaacatgagcattgcacacctaatctgagtcctcacatataaaagaaaaagatttgtcatgggacttgcaggccgggagcacactgccaaacaacttctacattgatttgtgaagaagaaaaaaaaaccaagactgagatatgaagatcttaatcctttttctctgatattacaggcatcaccatattgaatgaaattgccaccatgaagcgctttctagaaaatgattttgcttttatttatgttggcacttgtagtggatcagaaccatatattctttgctgtagctgtatttaatgctctttcatagagggttaacaactattcaatcgcctagtcggtagggatcccctgtatcacttcctggattagggagcacaagatcctatattttaactgacacagtgttctaaaaaagggctaagtgggctcctggtgctgtctaccaccagattgtgtttctgttatccttttttggtcttttgctgtgaagcctacatgtataatcggatagctccacttttctattttctttaatgtttcaggtaaaggtttggttatgatgaaggggattaaaggatcatttgctgatgctgcgtcatctgctaagatatttgctgttcttgctggtgttcaaagtttagtagcctgctctttgagaaaactacgtggaaaagatgatggagtcgcaggctgttgcactggccttgctctgagctttccaggtgcaccacaaactctgattcagagctgcttgacctttgggactttctcttacatcattgagaagctaaacaagcagcaacctgcgctggcgctcctgcctgcgacaggtgtgatggatccgaaggctggacaaagcgttcttccttccttcacacttcctcctctggataccatggacgaattttctaagttccaaaactttttgtcatccaaatttcggggaaactgagttatcctggtggagtgacgcctagttatctactctggaacgtgtccttgtaaatgcgtcaatggtcaatctgagttttttttccccttgtttattcttcgccaatgtatgtttccaaattccaaggtagtgttttggtagtgttgatgattctaccttgacatatcgaacacaatttgtaaataaggcgagcagcttgtcctttgttcaactgattggatcttcggagttttacccacagaccgtgccccgtaagaaggaagaacatgcaccttgattcttacgagtgtgtcctttgtcatcttgccataggggaatcttcagaac

SEQ ID NO: 16043 - DNA, 2451 bp, Zea Mays
gttcaccctggggggtagccaattatttgtgcctggtctaatttgtagtctttaatctttattgtacagttctgggtctactcttaggaactgcttacattttttggtctataattgcaccatttagagctttcttttgttagattaatgctatgttatctaagtttctacagattgtgcagaagatctgattcgggtgggatattttaagttacatgcatgtgtgttttcagctctattttaaccatgggaacgggactatttggtttcaataaatgtctggatttgaaatgtgggggtgaaaatttctctgatatattcactttattttggcactggctcctgactcctgatttctgaccatgtaaccacacagaggtttagtactaaacatgactaaaccttgattcctacagtcagactgctaatctgctgtattgggctgagactctaagcctgaaaaagcttcacttgcatgggtatttgtgttatctttatagctaatatatctttaatctgttttcaaatttatgtatgcccatagttgattagttagttggtgatttggatggttctggagtatttggcttgtagcatatctgtttttttaatgaaagagaaggtatggtggtgtgtttgggacaattacctgcctttcatgggtgaggattagtttgattcgcaaaattgggtctcttacaaccctatgcaagtgggggtctacattagtgattaaattggacaaaggtgagctgcaaaagtgaaattaaggttaagtaggtggattaatgcaggttaaattctaatgtcataaccttgtaaagcacacatcatggaaaccagacggcatcttgtattcttagttcatcctgcattcctgcatcacacacagctgaccaaacagaacactgacttgtatcttctcttgttcaaaccagtttgggttgaggctgtattttactggagtcactgctacaagtagaaattgaaagatagctattttatatagaagaacaggataggaaaccagaggtgcttgtaccaaataggaaatactactgatattaccgaagttacaattcacttgagtaatacataaattatccatgaagttatatcccaaaacctgatctagcccttcaaatgcatatatggttcaacatgagcattgcacacctaatctgagtcctcacatataaaagaaaaagatttgtcatgggacttgcaggccgggagcacactgccaaacaacttctacattgatttgtgaagaagaaaaaaaaaccaagactgagatatgaagatcttaatcctttttctctgatattacaggcatcaccatattgaatgaaattgccaccatgaagcgctttctagaaaatgattttgcttttatttatgttggcacttgtagtggatcagaaccatatattctttgctgtagctgtatttaatgctctttcatagagggttaacaactattcaatcgcctagtcggtagggatcccctgtatcacttcctggattagggagcacaagatcctatattttaactgacacagtgttctaaaaaagggctaagtgggctcctggtgctgtctaccaccagattgtgtttctgttatccttttttggtcttttgctgtgaagcctacatgtataatcggatagctccacttttctattttctttaatgtttcaggtaaaggtttggttatgatgaaggggattaaaggatcatttgctgatgctgcgtcatctgctaagatatttgctgttcttgctggtgttcaaagtttagtagcctgctctttgagaaaactacgtggaaaagatgatggaatcaatgcaggagtcgcaggctgttgcactggccttgctctgagctttccaggtgcaccacaaactctgattcagagctgcttgacctttgggactttctcttacatcattgagaagctaaacaagcagcaacctgcgctggcgctcctgcctgcgacaggtgtgatggatccgaaggctggacaaagcgttcttccttccttcacacttcctcctctggataccatggacgaattttctaagttccaaaactttttgtcatccaaatttcggggaaactgagttatcctggtggagtgacgcctagttatctactctggaacgtgtccttgtaaatgcgtcaatggtcaatctgagttttttttccccttgtttattcttcgccaatgtatgtttccaaattccaaggtagtgttttggtagtgttgatgattctaccttgacatatcgaacacaatttgtaaataaggcgagcagcttgtcctttgttcaactgattggatcttcggagttttacccacagaccgtgccccgtaagaaggaagaacatgcaccttgattcttacgagtgtgtcctttgtcatcttgccataggggaatcttcagaac

SEQ ID NO: 16044 - DNA, 780 bp, Zea Mays
ggatgatggggctggactccgtgcggcttaggtaaaggtttggttatgatgaaggggattaaaggatcatttgctgatgctgcgtcatctgctaagatatttgctgttcttgctggtgttcaaagtttagtagcctgctctttgagaaaactacgtggaaaagatgatggaatcaatgcaggagtcgcaggctgttgcactggccttgctctgagctttccaggtgcaccacaaactctgattcagagctgcttgacctttgggactttctcttacatcattgagaagctaaacaagcagcaacctgcgctggcgctcctgcctgcgacaggtgtgatggatccgaaggctggacaaagcgttcttccttccttcacacttcctcctctggataccatggacgaattttctaagttccaaaactttttgtcatccaaatttcggggaaactgagttatcctggtggagtgacgcctagttatctactctggaacgtgtccttgtaaatgcgtcaatggtcaatctgagttttttttccccttgtttattcttcgccaatgtatgtttccaaattccaaggtagtgttttggtagtgttgatgattctaccttgacatatcgaacacaatttgtaaataaggcgagcagcttgtcctttgttcaactgattggatcttcggagttttacccacagaccgtgccccgtaagaaggaagaacatgcaccttgattcttacgagtgtgtcctttgtcatcttgccataggggaatcttcagaac

SEQ ID NO: 16045 - DNA, 710 bp, Zea Mays
ttgggatgatggggctggactccgtgcggcttaggtaaaggtttggttatgatgaaggggattaaaggatcatttgctgatgctgcgtcatctgctaaggaatcaatgcaggagtcgcaggctgttgcactggccttgctctgagctttccaggtgcaccacaaactctgattcagagctgcttgacctttgggactttctcttacatcattgagaagctaaacaagcagcaacctgcgctggcgctcctgcctgcgacaggtgtgatggatccgaaggctggacaaagcgttcttccttccttcacacttcctcctctggataccatggacgaattttctaagttccaaaactttttgtcatccaaatttcggggaaactgagttatcctggtggagtgacgcctagttatctactctggaacgtgtccttgtaaatgcgtcaatggtcaatctgagttttttttccccttgtttattcttcgccaatgtatgtttccaaattccaaggtagtgttttggtagtgttgatgattctaccttgacatatcgaacacaatttgtaaataaggcgagcagcttgtcctttgttcaactgattggatcttcggagttttacccacagaccgtgccccgtaagaaggaagaacatgcaccttgattcttacgagtgtgtcctttgtcatcttgccataggggaatcttcagaac

SEQ ID NO: 16046 - DNA, 2954 bp, Zea Mays
gcgtcgcgtgtggcgccaccggcaggcgcaggctgtgcacacgacacggtcagtccgcagcgcactgcagtctgcgcgtggcggtgcacccattccttctggtcccgtgacaagcagcgcgctagacacacacgcgcgcgaacacgaacagggacacgaggccgcggcggccatggcgagaggcggcggcgatcggagtcgggaggatgatcccttctccgacggcggcaccaccgaaaccgactcggacgagtcctctccgcgtggggtgggggcccgcggtcccggctccacctccaacccgatcctgacacgcctcgcggtgtcgcggaactcgagcccgctggccgcggccaccgcggccccaggggtctgcctcctccgcttcgcctgggagtccgccgcgggctccctcgtcggcgccgtcgttggctacgggtttatggctcaccgatggcgaggcaacgtgtggctgtggcgccatttcgaggacctcaggtgcggacttgggatgatggggctggactccgtgcggcttaggttatgttcccccgattctagcgtcacaatttgtttgataagtattgttttgctatggacattgttctgttgttcaccctggggggtagccaattatttgtgcctggtctaatttgtagtctttaatctttattgtacagttctgggtctactcttaggaactgcttacattttttggtctataattgcaccatttagagctttcttttgttagattaatgctatgttatctaagtttctacagattgtgcagaagatctgattcgggtgggatattttaagttacatgcatgtgtgttttcagctctattttaaccatgggaacgggactatttggtttcaataaatgtctggatttgaaatgtgggggtgaaaatttctctgatatattcactttattttggcactggctcctgactcctgatttctgaccatgtaaccacacagaggtttagtactaaacatgactaaaccttgattcctacagtcagactgctaatctgctgtattgggctgagactctaagcctgaaaaagcttcacttgcatgggtatttgtgttatctttatagctaatatatctttaatctgttttcaaatttatgtatgcccatagttgattagttagttggtgatttggatggttctggagtatttggcttgtagcatatctgtttttttaatgaaagagaaggtatggtggtgtgtttgggacaattacctgcctttcatgggtgaggattagtttgattcgcaaaattgggtctcttacaaccctatgcaagtgggggtctacattagtgattaaattggacaaaggtgagctgcaaaagtgaaattaaggttaagtaggtggattaatgcaggttaaattctaatgtcataaccttgtaaagcacacatcatggaaaccagacggcatcttgtattcttagttcatcctgcattcctgcatcacacacagctgaccaaacagaacactgacttgtatcttctcttgttcaaaccagtttgggttgaggctgtattttactggagtcactgctacaagtagaaattgaaagatagctattttatatagaagaacaggataggaaaccagaggtgcttgtaccaaataggaaatactactgatattaccgaagttacaattcacttgagtaatacataaattatccatgaagttatatcccaaaacctgatctagcccttcaaatgcatatatggttcaacatgagcattgcacacctaatctgagtcctcacatataaaagaaaaagatttgtcatgggacttgcaggccgggagcacactgccaaacaacttctacattgatttgtgaagaagaaaaaaaaaccaagactgagatatgaagatcttaatcctttttctctgatattacaggcatcaccatattgaatgaaattgccaccatgaagcgctttctagaaaatgattttgcttttatttatgttggcacttgtagtggatcagaaccatatattctttgctgtagctgtatttaatgctctttcatagagggttaacaactattcaatcgcctagtcggtagggatcccctgtatcacttcctggattagggagcacaagatcctatattttaactgacacagtgttctaaaaaagggctaagtgggctcctggtgctgtctaccaccagattgtgtttctgttatccttttttggtcttttgctgtgaagcctacatgtataatcggatagctccacttttctattttctttaatgtttcaggtaaaggtttggttatgatgaaggggattaaaggatcatttgctgatgctgcgtcatctgctaagatatttgctgttcttgctggtgttcaaagtttagtagcctgctctttgagaaaactacgtggaaaagatgatggaatcaatgcaggagtcgcaggctgttgcactggccttgctctgagctttccaggtgtgatggatccgaaggctggacaaagcgttcttccttccttcacacttcctcctctggataccatggacgaattttctaagttccaaaactttttgtcatccaaatttcggggaaactgagttatcctggtggagtgacgcctagttatctactctggaacgtgtccttgtaaatgcgtcaatggtcaatctgagttttttttccccttgtttattcttcgccaatgtatgtttccaaattccaaggtagtgttttggtagtgttgatgattctaccttgacatatcgaacacaatttgtaaataaggcgagcagcttgtcctttgttcaactgattggatcttcggagttttacccacagaccgtgccccgtaagaaggaagaacatgcaccttgattcttacgagtgtgtcctttgtcatcttgccataggggaatcttcagaac

SEQ ID NO: 16047 - DNA, 1565 bp, Zea Mays
gaagtcggcgatgtagctcagcaggatgcccgagttgccggcgatctgacgtcacaaagcatgattataggtcacaagaaataataataactgtcaatcgtctcgatcgcatctaggccatttcctaaaagctgtcatcagctgtggcccccaaaagctggcgtccagtttgccactgatctagacctttttcctaaaaccatgcgcgcgcacgcaaaacctctcgtggaaaaaaaatgcaagtgaataaaagaatgcaagtggaagatgtgaaaaaaaaagcatcatggtgaataaaattaagcatgcaagttttgattggatgtcatctgttaggcctccgttgacattattgtaccagctgtactctttcgctaaatagtagtcgttttaaagaatcagtggtttatacaattctttacgcatgttatatcaaacgactaatgttttggaaccgagagagtactctgataattcaacgtgccgtacttacaattgtgttggtaagagtgtctccaagagactctttattttgtactctctatttgactctttatttgtctcttcataaatattaaactatatatataacatctcattccagcagactcttcaaaatgtaatttagcttggctagcgagagttgctagccaaatttgactagtgagggagttaatttagagagccagatagcttagcaagttaaatgactattctgttggagagctattatgctattaagtagctaaaatttagcttgacaaactatttagctattctcttggagatgctctaagtgtgccatccattttcagttaaacatggcaagttttggtttgatttcttccacgtacgagctctattgtcccgtcgctaccaagacgtgtgccaccaccagtactatatatatgctatagtggtgtagtagtccattttggcttagtgggtaggaccaagcaggcaggggtggagccaatcatgtcacgatagcataatcttgctcaaaaaaacatagaaacagagggaccgtttcttgcacacacacacacacaaaagcattgctgccactggacaacaataatgctgaaactgtggctccgtcctaggagcagggtaaaaggggaattggacaaacaggggcggaaggtaattgacaaaacagaataaacagggtttaagcgtttgtgtgaatttagtcatgcaaattttggtttatttcctgcagttgcacccccagctagctgtacgtcgttgtaccagttgtgtactgcaataaaatttaagttttagcctttgtgtcacatcagagaactccgattcgatttcgctcttctaaaagtagatgcaaagcatttctttcagatgggatcgaactaacttcccttttaaaattgcaacaaacctcccattttctctcccaattaatgactaggatttcagatctgcaaaccacccgagagacaccaacccgcggcgccgccaccgcattcacaacttattaacaacaacgtacgaacaaccatgcatgcacacggccgcgcgcggagaatcagcgccgtacgtgg

SEQ ID NO: 16048 - DNA, 603 bp, Zea Mays
agatattgaagatatagaggatattgtaagtgtaaaggacggtaaatattgatttagagaatgaaatttaagggacgcgcgcgttgctagaaacagctaccggataatcaacccattcaaatgacaagagtacaaaactattcgtcgacggcatcttggctgcttacaaatacactagcccctgtctaaccttgctacactgcacacctgacaacttcatgtcatcacgtgcttgttccttgcgtggacatgatgcatctgtgtactcggtgtctggaacgtcacgacaacgccgcccgtggcgacggcgcagcaccggcgtcgaagagtgcctccatctcctcgaggctcctccccttggtctcaggcaggcacgcgtagacgaacacccacgccgccgcggacatcgccgcgaagatgtagaaggtcccggccatgcccaccgcctcgtacatcgggatgaaggtcatccccacgatggcgctcatcacccggttgaccgccgtcccgacgccagtcccctgcgcgcgcagccgcagcggcaggatctccgacccgtacatccagatcacgggtccgaaccccagcgagaaggtcgccatg

SEQ ID NO: 16049 - DNA, 301 bp, Zea Mays
gtcatgatccagcacccgggaaaaacgcgaaagctgcccaccaccacggccgattaggaggtaagagagggagagcttgaagacgccgccgcgggcaactcgaccacaccgtcgtctaggctctggcgagttcccttgaggtctcgaaggatcgtgcttatcgcgtgtggggcctcgctgggcgtgggaagagtccggggcgacgggagttcattgacggacttcacggaagctgcagagacaccccacaacgtcgccagacctaaacaccgcccaattgccgtgaggtcacgagaatctg

SEQ ID NO: 16050 - DNA, 2089 bp, Zea Mays
caaatttctctcaacggtcctagcaatcgcgtcaccgtcttctccatcgccggtgctcccttactctcgatggcatcctcggccgccgctcgccgccttctcctcctccgccaccgccatgggaaccttctccccaaacgccacttctcttcctcatccgctcccgacggcctcgacgacggcggtggccgcgtcaagatcttcgaccgcgacctgaagcgccggcaccgggaccgcgcggcgtgggtgatgcgtgagaccgatgggctcgtggatgcggtcgctgagaatctcctagaccgcctcgaggactgcaggaaagccttcccctccgcactctgccttgggggctccgccggcgccgtccgccgcttgctccgtggccgcggtgggattgagaggctgatcatgatggacatgtcagccgatatggtgaagaagtggcgagagtcagagaatgccactggtgatgggcctgagacccactttgttatcggcgatgaggagtttcttccaatcaaagagagctcacaggatttgataatgagctgtcttggacttcattggacaaatgatctacctggagcaatgatacagtgtaggctggcgttgcaacctgatggcctttttctggcagcaattcttggtggagaaacactgaaggagcttagaattgcatgcacagttgctcaaatggaacgcgaagggggcatcagtcctcgaatgtcccctttagcgcaagtccgtgacgcaggaaaccttttgacaagggcaggctttacccttccaggagttgatgttgatcagtataccgttagatacaataatggtttgtagaaaaaagaaagcttcagtttctgatgagtgttgtgtattgttcatcttcccttttccttacaatattacatgatggtagaataaacgtgtatttcgacttgtatgcctggcttttgtgtggttgatgttacatctatcaaaaaaaaaaactcgacctgcggggggttagacagcccccggatattgtattaagaagaagaccttttcacacagaccgagaaaaccctcgaacccctgccccacccatacacagcggcatcgaagcccatgtgagaacgaccacgaccggggctgagccttaacctatgctttggcgtgggacagacgaggggattttttaaccacaacctgaaatttgctcccacggggagtcgaacccaggacctgaggaatgctactcagaccacctaaccaactcagctagaggccctttcgctgttacatctatcaagataacaaatagttattcctgtatttaatttagaaataatttgctataagagttcattcaatatcaacgaaatacactgattttgattatggagatttacgagttacctacccatgctgatggttttgctacttctgtcaactagctttggaacttgttgaacatcttagagcaatgggggaaacaaatgctctctttcaaagaaatcctgtgttgaaaagggatacggccttggcaactgcagcaatttaccagtcaatgtttgggttagaagacggatctattccagcaacctttcaagtaatttacatgactggctggagggagcatccatcacagcaaaaggctaagagaaggggttctgcgaccatatcattcggtgatatacagaaacaatttggtcccagtgagaactgagcctcactgcttcagaaatgtattcccaaacccttgatcgaaaattaaaaaaaaaaacaacatttgaggaaagaaaagaaatcctctggtggttccacccaacggctttgtattcctgaaggttgatgtttgtggtgggcttctgttgcctgttgtatgaacatactgagtttgatggaatccagcaattgtgaaattcatctgtagtgttactccacccacaaggttcgctagtggcgtgctgcaatgttacaagacaccaccactgttgtggtagacctgtgagtgcaaagaaacttagaaatttatttactcccttaacaaatgtgttcaagttttcgctggtggtatggcttagcaatcctttacattatatttcagaaa

SEQ ID NO: 16051 - DNA, 1680 bp, Zea Mays
caaatttctctcaacggtcctagcaatcgcgtcaccgtcttctccatcgccggtgctcccttactctcgatggcatcctcggccgccgctcgccgccttctcctcctccgccaccgccatgggaaccttctccccaaacgccacttctcttcctcatccgctcccgacggcctcgacgacggcggtggccgcgtcaagatcttcgaccgcgacctgaagcgccggcaccgggaccgcgcggcgtgggtgatgcgtgagaccgatgggctcgtggatgcggtcgctgagaatctcctagaccgcctcgaggactgcaggaaagccttcccctccgcactctgccttgggggctccgccggcgccgtccgccgcttgctccgtggccgcggtgggattgagaggctgatcatgatggacatgtcagccgatatggtgaagaagtggcgagagtcagagaatgccactggtgatgggcctgagacccactttgttatcggcgatgaggagtttcttccaatcaaagagagctcacaggatttgataatgagctgtcttggacttcattggacaaatgatctacctggagcaatgatacagtgtaggctggcgttgcaacctgatggcctttttctggcagcaattcttggtggagaaacactgaaggagcttagaattgcatgcacagttgctcaaatggaacgcgaagggggcatcagtcctcgaatgtcccctttagcgcaagtccgtgacgcaggaaaccttttgacaagggcaggctttacccttccaggagttgatgttgatcagtataccgttagatacaataatgctttggaacttgttgaacatcttagagcaatgggggaaacaaatgctctctttcaaagaaatcctgtgttgaaaagggatacggccttggcaactgcagcaatttaccagtcaatgtttgggttagaagacggatctattccagcaacctttcaagtaatttacatgactggctggagggagcatccatcacagcaaaaggctaagagaaggggttctgcgaccatatcattcggtgatatacagaaacaatttggtcccagtgagaactgagcctcactgcttcagaaatgtgttcccaaaccccactcaggctttgtttgggtaaagaggaactgaagtggattgaggtgtattgaaaggactgaaagggaaattagttcatgttacacttcaatacaccccataccacctcaattcactccaataagagattacccaaacaggcctcatgtgagagcctccggagctgggtctaaccattttagtattcccaaacccttgatcgaaaattaaaaaaaaaaacaacatttgaggaaagaaaagaaatcctctggtggttccacccaacggctttgtattcctgaaggttgatgtttgtggtgggcttctgttgcctgttgtatgaacatactgagtttgatggaatccagcaattgtgaaattcatctgtagtgttactccacccacaaggttcgctagtggcgtgctgcaatgttacaagacaccaccactgttgtggtagacctgtgagtgcaaagaaacttagaaatttatttactcccttaacaaatgtgttcaagttttcgctggtggtatggcttagcaatcctttacattatatttcagaaa

SEQ ID NO: 16052 - DNA, 1646 bp, Zea Mays
caaatttctctcaacggtcctagcaatcgcgtcaccgtcttctccatcgccggtgctcccttactctcgatggcatcctcggccgccgctcgccgccttctcctcctccgccaccgccatgggaaccttctccccaaacgccacttctcttcctcatccgctcccgacggcctcgacgacggcggtggccgcgtcaagatcttcgaccgcgacctgaagcgccggcaccgggaccgcgcggcgtgggtgatgcgtgagaccgatgggctcgtggatgcggtcgctgagaatctcctagaccgcctcgaggactgcaggaaagccttcccctccgcactctgccttgggggctccgccggcgccgtccgccgcttgctccgtggccgcggtgggattgagaggctgatcatgatggacatgtcagccgatatggtgaagaagtggcgagagtcagagaatgccactggtgatgggcctgagacccactttgttatcggcgatgaggagtttcttccaatcaaagagagctcacaggatttgataatgagctgtcttggacttcattggacaaatgatctacctggagcaatgatacagtgtaggctggcgttgcaacctgatggcctttttctggcagcaattcttggtggagaaacactgaaggagcttagaattgcatgcacagttgctcaaatggaacgcgaagggggcatcagtcctcgaatgtcccctttagcgcaagtccgtgacgcaggaaaccttttgacaagggcaggctttacccttccaggagttgatgttgatcagtataccgttagatacaataatgctttggaacttgttgaacatcttagagcaatgggggaaacaaatgctctctttcaaagaaatcctgtgttgaaaagggatacggccttggcaactgcagcaatttaccagtcaatgtttgggtaatttacatgactggctggagggagcatccatcacagcaaaaggctaagagaaggggttctgcgaccatatcattcggtgatatacagaaacaatttggtcccagtgagaactgagcctcactgcttcagaaatgtgttcccaaaccccactcaggctttgtttgggtaaagaggaactgaagtggattgaggtgtattgaaaggactgaaagggaaattagttcatgttacacttcaatacaccccataccacctcaattcactccaataagagattacccaaacaggcctcatgtgagagcctccggagctgggtctaaccattttagtattcccaaacccttgatcgaaaattaaaaaaaaaaacaacatttgaggaaagaaaagaaatcctctggtggttccacccaacggctttgtattcctgaaggttgatgtttgtggtgggcttctgttgcctgttgtatgaacatactgagtttgatggaatccagcaattgtgaaattcatctgtagtgttactccacccacaaggttcgctagtggcgtgctgcaatgttacaagacaccaccactgttgtggtagacctgtgagtgcaaagaaacttagaaatttatttactcccttaacaaatgtgttcaagttttcgctggtggtatggcttagcaatcctttacattatatttcagaaa

SEQ ID NO: 16053 - DNA, 1578 bp, Zea Mays
caaatttctctcaacggtcctagcaatcgcgtcaccgtcttctccatcgccggtgctcccttactctcgatggcatcctcggccgccgctcgccgccttctcctcctccgccaccgccatgggaaccttctccccaaacgccacttctcttcctcatccgctcccgacggcctcgacgacggcggtggccgcgtcaagatcttcgaccgcgacctgaagcgccggcaccgggaccgcgcggcgtgggtgatgcgtgagaccgatgggctcgtggatgcggtcgctgagaatctcctagaccgcctcgaggactgcaggaaagccttcccctccgcactctgccttgggggctccgccggcgccgtccgccgcttgctccgtggccgcggtgggattgagaggctgatcatgatggacatgtcagccgatatggtgaagaagtggcgagagtcagagaatgccactggtgatgggcctgagacccactttgttatcggcgatgaggagtttcttccaatcaaagagaggatttgataatgagctgtcttggacttcattggacaaatgatctacctggagcaatgatacagtgtaggctggcgttgcaacctgatggcctttttctggcagcaattcttggtggagaaacactgaagtgataacctgtcaaattgtagacaaaacttgattttctgattttttttgtcatttttatttccttatctgttttgtcttgcctctatttcttttatcagggagcttagaattgcatgcacagttgctcaaatggaacgcgaagggggcatcagtcctcgaatgtcccctttagcgcaagtccgtgacgcaggaaaccttttgacaagggcaggctttacccttccaggagttgatgttgatcagtataccgttagatacaataatgctttggaacttgttgaacatcttagagcaatgggggaaacaaatgctctctttcaaagaaatcctgtgttgaaaagggatacggccttggcaactgcagcaatttaccagtcaatgtttgggttagaagacggatctattccagcaacctttcaagtaatttacatgactggctggagggagcatccatcacagcaaaaggctaagagaaggggttctgcgaccatatcattcggtgatatacagaaacaatttggtcccagtgagaactgagcctcactgcttcagaaatgtattcccaaacccttgatcgaaaattaaaaaaaaaaacaacatttgaggaaagaaaagaaatcctctggtggttccacccaacggctttgtattcctgaaggttgatgtttgtggtgggcttctgttgcctgttgtatgaacatactgagtttgatggaatccagcaattgtgaaattcatctgtagtgttactccacccacaaggttcgctagtggcgtgctgcaatgttacaagacaccaccactgttgtggtagacctgtgagtgcaaagaaacttagaaatttatttactcccttaacaaatgtgttcaagttttcgctggtggtatggcttagcaatcctttacattatatttcagaaa

SEQ ID NO: 16054 - DNA, 1668 bp, Zea Mays
caaatttctctcaacggtcctagcaatcgcgtcaccgtcttctccatcgccggtgctcccttactctcgatggcatcctcggccgccgctcgccgccttctcctcctccgccaccgccatgggaaccttctccccaaacgccacttctcttcctcatccgctcccgacggcctcgacgacggcggtggccgcgtcaagatcttcgaccgcgacctgaagcgccggcaccgggaccgcgcggcgtgggtgatgcgtgagaccgatgggctcgtggatgcggtcgctgagaatctcctagaccgcctcgaggactgcaggaaagccttcccctccgcactctgccttgggggctccgccggcgccgtccgccgcttgctccgtggccgcggtgggattgagaggctgatcatgatggacatgtcagccgatatggtgaagaagtggcgagagtcagagaatgccactggtgatgggcctgagacccactttgttatcggcgatgaggagtttcttccaatcaaagagaggatttgataatgagctgtcttggacttcattggacaaatgatctacctggagcaatgatacaggctggcgttgcaacctgatggcctttttctggcagcaattcttggtggagaaacactgaaggagcttagaattgcatgcacagttgctcaaatggaacgcgaagggggcatcagtcctcgaatgtcccctttagcgcaagtccgtgacgcaggaaaccttttgacaagggcaggctttacccttccaggagttgatgttgatcagtataccgttagatacaataatgctttggaacttgttgaacatcttagagcaatgggggaaacaaatgctctctttcaaagaaatcctgtgttgaaaagggatacggccttggcaactgcagcaatttaccagtcaatgtttgggttagaagacggatctattccagcaacctttcaagtaatttacatgactggctggagggagcatccatcacagcaaaaggctaagagaaggggttctgcgaccatatcattcggtgatatacagaaacaatttggtcccagtgagaactgagcctcactgcttcagaaatgtgttcccaaaccccactcaggctttgtttgggtaaagaggaactgaagtggattgaggtgtattgaaaggactgaaagggaaattagttcatgttacacttcaatacaccccataccacctcaattcactccaataagagattacccaaacaggcctcatgtgagagcctccggagctgggtctaaccattttagtattcccaaacccttgatcgaaaattaaaaaaaaaaacaacatttgaggaaagaaaagaaatcctctggtggttccacccaacggctttgtattcctgaaggttgatgtttgtggtgggcttctgttgcctgttgtatgaacatactgagtttgatggaatccagcaattgtgaaattcatctgtagtgttactccacccacaaggttcgctagtggcgtgctgcaatgttacaagacaccaccactgttgtggtagacctgtgagtgcaaagaaacttagaaatttatttactcccttaacaaatgtgttcaagttttcgctggtggtatggcttagcaatcctttacattatatttcagaaa

SEQ ID NO: 16055 - DNA, 4000 bp, Zea Mays
ctgcgttcgtcggccatttctcaaaaaacaagtcagtgtctttccagactggagatggggactatgtttggagcgtgtgttggcccaagtgagcttcacttgaggaaggaacttactgctttgcaaaaggcgcgctgcttgcaggaccctgacacttgctcaacatggagatcacctttgagttctaggtcactggtggcaacttcaaggattacatacaacggtggtatttctagtaatttagcaccaaagcacaatgagtcaccttgtgcacctccaaacactgataagaaaagaagaaaggtttatctctacaattggaggcagaattcttataaatctagtgaaagcggaatgaagatagatgaggatgtcaagcaaccatctggtgatctaagcctggacagtccatgcaagtctaatggggtaaagtccaaaggtgatgcatatctggatcctccagccagcatctacaatgttcagagttcaacatcatgtactcctgtcaaaagaatagctagaaggagaaatggtgttttgtccaagaaaggagcagtcagaaaccaagctataccgaagttgtcagatcttcaggttaactctggtgagccatctgaggatactgagaactgcaactcagaggctctggagatacttcgaagaggctacttatctcatcctgcatctccgctatttgctgcatgtggttgtgtcagctcttcaaatccttcaaaactactgaaaataggtagaagagagggatcttccttttcttgcacaccggtttctactagctcctattacaggcatgtaagaaggaacaccagcactgttggttcttgggatgctaggactgctacttctcttgatggtgatgagtctaaccaatcagcagttctgagaagtcagaggtcgcatgtcccttgctatgtatcaaagaggagaaaacatcaaggatctgaaggaagtaattattctccttcactatccgctatacttcgaagaaaaggtagcagcctaatatgtgggagccagacaatgcacaagaagaagaaatcatttggttcaatgaaatgggcacattcgaagaagtctgctcagggaatgccacttttgggtaatagctgtgattttggttcgtcgtcatttgattcatcaagtgatgatctctcaaccaatataggggagcttgatatggaggcttcaagccggttggatgggaaaagatggtcaagctgcagaagccaggatgggatggatctatctgttcattgtgctgatctgcacgagtcagacccgagaagcttgagccaaaaatatagaccaagagcattcccagaaattgttagtcaaaatattgcagtccaatcacttagtaatgctataacaagggaaaggatagctcctgcctatctttttcaaggtcctcgtggaacaggaaaaacatcgactgcaaggatattttcagcagctttaaattgccttactactggagataataaaccctgtggggtatgtaaccactgcactgacttcttcagtggaaaagctagcaatataaaagaagttgatgcaagtaacagaaagagtataggcataattaagcacttgctggaaaatttgccgccatctgcgcctttgtcccggtacaaggtgtttgttgtcgatgaatgccacatgataccttccaaattatggtcagcatttatgaagtttcttgatgaaccatttccttatgttgtgttcatatttattacaatcgacccgaacaacgtacctcgagcagttgtatcacgttgccagaaatatgtgttctctaagatcaaagatattgacactgtgtgccggctgaggaaaatctgtgtaaaggaaaatcttgatgttgagctagcagctttggatttgatagctctgaattcagatggctcgctacgagatgcagaaacaatgttagatcaattgagcttgttagggaaaaagataactccttcacttgtcaatgatttggttggtgttgtctcggaagagaaattgcttgatcttctggagatagctatgtcaggagacacggctgagacagtgaaaagatccagagagctgatggattctggcactgatccaatggcattaatgtctcagttagctgggctcatcatggacatcattgctggcacctacaaattggctgatgttgcttgttgtaatggctcagcagttggtggtcgaagtttaacggaagcagagttagaaagattacaacaagcattgaagattctttctgatgctgaaaagcagataagcctttcaagtgagcgtcccacgtggtttactgctgccttactacaacttgggtgtggtcatagttcagatgtgaaccaacaaaaaggcagtactcaagaacaccataaagtagccaatgatgctatgtctgagatagcaagggaatcatccagcagaactttttctcattcattatctgcctttggcatttctaagagaacgcttgactccaaaacaattagtgtgcactcgagtcctcaggtccttgcctcacattcatctcggttgagactgaatgacaacttggtttatggagagtgtaggtctgttgatagagttccactcaattctaatcaactgaatggcaactgttcccagcaaagggccctggtaaatggaatctcagatagccttgctcaggtttggataagatgcattgagaactgccactcgaagacattacagcacctacttcttgaccatgggaaactagtatcaatcaggcaatttgagggccacgcgactgcttttattgcaattgaggactgtggcataaaatctagagctcaaagatttttgagtagcattaccaattcacttgagacggtactgaaatgcaacgtggaagtcaagattggtccactagcagaattgatggacggagaagtaacattagaggctggtcctaatgtaagaagatacgagtctgacgtcttgagttgctcatcaaacagtgaccgactaaagggagctttagattcaaggagaagctctggtcatcctgatgaagtaaagaaagaactggaaacgtacaaagaagttcccatccagactacaaaagaaccaacaattgacgaccagcgactggaaagtgcatggctccaggttactgagaagcacacacctggtctggtggatcaggcactacacgatcaacatcaggttctgtctcaattttctggcaaccaacaccaaaggaagtcctcgatgtccctagttgtgccctcaagccatgtagatgaggatcttgctcatcagatagaagcgctgaagattgttgacagttatggttctcagaagcaccagagtggaagaagtgaaagcggcttttccgtttcaccaagcagaatgcacaggaaggatgacatggttgattgcgacaaagagagcgtatgctctgagcttggaaaatcgagatgccatggccttttcccttgttggaaatctcaaaaaccaaggggagtaaagacgaagaggcatatgcgggtgaaatcttcttcgtctggcagacttgtttaacatgccgatgatgatgtagcgagcctgggagtagaatacgtgttggaacggaattcgtgtttgaaatggttcttgtttttgcaaaatgacacattgttgtttcagaagaaaaggaaatttgaattgctagaacattaaattcagcatccttctctcgtggccgcatatttttggccttcatggggtagggcaggattcagggacggaggtcaatttctccagcaatcagctgcacgtgtaatcttgattttgtatttatatgtgtcctagtaaagttattatgtgctccttgttatcttggggaaaaagaaagagactatatcttcaggaacctcacatgaatgaaactgatgaatatagatttaagttaccaaatctggtttctcttgtgtactaatgatatgatcttgtgttacctgtt

SEQ ID NO: 16056 - DNA, 4175 bp, Zea Mays
ccgcgtgctacttcgaatctccgtctcctccgacattcactgcccgatggcgatggatgtaggttccacctccaaaggcgcctcctttttcgacgccttgatgcctttctaggactaggaccagtccgaactgctcgtgctccctctttcccgtgcgcgctgcaggttggtcgatcccacctggcggcctccgtgattgccgacaagtcagtgtctttccagactggagatggggactatgtttggagcgtgtgttggcccaagtgagcttcacttgaggaaggaacttactgctttgcaaaaggcgcgctgcttgcaggaccctgacacttgctcaacatggagatcacctttgagttctaggtcactggtggcaacttcaaggattacatacaacggtggtatttctagtaatttagcaccaaagcacaatgagtcaccttgtgcacctccaaacactgataagaaaagaagaaaggtttatctctacaattggaggcagaattcttataaatctagtgaaagcggaatgaagatagatgaggatgtcaagcaaccatctggtgatctaagcctggacagtccatgcaagtctaatggggtaaagtccaaaggtgatgcatatctggatcctccagccagcatctacaatgttcagagttcaacatcatgtactcctgtcaaaagaatagctagaaggagaaatggtgttttgtccaagaaaggagcagtcagaaaccaagctataccgaagttgtcagatcttcaggttaactctggtgagccatctgaggatactgagaactgcaactcagaggctctggagatacttcgaagaggctacttatctcatcctgcatctccgctatttgctgcatgtggttgtgtcagctcttcaaatccttcaaaactactgaaaataggtagaagagagggatcttccttttcttgcacaccggtttctactagctcctattacaggcatgtaagaaggaacaccagcactgttggttcttgggatgctaggactgctacttctcttgatggtgatgagtctaaccaatcagcagttctgagaagtcagaggtcgcatgtcccttgctatgtatcaaagaggagaaaacatcaaggatctgaaggaagtaattattctccttcactatccgctatacttcgaagaaaaggtagcagcctaatatgtgggagccagacaatgcacaagaagaagaaatcatttggttcaatgaaatgggcacattcgaagaagtctgctcagggaatgccacttttgggtaatagctgtgattttggttcgtcgtcatttgattcatcaagtgatgatctctcaaccaatataggggagcttgatatggaggcttcaagccggttggatgggaaaagatggtcaagctgcagaagccaggatgggatggatctatctgttcattgtgctgatctgcacgagtcagacccgagaagcttgagccaaaaatatagaccaagagcattcccagaaattgttagtcaaaatattgcagtccaatcacttagtaatgctataacaagggaaaggatagctcctgcctatctttttcaaggtcctcgtggaacaggaaaaacatcgactgcaaggatattttcagcagctttaaattgccttactactggagataataaaccctgtggggtatgtaaccactgcactgacttcttcagtggaaaagctagcaatataaaagaagttgatgcaagtaacagaaagagtataggcataattaagcacttgctggaaaatttgccgccatctgcgcctttgtcccggtacaaggtgtttgttgtcgatgaatgccacatgataccttccaaattatggtcagcatttatgaagtttcttgatgaaccatttccttatgttgtgttcatatttattacaatcgacccgaacaacgtacctcgagcagttgtatcacgttgccagaaatatgtgttctctaagatcaaagatattgacactgtgtgccggctgaggaaaatctgtgtaaaggaaaatcttgatgttgagctagcagctttggatttgatagctctgaattcagatggctcgctacgagatgcagaaacaatgttagatcaattgagcttgttagggaaaaagataactccttcacttgtcaatgatttggttggtgttgtctcggaagagaaattgcttgatcttctggagatagctatgtcaggagacacggctgagacagtgaaaagatccagagagctgatggattctggcactgatccaatggcattaatgtctcagttagctgggctcatcatggacatcattgctggcacctacaaattggctgatgttgcttgttgtaatggctcagcagttggtggtcgaagtttaacggaagcagagttagaaagattacaacaagcattgaagattctttctgatgctgaaaagcagataagcctttcaagtgagcgtcccacgtggtttactgctgccttactacaacttgggtgtggtcatagttcagatgtgaaccaacaaaaaggcagtactcaagaacaccataaagtagccaatgatgctatgtctgagatagcaagggaatcatccagcagaactttttctcattcattatctgcctttggcatttctaagagaacgcttgactccaaaacaattagtgtgcactcgagtcctcaggtccttgcctcacattcatctcggttgagactgaatgacaacttggtttatggagagtgtaggtctgttgatagagttccactcaattctaatcaactgaatggcaactgttcccagcaaagggccctggtaaatggaatctcagatagccttgctcaggtttggataagatgcattgagaactgccactcgaagacattacagcacctacttcttgaccatgggaaactagtatcaatcaggcaatttgagggccacgcgactgcttttattgcaattgaggactgtggcataaaatctagagctcaaagatttttgagtagcattaccaattcacttgagacggtactgaaatgcaacgtggaagtcaagattggtccactagcagaattgatggacggagaagtaacattagaggctggtcctaatgtaagaagatacgagtctgacgtcttgagttgctcatcaaacagtgaccgactaaagggagctttagattcaaggagaagctctggtcatcctgatgaagtaaagaaagaactggaaacgtacaaagaagttcccatccagactacaaaagaaccaacaattgacgaccagcgactggaaagtgcatggctccaggttactgagaagcacacacctggtctggtggatcaggcactacacgatcaacatcaggttctgtctcaattttctggcaaccaacaccaaaggaagtcctcgatgtccctagttgtgccctcaagccatgtagatgaggatcttgctcatcagatagaagcgctgaagattgttgacagttatggttctcagaagcaccagagtggaagaagtgaaagcggcttttccgtttcaccaagcagaatgcacaggaaggatgacatggttgattgcgacaaagagagcgtatgctctgagcttggaaaatcgagatgccatggccttttcccttgttggaaatctcaaaaaccaaggggagtaaagacgaagaggcatatgcgggtgaaatcttcttcgtctggcagacttgtttaacatgccgatgatgatgtagcgagcctgggagtagaatacgtgttggaacggaattcgtgtttgaaatggttcttgtttttgcaaaatgacacattgttgtttcagaagaaaaggaaatttgaattgctagaacattaaattcagcatccttctctcgtggccgcatatttttggccttcatggggtagggcaggattcagggacggaggtcaatttctccagcaatcagctgcacgtgtaatcttgattttgtatttatatgtgtcctagtaaagttattatgtgctccttgttatcttggggaaaaagaaagagactatatcttcaggaacctcacatgaatgaaactgatgaatatagatttaagttaccaaatctggtttctcttgtgtactaatgatatgatcttgtgttacctgtt

SEQ ID NO: 16057 - DNA, 798 bp, Zea Mays
cgacgcatactcgctggtgggtggggcccccttgtccgtacttccttctcagccgtaacaaccgtgcgaaatcgtcgcgcgcgacgtgaatcctggtcggtttccttccctccttgaccgatggcacggggataaattcggtgccggatgacctacctgttaagccacaagcgagagacatagagccgtcgtcgtcgtgtgtgagtcgcctgccacgcatgtcctatccaccgagagtgagagaggactcgccgccgccatccattggtaaaggcacttgggaatccggagctgaaccgtggagctgcacagaccacgcagaacgtgggtgactcatcctcgggcgtgattgacgactggtgtcgggggaatcgctcaccggtgaccacaggccgcacctctccgcaggcagagcgcttcactgcatagtcgtagacgggcaagtgaatgaggacacagagactcagcaggtggataatactaagcaggagctcgttgaaggtgaagagcaggtagcccaggaggaggaggcctacaatgaggagtatgagcttatctaggtggcctctcccagtcagctttatggcgccaaggaataatacttagttcgctttattgttctcatttatttttgtaagacttccgctatgtaataatgatgtttgtgacatttatctctatacactttgtcattatatgtgatgttcttctttggcaaacatgtgagacgcacccggttttaccccttgaatccgagtgtgacacatattttgatgcctatatgtagatgcaattgtg

SEQ ID NO: 16058 - DNA, 1057 bp, Zea Mays
agaagtagcaagcagaggacaggttttagaggatgaagacgagttcaattcctgcttgccttttctgttacacaagctatcctatactattgacattgcatgggctgagactccttgatagctgaggcccacaccatttgagatattgtgacggcctagctcatgacactccagtgcttgggtttgactctccatgggagtgaatttcaggaaacgtctcttcaccatgatcaataatcttcccagcatatatgaggttgtcacaggaacagccaagaaagagtccaaagaaaaaactcctaaaagcagcaacaagactaacaaatctggctcaaagccttcacgccaggtagaacccaactccagggtcccaaagatgccacctccaaaggacgaggagagtgaaggggaggaaggtgaaccacaggaagaccatgagagtgcgctgtgcggcgcatgtggcctaggttatgacgacttctggatctgttgcgacttatgcgagacatggttccacggcaagtgtgtcaagatcaccccaaataaagcggagcacatcaagcagtataagtgcccctcgtgcacaggaagcaagagggccaaggcttgattctatctatctacgatatagatatgaattgcggacaatgctccaagaaccgaggagcctttgacgagagttgtaagatgaatcttccgggtagggcagctaatagatttgaatacttcgtgtggatactgtcggcattggtgcttgagatgcctcaaaatatagtgtcagtactgatcaactgttaactgttgtagtttgtggggccctcaggcatctatgttctgtagtctactgtgtggtggtttagataccgtctatgccatttgtgatgaagcagtcgttttaaagttagatcccagtaatttccctactatacatttgtcttcgtgtaatcgtgtttaggcagaatctagcagtgaaggtcaggtcccgattgtttatgcattcgaagatgtcggttaaatatgtggagtcgtagtggttctgcttgtttgtgtgctctcc

SEQ ID NO: 16059 - DNA, 1195 bp, Zea Mays
gtcatctccaaaagtcgtgcggctgtcgatttactgttatgctcccggacaacgacatctgctgcaactgtaccgaggggcattttcggaatattttgtcagtgagtcactgatgtcagagaaggataatttatgtttatatggacttcccaatgagacatgggaagtaaacttgcctgctgaggaggttcctcctgaactcccagagccagctctcggaattaattttgctcgtgatgggatgaatgaaaaagattggctatcacttgttgcagtgcatagtgattcttggctaatgtctgttgcattttattttggagcaaggtttggattcgacaaggaatccaggaaacgtctcttcaccatgatcaataatcttcccagcatatatgaggttgtcacaggaacagccaagaaagagtccaaagaaaaaactcctaaaagcagcaacaagactaacaaatctggctcaaagccttcacgccaggtagaacccaactccagggtcccaaagatgccacctccaaaggacgaggagagtgaaggggaggaaggtgaaccacaggaagaccatgagagtgcgctgtgcggcgcatgtggcctaggttatgacgacttctggatctgttgcgacttatgcgagacatggttccacggcaagtgtgtcaagatcaccccaaataaagcggagcacatcaagcagtataagtgcccctcgtgcacaggaagcaagagggccaaggcttgattctatctatctacgatatagatatgaattgcggacaatgctccaagaaccgaggagcctttgacgagagttgtaagatgaatcttccgggtagggcagctaatagatttgaatacttcgtgtggatactgtcggcattggtgcttgagatgcctcaaaatatagtgtcagtactgatcaactgttaactgttgtagtttgtggggccctcaggcatctatgttctgtagtctactgtgtggtggtttagataccgtctatgccatttgtgatgaagcagtcgttttaaagttagatcccagtaatttccctactatacatttgtcttcgtgtaatcgtgtttaggcagaatctagcagtgaaggtcaggtcccgattgtttatgcattcgaagatgtcggttaaatatgtggagtcgtagtggttctgcttgtttgtgtgctctcc

SEQ ID NO: 16060 - DNA, 1144 bp, Zea Mays
cccattcattggttctggtgcgccctgggaggctatttcgcggcggaatttctgctccgatcttgctgagaaggataatttatgtttatatggacttcccaatgagacatgggaagtaaacttgcctgctgaggaggttcctcctgaactcccagagccagctctcggaattaattttgctcgtgatgggatgaatgaaaaagattggctatcacttgttgcagtgcatagtgattcttggctaatgtctgttgcattttattttggagcaaggtttggattcgacaaggaatccaggaaacgtctcttcaccatgatcaataatcttcccagcatatatgaggttgtcacaggaacagccaagaaagagtccaaagaaaaaactcctaaaagcagcaacaagactaacaaatctggctcaaagccttcacgccaggtagaacccaactccagggtcccaaagatgccacctccaaaggacgaggagagtgaaggggaggaaggtgaaccacaggaagaccatgagagtgcgctgtgcggcgcatgtggcctaggttatgacgacttctggatctgttgcgacttatgcgagacatggttccacggcaagtgtgtcaagatcaccccaaataaagcggagcacatcaagcagtataagtgcccctcgtgcacaggaagcaagagggccaaggcttgattctatctatctacgatatagatatgaattgcggacaatgctccaagaaccgaggagcctttgacgagagttgtaagatgaatcttccgggtagggcagctaatagatttgaatacttcgtgtggatactgtcggcattggtgcttgagatgcctcaaaatatagtgtcagtactgatcaactgttaactgttgtagtttgtggggccctcaggcatctatgttctgtagtctactgtgtggtggtttagataccgtctatgccatttgtgatgaagcagtcgttttaaagttagatcccagtaatttccctactatacatttgtcttcgtgtaatcgtgtttaggcagaatctagcagtgaaggtcaggtcccgattgtttatgcattcgaagatgtcggttaaatatgtggagtcgtagtggttctgcttgtttgtgtgctctcc

SEQ ID NO: 16061 - DNA, 1349 bp, Zea Mays
caaatagggccgcaaactatcggactcattggaaggcccgcgactgcggctgcgcctgcgcccgaccaaacgtaggagacccatctcctctcttttctttccaagaaaagtcttctcttctctgtctcagcgccgacgcttcccaactccttccaatcgattcttcgtctcgtcctcgtgtaatccccagcttgccctcctcgctcttccctcccaaaaccctacgcctccctgaccaagctccggggacgaatggacggaggagccggcttccctggcacgccggtcccgcgctcgccggaggacgttttccgggactaccgcgcgcgccaggccggcctaatcagggcgctcaccaccgagaaggataatttatgtttatatggacttcccaatgagacatgggaagtaaacttgcctgctgaggagtgcatagtgattcttggctaatgtctgttgcattttattttggagcaaggtttggattcgacaaggaatccaggaaacgtctcttcaccatgatcaataatcttcccagcatatatgaggttgtcacaggaacagccaagaaagagtccaaagaaaaaactcctaaaagcagcaacaagactaacaaatctggctcaaagccttcacgccaggtagaacccaactccagggtcccaaagatgccacctccaaaggacgaggagagtgaaggggaggaaggtgaaccacaggaagaccatgagagtgcgctgtgcggcgcatgtggcctaggttatgacgacttctggatctgttgcgacttatgcgagacatggttccacggcaagtgtgtcaagatcaccccaaataaagcggagcacatcaagcagtataagtgcccctcgtgcacaggaagcaagagggccaaggcttgattctatctatctacgatatagatatgaattgcggacaatgctccaagaaccgaggagcctttgacgagagttgtaagatgaatcttccgggtagggcagctaatagatttgaatacttcgtgtggatactgtcggcattggtgcttgagatgcctcaaaatatagtgtcagtactgatcaactgttaactgttgtagtttgtggggccctcaggcatctatgttctgtagtctactgtgtggtggtttagataccgtctatgccatttgtgatgaagcagtcgttttaaagttagatcccagtaatttccctactatacatttgtcttcgtgtaatcgtgtttaggcagaatctagcagtgaaggtcaggtcccgattgtttatgcattcgaagatgtcggttaaatatgtggagtcgtagtggttctgcttgtttgtgtgctctcc

SEQ ID NO: 16062 - DNA, 1136 bp, Zea Mays
aagtaccatctccaaagtgtccccagcggctaatgggtagatcatgtccataccgacgtttgcggcatttggccgttgtcaacgtctccaaagtgtcaaagtcgttccctacgtcatttcgtcaaaatcgagcactgtcgtgttcttatccggtcccgaacaaacaaccccgcttctgccggccgttttggaggcgttgcggccatggcggcttcgaagcccatcttgtatagcgcgtggatcagctcctgctccttccgagtccggatcgccctcaacctcaaaggtgtggattatgagtacagggctgtgacaaggaacgatctagattacgaaaagatcaatccaatcaagtatgttccagcattggttgatggggattttgttgtttctgactccctggcaatcatattgtatcttgaagataaatatcctcaacaccctcttttgcctcaagatctcaaaaagaaagctataaatctgcagattgcaaatatagtttgttcaagcattcaacctcttcaatgttatgctgtaattggtctgcttgatggcaccttaggctctaaccagagccttcagattgttcggaattacaccgacaagggatttaaagcaatcgaaaaacttctggaaggttgtgacagtaaatatgctactggagacgaagtccaactgatgtgtttcttgcgccccagatgtatgcaggcgtgacgcgcttcggaattgatatgtcaaagtaccctcttctggagaggttctacaaagcctatatggagatcccagcatttcaagtcgcggttcctgaaaaacagccggatgcgcctgcgtccccatactgaaacggaggcagcaaccatattgatattcaaattgatttggttatcttggaatcatgttgtatgtagcatgacatagaaggccacgatgtatgcctatttgtttcgtacacattctggtttgtccgaagaatttcacagtaaataaggcccgatgatttgtgtagtagtgttaatagaaaaaagaaacagaatgcatggctcctgttgtactacatatgctaaaaaaatctgcgatgccaaatgcaaatgactcctcgttggacagagatgaggcaccgaccaattcaaattaat

SEQ ID NO: 16063 - DNA, 1173 bp, Zea Mays
aagtaccatctccaaagtgtccccagcggctaatgggtagatcatgtccataccgacgtttgcggcatttggccgttgtcaacgtctccaaagtgtcaaagtcgttccctacgtcatttcgtcaaaatcgagcactgtcgtgttcttatccggtcccgaacaaacaaccccgcttctgccggccgttttggtacttctctctttgtctgcgcttccaacgcaggaggcgttgcggccatggcggcttcgaagcccatcttgtatagcgcgtggatcagctcctgctccttccgagtccggatcgccctcaacctcaaaggtgtggattatgagtacagggctgtgacaaggaacgatctagattacgaaaagatcaatccaatcaagtatgttccagcattggttgatggggattttgttgtttctgactccctggcaatcatattgtatcttgaagataaatatcctcaacaccctcttttgcctcaagatctcaaaaagaaagctataaatctgcagattgcaaatatagtttgttcaagcattcaacctcttcaatgttatgctgtaattggtctgcttgatggcaccttaggctctaaccagagccttcagattgttcggaattacaccgacaagggatttaaagcaatcgaaaaacttctggaaggttgtgacagtaaatatgctactggagacgaagtccaactggcagatgtgtttcttgcgccccagatgtatgcaggcgtgacgcgcttcggaattgatatgtcaaagtaccctcttctggagaggttctacaaagcctatatggagatcccagcatttcaagtcgcggttcctgaaaaacagccggatgcgcctgcgtccccatactgaaacggaggcagcaaccatattgatattcaaattgatttggttatcttggaatcatgttgtatgtagcatgacatagaaggccacgatgtatgcctatttgtttcgtacacattctggtttgtccgaagaatttcacagtaaataaggcccgatgatttgtgtagtagtgttaatagaaaaaagaaacagaatgcatggctcctgttgtactacatatgctaaaaaaatctgcgatgccaaatgcaaatgactcctcgttggacagagatgaggcaccgaccaattcaaattaat

SEQ ID NO: 16064 - DNA, 1147 bp, Zea Mays
gctcgtgggtagctaacggtgtgagctcaagtaccatctccaaagtgtccccagcggctaatgggtagatcatgtccataccgacgtttgcggcatttggccgttgtcaacgtctccaaagtgtcaaagtcgttccctacgtcatttcgtcaaaatcgagcactgtcgtgttcttatccggtcccgaacaaacaaccccgcttctgccggccgttttggaggcgttgcggccatggcggcttcgaagcccatcttgtatagcgcgtggatcagctcctgctccttccgagtccggatcgccctcaacctcaaaggtgtggattatgagtacagggctgtgacaaggaacgatctagattacgaaaagatcaatccaatcaagtatgttccagcattggttgatggggattttgttgtttctgactccctggcaatcatattgtatcttgaagataaatatcctcaacaccctcttttgcctcaagatctcaaaaagaaagctataaatctgcagattgcaaatatagtttgttcaagcattcaacctcttcaatgttatgctgtaattggtctgcttgatggcaccttaggctctaaccagagccttcagattgttcggaattacaccgacaagggatttaaaggttgtgacagtaaatatgctactggagacgaagtccaactggcagatgtgtttcttgcgccccagatgtatgcaggcgtgacgcgcttcggaattgatatgtcaaagtaccctcttctggagaggttctacaaagcctatatggagatcccagcatttcaagtcgcggttcctgaaaaacagccggatgcgcctgcgtccccatactgaaacggaggcagcaaccatattgatattcaaattgatttggttatcttggaatcatgttgtatgtagcatgacatagaaggccacgatgtatgcctatttgtttcgtacacattctggtttgtccgaagaatttcacagtaaataaggcccgatgatttgtgtagtagtgttaatagaaaaaagaaacagaatgcatggctcctgttgtactacatatgctaaaaaaatctgcgatgccaaatgcaaatgactcctcgttggacagagatgaggcaccgaccaattcaaattaat

SEQ ID NO: 16065 - DNA, 1953 bp, Zea Mays
atattctcccaaaaaacccaacactccagtggcggcaaagacctaacatttcaaaatcaatggccaagaaccccaaggcgcccgacacccgcagtggccgttctcccaccagaaggccccgaccacgccgcgccaaggcggtgccagaagcctcctccgcagctgatatcgaagacctggctccctcagtgcctggggccgctgcccctggcgctgccgcacccacggccctgcgcgcacagctgctccggtggtatgacgcgcaccgtagggacctgccgtggcgatgcgtaagcggcagcgaggaagagagggcgtacgcggtgtgggtgtccgaggtgatgctgcagcagacgcgggtgcccgtggtcgtcgcttactacgagcggtggatggcgcggtggccgaccgtacgaagcctcgccgccgctacgcaggaggaggtgaacgagatgtgggcgggtcttggctactaccgtagggctcgatttctgctggagggagcaaagcagatcatcgaaaaggggttgtttccttgcacggcgttagcccttcgtgaggttcgtggcattggggattacacagctggagcaatcgcttcaattgccttcaacgaggttgtcccagttgtggatggaaatgtgatacgagtcatcagcaggctttacaccattgctgacaacccaaaggaatcctcaacagtgaagagattctgggacctcgtaggtcaaatggttgaccctttgagaccaggagacttcaaccaagcgatgatggagttaggagcaacattatgtagcaagacaaagcctgattgcacaaggcttggaggaagaggcggcagacccaaagggaaatgaccatctctttttgctgatcaagagaccagaagagggcctgcttgcagggctctgggagttcccactggtccttgtggaccaagggaaaaccgatttgctgaacagaaggaaagcaatggacaagtatctgtcaaagttgcttagcatcgacatggttcggaaacctgacgtgatcctccgggaggatgttggtgagcatgtccacattttctcccacattcgcctgacaatgcatgtggagctcatggttattaatctcaaagatggtgtggatcgactatgcaaaaagggtgctgatagcacaaagttgaaacttgtcaacgagtcctgcgtggagtccatgggattaacatcgggtattcggaaggtgtacaacatggtcagggctttcaaggagaaaagcctcgctgtatctgagataggtcatgtacccacgaggaaaaggactagacggttaaagcggtagcctaagcaattaggcagtagaggcaagaactagacggttaaagcaagtaaccgtaagcaaattagggagtagagactgctagctagtgcagtacaacatgcagcttgtgagatgttgatttctgtttcggtgcatgtatctggcgtgctgatgtccaaaactgctaattgttgcaagcttgctggaagaaagaaggctgattggtactcagggctcttgtttatcgcgcaattttcctgcatttccagacgtcaagtgatacacagcgttttagttttatgtacgctttggtttgttccgtttggggccctcttctgctttacgggagcggcaagctggtaatcaaccaacaatggcctttgtctagcgatgatattgtttgttccataacatggtggtacaactggcgaaagaacacaaacgaacccaacaggtttaaattcaatagttcgatgataacagacagctactgcattgaagcagtaacaactaactcattcataataaagtccaccatgttgagatgctagtgtgtgagaatcttatccggttagaggcaagcacggaggagttgctcaagtatattgatggggctgatcatgctgcgatgactttttagactaccgg

SEQ ID NO: 16066 - DNA, 2055 bp, Zea Mays
cttcttgcgcatgcccatattctcccaaaaaacccaacactccagtggcggcaaagacctaacatttcaaaatcaatggccaagaaccccaaggcgcccgacacccgcagtggccgttctcccaccagaaggccccgaccacgccgcgccaaggcggtgccagaagcctcctccgcagctgatatcgaagacctggctccctcagtgcctggggccgctgcccctggcgctgccgcacccacggccctgcgcgcacagctgctccggtggtatgacgcgcaccgtagggacctgccgtggcgatgcgtaagcggcagcgaggaagagagggcgtacgcggtgtgggtgtccgaggtgatgctgcagcagacgcgggtgcccgtggtcgtcgcttactacgagcggtggatggcgcggtggccgaccgtacgaagcctcgccgccgctacgcaggaggaggtgaacgagatgtgggcgggtcttggctactaccgtagggctcgatttctgctggagggagcaaagcagatcatcgaaaaggggttgtttccttgcacggcgttagcccttcgtgaggttgtcccagttgtggatggaaatgtgatacgagtcatcagcaggctttacaccattgctgacaacccaaaggaatcctcaacagtgaagagattctgggacctcgtaggtcaaatggttgaccctttgagaccaggagacttcaaccaagcgatgatggagttaggagcaacattatgtagcaagacaaagcctggttgctctcaatgcccagtctctagccactgccaagcgcttgcgctttcccgtgaaaaatcatcggttcaagttacagacttcccacgagtggttccaaaggccaaacctcggagtgatttcgctgctgtttgtgtggttcagattgcacaaggcttggaggaagaggcggcagacccaaagggaaatgaccatctctttttgctgatcaagagaccagaagagggcctgcttgcagggctctgggagttcccactggtccttgtggaccaagggaaaaccgatttgctgaacagaaggaaagcaatggacaagtatctgtcaaagttgcttagcatcgacatggttcggaaacctgacgtgatcctccgggaggatgttggtgagcatgtccacattttctcccacattcgcctgacaatgcatgtggagctcatggttattaatctcaaagatggtgtggatcgactatgcaaaaagggtgctgatagcacaaagttgaaacttgtcaacgagtcctgcgtggagtccatgggattaacatcgggtattcggaaggtgtacaacatggtcagggctttcaaggagaaaagcctcgctgtatctgagataggtcatgtacccacgaggaaaaggactagacggttaaagcggtagcctaagcaattaggcagtagaggcaagaactagacggttaaagcaagtaaccgtaagcaaattagggagtagagactgctagctagtgcagtacaacatgcagcttgtgagatgttgatttctgtttcggtgcatgtatctggcgtgctgatgtccaaaactgctaattgttgcaagcttgctggaagaaagaaggctgattggtactcagggctcttgtttatcgcgcaattttcctgcatttccagacgtcaagtgatacacagcgttttagttttatgtacgctttggtttgttccgtttggggccctcttctgctttacgggagcggcaagctggtaatcaaccaacaatggcctttgtctagcgatgatattgtttgttccataacatggtggtacaactggcgaaagaacacaaacgaacccaacaggtttaaattcaatagttcgatgataacagacagctactgcattgaagcagtaacaactaactcattcataataaagtccaccatgttgagatgctagtgtgtgagaatcttatccggttagaggcaagcacggaggagttgctcaagtatattgatggggctgatcatgctgcgatgactttttagactaccgg

SEQ ID NO: 16067 - DNA, 340 bp, Zea Mays
gtcgtcgtgagcaccgtgcggtgtgctgaaaatcgccaccgccgcggtacatcctctacactgtcgtctagtgtgtcggcattggccgtggcgtttcgcaaagtccgcggggcggaatcggagcctagcaaggggagacggggaggtgtggttgcgaaatcactctcggagtcaagaacggcgaccggttcaattgattcctaggctatcaacgtcactgcttccttcgccgttgagacgagcaagccacagaggatccaggggttcagtaggtggagactgctgagtaggagctaattgaaggcaagttgtgcccttgatcacttcctttttacccagt

SEQ ID NO: 16068 - DNA, 1866 bp, Zea Mays
ttgaggggagggggtgcaacacatctttcatgccatgtacattcatagaaaactggaatcctataaaaaggtaagtaggtcacataatgtcttctgaagataaagcaatggctaatcgtgtcacttcacactcgccaaaagctatggtgtcggaaccagatcccaacaggatgatgatgtttagatcaaatatggagtattcacaaacaaatggccagacaaatgctgttcttggtcctgtggctatcttttgggacattgagaactgtcctgttccatgtgatgtacggccagaagatgttgctggcaatgttaggatggctttgcgcatgcatcctgttgttaggggtgcggtgacaatgctgtctgcttatggagatttcaatgctttcccaaggagactccgggagggatgccagagaactggagtcaaacttgttgatgttcctaatggacggaaagatgctgctgataaggctatactggttgatatgttcctttttgcacttgacaatcacccaccatcatccattatgctcatatctggtgatgtggacttcgctccggcattgcatatacttggccagcgtggatacaccattgtcattgctattccgtcttcagttaccgtctcatcagctctgagcagtgctgggagtttcgtgtgggactggcctagccttgcccgtggtgaaggtgttgtgatccctaggtccttggtgcgccgtctggctgattatccatgttatgtcaacagtgggaatatgggacagttccctgataatcagaatgaagaggaggccattgtatataccggaacatcaaggaatgaatatggtggcagacctcccgtcaatcaaatgtattgttataacacttcccagacaactagagaaccaagcaaagctttgtatactgttgaagatgtgaactgtggtacatcatcaaggcctcataatttatcatgtcgtcagagtgaaagtcctgagacagaccaaggtttgacagatgagcagtcatggtgggttcgtcctggtgatcttcaaggattgaagggtcaactaatacgtctgtttgaattatctggaggatgtgtcccacttgttcgtattccctcagagtatctaaaactctttggcagacatttatatgtatcagaatatggagctgttaagcttgttcatcttttcgagaagctggccgactcttttgttgtcgttggtaagggtcataaaaagatgatctgtctctgcaattctggtgataggaacctgaagaattatccaagtacgccaatcattctgacgaagaaaaacagaggaaattctgctcttgaagaaagcacgataggagcatgtcagcaattaggcagctcatcagatgaattatcagaggatgaaccaattatcaacccagatataaatgttgcatgtgtgttcaatgagcatctagacagcttcagaagggagattcaggagctccttgtttgctactcctgccctgttccgcttggtaattttgagagtttatatgagcaacggtataagaagatcattgactatgagagcttaggagtcaccggtctggaggagctagttgagaaggtgaaagacgtggtagatttgcacgaggaccaaaccagcaaaagcaagttccttattgcaaactacacaaccgggtcggcatctttttttaccgtgccggtatgataagtgtgaatggcatagtaagtatttgtaatggcttccctcatgcctcagctaatctgtgcaaacagggagttgtttcttgtatgcaaaaagatgattatactaaagaacagtgaccatttatttggcaaatacatctaattccagttcaagtcaa

SEQ ID NO: 16069 - DNA, 1945 bp, Zea Mays
accgtccgtggagcgcggctccggtggccccacgtgtggaaggagcgcgggctccaacgtcctgacgtaagtaggtcacataatgtcttctgaagataaagcaatggctaatcgtgtcacttcacactcgccaaaagctatggtgtcggaaccagatcccaacaggatgatgatgtttagatcaaatatggagtattcacaaacaaatggccagacaaatgctgttcttggtcctgtggctatcttttgggacattgagaactgtcctgttccatgtgatgtacggccagaagatgttgctggcaatgttaggatggctttgcgcatgcatcctgttgttaggggtgcggtgacaatgctgtctgcttatggagatttcaatgctttcccaaggagactccgggagggatgccagagaactggagtcaaacttgttgatgttcctaatggacggaaagatgctgctgataaggctatactggttgatatgttcctttttgcacttgacaatcacccaccatcatccattatgctcatatctggtgatgtggacttcgctccggcattgcatatacttggccagcgtggatacaccattgtcattgctattccgtcttcagttaccgtctcatcagctctgagcagtgctgggagtttcgtgtgggactggcctagccttgcccgtggtgaaggtgttgtgatccctaggtccttggtgcgccgtctggctgattatccatgttatgtcaacagtgggaatatgggacagttccctgataatcagaatgaagaggaggccattgtatataccggaacatcaaggaatgaatatggtggcagacctcccgtcaatcaaatgtattgttataacacttcccagacaactagagaaccaagcaaagctttgtatactgttgaagatgtgaactgtggtacatcatcaaggcctcataatttatcatgtcgtcagagtgaaagtcctgagacagaccaaggtttgacagatgagcagtcatggtgggttcgtcctggtgatcttcaaggattgaagggtcaactaatacgtctgtttgaattatctggaggatgtgtcccacttgttcgtattccctcagagtatctaaaactctttggcagacatttatatgtatcagaatatggagctgttaagcttgttcatcttttcgagaagctggccgactcttttgttgtcgttggtaagggtcataaaaagatgatctgtctctgcaattctggtgataggaacctgaagaattatccaagtacgccaatcattctgacgaagaaaaacagaggaaattctgctcttgaagaaagcacgataggagcatgtcagcaattaggcagctcatcagatgaattatcagaggatgaaccaattatcaacccagatataaatgttgcatgtgtgttcaatgagcatctagacagcttcagaagggagattcaggagctccttgtttgctactcctgccctgttccgcttggtaattttgagagtttatatgagcaacggtataagaagatcattgactatgagagcttaggagtcaccggtctggaggagctagttgagaaggtgaaagacgtggtagatttgcacgaggaccaaaccagcaaaagcaagttccttattgcaaactacacaaccggttaggctctttctgttgtcttgatgtcctagttcagctcctaaagtacttcagctcgtgtttccttaacatgtgtcacacagggtcggcatctttttttaccgtgccggtatgataagtgtgaatggcatagtaagtatttgtaatggcttccctcatgcctcagctaatctgtgcaaacagggagttgtttcttgtatgcaaaaagatgattatactaaagaacagtgaccatttatttggcaaatacatctaattccagttcaagtcaa

SEQ ID NO: 16070 - DNA, 3005 bp, Zea Mays
cgatcttcgaattctcctcctcttttccttcctcttctgcagcgccagcgccagcgccgaccgaacccaacgccaacggcacggcaagccaagcgaagcggagcaagggtttgctcgccccacacccgtcccgcggccgaggctctgcttctcatcgtgacaagcctggcgaactgccatggacctggtgggatccttgctcctgagcatggcacgtctgcttgacccatccggtctccacttcgtgggctggctcgtcaccgcgggctccattggtcttgccgcactcatctacgctctcctcaggctgcagcgtgaggcggcgttgtactggaccaaggcgaccagggagaagcgtgccgcatggaggagattgcggtgccctagctcctgccactcgtggtctgaggactacttccacggtggccagccatcgacatgctgcgtttgcctgtcgtcccttggctccacgcagggcgtcgacatggttcaccgctgctctgtttgcggcgtggctgcacactcaaactgctctccccgtgcagagaaggattgcaagtgcgttgcacaggctggcgcttcgcccttgctgcatcactggtctgagaggtgggtggagctggatgacaacccggagatatcctcctcctgttactactgtgatgagccgtgcggtgtgcctttccttggagtctctcctatatggcgttgcctgtggtgccagcggcagatccatgttgattgccatgcaaaactgttgaaggaaaccggaaacacttgtgatcttggccttctcaggaggcttatagttcctccccaatcagtgaaagaaattggtcaaggttcaggaattagtggaatgctgaactcaatcaaggacgggtttgccaattcaacagttgggaaccgtaggaggtcacgcaacaagaagcgcatgaataaccatcctggtggcaagataaattccattcccacaaaattctcagtcattgattcagtgcttgaaggatttgctagattgaagggcctggatgggaagtatgcactagcaaagcctttatctcaacattctgtaaagcaaacatatcgatctgttattcctaatggacgagtcagaaagtatgaacttgttgatttgccacaagattcaagaccactgctggtattcatcaatggcaagagtggaggtcgaaatggaccttctcttagaagaaggctgaacatgttgttgaatccaatacagatatttgagctaagtgcttctcaggcacctgaagttggattacaactattccacaatgtgaaacacttcagaatccttgtttgtggtggggatggaactgtagcatgggttcttgatgctattgaaaagcagaactacgaatctcctccccctgtcgccattcttcctctcggaactggaaatgacctatcacgtgttatgcgctggggagggggtttatcttctgttgaacgacaaggaggcatatatgcacttttaaatgatgttgaccatgcagctgttacagtgcttgatcgctggaatgtaaccatcaaagagaagaatggaacagaaggtgaatgcaccaagcaaataaaatttatgactaattatttaggtattggatgtgatgcaaaggttgcttatgacttccacaccactagggaggaaaaaccagataaattttgcagtcaggtagggatgtattttttattttattttacagtttacgctaggacgctgtaatttcctaacatttatgtaggaaatcaacagtttcttttttaattattggaaacctactgagaaatcgtgatgatatactaccttcttttcttaatgcttactatgtacatgtagtatgtacattggcagaaacttaaatgcattacttttatgcatacagtttgtcaacaagcttatatatgctagagagggtgcaaaggatatgatggataggtcatgttctgatttaccgtggcatgttagccttgaggttgatgggaaaaacattgaaattccggaggatgcagaaggtgtgattgtaatgaatatccctagctacatgggtggtgtggatctgtggcaaaacgacaatgaccataatgatgatttcagattgcaatcaatccatgacaaaatacttgaggtggtttgtatatccgggacatggcatctaggcaaactgcaggtcggactttcaagggcacaccggttagcccaaggaaaagttataagattacacctccacagttcattccctgtgcaggttgatggtgaaccatggatccagccacctgggtgccttgagatatctcatcgtggacagatgttcatgctaaggaggacatctgaagagcctactggacatgctgccgcaatcatgagtgaggtgctcgtgaatgcagagtgcaatggtgtgattgacgcctctcagaagagattgcttctccacgagatagcactccgtttatcctcctgagactatccagtccagcaaccctcacctcacaaggctaactcattctgtaccctttgatgccaaacctatcgtctctgttgagaaatccctttgcacagacgtaaactgctatggtagagttggtgtatacaatacaaagagatagaaggtgtatacaatacgaggaaatagaagtttccttttgtatttggctgtaccttttgagataggtcatctacttctttgtggctggtttcatcagaacagctgttgaagaattttgtagcgcagagccactataaccgcaactagggctcaatgaaatgtaactagagtggatgtgaatgttttgtttgcaaagatattgatgcaactgttatcacacttcatgagaagacctgaatttcgctaaggggccattttgatccttttattttgaaggaattggaatttacttcaaagagtaggttatttagtttgtaatttgacattcaatcactttccagattttatatataagtctatctcaaatttatagaatga

SEQ ID NO: 16071 - DNA, 2787 bp, Zea Mays
cgatcttcgaattctcctcctcttttccttcctcttctgcagcgccagcgccagcgccgaccgaacccaacgccaacggcacggcaagccaagcgaagcggagcaagggtttgctcgccccacacccgtcccgcggccgaggctctgcttctcatcgtgacaagcctggcgaactgccatggacctggtgggatccttgctcctgagcatggcacgtctgcttgacccatccggtctccacttcgtgggctggctcgtcaccgcgggctccattggtcttgccgcactcatctacgctctcctcaggctgcagcgtgaggcggcgttgtactggaccaaggcgaccagggagaagcgtgccgcatggaggagattgcggtgccctagctcctgccactcgtggtctgaggactacttccacggtggccagccatcgacatgctgcgtttgcctgtcgtcccttggctccacgcagggcgtcgacatggttcaccgctgctctgtttgcggcgtggctgcacactcaaactgctctccccgtgcagagaaggattgcaagtgcgttgcacaggctggcgcttcgcccttgctgcatcactggtctgagaggtgggtggagctggatgacaacccggagatatcctcctcctgttactactgtgatgagccgtgcggtgtgcctttccttggagtctctcctatatggcgttgcctgtggtgccagcggcagatccatgttgattgccatgcaaaactgttgaaggaaaccggaaacacttgtgatcttggccttctcaggaggcttatagttcctccccaatcagtgaaagaaattggtcaaggttcaggaattagtggaatgctgaactcaatcaaggacgggtttgccaattcaacagttgggaaccgtaggaggtcacgcaacaagaagcgcatgaataaccatcctggtggcaagataaattccattcccacaaaattctcagtcattgattcagtgcttgaaggatttgctagattgaagggcctggatgggaagtatgcactagcaaagcctttatctcaacattctgtaaagcaaacatatcgatctgttattcctaatggacgagtcagaaagtatgaacttgttgatttgccacaagattcaagaccactgctggtattcatcaatggcaagagtggaggtcgaaatggaccttctcttagaagaaggctgaacatgttgttgaatccaatacagatatttgagctaagtgcttctcaggcacctgaagttggattacaactattccacaatgtgaaacacttcagaatccttgtttgtggtggggatggaactgtagcatgggttcttgatgctattgaaaagcagaactacgaatctcctccccctgtcgccattcttcctctcggaactggaaatgacctatcacgtgttatgcgctggggagggggtttatcttctgttgaacgacaaggaggcatatatgcacttttaaatgatgttgaccatgcagctgttacagtgcttgatcgctggaatgtaaccatcaaagagaagaatggaacagaaggtgaatgcaccaagcaaataaaatttatgactaattatttaggtattggatgtgatgcaaaggttgcttatgacttccacaccactagggaggaaaaaccagataaattttgcagtcagtttgtcaacaagcttatatatgctagagagggtgcaaaggatatgatggataggtcatgttctgatttaccgtggcatgttagccttgaggttgatgggaaaaacattgaaattccggagaaggtgtgattgtaatgaatatccctagctacatgggtggtgtggatctgtggcaaaacgacaatgaccataatgatgatttcagattgcaatcaatccatgacaaaatacttgaggtggtttgtatatccgggacatggcatctaggcaaactgcaggtcggactttcaagggcacaccggttagcccaaggaaaagttataagattacacctccacagttcattccctgtgcaggttgatggtgaaccatggatccagccacctgggtgccttgagatatctcatcgtggacagatgttcatgctaaggaggacatctgaagagcctactggacatgctgccgcaatcatgagtgaggtgctcgtgaatgcagagtgcaatggtgtgattgacgcctctcagaagagattgcttctccacgagatagcactccgtttatcctcctgagactatccagtccagcaaccctcacctcacaaggctaactcattctgtaccctttgatgccaaacctatcgtctctgttgagaaatccctttgcacagacgtaaactgctatggtagagttggtgtatacaatacaaagagatagaaggtgtatacaatacgaggaaatagaagtttccttttgtatttggctgtaccttttgagataggtcatctacttctttgtggctggtttcatcagaacagctgttgaagaattttgtagcgcagagccactataaccgcaactagggctcaatgaaatgtaactagagtggatgtgaatgttttgtttgcaaagatattgatgcaactgttatcacacttcatgagaagacctgaatttcgctaaggggccattttgatccttttattttgaaggaattggaatttacttcaaagagtaggttatttagtttgtaatttgacattcaatcactttccagattttatatataagtctatctcaaatttatagaatga

SEQ ID NO: 16072 - DNA, 2751 bp, Zea Mays
gcccctgaggccggatcctcccatctagctttcctttttaaacgcacgccacgacgccgatcggcccccacccacgacgatcttcgaattctcctcctcttttccttcctcttctgcagcgccagcgccagcgccgaccgaacccaacgccaacggcacggcaagccaagcgaagcggagcaagggtttgctcgccccacacccgtcccgcggccgaggctctgcttctcatcgtgacaagcctggcgaactgccatggacctggtgggatccttgctcctgagcatggcacgtctgcttgacccatccggtctccacttcgtgggctggctcgtcaccgcgggctccattggtcttgccgcactcatctacgctctcctcaggctgcagcgtgaggcggcgttgtactggaccaaggcgaccagggagaagcgtgccgcatggaggagattgcggtgccctagctcctgccactcgtggtctgaggactacttccacggtggccagccatcgacatgctgcgtttgcctgtcgtcccttggctccacgcagggcgtcgacatggttcaccgctgctctgtttgcggcgtggctgcacactcaaactgctctccccgtgcagagaaggattgcaagtgcgttgcacaggctggcgcttcgcccttgctgcatcactggtctgagaggtgggtggagctggatgacaacccggagatatcctcctcctgttactactgtgatgagccgtgcggtgtgcctttccttggagtctctcctatatggcgttgcctgtggtgccagcggcagatccatgttgattgccatgcaaaactgttgaaggaaaccggaaacacttgtgatcttggccttctcaggaggcttatagttcctccccaatcagtgaaagaaattggtcaaggttcaggaattagtggaatgctgaactcaatcaaggacgggtttgccaattcaacagttgggaaccgtaggaggtcacgcaacaagaagcgcatgaataaccatcctggtggcaagataaattccattcccacaaaattctcagtcattgattcagtgcttgaaggatttgctagattgaagggcctggatgggaagtatgcactagcaaagcctttatctcaacattctgtaaagcaaacatatcgatctgttattcctaatggacgagtcagaaagtatgaacttgttgatttgccacaagattcaagaccactgctggtattcatcaatggcaagagtggaggtcgaaatggaccttctcttagaagaaggctgaacatgttgttgaatccaatacagatatttgagctaagtgcttctcaggcacctgaagttggattacaactattccacaatgtgaaacacttcagaatccttgtttgtggtggggatggaactgtagcatgggttcttgatgctattgaaaagcagaactacgaatctcctccccctgtcgccattcttcctctcggaactggaaatgacctatcacgtgttatgcgctggggagggggtttatcttctgttgaacgacaaggaggcatatatgcacttttaaatgatgttgaccatgcagctgttacagtgcttgatcgctggaatgtaaccatcaaagagaagaatggaacagaaggtgaatgcaccaagcaaataaaatttatgactaattatttaggtattggatgtgatgcaaaggttgcttatgacttccacaccactagggaggaaaaaccagataaattttgcagtcaggatgcagaaggtgtgattgtaatgaatatccctagctacatgggtggtgtggatctgtggcaaaacgacaatgaccataatgatgatttcagattgcaatcaatccatgacaaaatacttgaggtggtttgtatatccgggacatggcatctaggcaaactgcaggtcggactttcaagggcacaccggttagcccaaggaaaagttataagattacacctccacagttcattccctgtgcaggttgatggtgaaccatggatccagccacctgggtgccttgagatatctcatcgtggacagatgttcatgctaaggaggacatctgaagagcctactggacatgctgccgcaatcatgagtgaggtgctcgtgaatgcagagtgcaatggtgtgattgacgcctctcagaagagattgcttctccacgagatagcactccgtttatcctcctgagactatccagtccagcaaccctcacctcacaaggctaactcattctgtaccctttgatgccaaacctatcgtctctgttgagaaatccctttgcacagacgtaaactgctatggtagagttggtgtatacaatacaaagagatagaaggtgtatacaatacgaggaaatagaagtttccttttgtatttggctgtaccttttgagataggtcatctacttctttgtggctggtttcatcagaacagctgttgaagaattttgtagcgcagagccactataaccgcaactagggctcaatgaaatgtaactagagtggatgtgaatgttttgtttgcaaagatattgatgcaactgttatcacacttcatgagaagacctgaatttcgctaaggggccattttgatccttttattttgaaggaattggaatttacttcaaagagtaggttatttagtttgtaatttgacattcaatcactttccagattttatatataagtctatctcaaatttatagaatga

SEQ ID NO: 16073 - DNA, 1406 bp, Zea Mays
tccaaagccaacaaacagagctccaactcagaaagcatccgtcccttggcagcagcaacaagctactagctatgtgtgtttagagcgagcgagggaaaaaaaagaaaacatctaagatatactccatcatcttcgtttgattaacccgcccagtaaagccatgggtactaatgatagagcggtcatttctctggtactcctcgtgtgcatcgctagccgctcgtccttgggtgccgctgaaactgacgttgagcagaagcgcttgtcagtcccgttgatgtttgtgttcggtgattcgctggtcgatgtcggaaacaataacttcctgccgccgcctgcaccccgtgctgcatctccgtacggcatcgacttccatgctggcaccgccggcgccgtctcaggacggttcacgaatggctacaaccttgccgatttagtcgcgcgacgtctggggttcaagatgagtccacctgcttacctctcgttgacaccggtatcaaagtttgacctgttcacgtgccgaattggtgccaattacgcgtctggcggatctggcattctcaacaccacgggaaacgggacactcacgctgcagaaacaaatcacgctgttctccaaaactcaagcaagaatgtcgtgggcccgctgcaagctcaggtctatggtatcgaggtccttgttccttgtcagcgccggcggcaatgacttctccgccttcagtgaaatgggcatgggcgaacaagacgccccagcctacatcagtagcatggtctcaacctatgtccagcatatcgacgcgttgtacaagttgggagcacggaggttggggatcctagacgtgccagctatcggctgtaccccaggctccagagtccccatggccaacggcggatgcaacgacgctgccaactctatggcgcagaacttcaacagactcctaaggctcgagggctccgggtggtcgacagggcatgctgcggatcgggaaaactgaacgcggcggtcatgtgcgcccagccaaacacgacttactgttcggatcgcgacgactacatgttctgggacatgctacatcctacgcaggcaacaaatgaacgtggggtggtcgccatcttctacggcccgcaggagtacgcggatcccatcaactttgcacagttggccgctgccacagcaaatgatgatgatgatataaatactgctatgaccgcaggcgtctatgccgccatatgataaacactatttatgtctattggcatgcagctgcgacatgtcactacctgagtactatatacgtaattcagttggaataatgtacgttgtgtgcatcatcagtctctctctatatatgctggaaataaaatgaagacaagagaccacaatgttagtatcactaccggaatcag

SEQ ID NO: 16074 - DNA, 585 bp, Zea Mays
cattttagtgtgcttgtccttttctatgatagatactgatttcaaaaaaaattgattcatacccgtgccaaccgaccaaattgccagatacacgattacaaagcgaatgtaatatactggttttgacagctcgccgtgtccacaaagtgtgacgcacaaatactcccaccacaaagatatacaatacaagcatacaagcagcaatctgcatgcctcactcaacaccaacagcacacaacccaggtagcacagcctgtggcttccccctgcccatggtgaaacccctggtgccatcaggcatgcgggggcctggtggaagcttgttggccccaataggcagctgcggatgcggctcaagcttggttatcaggttatgcggtgtagtaccaacagagtgaaggctgccacggttcccaccaaggtggttgttgccatggttattgtactgcggctggttgttctggtggtgctggttattgtgatggtgattgttatattgatggttgccacgcccatgccctctgccaccgcgaccgcgccctttgccgcgcttgggaacttccttgttgaaattctcatcaaacg

SEQ ID NO: 16075 - DNA, 690 bp, Zea Mays
atgtttatctcttgcgcgctcctcttcttcctccctggcgctcggtcgcttctctctggtctccacgcgcaccgcgtccagctccctcctccagctgtgtctgctgctcgccccagcctggagcttcgctcggcttccaactccggcgcccggccgagctccctgattcttctgtacaacttcgatggtggtacaatttgttcagtggttattttgaaagaatggcttggcatccatcgcgtcgctgctgctgaaatatctaaagtctgtggtctcccaatttttggcattggtgttgggcatagcacatatgacaaagcttcggtaattactctgatgcttgctatttgtttggtaggctatagctacagccaaaatcataaaagtgcctggtttgaagctatcagcactaagccaaataaaggattccggctctcatcaagtgactccccctcatgttgactttgcggatgtctcaattctagtggtggagctacgaacaacaatccgatgtcctgatcgagagcgatggagttaatgtttgaacttgtgtgtttgaacttgtgaactaaaaatgtgaactatggatgtgaacttaacttgtgtgtttgaacttgtgaactaaaaatgtgaactatggatgtgaacttgtgtgaatttgtgaacttatgtatttggacttatgtgaat

SEQ ID NO: 16076 - DNA, 584 bp, Zea Mays
atgtttatctcttgcgcgctcctcttcttcctccctggcgctcggtcgcttctctctggtctccacgcgcaccgcgtccagctccctcctccagctgtgtctgctgctcgccccagcctggagcttcgctcggcttccaactccggcgcccggccgagctccctgattcttctgtacaacttcgatggtggtacaatttgttcagtggttattttgaaagaatggcttggcatccatcgcgtcgctgctgctgaaatatctaaaggtctcccaatttttggcattggtgttgggcatagcacatatgacaaagcttcggattccggctctcatcaagtgactccccctcatgttgactttgcggatgtctcaattctagtggtggagctacgaacaacaatccgatgtcctgatcgagagcgatggagttaatgtttgaacttgtgtgtttgaacttgtgaactaaaaatgtgaactatggatgtgaacttaacttgtgtgtttgaacttgtgaactaaaaatgtgaactatggatgtgaacttgtgtgaatttgtgaacttatgtatttggacttatgtgaat

SEQ ID NO: 16077 - DNA, 650 bp, Zea Mays
atgtttatctcttgcgcgctcctcttcttcctccctggcgctcggtcgcttctctctggtctccacgcgcaccgcgtccagctccctcctccagctgtgtctgctgctcgccccagcctggagcttcgctcggcttccaactccggcgcccggccgagctccctgattcttctgtacaacttcgatggtggtacaatttgttcagtggttattttgaaagaatggcttggcatccatcgcgtcgctgctgctgaaatatctaaaggtctcccaatttttggcattggtgttgggcatagcacatatgacaaagcttcggctatagctacagccaaaatcataaaagtgcctggtttgaagctatcagcactaagccaaataaaggattccggctctcatcaagtgactccccctcatgttgactttgcggatgtctcaattctagtggtggagctacgaacaacaatccgatgtcctgatcgagagcgatggagttaatgtttgaacttgtgtgtttgaacttgtgaactaaaaatgtgaactatggatgtgaacttaacttgtgtgtttgaacttgtgaactaaaaatgtgaactatggatgtgaacttgtgtgaatttgtgaacttatgtatttggacttatgtgaat

SEQ ID NO: 16078 - DNA, 861 bp, Zea Mays
atgtttatctcttgcgcgctcctcttcttcctccctggcgctcggtcgcttctctctggtctccacgcgcaccgcgtccagctccctcctccagctgtgtctgctgctcgccccagcctggagcttcgctcggcttccaactccggcgcccggccgagctccctgctcccactctttatcactttatatggttggagcctggagaatatgcaccagggctatcccaaagaaacacttgtgcgtttccttaaggctagagagtggaatgtagcaaaggctcataaaatgattgtagaatgtttgaattggaggattcaaaatgaaattgatagtgtgctcgagattcttctgtacaacttcgatggtggtacaatttgttcagtggttattttgaaagaatggcttggcatccatcgcgtcgctgctgctgaaatatctaaaggtctcccaatttttggcattggtgttgggcatagcacatatgacaaagcttcggtaattactctgatgcttgctatttgtttggtaggctatagctacagccaaaatcataaaagtgcctggtttgaagctatcagcactaagccaaataaaggattccggctctcatcaagtgactccccctcatgttgactttgcggatgtctcaattctagtggtggagctacgaacaacaatccgatgtcctgatcgagagcgatggagttaatgtttgaacttgtgtgtttgaacttgtgaactaaaaatgtgaactatggatgtgaacttaacttgtgtgtttgaacttgtgaactaaaaatgtgaactatggatgtgaacttgtgtgaatttgtgaacttatgtatttggacttatgtgaat

SEQ ID NO: 16079 - DNA, 905 bp, Zea Mays
atgtttatctcttgcgcgctcctcttcttcctccctggcgctcggtcgcttctctctggtctccacgcgcaccgcgtccagctccctcctccagctgtgtctgctgctcgccccagcctggagcttcgctcggcttccaactccggcgcccggccgagctccctgctcccactctttatcactttatatggttggagcctggagaatatgcaccagggctatcccaaagaaacacttgtgcgtttccttaaggctagagagtggaatgtagcaaaggctcataaaatgattgtagaatgtttgaattggaggattcaaaatgaaattgatagtgtgctcgagaggcctatagccccagtagatttatacaaatcaatacgtgattcacaacttattggcctgtcacgatacacaaaggagattcttctgtacaacttcgatggtggtacaatttgttcagtggttattttgaaagaatggcttggcatccatcgcgtcgctgctgctgaaatatctaaaggtctcccaatttttggcattggtgttgggcatagcacatatgacaaagcttcggctatagctacagccaaaatcataaaagtgcctggtttgaagctatcagcactaagccaaataaaggattccggctctcatcaagtgactccccctcatgttgactttgcggatgtctcaattctagtggtggagctacgaacaacaatccgatgtcctgatcgagagcgatggagttaatgtttgaacttgtgtgtttgaacttgtgaactaaaaatgtgaactatggatgtgaacttaacttgtgtgtttgaacttgtgaactaaaaatgtgaactatggatgtgaacttgtgtgaatttgtgaacttatgtatttggacttatgtgaat

SEQ ID NO: 16080 - DNA, 866 bp, Zea Mays
atgtttatctcttgcgcgctcctcttcttcctccctggcgctcggtcgcttctctctggtctccacgcgcaccgcgtccagctccctcctccagctgtgtctgctgctcgccccagcctggagcttcgctcggcttccaactccggcgcccggccgagctccctgaatatgcaccagggctatcccaaagaaacacttgtgcgtttccttaaggctagagagtggaatgtagcaaaggctcataaaatgattgtagaatgtttgaattggaggattcaaaatgaaattgatagtgtgctcgagaggcctatagccccagtagatttatacaaatcaatacgtgattcacaacttattggcctgtcacgatacacaaaggagattcttctgtacaacttcgatggtggtacaatttgttcagtggttattttgaaagaatggcttggcatccatcgcgtcgctgctgctgaaatatctaaaggtctcccaatttttggcattggtgttgggcatagcacatatgacaaagcttcggctatagctacagccaaaatcataaaagtgcctggtttgaagctatcagcactaagccaaataaaggattccggctctcatcaagtgactccccctcatgttgactttgcggatgtctcaattctagtggtggagctacgaacaacaatccgatgtcctgatcgagagcgatggagttaatgtttgaacttgtgtgtttgaacttgtgaactaaaaatgtgaactatggatgtgaacttaacttgtgtgtttgaacttgtgaactaaaaatgtgaactatggatgtgaacttgtgtgaatttgtgaacttatgtatttggacttatgtgaat

SEQ ID NO: 16081 - DNA, 851 bp, Zea Mays
atgtttatctcttgcgcgctcctcttcttcctccctggcgctcggtcgcttctctctggtctccacgcgcaccgcgtccagctccctcctccagctgtgtctgctgctcgccccagcctggagcttcgctcggcttccaactccggcgcccggccgagctccctgctcccactctttatcactttatatggttggagcctggagaatatgcaccagggctatcccaaagaaacacttgtgcgtttccttaaggctagagagtggaatgtagcaaaggctcataaaatgattgtagaatgtttgaattggaggattcaaaatgaaattgatagtgtgctcgagaggcctatagccccagtagatttatacaaatcaatacgtgattcacaacttattggcctgtcacgatacacaaaggagattcttctgtacaacttcgatggtggtacaatttgttcagtggttattttgaaagaatggcttggcatccatcgcgtcgctgctgctgaaatatctaaagctatagctacagccaaaatcataaaagtgcctggtttgaagctatcagcactaagccaaataaaggattccggctctcatcaagtgactccccctcatgttgactttgcggatgtctcaattctagtggtggagctacgaacaacaatccgatgtcctgatcgagagcgatggagttaatgtttgaacttgtgtgtttgaacttgtgaactaaaaatgtgaactatggatgtgaacttaacttgtgtgtttgaacttgtgaactaaaaatgtgaactatggatgtgaacttgtgtgaatttgtgaacttatgtatttggacttatgtgaat

SEQ ID NO: 16082 - DNA, 762 bp, Zea Mays
atgtttatctcttgcgcgctcctcttcttcctccctggcgctcggtcgcttctctctggtctccacgcgcaccgcgtccagctccctcctccagctgtgtctgctgctcgccccagcctggagcttcgctcggcttccaactccggcgcccggccgagctccctgaggcctatagccccagtagatttatacaaatcaatacgtgattcacaacttattggcctgtcacgatacacaaaggagattcttctgtacaacttcgatggtggtacaatttgttcagtggttattttgaaagaatggcttggcatccatcgcgtcgctgctgctgaaatatctaaaggtctcccaatttttggcattggtgttgggcatagcacatatgacaaagcttcggtaattactctgatgcttgctatttgtttggtaggctatagctacagccaaaatcataaaagtgcctggtttgaagctatcagcactaagccaaataaaggattccggctctcatcaagtgactccccctcatgttgactttgcggatgtctcaattctagtggtggagctacgaacaacaatccgatgtcctgatcgagagcgatggagttaatgtttgaacttgtgtgtttgaacttgtgaactaaaaatgtgaactatggatgtgaacttaacttgtgtgtttgaacttgtgaactaaaaatgtgaactatggatgtgaacttgtgtgaatttgtgaacttatgtatttggacttatgtgaat

SEQ ID NO: 16083 - DNA, 768 bp, Zea Mays
tactaacagcaacatgggttattaaggtctgtagtttcaaagtatgatatggcgtcataattacttgaactgtgataactgcagttgactggacattgtttggttattatggtctgtaggatcataggtatgttttcacttggcatctgtgataactacagttgacctgtcaatattttgttagaaagagctgtaggatcttatgtgataatttctcacctttaagctttgggttcgccttgatatttctcacctgtgatcaatctaacactaagggagcatggtgggagaaagaaatgagtcttttggttctcagtgtaatggcagattcttctgtacaacttcgatggtggtacaatttgttcagtggttattttgaaagaatggcttggcatccatcgcgtcgctgctgctgaaatatctaaaggtctcccaatttttggcattggtgttgggcatagcacatatgacaaagcttcggctatagctacagccaaaatcataaaagtgcctggtttgaagctatcagcactaagccaaataaaggtggctgaattttcagatttggaacagcgtctaagtctgaatttccaaagtagtttcttggacagttaacatcgcggatcctttgcacgatgcatcattttaaataacacggtgctgcgaaatgaagtctgttttcactctcatgttcatgttcatgcacaaatatggaagccacattttatgtttatcatgctttcctatatctttgtgtacacgtgtttt

SEQ ID NO: 16084 - DNA, 606 bp, Zea Mays
atgtttatctcttgcgcgctcctcttcttcctccctggcgctcggtcgcttctctctggtctccacgcgcaccgcgtccagctccctcctccagctgtgtctgctgctcgccccagcctggagcttcgctcggcttccaactccggcgcccggccgagctccctgattcttctgtacaacttcgatggtggtacaatttgttcagtggttattttgaaagaatggcttggcatccatcgcgtcgctgctgctgaaatatctaaaggtctcccaatttttggcattggtgttgggcatagcacatatgacaaagcttcggctatagctacagccaaaatcataaaagtgcctggtttgaagctatcagcactaagccaaataaaggtggctgaattttcagatttggaacagcgtctaagtctgaatttccaaagtagtttcttggacagttaacatcgcggatcctttgcacgatgcatcattttaaataacacggtgctgcgaaatgaagtctgttttcactctcatgttcatgttcatgcacaaatatggaagccacattttatgtttatcatgctttcctatatctttgtgtacacgtgtttt

SEQ ID NO: 16085 - DNA, 783 bp, Zea Mays
atgtttatctcttgcgcgctcctcttcttcctccctggcgctcggtcgcttctctctggtctccacgcgcaccgcgtccagctccctcctccagctgtgtctgctgctcgccccagcctggagcttcgctcggcttccaactccggcgcccggccgagctccctgaatatgcaccagggctatcccaaagaaacacttgtgcgtttccttaaggctagagagtggaatgtagcaaaggctcataaaatgattgtagaatgtttgaattggaggattcaaaatgaaattgatagtgtgctcgagattcttctgtacaacttcgatggtggtacaatttgttcagtggttattttgaaagaatggcttggcatccatcgcgtcgctgctgctgaaatatctaaagtctgggtctcccaatttttggcattggtgttgggcatagcacatatgacaaagcttcggtaattactctgatgcttgctatttgtttggtaggctatagctacagccaaaatcataaaagtgcctggtttgaagctatcagcactaagccaaataaaggtggctgaattttcagatttggaacagcgtctaagtctgaatttccaaagtagtttcttggacagttaacatcgcggatcctttgcacgatgcatcattttaaataacacggtgctgcgaaatgaagtctgttttcactctcatgttcatgttcatgcacaaatatggaagccacattttatgtttatcatgctttcctatatctttgtgtacacgtgtttt

SEQ ID NO: 16086 - DNA, 744 bp, Zea Mays
atgtttatctcttgcgcgctcctcttcttcctccctggcgctcggtcgcttctctctggtctccacgcgcaccgcgtccagctccctcctccagctgtgtctgctgctcgccccagcctggagcttcgctcggcttccaactccggcgcccggccgagctccctgaatatgcaccagggctatcccaaagaaacacttgtgcgtttccttaaggctagagagtggaatgtagcaaaggctcataaaatgattgtagaatgtttgaattggaggattcaaaatgaaattgatagtgtgctcgagattcttctgtacaacttcgatggtggtacaatttgttcagtggttattttgaaagaatggcttggcatccatcgcgtcgctgctgctgaaatatctaaaggtctcccaatttttggcattggtgttgggcatagcacatatgacaaagcttcggctatagctacagccaaaatcataaaagtgcctggtttgaagctatcagcactaagccaaataaaggtggctgaattttcagatttggaacagcgtctaagtctgaatttccaaagtagtttcttggacagttaacatcgcggatcctttgcacgatgcatcattttaaataacacggtgctgcgaaatgaagtctgttttcactctcatgttcatgttcatgcacaaatatggaagccacattttatgtttatcatgctttcctatatctttgtgtacacgtgtttt

SEQ ID NO: 16087 - DNA, 864 bp, Zea Mays
atgtttatctcttgcgcgctcctcttcttcctccctggcgctcggtcgcttctctctggtctccacgcgcaccgcgtccagctccctcctccagctgtgtctgctgctcgccccagcctggagcttcgctcggcttccaactccggcgcccggccgagctccctgattatttgctccagatctattactcaagattatttgccagatcatcttttgcagctcccaatctcaggtcttaatgtatttttggattactgtgaagttgcaagagtacaatctcaagtcttattgtatcttttgcagctcccactctttatcactttatatggttggagcctggaggtagtcttcggcctcaaaacactagcagcttgactatatagaatgattaaatttctgaaaatgtttgattactaccttcacttcagtgtcgttagatgtaaatatgtaatacatgattatttgttcatcaacttaaactataacttgttgagggattttgggaaacaatgtgagcatatcttcgcttatttcagaatatgcaccagggctatcccaaagaaacacttgtgcgtttccttaaggctagagagtggaatgtagcaaaggctcataaaatggtaacgtttcatacaagtttctcaacagtgggtgaaggaccacgaatttaattaataatatgtttgtttctatagattgtagaatgtttgaattggaggattcaaaatgaaattgatagtgtgctcgagaggcctatagccccagtagatttatacaaatcaatacgtgattcacaacttattggcctgtcacgatacacaaaggagttaaatgttgtgaggggttctgcctaatatgttactc

SEQ ID NO: 16088 - DNA, 538 bp, Zea Mays
ttttttttaaatctcttaggttcaggttgctgcaatacatgcgactcagaagtattttgtcgcccaccccctcgctcggctcattaataatgggaacatgacaagttataacggagggagagcgaagtctacttcaactaagcgaaggctttgggatggagggatcgaccaggacaggcaagggccttgccaactcccgtaggcctagcgccctaagacgcaggctgcagtcactactcgcgcatgttattaaagcgggcccgtgcgactgacatcctggatcgcctgaccccacgggtaagcctcagtctaggtaggatttgtggtgtgtcagtccgggttgtatttaactacactataatgacctgtaataacccttgaggggaaatattctacggataacgtaggtaaacagggactgtatttacgaggatgagacttgttggtcacttgttctcaaatgctgtgaatcaagaacaaagcaactgtaatacccaactattggaatatcaaagagagggataaatctttatgtgta

SEQ ID NO: 16089 - DNA, 2829 bp, Zea Mays
ccctgacttctaccgtctcccgtccgcccgtcgcagagtcacggacgatgcgccgcagcccgccgtcctgccgaggcaccgacggttgccgcctaccccagcacggctgcacttcgatccggtcttgctcgtgcttcgtgctgtcttagcggtcgatcgtcgccatctcccctcggtgcttggccgtccagcgggaacggcgcagccgcgcaggcgcaacgggtgctcgcctttcgacaagggcgccccccgcgccagcccaagcgccagcaccagcgaggccggggcggagcacaggagcccgccgctggcctgctgctcaagccccaggggcggcggatctacagccggcgccgagggaggcgccaagcccttcctccagctgatgtagcaatatttactcacatttgatcctcacaacactgatacttcaagatggaacaaatttcaatacaaggagtgcaggacacaaagaactaccagctgtcaaacaaaaatacttgttggaaaggatgtattaaacgaaatagagcaaaggcgttcatcaccaagtgtgattgcaaaactgatgggaattgaggtgttgccaccttctaaagtggtcaatagtcggcatcaagaatttaaggatgtttttgaagtgtcagaggaaccaccagaggctgtcgcaaaagagaagtcccaaggcttgccgagcttgaaacgaagagcgctaagcttgaaaaagcttatgccatcaaaaacactctacagagatgatacacatgattgttatgtggattgtgtagctggcttgggtcgcttgaactcagtggaaataaataatcctttatttgagaagcaccttcatgacatgaactattctgcaaattatcagtatgtaaaagatacatcaagtgtttgcaggacataccctgtgggtttagccaattcatcactcagcaatttcagccttttatcaagagggaaaaacaaagatttcaacagcattgtagttctggaaccaccatgcttggaaaaagggcatgatccagaaaacattttttccattccatacctttctcctgtcaataaaaactgcagtagaggcatgaaacataagaaatttgagtttcctgtaatggagaatggaagagttcgggaacatatattaggtactgaagctaacaatgtgcttcgaattagaaaagaaagacccttgactagtgactccattgatccactgcaaattggacaggaagcatcagttcatcagtttgggaatactgatgtgagttgttctggatcatctcagaggtattcttgtggtaacgatagctttaggaaaactaacaggtcatcatcaagcagaatatgccggcatgcagaatctgctgttggttcgaaaactcttgcagaaatgtttgctttatctgattctgaaagactgaagctaaattcagactcaaatgctccagttctatgtaatatgattgaccgtgataatggtcatagcaaggatggatgctttatagttttaccaaagcatgcacctgtgctgtctatccgaagctcaatggacatgccttcttgcttggaaggctcctctcagggtaaaaataatctaaacatatccaatatttacaacaatgctcacttgagcagtgctcactgtttccaaaatcttacaggtgacaacttttcaactcctgattgcttaaatgataaagtattgttgacaacagatgaagacgtagttcgacaatcagctgaatctgagccttccaggttcaacttgcaggtttctaggaaacaacgggtgacagtattgcctttccattgtcacgaggatgaatcgatatctgtttcggatcatactgatggtacaaaattttgtaaaggctcaaaagaggttgagcaaccgagcccagtgtccatccttgagcctccaattaatgaagatatttgttttccacgatgtttcaactatgacttgcaagggatggctaacaaacagagaggttgccatcaatatcacaatgaatctgaagttaacatgtcaagtgatgatgaagaccattctttttaccaatctttggaagcatttcaggtcgaggaaaactgggacttctcatatcttctcgacatacttatatgctctggtatcatagttgttgactggcagctcatctgcaagtcatggtacttgcctggttaccctgttggccctcatgtctttgataggcttgaaaggaaatacaataaaatcgcaacatgggcaaagcctgagaggaggcttctttttgacctcgtgaattcaattctttccgaggtccttgcaccatgtgttgatgtgcacccatgggtgcagcctagtagacactgtgtggcattttggggccctgaagggcctgttgagaaggtttggcagacaattgttaggctgcaggaagactgtgtcacaaggcatcctgatgagatggttcttgatacaaattggctggaagtaggcaccgacatcaatatggtggggaagcagatagctaggatgttacatggcgacctcttggaagaagtcatagtggacttccttggttgagttggtagtttcatgtggacataactagtaactaacaacttcggcaacatggggttcgctcaaacttcaagcagattatgctgaatatgtaacggcttttcaagtgcacacatgccgcatttttcttctggttataataggagctatgtattatgtaattacattggagagcaaaatatacaggccaaaaaaacactactgcaggtccatatgattgatggtcgtggtgccagctccaatcttgattccac

SEQ ID NO: 16090 - DNA, 2891 bp, Zea Mays
ccctgacttctaccgtctcccgtccgcccgtcgcagagtcacggacgatgcgccgcagcccgccgtcctgccgaggcaccgacggttgccgcctaccccagcacggctgcacttcgatccggtcttgctcgtgcttcgtgctgtcttagcggtcgatcgtcgccatctcccctcggtgcttggccgtccagcgggaacggcgcagccgcgcaggcgcaacgggtgctcgcctttcgacaagggcgccccccgcgccagcccaagcgccagcaccagcgaggccggggcggagcacaggagcccgccgctggcctgctgctcaagccccaggggcggcggatctacagccggcgccgagggaggcgccaagcccttcctccagctgatgtagcaatatttactcacatttgatcctcacaacactgatacttcaagatggaacaaatttcacttggcaacagatacaaggagtgcaggacacaaagaactaccagctgtcaaacaaaaatacttgttggaaaggatgtattaaacgaaatagagcaaaggcgttcatcaccaagtgtgattgcaaaactgatgggaattgaggtgttgccaccttctaaagtggtcaatagtcggcatcaagaatttaaggatgtttttgaagtgtcagaggaaccaccagaggctgtcgcaaaagagaagtcccaaggcttgccgagcttgaaacgaagagcgctaagcttgaaaaagcttatgccatcaaaaacactctacagagatgatacacatgattgttatgtggattgtgtagctggcttgggtcgcttgaactcagtggaaataaataatcctttatttgagaagcaccttcatgacatgaactattctgcaaattatcagtatgtaaaagatacatcaagtgtttgcaggacataccctgtgggtttagccaattcatcactcagcaatttcagccttttatcaagagggaaaaacaaagatttcaacagcattgtagttctggaaccaccatgcttggaaaaagggcatgatccagaaaacattttttccattccatacctttctcctgtcaataaaaactgcagtagaggcatgaaacataagaaatttgagtttcctgtaatggagaatggaagagttcgggaacatatattaggtactgaagctaacaatgtgcttcgaattagaaaagaaagacccttgactagtgactccattgatccactgcaaattggacaggaagcatcagttcatcagtttgggaatactgatgtgagttgttctggatcatctcagaggtattcttgtggtaacgatagctttaggaaaactaacaggtcatcatcaagcagaatatgccggcatgcagaatctgctgttggttcgaaaactcttgcagaaatgtttgctttatctgattctgaaagactgaagctaaattcagactcaaatgctccagttctatgtaatatgattgaccgtgataatggtcatagcaaggatggatgctttatagttttaccaaagcatgcacctgtgctgtctatccgaagctcaatggacatgccttcttgcttggaaggctcctctcagggtgacaacttttcaactcctgattgcttaaatgataaagtattgttgacaacagatgaagacgtagttcgacaatcagctgaatctgagccttccaggttcaacttgcaggtttctaggaaacaacgggtgacagtattgcctttccattgtcacgaggatgaatcgatatctgtttcggatcatactgatggtacaaaattttgtaaaggctcaaaagaggttgagcaaccgagcccagtgtccatccttgagcctccaattaatgaagatatttgttttccacgatgtttcaactatgacttgcaagggatggctaacaaacagagaggttgccatcaatatcacaatgaatctgaagttaacatgtcaagtgatgatgaagaccattctttttaccaatctttggaagcatttcaggtcgaggaaaactgggacttctcatatcttctcgacatacttatatgctctggtatcatagttgttgactggcagctcatctgcaagtcatggtacttgcctggttaccctgttggccctcatgtctttgataggcttgaaaggaaatacaataaaatcgcaacatgggcaaagcctgagaggaggcttctttttgacctcgtgaattcaattctttccgaggtccttgcaccatgtgttgatgtgcacccatgggtgcagcctagtagacactgtgtggcattttggggccctgaagggcctgttgagaaggtttggcagacaattgttaggctgcaggaagactgtgtcacaaggcatcctgatgagatggttcttgatacaaattggctggaagtaggcaccgacatcaatatggtggggaagcagatagctaggatgttacatggcgacctcttggaagaagtcatagtggacttccttggttgagttggtagtttcatgtggacataactagtaactaacaacttcggcaacatggggttcgctcaaacttcaagcagattatgctgaatatgtaacggcttttcaagtgcacacatgccgcatttttcttctggttataataggagctatgtattatgtaattacattggagagcaaaatatacaggccaaaaaaacactactgcaggtatttttcgattctgtactgctaagctgtacttcctggtcctatctgatactttgatgggtgtagtaattgtaaggaaaatggaccttaatctagtttggttatgatgtttgatgaccaacatgattatttggactaatatttgattggtgaaaaagtggactgatttagacaaa

SEQ ID NO: 16091 - DNA, 2876 bp, Zea Mays
ccctgacttctaccgtctcccgtccgcccgtcgcagagtcacggacgatgcgccgcagcccgccgtcctgccgaggcaccgacggttgccgcctaccccagcacggctgcacttcgatccggtcttgctcgtgcttcgtgctgtcttagcggtcgatcgtcgccatctcccctcggtgcttggccgtccagcgggaacggcgcagccgcgcaggcgcaacgggtgctcgcctttcgacaagggcgccccccgcgccagcccaagcgccagcaccagcgaggccggggcggagcacaggagcccgccgctggcctgctgctcaagccccaggggcggcggatctacagccggcgccgagggaggcgccaagcccttcctccagctgatgtagcaatatttactcacatttgatcctcacaacactgatacttcaagatggaacaaatttcacttggcaacagatacaaggagtgcaggacacaaagaactaccagctgtcaaacaaaaatacttgttggaaaggatgtattaaacgaaatagagcaaaggcgttcatcaccaagtgtgattgcaaaactgatgggaattgaggtgttgccaccttctaaagtggtcaatagtcggcatcaagaatttaaggatgtttttgaagtgtcagaggaaccaccagaggctgtcgcaaaagagaagtcccaaggcttgccgagcttgaaacgaagagcgctaagcttgaaaaagcttatgccatcaaaaacactctacagagatgatacacatgattgttatgtggattgtgtagctggcttgggtcgcttgaactcagtggaaataaataatcctttatttgagaagcaccttcatgacatgaactattctgcaaattatcagtatgtaaaagatacatcaagtgtttgcaggacataccctgtgggtttagccaattcatcactcagcaatttcagccttttatcaagagggaaaaacaaagatttcaacagcattgtagttctggaaccaccatgcttggaaaaagggcatgatccagaaaacattttttccattccatacctttctcctgtcaataaaaactgcagtagaggcatgaaacataagaaatttgagtttcctgtaatggagaatggaagagttcgggaacatatattaggtactgaagctaacaatgtgcttcgaattagaaaagaaagacccttgactagtgactccattgatccactgcaaattggacaggaagcatcagttcatcagtttgggaatactgatgtgagttgttctggatcatctcagaggtattcttgtggtaacgatagctttaggaaaactaacaggtcatcatcaagcagaatatgccggcatgcagaatctgctgttggttcgaaaactcttgcagaaatgtttgctttatctgattctgaaagactgaagctaaattcagactcaaatgctccagttctatgtaatatgattgaccgtgataatggtcatagcaaggatggatgctttatagttttaccaaagcatgcacctgtgctgtctatccgaagctcaatggacatgccttcttgcttggaaggctcctctcagggtaaaaataatctaaacatatccaatatttacaacaatgatgaagacgtagttcgacaatcagctgaatctgagccttccaggttcaacttgcaggtttctaggaaacaacgggtgacagtattgcctttccattgtcacgaggatgaatcgatatctgtttcggatcatactgatggtacaaaattttgtaaaggctcaaaagaggttgagcaaccgagcccagtgtccatccttgagcctccaattaatgaagatatttgttttccacgatgtttcaactatgacttgcaagggatggctaacaaacagagaggttgccatcaatatcacaatgaatctgaagttaacatgtcaagtgatgatgaagaccattctttttaccaatctttggaagcatttcaggtcgaggaaaactgggacttctcatatcttctcgacatacttatatgctctggtatcatagttgttgactggcagctcatctgcaagtcatggtacttgcctggttaccctgttggccctcatgtctttgataggcttgaaaggaaatacaataaaatcgcaacatgggcaaagcctgagaggaggcttctttttgacctcgtgaattcaattctttccgaggtccttgcaccatgtgttgatgtgcacccatgggtgcagcctagtagacactgtgtggcattttggggccctgaagggcctgttgagaaggtttggcagacaattgttaggctgcaggaagactgtgtcacaaggcatcctgatgagatggttcttgatacaaattggctggaagtaggcaccgacatcaatatggtggggaagcagatagctaggatgttacatggcgacctcttggaagaagtcatagtggacttccttggttgagttggtagtttcatgtggacataactagtaactaacaacttcggcaacatggggttcgctcaaacttcaagcagattatgctgaatatgtaacggcttttcaagtgcacacatgccgcatttttcttctggttataataggagctatgtattatgtaattacattggagagcaaaatatacaggccaaaaaaacactactgcaggtatttttcgattctgtactgctaagctgtacttcctggtcctatctgatactttgatgggtgtagtaattgtaaggaaaatggaccttaatctagtttggttatgatgtttgatgaccaacatgattatttggactaatatttgattggtgaaaaagtggactgatttagacaaa

SEQ ID NO: 16092 - DNA, 2941 bp, Zea Mays
ccctgacttctaccgtctcccgtccgcccgtcgcagagtcacggacgatgcgccgcagcccgccgtcctgccgaggcaccgacggttgccgcctaccccagcacggctgcacttcgatccggtcttgctcgtgcttcgtgctgtcttagcggtcgatcgtcgccatctcccctcggtgcttggccgtccagcgggaacggcgcagccgcgcaggcgcaacgggtgctcgcctttcgacaagggcgccccccgcgccagcccaagcgccagcaccagcgaggccggggcggagcacaggagcccgccgctggcctgctgctcaagccccaggggcggcggatctacagccggcgccgagggaggcgccaagcccttcctccagctgatgtagcaatatttactcacatttgatcctcacaacactgatacttcaagatggaacaaatttcacttggcaacagatacaaggagtgcaggacacaaagaactaccagctgtcaaacaaaaatacttgttggaaaggatgtattaaacgaaatagagcaaaggcgttcatcaccaagtgtgattgcaaaactgatgggaattgaggtgttgccaccttctaaagtggtcaatagtcggcatcaagaatttaaggatgtttttgaagtgtcagaggaaccaccagaggctgtcgcaaaagagaagtcccaaggcttgccgagcttgaaacgaagagcgctaagcttgaaaaagcttatgccatcaaaaacactctacagagatgatacacatgattgttatgtggattgtgtagctggcttgggtcgcttgaactcagtggaaataaataatcctttatttgagaagcaccttcatgacatgaactattctgcaaattatcagtatgtaaaagatacatcaagtgtttgcaggacataccctgtgggtttagccaattcatcactcagcaatttcagccttttatcaagagggaaaaacaaagatttcaacagcattgtagttctggaaccaccatgcttggaaaaagggcatgatccagaaaacattttttccattccatacctttctcctgtcaataaaaactgcagtagaggcatgaaacataagaaatttgagtttcctgtaatggagaatggaagagttcgggaacatatattaggtactgaagctaacaatgtgcttcgaattagaaaagaaagacccttgactagtgactccattgatccactgcaaattggacaggaagcatcagttcatcagtttgggaatactgatgtgagttgttctggatcatctcagaggtattcttgtggtaacgatagctttaggaaaactaacaggtcatcatcaagcagaatatgccggcatgcagaatctgctgttggttcgaaaactcttgcagaaatgtttgctttatctgattctgaaagactgaagctaaattcagactcaaatgctccagttctatgtaatatgattgaccgtgataatggtcatagcaaggatggatgctttatagttttaccaaagcatgcacctgtgctgtctatccgaagctcaatggacatgccttcttgcttggaaggctcctctcaggtggcactgaagctcacttgagcagtgctcactgtttccaaaatcttacaggtgacaacttttcaactcctgattgcttaaatgataaagtattgttgacaacagatgaagacgtagttcgacaatcagctgaatctgagccttccaggttcaacttgcaggtttctaggaaacaacgggtgacagtattgcctttccattgtcacgaggatgaatcgatatctgtttcggatcatactgatggtacaaaattttgtaaaggctcaaaagaggttgagcaaccgagcccagtgtccatccttgagcctccaattaatgaagatatttgttttccacgatgtttcaactatgacttgcaagggatggctaacaaacagagaggttgccatcaatatcacaatgaatctgaagttaacatgtcaagtgatgatgaagaccattctttttaccaatctttggaagcatttcaggtcgaggaaaactgggacttctcatatcttctcgacatacttatatgctctggtatcatagttgttgactggcagctcatctgcaagtcatggtacttgcctggttaccctgttggccctcatgtctttgataggcttgaaaggaaatacaataaaatcgcaacatgggcaaagcctgagaggaggcttctttttgacctcgtgaattcaattctttccgaggtccttgcaccatgtgttgatgtgcacccatgggtgcagcctagtagacactgtgtggcattttggggccctgaagggcctgttgagaaggtttggcagacaattgttaggctgcaggaagactgtgtcacaaggcatcctgatgagatggttcttgatacaaattggctggaagtaggcaccgacatcaatatggtggggaagcagatagctaggatgttacatggcgacctcttggaagaagtcatagtggacttccttggttgagttggtagtttcatgtggacataactagtaactaacaacttcggcaacatggggttcgctcaaacttcaagcagattatgctgaatatgtaacggcttttcaagtgcacacatgccgcatttttcttctggttataataggagctatgtattatgtaattacattggagagcaaaatatacaggccaaaaaaacactactgcaggtatttttcgattctgtactgctaagctgtacttcctggtcctatctgatactttgatgggtgtagtaattgtaaggaaaatggaccttaatctagtttggttatgatgtttgatgaccaacatgattatttggactaatatttgattggtgaaaaagtggactgatttagacaaa

SEQ ID NO: 16093 - DNA, 2930 bp, Zea Mays
ccctgacttctaccgtctcccgtccgcccgtcgcagagtcacggacgatgcgccgcagcccgccgtcctgccgaggcaccgacggttgccgcctaccccagcacggctgcacttcgatccggtcttgctcgtgcttcgtgctgtcttagcggtcgatcgtcgccatctcccctcggtgcttggccgtccagcgggaacggcgcagccgcgcaggcgcaacgggtgctcgcctttcgacaagggcgccccccgcgccagcccaagcgccagcaccagcgaggccggggcggagcacaggagcccgccgctggcctgctgctcaagccccaggggcggcggatctacagccggcgccgagggaggcgccaagcccttcctccagctgatgtagcaatatttactcacatttgatcctcacaacactgatacttcaagatggaacaaatttcacttggcaacagatacaaggagtgcaggacacaaagaactaccagctgtcaaacaaaaatacttgttggaaaggatgtattaaacgaaatagagcaaaggcgttcatcaccaagtgtgattgcaaaactgatgggaattgaggtgttgccaccttctaaagtggtcaatagtcggcatcaagaatttaaggatgtttttgaagtgtcagaggaaccaccagaggctgtcgcaaaagagaagtcccaaggcttgccgagcttgaaacgaagagcgctaagcttgaaaaagcttatgccatcaaaaacactctacagagatgatacacatgattgttatgtggattgtgtagctggcttgggtcgcttgaactcagtggaaataaataatcctttatttgagaagcaccttcatgacatgaactattctgcaaattatcagtatgtaaaagatacatcaagtgtttgcaggacataccctgtgggtttagccaattcatcactcagcaatttcagccttttatcaagagggaaaaacaaagatttcaacagcattgtagttctggaaccaccatgcttggaaaaagggcatgatccagaaaacattttttccattccatacctttctcctgtcaataaaaactgcagtagaggcatgaaacataagaaatttgagtttcctgtaatggagaatggaagagttcgggaacatatattaggtactgaagctaacaatgtgcttcgaattagaaaagaaagacccttgactagtgactccattgatccactgcaaattggacaggaagcatcagttcatcagtttgggaatactgatgtgagttgttctggatcatctcagaggtattcttgtggtaacgatagctttaggaaaactaacaggtcatcatcaagcagaatatgccggcatgcagaatctgctgttggttcgaaaactcttgcagaaatgtttgctttatctgattctgaaagactgaagctaaattcagactcaaatgctccagttctatgtaatatgattgaccgtgataatggtcatagcaaggatggatgctttatagttttaccaaagcatgcacctgtgctgtctatccgaagctcaatggacatgccttcttgcttggaaggctcctctcagggtaaaaataatctaaacatatccaatatttacaacaatggtgacaacttttcaactcctgattgcttaaatgataaagtattgttgacaacagatgaagacgtagttcgacaatcagctgaatctgagccttccaggttcaacttgcaggtttctaggaaacaacgggtgacagtattgcctttccattgtcacgaggatgaatcgatatctgtttcggatcatactgatggtacaaaattttgtaaaggctcaaaagaggttgagcaaccgagcccagtgtccatccttgagcctccaattaatgaagatatttgttttccacgatgtttcaactatgacttgcaagggatggctaacaaacagagaggttgccatcaatatcacaatgaatctgaagttaacatgtcaagtgatgatgaagaccattctttttaccaatctttggaagcatttcaggtcgaggaaaactgggacttctcatatcttctcgacatacttatatgctctggtatcatagttgttgactggcagctcatctgcaagtcatggtacttgcctggttaccctgttggccctcatgtctttgataggcttgaaaggaaatacaataaaatcgcaacatgggcaaagcctgagaggaggcttctttttgacctcgtgaattcaattctttccgaggtccttgcaccatgtgttgatgtgcacccatgggtgcagcctagtagacactgtgtggcattttggggccctgaagggcctgttgagaaggtttggcagacaattgttaggctgcaggaagactgtgtcacaaggcatcctgatgagatggttcttgatacaaattggctggaagtaggcaccgacatcaatatggtggggaagcagatagctaggatgttacatggcgacctcttggaagaagtcatagtggacttccttggttgagttggtagtttcatgtggacataactagtaactaacaacttcggcaacatggggttcgctcaaacttcaagcagattatgctgaatatgtaacggcttttcaagtgcacacatgccgcatttttcttctggttataataggagctatgtattatgtaattacattggagagcaaaatatacaggccaaaaaaacactactgcaggtatttttcgattctgtactgctaagctgtacttcctggtcctatctgatactttgatgggtgtagtaattgtaaggaaaatggaccttaatctagtttggttatgatgtttgatgaccaacatgattatttggactaatatttgattggtgaaaaagtggactgatttagacaaa

SEQ ID NO: 16094 - DNA, 767 bp, Zea Mays
cttgcttctgccttcatgcacgccctgtagctcgcaacttcccagctgttgcagcgctcgattccccgtacccactgcacgccatctccttcccccagctccagcctcgccttggccgtggtctggccgacgcccaagccatcgtccgcatctagcgctggccctcgccttggctgcttgctcggactctgtccctaccagagctcgcgagcacctcagccgtcataggttctcttccatggcgcctagtcttctccctagggcgaactcgcccagccactcgcctccactacagcacgtcgtgcctgcgcagccccgacagcaacaccctcctctgcgtcgcaccatcgacccgctcaatagaatgccacagcaagctctacccgatctgcagcgtctgcgcgcagtcgtcgaaatccccacaaccgtgttggtccgcaacagcatgtcgtcgactccgtgatttttttggcagcccggttgcggtgtcgtcagaccccgccctctgttgatgacacgtccgctccttatccgagcacctcgtcgtagttctgtatgttgccgaggaatttcatgtgtgtgaagagaagcaagacgcgtggtgcttgctaggtgtcaaatagaaagaccaaacccaaaccatcgccatgttcacggacaccgcgtcgagtttagtcgtgggagctgcgcaagcgcagcggccaccgggaggagtcctcggtgctcgatcgtcaaggacctccaagagttaaccccaagcagtgcag

SEQ ID NO: 16095 - DNA, 1606 bp, Zea Mays
cttgcttctgccttcatgcacgccctgtagctcgcaacttcccagctgttgcagcgctcgattccccgtacccactgcacgccatctccttcccccagctccagcctcgccttggccgtggtctggccgacgcccaagccatcgtccgcatctagcgctggccctcgccttggctgcttgctcggactctgtccctaccagagctcgcgagcacctcagccgtcataggttctcttccatggcgcctagtcttctccctagggcgaactcgcccagccactcgcctccactacagcacgtcgtgcctgcgcagccccgacagcaacaccctcctctgcgtcgcaccatcgacccgctcaatagaatgccacagcaagctctacccgatctgcagcgtctgcgcgcagtcgtcgaaatccccacaaccgtgttggtccgcaacagcatgtcgtcgactccgtgatttttttggcagcccggttgcggtgtcgtcagaccccgccctctgttgatgacacgtccgctccttatccgagcacctcgtcgtagttctgtatgttgccggtgaggcatccttttctttatatatattcaatttagttttcgcttggcataaatggttagctgttgattacatttatatgtatatgtgtgttttgcgaggagaggaatttcatgtgtgtgaagagaagcaagacgcgtggtgcttgctaggtgtcaaatagaaagaccaaacccaaaccatcgccatgttcacggacaccgcgtcgagtttagtcgtggtataatacttattaaaatgcacgagtcacttgcagcaatttggtcgatgtcgtgtctatgtgtatggagttcatgtccggctaggggaatcattatgctatatgtggtgatcgattaggagtgttgaccaagtgttgattgatacttgaatatgaaatagactagtttatatacacaattaactaggtggttttaactctaatttaggatgatgtgttagaatagttgaagtatcaagtatatggtgattgtagaggtgaactaggagctaaattaaattcttgctgtttgggactgcttgaccagttttacttaagcaagtagttcaatgatgtaaaacatgttttctgtagaaatgttatataggaaagttgtagataacttctttatcttacttgtgtaaaaatttcatgaccatatgtttagtagtttaggagttatgatttttccaagtccagtttcagaatctgtccaaattatgtacatgtttcgaaaactgcattgtttgattaaattctctactacttattaaggcggtaagggtagcctgccgttctgccttcgttcaatctggatcgtccatcgccaacattaacctgctagccgcgccctcctcatcccgccccattcgcgcgcaaaaaatcgacacaagctgacaataccaagagctgattacacgagctgactgtttctctgtagcagcaaggtttataagttgctatcgcaacctttggctggtcgatatggtacattatatttgcgccgcggtagcctgcgtgggctgcgttatttagttaacgtacaaggcccatctaaattccat

SEQ ID NO: 16096 - DNA, 2742 bp, Zea Mays
agtgagtttgccacgtcacttcttctcagtcgttggataccaaacggagtacacaaaattgtccacgtcgccttttaatagagtccattggatgccttttaaacggtgtgtactctgccttcttttttttcctctcacatcctcccgtaagttccagagaatgctggacattggacactccggccaataagaaaatgggcaaaagaaagaaaaaagaaggaaagcaacgggagaggcacgccctcgctcctggcagccgagaacgcgtctgccgctcctgacgactaggtttccatcctcctctcctcagtctctcgatcttgcacttctcaggtcctgtgacaacaaatctccctatctgcagctttcgcttctttgtgacagtaatcttcatatttttgtctgtcatccatgtcagcgaggtcctactttcatttacaaacaatgtggagtacaactgtttgattgtttcttcatgccagttctgttttatagccatcaattcatgaagaccaatgtcatgacatgctttctcaacatctggcattccaggaatttatctgatcttttcccaattgatccatttattgtcagcacattgcttctcgctatatatatatatattgttatatagattcatatgctcgttcgaccaaaaacggtcatcgattgcagttctatcttgtagatacaaatttacgcatttaaccgatgacttcttcctttttaattttttgtagctcacaggcatcacagctacagcctcagctagttggggcaaaccatcccgacgctttacaatgtacttaatgaggaccgcatgaagaagaaagctgataatggaaaaatgtcagaaatatttaagagcaaaattgtttcttcaaaacaatcaaaacaaaagatgcaagacttgtgttttgcactctctataagtctagttggttggaaaatcagaaattccacatcttagttattgatgaggcagcatacttaaaagaatgtgaatcattaatcccttttgcaactagtgggataaaacatgtggtgcttgttgggatgacaagcaactacaatcagtggtaaagagcacggtgtgtattcattataacttataagaccatttgaatgtatccttgattccttgtgttaccaataattatttatagactgctaatactttctctttactgataagattgctaaagagaacaggtttgggcgaagcctctttgagagattaagtggacttgatttcccaaagcacatgctaaatattcaatatagaatgcacccttccatcagcaagtttccaaatcaaaagttttatgaaggaaaaattatagatggtctcaacgttaaggactataacaatatttatctcgatggtcatatgtatggtccttattcattcatccatgttgaagttggtttcgaagaaaacaataaacagggcttaaaaatattgttgaagctgctgtggtagcaaatattgttggcagacttgctgaaggtaagtctaacatttgagctgataaagaacatgtaagtttcattaaagttgatatgtttaagtgacatccatgtttttttggtctataaccactacagcatgcgccgagcagaagaagaaaaccagcgttggtatagtatctccatatgcagcccaattagacaaaataatggtgggaatatatactttcttgattgtgttatgagaactaatgtggctttgacaagagcaaagtaggttaacttttgttcctttttgttggtttaattaaattttgtttttttgttggcaaaggatcagcctttggatacttagttaattcaagatcccagtacatactcatctaaataattatttcttccacaggcactccatgtggatccttggacatgaaacgactcaccttgacagtaattcaacatggtgacagacaatgtttcacgatggaacattgaatgccagtgtgctccagatgcacaactcacaggtgacaaccgtgccacaataccagacaaggcacaggttgtagagcctgcacatgcagagcaggtgcctgtgcagtcagaaagggctgtagagaagacatggcaggtgcgtcttgatcagctctcgctcagtccttcttttgctccaggtgaacaactaacagatgaaaaggttgtagagcctgcacatgcagagcaagtgcatcttgctcggctctcgcccagtccatcaagggagagggcccgtctcagtcagtttgctccaggtgctcaactcacagatgaagaagcggctacactagaggaagaagaccgtcctcaaattgaccttctagatggtttgccccaactagctgaggctgtagccaggacgcctgtcagatctgcaagcgatgggcgtttttggtccaacgagcatatggatctatacaacagtatttatagcaagaagaaatgtgctgacaacaaatggatcgattggaaaaatatcaaacgtttaccgaagatgccatatgttgagaaagcaagtcgtgacattagtcttcatgaattgatggctataaaacagaactggtatgaagagccgatcaaacagttctactccacattgtccataaatcaaagtaggacctcactgacttggatgacaggcataaataagaagattactgtcacaaagagattttgtcaaaaggttctccatgttccgtccgagcacaatattaagattaagcgccaattgatgga

SEQ ID NO: 16097 - DNA, 10474 bp, Zea Mays
gtcaaacttgggaaaggcagactggccattgctgcttccagctccttgctcaatacccaaaaataaattatttgcagctcctgtctgcaatcaaattaaacaagaaaatcaaccagaaagcatttattcaattagtcacatcagttaaagagggctacaaatacatactgaaagtggataattgtcatttcctggatttagccttttattatcccagtcattggccaggtcctctgaagccaaccgcttagttcctaatgctgaaacaagcaagattgagaatgaagaagaaataatctgttgacatcaacctaaaattaacaggaacagtaactgtaatgttacattaagcataacaaagaataacaactgagaatatctgcagcccctgaatgaagcatggatttagatttactatcaccttcacgagaagataagttctatgtaaccctcccccccacacacacacacacagacttgccggcaccaccaccaccaagatacccatagccacataaacctcaaccaagggatggcagacccctgattctgttcttaagcagtttgtgtcattcttgaaacattgacttgtgttgtttatatgcctagacacaatcatgatctacacaggggtggacccagtgggtggtccataatccatatggaccacggcacacactaagaacacaaaagagcagttagcttagtggtttcaaactagccagtcacagtttgaaccctaattttatttcttttctcattttctctctctctctctctctctctctttgtcagcaacattattaaccactctgtagtacaccattccatcatattgattgatgaatgctcgcaactcaaagctcacaaatgcgagttctttgttgatgttccaaagcgtatcattgaacagttgttgatcattggctgcaagccatatatgaaataattcaaataagtggttggaggctagacagttgttgcgctatgacgcataaatagaagagttgaggatgacttaccggtgttcttgccaaaggcgccatcgatgaaagcgtggaagtcgcgctcagagagcgggccgcgggcgagcagcacctggattaggacgtggtgcttgctcgacagcgacgccatggaggtgaggacgccgctccgccgtcgtctacgcacctccgcgagacgcgctgccccggaaccccgcagccggcctccgcgccgcaaaccatccagaaggtcaatttgaggatggtcttcttcctctagtgcagccgcttcttcatctgtgagttgagcaccttgagcaaactgactgagacgggccctctcccttgatggactgggcgagagctgagcaagatgcacttgctttgcatgtgcaggctctacaaccttttcgtctgttagttgttcacctggagcaaaagaaggaatgtgcgagagctgattaagacacagctgccatgtcttttctgcagctctttctgactgcataggcacctgctctgcatgtgcaggctctacaacctgtgccttgtctggtattgtggcacggttgtcacctgtgagttgtgcatctggagccttgtctggtattgtagcatggttgtcacatgtgagttgtgcatctggagcacactggcattcaatgttccatcgtgaaacattgtctgtcacctgtgagttttgcataagtctaaactgatccattgttctagcaaaaaaatcatcatcgcgagctttaaagaaacattcacgatccttcgcgtctttgactaaatcataccatgttgaattcatgtccaaggatccacatgcagtgcctgtggaagaaataattatttagatgagtatgtactgggatcttgaattaactaagtatccaaaggttgatcctttgccaacaaaaaaaataaaatttaattaagccaacaaaaaggaacaaaagttaacatactttgctcttgtcaaagccacattagttctcataacacaatcaacaaagcctatattcccaccattattttgtctaactgttgaaaggattaatgtctttctcagcactttgacatgaatcaacaatgcatacttcaatagaaagaaagtcatgcttcttataaatctgaactctttcttgcaaagaaattacttgggctgcatatggagatactataccaacgttggttttcttcttctgctcggcgcatgctgtagtggttatagaccaaaaaaacatggatgacacttaaacatatcagctttaatgaaacttacatgttctttatcagctcaaatgttagacataccttccgcaaatctgccaacaatattggctaccacagcagcttcaacaatatttttaagccctgtttattgttttcttcgaaaccatcttcaacatggatgaatgaataaggaccatatatatgcacatcgagataaatattgttatagtccttaacgttcagaccatctataatttttccttcataaaatttttgatttggaaacttgctgatgaaagggtgcattctatattgaatatttagcatgtgctttgggaaatcaagtccacttaatctctcaaagaggcttcgcccaaacctgttctctttagcaatcttaccagtaaggagaaagtattagcagtctagaaataatcattggtaacacaaggaatcaaggatacattcaaatggtcttataagttataataaagacatatcgtgctctttaccactgattgtagttgtttgtcatccccaacaagcaccacatgttttatcccactagttgcaagagggatcaatgattcacattcttttaagtatgctgcctcatcaataaataagatgtggaatttctgattttccaaccaactagacctatagggagtgcaaaacacaagtcttgcatcttttgtttttgatttttttgaagaaacaattttgcttttaaatatttctgacaattttccattctcaactttcttcttcatgcggtcctcattaggtacactgtaaagtgtcgggaaggtatgcgtaaatttgtatctacaggatagaactgcaagcgatgaccgtttttggtcgaacgagcatatgaatctatacaacaatatatatagcaagaagtaatgtgctgacaataaatggatcaattgggaaaagatcagacaaattcctgagatgccagatattgagaaagcatgtcatgacattggtcttcatgaattgatggctataaaacagaactggcatgaagaaacaatcaaacagttctactccacattgtaaatgaaagtaggacctcgctgacatggatgacaggcaaaaatatgaagattactgtcacaaagaagcggaagctgcggatagggagatttgttgtcacaggacctgagaagagcaagatcgagagactgaggagaggaggatgaaaacctagtcatcaggagcagcagacgcgttctcggctgccaggagcgagggcgtgcctctcccgttgctttccttctttttttctttcttttgcccgttttcttattggccggagtgtccaatgtccagccttctctggaacttacgggaggatgtgagaggaaaaaaaagaaggcagagtacgcaccgtttaaaaggcatccaatggactctattgaaaggcgacgtggacaattttgtgtactccgtttggtatccaacggctgagaagaaagaagtgacgtggcaaactccctgcacatccaatggactctattgaaaggcgacgtggacaattttgtgtactccgtttggtatccaacggctgagaagaaagaagtgacgtggcaaactccctgcacagcatggtgcacagcttttactatagaaatttagccactgcacagaacaccacggtctccgccgtcgccgccggcgtgccccttctggccttcactgcccgcattgaagttctgcccctccctccaacctccattctctcccccaacaaatgaagggcgagtcctctggtccgggccgggacggcagtggccatgcgcggagatccagccgagtcctctgcctccgagtcgctgcccccgagcctgtctaatcgccattgctctgagtcactggctacagccgcccgcgtgccccttctggccttcactgcccgcattgaagttctccccctccctctcccccccccaacaaatgaagggcaagggcgagtcctctggtccgcgcccggacggcagtggccatgcgcggagatccagccgacgcattaccggcaaattttcttaccaatacagccgacgcatagtcggcccatattcttgctggatcggtggtggctctttggtgaggtttagccgtcgcatcgccggttgcagttctcgtttgactcggtcttcaccttgtcggtccagtcgattgccaggtacctcctcttccttcgcatctgctgaccacgaagtagggttcttggtcctaaggttcttgtggaatattggaaatacagtggtaaattatagagcacttaataggattgcttgctacagaagtatcgagtgtcagctttgtctcagcacataatcagtaattgcccagtccaataaatagttgtactattttgtgtttcacttctctgaccattgtttaaaattgttagggcgcaagggatggcatatcaccctggaacaccgatacacgatttgcttgcagaaatccatacaatactttcagaacagatggttaaactccttgcatctttttttcccttttaggttggagggatccgttggacatggcacggcctgatgtattggacacacttttcgtggatgcgtgtttcaaagaggttgagaacggcatctatgtagcagaattcactcaccttttttggcagaatgttacaaaatccattaatgaacaaacgaatatgactattccacttaagtatctgcaaaataggtttaaatacttcaaagaaagagatttcagacggattgtaattcactcacctttttttgctagtctattacaaagaaagcaatatacaatcatcattactttcagaagatagaaaaacatgtaaacagaaagaaaccaaggttgaacacagtctccatgacatgtatttgcttttagctggcctcttagattttaaggccaaactagactagcaaaaaaacacaggaacaagataaataactgacatgactacagaagacctaaacaaactggattacctttaaggaagagggatcagattctaatttccaggttactggtaggaaactgatccatcagattttaatttcaggttccttccaggaaactaatcctttcctcaagagatttcagacgggagaacgtggtcagattttgatagtctttaagtaacttattggctatacaaaattttaaagtaccacctaagatgtcatggtctttaagatattgcattgcatcttcgtgggtaatgtcattttgtaatgactgagccaaatgaactttcgagctcttctgccgaacatggctggaagaggtctcgtcaatgctgcgcttcccagtacttgcactacttaagttcccacatctaatattggcacgatacgcaggtactgatggtgacttatgctcatcacagcttataaatatatgtgtgagctgatccaaatattgcaacatacgttcgtatttacccgattcaagttctttttttatctgcaatggaaagcgtcagttagtgttaagttctataaatagagaaagactgaaatgttcaggtgagatacctcttcaagtgagagctttatcgggcctgcgccacttgacaactgtcgcgtaagcttattgtaccgtccccacaaatctttgaaatatttaaacctattttgcagatccttaagtggaatagtcatattcgtgtgttattaatggattttgtaacattctgccaaaaaaggtgagtgaattctattacatagatgccgttctcaacctctttgaaacacgcatccacgaaaagtgtgtccaatacatcaggccatgccatgtccaacggatccctccaacctaaaagggaaaaaagatgcaaggagtttaaccatctgttatgaaagtattgtatgggtttctgcaagaaaatcgtgtatcggtgttccagggtgatatgtcatcccttgcgcccccaacaattttaaacaatggtcagagaagtgaaacacaaaatattacaactatttattggactgggcaattactgattaggtgctgagacaaagctgacacttgatacttctgtagcaagcaatcctattaagtgctctataatttaccactgaattccaatattccacaagaactaaaaaccctaggacccaagaaccctactttgtggtcagcagatgcgaaggaagaggaggtacctggcaatcgactggaccgacaaggtgaagaccgagtcaaacgagaactgcaaccggcgatgcgacggctgaacctcaccaaagagccaccaccgatccagcaagaatatgggtcggctatgcgtcggctatatttgtaagaaaatttgccggcaatgcgtcggctggatctccgcgcatggccactgccgtccggacgcggaccagaggactcgcccttgcccttcatttgttggggggagaatggagggaggggaagaacttcaatgcagacagtgaaggccagaaggggcacgcgggcggctgtagccagtgactcagagcaattgcgattagacaggctcgggggcagcgacttggaggcagaggactcggctggatctccgcgcatggccactgccgtccgggcccagaccagaggactcgcccttcatttgttaggggagagaatggaggttggagagaggggcagaacttcaatgcggacagtgaaggccagaaggggcacgccgacggcggcggcggagaccgaggtgttctgtgcagtggctaaatttctatagtaaaagctatgcaccatgccgtgtagtgagtttgccacgtcacttcttctcagtcgttggataccaaacggagtacacaaaattgtccacgtcgccttttaatagagtccattggatgccttttaaacggtgtgtactctgccttcttttttttcctctcacatcctcccgtaagttccagagaatgctggacattggacactccggccaataagaaaatgggcaaaagaaagaaaaaagaaggaaagcaacgggagaggcacgccctcgctcctggcagccgagaacgcgtctgccgctcctgacgactaggtttccatcctcctctcctcagtctctcgatcttgcacttctcaggtcctgtgacaacaaatctccctatctgcagctttcgcttctttgtgacagtaatcttcatatttttgtctgtcatccatgtcagcgaggtcctactttcatttacaaacaatgtggagtacaactgtttgattgtttcttcatgccagttctgttttatagccatcaattcatgaagaccaatgtcatgacatgctttctcaacatctggcattccaggaatttatctgatcttttcccaattgatccatttattgtcagcacattgcttctcgctatatatatatatattgttatatagattcatatgctcgttcgaccaaaaacggtcatcgattgcagttctatcttgtagatacaaatttacgcatttaaccgatgacttcttcctttttaattttttgtagctcacaggcatcacagctacagcctcagctagttggggcaaaccatcccgacgctttacaatgtacttaatgaggaccgcatgaagaagaaagctgataatggaaaaatgtcagaaatatttaagagcaaaattgtttcttcaaaacaatcaaaacaaaagatgcaagacttgtgttttgcactctctataagtctagttggttggaaaatcagaaattccacatcttagttattgatgaggcagcatacttaaaagaatgtgaatcattaatcccttttgcaactagtgggataaaacatgtggtgcttgttgggatgacaagcaactacaatcagtggtaaagagcacggtgtgtattcattataacttataagaccatttgaatgtatccttgattccttgtgttaccaataattatttatagactgctaatactttctctttactgataagattgctaaagagaacaggtttgggcgaagcctctttgagagattaagtggacttgatttcccaaagcacatgctaaatattcaatatagaatgcacccttccatcagcaagtttccaaatcaaaagttttatgaaggaaaaattatagatggtctcaacgttaaggactataacaatatttatctcgatggtcatatgtatggtccttattcattcatccatgttgaagttggtttcgaagaaaacaataaacagggcttaaaaatattgttgaagctgctgtggtagcaaatattgttggcagacttgctgaagtgacatccatgtttttttggtctataaccactacagcatgcgccgagcagaagaagaaaaccagcgttggtatagtatctccatatgcagcccaagtaatttctttgcaagaaagaattcagagttatgaaaagtatgactttctttctgttgaagtatgcactgttgattcatgtcaaggtgctgagaaggacattaatcctttcaacagttagacaaaataatggtgggaatatatactttcttgattgtgttatgagaactaatgtggctttgacaagagcaaagtaggttaacttttgttcctttttgttggtttaattaaattttgtttttttgttggcaaaggatcagcctttggatacttagttaattcaagatcccagtacatactcatctaaataattatttcttccacaggcactccatgtggatccttggacatgaaacgactcaccttgacagtaattcaacatggtctgattatgtcaaagacgcgaaggatcgtgaatgtttccttaaaactcgcgatgatgattttcttgctagaacaatggatcagtttagacttatgcaaaactcacaggtgacagacaatgtttcacgatggaacattgaatgccagtgtgctccagatgcacaactcacaggtgacaaccgtgccacaataccagacaaggcacaggttgtagagcctgcacatgcagagcaggtgcctgtgcagtcagaaagggctgtagagaagacatggcaggtgcgtcttgatcagctctcgctcagtccttcttttgctccaggtgaacaactaacagatgaaaaggttgtagagcctgcacatgcagagcaagtgcatcttgctcggctctcgcccagtccatcaagggagagggcccgtctcagtcagtttgctccaggtgctcaactcacagatgaagaagcggctacactagaggaagaagaccgtcctcaaattgaccttctagatggtttgccccaactagctgaggctgtagccaggacgcctgtcagatctgcaagcgatgggcgtttttggtccaacgagcatatggatctatacaacagtatttatagcaagaagaaatgtgctgacaacaaatggatcgattggaaaaatatcaaacgtttaccgaagatgccatatgttgagaaagcaagtcgtgacattagtcttcatgaattgatggctataaaacagaactggtatgaagagccgatcaaacagttctactccacattgtccataaatcaaagtaggacctcactgacttggatgacaggcataaataagaagattactgtcacaaagagattttgtcaaaaggttctccatgttccgtccgagcacaatattaagattaagcgccaattgactgatgcacaagaaaaagagctcatgagtgcagatggtaaccaagtttattcattaaaccggattattacaaagactatcaatcctttgattggagataaaagtaaggttcacgaatcaagtagggtcctactgtatcatattttgttcgggaagccttttgacatagtagacatgttggaggagatggaaaacaatcacatgcacacatctaagagaatgtcatatgccccatacatcatgttactaattaacagtgcgactaaggaaaaatttgtacccgggagtggagaaaataaatgtgtagagcacgaaaagtaaaaaatggagtcaaattcgaataaaaaaacgaaagaatcgaagaacttcaaagtccgaatcgcctgtaccattgaaaaagtccaaatcaatgtgtgtaccattgatgaagccatgatcacttcatctcgtttgttgcaagtgctcaggtgttaataaacgtaagttttgtaggtcaaaaatgatttcagctgtagtgtttgctcacacgcttgtttcaacatggggctgtggtcggcagtagcaaatcttat

SEQ ID NO: 16098 - DNA, 1344 bp, Zea Mays
acgtgctgccgctgagatgccccagccggagccacaacctaaaactaagccggagccccatatgcagccactgccccagccagaacctaaaccgaaacctatgccacatccagagccaaagcctgaacctcaaccaaagcccaaccctgaacctcaaccaatgcccaagcctcaaccaaaatccaaaccagagccattgcctacaccgaagcctgaacctaagcccgaacctaagccagagcctaagcccgaacctaaaataaaaccaaagccaaaacctgaaccaaaaccagagcctaagccagagccgaaaccggagccaaagccagagccccaacctaagccagagcctaagcctgagccgaaaccagaaccaaagccagagccacaaccaaagcctgagcctaaaccagaaccaaaaccagagccaaagccagagcctaagcccgaaccaaaaccagagccaaagcctgagcctaaacccgaaccaaggccagaacctaagccagagccaaagcctgagccgaaaccgaaaccagatccaaagccagagccacaaccaaagccagagcctaaacctgaaccaaaaccgaaaccagaaccggagccacaaccaaagccagagcctaagcctgatccaaaaccagagcctaaacccgaaccaaaaccagagcccccaaccaaaaccagaacctaagcccgaaccaaaaccacagccagaacctaaagcccgagcccaaaccaaagcctgaccctccacacatcccaccagcagctatcaactgaggaagtggctattaacaattattgtagtgtttaaataaaatgccatgttgcagcgtgcttttgtaggtgctgctacttgttgtatctatcctatcttttctttgtcattttttgtatgttatgctattatatgatcttagtgcagtttagcttgttccgtgtatacacgcatttatgcactcagtgggtttttgttatatgttggttgttatgtatatatgttcgctgtttcgagcagctaactaacagaaaccattgttttaatacacaaaagatgattaaatacataattcattcggccttattattgtgcacaaaagcaaaaagggtaaaaaaaggaacaaatgaaacgtgccattcatagtttagtatgttgattttatatgcatctatgcactcgtgaaattttgctatatattcgttgttatgtatgttagctgttttgccggcagctggctgggtcctctcactgttgcagtacgccacatttgattaaatacaaatatccttcttctagtacacaaaagcaaacatgtgaaaaagaaacaaaaagaaacg

SEQ ID NO: 16099 - DNA, 890 bp, Zea Mays
attctctgtcctcgagttctatccaaggatagctacacaggtgttgtggtccttgtgctcctgctagtattaataccctccctagttcctaagtgggtctgttccagggttagccctgtccagagttttgtgccatccccttcagactggtgaccattgccaccagtttcttcacctcacgtagccaggaatttcgggagatttgctcgaccatgtggtgtttgttccatactcaactgatgctgaggacagccttgccgtcgacccgttcaaccgcgtcttcctcgagcaatttcgcgcaagcactgagaacacctagaagaagtggtgtttgaaggaggaccctacttcagctgatcaagtggaggaaccatctaaatgtatactactgaatattacaggagcttcgtcaccataaatgcttcggtataacacaagaggagcgaagcaagcttcgtccaacaggcttcatcacggtgaaatgggttgacaacgtggcttcggcataatgaaaaggaagtacaacgaagcacgcttcatcaagcaggcttcgtcatgacgaaataatgagacgatgcaaggagaaggtgtttctcaagttattaaatacaaatggcgatgttgcccttgcgacatcttgtaaactttatatgtaattattgagggcataaatgtaatagcgtatgaaaccttacggttgcctataaatagatgaatagtaccctcgtactgttcacgctggattgtaattgctctcgcatcatcaccttgaaacaagccgaaggtatcaatgtaatataatttctgttaatgttaatatgtttattagagaatgaatatatgaatggataatacaccttgtgtgtataatctcttattccttatgaatc

SEQ ID NO: 16100 - DNA, 1189 bp, Zea Mays
gtttattctctgtcctcgagttctatccaaggatagctacacaggtgttgtggtccttgtgctcctgctagtattaataccctccctagttcctaagtgggtctgttccagggttagccctgtccagagttttgtgccatccccttcagactggtgaccattgccaccagtttcttcacctcacgtagccaggaatttcgggagatttgctcgaccatgtggtgtttgttccatactcaactgatgctgaggacagccttgccgtcgacccgttcaaccgcgtcttcctcgagcaatttcgcgcaagcactgagaacacctagaagaagtggtgtttgaaggaggaccctacttcagctgatcaagtggaggaaccatctaaatggtatttgatagagggatctagaacctcttcactacaacaaagttaatcaggagtattctaggtgtccctgtggctagaagatgcttccagtcttgaaggtggattagttaggtttatgtgtgagctttggaagggttctaccttcctagttttgtatgtaagttatgcactttgagttctatcaggacttgtaataaatattactctttctaacatgtaaaacttgagttttggaaatgttggggccttcctcttccgaaggttctcaaaaatacggctaaccatttgctttcagtatactactgaatattacaggagcttcgtcaccataaatgcttcggtataacacaagaggagcgaagcaagcttcgtccaacaggcttcatcacggtgaaatgggttgacaacgtggcttcggcataatgaaaaggaagtacaacgaagcacgcttcatcaagcaggcttcgtcatgacgaaataatgagacgatgcaaggagaaggtgtttctcaagttattaaatacaaatggcgatgttgcccttgcgacatcttgtaaactttatatgtaattattgagggcataaatgtaatagcgtatgaaaccttacggttgcctataaatagatgaatagtaccctcgtactgttcacgctggattgtaattgctctcgcatcatcaccttgaaacaagccgaaggtatcaatgtaatataatttctgttaatgttaatatgtttattagagaatgaatatatgaatggataatacaccttgtgtgtataatctcttattccttatgaatc

SEQ ID NO: 16101 - DNA, 2003 bp, Zea Mays
gtttattctctgtcctcgagttctatccaaggatagctacacaggtgttgtggtccttgtgctcctgctagtattaataccctccctagttcctaagtgggtctgttccagggttagccctgtccagagttttgtgccatccccttcagactggtgaccattgccaccagtttcttcacctcacgtagccaggaatttcgggagatttgctcgaccatgtggtgtttgttccatactcaactgatgctgaggacagccttgccgtcgacccgttcaaccgcgtcttcctcgagcaatttcgcgcaagcactgaggtcatggtgaatccctcctgctctctgcgcccttgattggaactctactattctagtgtctcaggatcgggctcgccgggccgtgcatctcgccggcgtcgtgttagtgcattagattgctggacagtggtagtgaagctgtgggttccctttgccttggccgtgaacacgtgctagggggggttggtgggcgttgaagatcagcgccgctgtgtcaggttctcagctcgtcggagggagtcagggaggcagcggggcatcgggtccgagttcttgtgaaagtgataaagccgagggacagggaccgatgtgcgcttgacagtgagcgtgacaacagtagattgggcttttatttagtttgtcagtgcagttggggcctttctgcatgatgtgcggcgcgggctctcgagcgcgggccgcctgtgtctggtcgtgggccgtgtgggccagaatcggcccagagtttagatgtttttcctttattatttagctgagaccttccaaataacgcaagaaattgtagaaaatgaaaacaaattaagggaccaattttattaggtgtataaattcagaatatttctattaaaaatatttttggaatttttgaagcagttagaaaattttaagtgaattaaaggtgctcatggaaggactattggaattttagaaataagagttgaacaccaaaaatcatgggcatttttggagaagcttgttatctgatgttaaacacttggtaaaagtttggggctgtttggaatcatttttctccagaaaccttataagccccaaaatagaatggtaattcctaatcaagtgtgggttaatgctttggaaaggagataagtttatctagtgaaagttggtctgtggatgaagaaaccaaaagaatattgatctctaagtaaattcaaattagtcacttttgtcaagtattagattatagagaagtatgtgtatacttgtcatatgcttcagttcatgtgtttatgttcccacctctccttatgagagtttgcatttcacatcattacataagcattcatgtaattataattgaattgtagaacacctagaagaagtggtgtttgaaggaggaccctacttcagctgatcaagtggaggaaccatctaaatggtatttgatagagggatctagaacctcttcactacaacaaagtatactactgaatattacaggagcttcgtcaccataaatgcttcggtataacacaagaggagcgaagcaagcttcgtccaacaggcttcatcacggtgaaatgggttgacaacgtggcttcggcataatgaaaaggaagtacaacgaagcacgcttcatcaagcaggcttcgtcatgacgaaataatgagacgatgcaaggagaaggtgtttctcaagttattaaatacaaatggcgatgttgcccttgcgacatcttgtaaactttatatgtaattattgagggcataaatgtaatagcgtatgaaaccttacggttgcctataaatagatgaatagtaccctcgtactgttcacgctggattgtaattgctctcgcatcatcaccttgaaacaagccgaaggtatcaatgtaatataatttctgttaatgttaatatgtttattagagaatgaatatatgaatggataatacaccttgtgtgtataatctcttattccttatgaatc

SEQ ID NO: 16102 - DNA, 1983 bp, Zea Mays
gtttattctctgtcctcgagttctatccaaggatagctacacaggtgttgtggtccttgtgctcctgctagtattaataccctccctagttcctaagtgggtctgttccagggttagccctgtccagagttttgtgccatccccttcagactggtgaccattgccaccagtttcttcacctcacgtagccaggaatttcgggagatttgctcgaccatgtggtgtttgttccatactcaactgatgctgaggacagccttgccgtcgacccgttcaaccgcgtcttcctcgagcaatttcgcgcaagcactgaggtcatggtgaatccctcctgctctctgcgcccttgattggaactctactattctagtgtctcaggatcgggctcgccgggccgtgcatctcgccggcgtcgtgttagtgcattagattgctggacagtggtagtgaagctgtgggttccctttgccttggccgtgaacacgtgctagggggggttggtgggcgttgaagatcagcgccgctgtgtcaggttctcagctcgtcggagggagtcagggaggcagcggggcatcgggtccgagttcttgtgaaagtgataaagccgagggacagggaccgatgtgcgcttgacagtgagcgtgacaacagtagattgggcttttatttagtttgtcagtgcagttggggcctttctgcatgatgtgcggcgcgggctctcgagcgcgggccgcctgtgtctggtcgtgggccgtgtgggccagaatcggcccagagtttagatgtttttcctttattatttagctgagaccttccaaataacgcaagaaattgtagaaaatgaaaacaaattaagggaccaattttattaggtgtataaattcagaatatttctattaaaaatatttttggaatttttgaagcagttagaaaattttaagtgaattaaaggtgctcatggaaggactattggaattttagaaataagagttgaacaccaaaaatcatgggcatttttggagaagcttgttatctgatgttaaacacttggtaaaagtttggggctgtttggaatcatttttctccagaaaccttataagccccaaaatagaatggtaattcctaatcaagtgtgggttaatgctttggaaaggagataagtttatctagtgaaagttggtctgtggatgaagaaaccaaaagaatattgatctctaagtaaattcaaattagtcacttttgtcaagtattagattatagagaagtatgtgtatacttgtcatatgcttcagttcatgtgtttatgttcccacctctccttatgagagtttgcatttcacatcattacataagcattcatgtaattataattgaattgtagaacacctagaagaagtggtgtttgaaggaggaccctacttcagctgatcaagtggaggaaccatctaaatggtatttgatagagggatctagaacctcttcactacaacaaaggagcttcgtcaccataaatgcttcggtataacacaagaggagcgaagcaagcttcgtccaacaggcttcatcacggtgaaatgggttgacaacgtggcttcggcataatgaaaaggaagtacaacgaagcacgcttcatcaagcaggcttcgtcatgacgaaataatgagacgatgcaaggagaaggtgtttctcaagttattaaatacaaatggcgatgttgcccttgcgacatcttgtaaactttatatgtaattattgagggcataaatgtaatagcgtatgaaaccttacggttgcctataaatagatgaatagtaccctcgtactgttcacgctggattgtaattgctctcgcatcatcaccttgaaacaagccgaaggtatcaatgtaatataatttctgttaatgttaatatgtttattagagaatgaatatatgaatggataatacaccttgtgtgtataatctcttattccttatgaatc

SEQ ID NO: 16103 - DNA, 2297 bp, Zea Mays
gctgccttgagatcctggttgtgaaagtttattctctgtcctcgagttctatccaaggatagctacacaggtgttgtggtccttgtgctcctgctagtattaataccctccctagttcctaagtgggtctgttccagggttagccctgtccagagttttgtgccatccccttcagactggtgaccattgccaccagtttcttcacctcacgtagccaggaatttcgggagatttgctcgaccatgtggtgtttgttccatactcaactgatgctgaggacagccttgccgtcgacccgttcaaccgcgtcttcctcgagcaatttcgcgcaagcactgaggtcatgaacacctagaagaagtggtgtttgaaggaggaccctacttcagctgatcaagtggaggaaccatctaaatggtatttgatagagggatctagaacctcttcactacaacaaaggcatgccccactgcatttgcccattcattgtatttttaaaagacttttatacactttaagtctagtgaaatgtgcactaagtttataggagttgcttggaaactatttgattcattgactaccttgatatccattccttttatagatacttctttgcaagtatcaaatattgtttacaaaattgcttagccctacctagagataagtcttgtagatagagtttgtcctttgcactaatgtgtagctcagggtttattctaaggaaggatgactctacctacaagaatattttcaccaggatcatggggagatctaatgcaaggttccctgtgatgttttaatcatcctaaggtacacaaataagtcctaaggatgaaagtacttaattcgagacttggtctaggaacaagtgatgttcttcccaggttgattaaagattatagcgaatgtaggcttgatgatcgaggactatttaactagccacatgccctggtatgggatagggtaagcctaacctcagcttgaccaatactagaaaggctaccacacaatgaaagtggagagatgacgagaatagcgtgtaccctccgtggcaagagactggacggtggagtaactgtgctcttggttggcgtgaacccgatatgatcttgagattgcaggttggcatatgcaagggttaagtgctacatatgtcatgtggttagagatccccagctaggtaaatcgatttgaatcactgttatatccttggataatggagaattgatcactaccctgcaatctaagtgatggatggaatcataatgagtaaaaatcatgtagtactgattaatgtgatgatgaagttggtctagatgcgaataaagtcaaataatacttatttcagaattaaaatgttgaaagtaaggatccactattagatgcttatttctgcaaatgagtaagcttgatttttgctaaaccttaccttgattcccaaatctagcatatcattgagagtatttttccttagttgggtaagacttgcgaaagtacacttcgtactcagggtttccgaacccatgttgttgcagttaatcaggagtattctaggtgtccctgtggctagaagatgcttccagtcttgaaggtggattagttaggtttatgtgtgagctttggaagggttctaccttcctagttttgtatgtaagttatgcactttgagttctatcaggacttgtaataaatattactctttctaacatgtaaaacttgagttttggaaatgttggggccttcctcttccgaaggttctcaaaaatacggctaaccatttgctttcagtatactactgaatattacaggagcttcgtcaccataaatgcttcggtataacacaagaggagcgaagcaagcttcgtccaacaggcttcatcacggtgaaatgggttgacaacgtggcttcggcataatgaaaaggaagtacaacgaagcacgcttcatcaagcaggcttcgtcatgacgaaataatgagacgatgcaaggagaaggtgtttctcaagttattaaatacaaatggcgatgttgcccttgcgacatcttgtaaactttatatgtaattattgagggcataaatgtaatagcgtatgaaaccttacggttgcctataaatagatgaatagtaccctcgtactgttcacgctggattgtaattgctctcgcatcatcaccttgaaacaagccgaaggtatcaatgtaatataatttctgttaatgttaatatgtttattagagaatgaatatatgaatggataatacaccttgtgtgtataatctcttattccttatgaatc

SEQ ID NO: 16104 - DNA, 1010 bp, Zea Mays
cttccccactgtgttgtgtgcaaggtcagagacacctgcccatgttcagctgccttgagatcctggttgtgaaagtttattctctgtcctcgagttctatccaaggatagctacacaggtgttgtggtccttgtgctcctgctagtattaataccctccctagttcctaagtgggtctgttccagggttagccctgtccagagttttgtgccatccccttcagactggtgaccattgccaccagtttcttcacctcacgtagccaggaatttcgggagatttgctcgaccatgtggtgtttgttccatactcaactgatgctgaggacagccttgccgtcgacccgttcaaccgcgtcttcctcgagcaatttcgcgcaagcactgagaacacctagaagaagtggtgtttgaaggaggaccctacttcagctgatcaagtggaggaaccatctaaatggtatttgatagagggatctagaacctcttcactacaacaaagtatactactgaatattacaggagcttcgtcaccataaatgcttcggtataacacaagaggagcgaagcaagcttcgtccaacaggcttcatcacggtgaaatgggttgacaacgtggcttcggcataatgaaaaggaagtacaacgaagcacgcttcatcaagcaggcttcgtcatgacgaaataatgagacgatgcaaggagaaggtgtttctcaagttattaaatacaaatggcgatgttgcccttgcgacatcttgtaaactttatatgtaattattgagggcataaatgtaatagcgtatgaaaccttacggttgcctataaatagatgaatagtaccctcgtactgttcacgctggattgtaattgctctcgcatcatcaccttgaaacaagccgaaggtatcaatgtaatataatttctgttaatgttaatatgtttattagagaatgaatatatgaatggataatacaccttgtgtgtataatctcttattccttatgaatc

SEQ ID NO: 16105 - DNA, 1001 bp, Zea Mays
gagcccttccccactgtgttgtgtgcaaggtcagagacacctgcccatgttcagctgccttgagatcctggttgtgaaagtttattctctgtcctcgagttctatccaaggatagctacacaggtgttgtggtccttgtgctcctgctagtattaataccctccctagttcctaagtgggtctgttccagggttagccctgtccagagttttgtgccatccccttcagactggtgaccattgccaccagtttcttcacctcacgtagccaggaatttcgggagatttgctcgaccatgtggtgtttgttccatactcaactgatgctgaggacagccttgccgtcgacccgttcaaccgcgtcttcctcgagcaatttcgcgcaagcactgaggtcatgaacacctagaagaagtggtgtttgaaggaggaccctacttcagctgatcaagtggaggaaccatctaaatggtatttgatagagggatctagaacctcttcactacaacaaaggagcttcgtcaccataaatgcttcggtataacacaagaggagcgaagcaagcttcgtccaacaggcttcatcacggtgaaatgggttgacaacgtggcttcggcataatgaaaaggaagtacaacgaagcacgcttcatcaagcaggcttcgtcatgacgaaataatgagacgatgcaaggagaaggtgtttctcaagttattaaatacaaatggcgatgttgcccttgcgacatcttgtaaactttatatgtaattattgagggcataaatgtaatagcgtatgaaaccttacggttgcctataaatagatgaatagtaccctcgtactgttcacgctggattgtaattgctctcgcatcatcaccttgaaacaagccgaaggtatcaatgtaatataatttctgttaatgttaatatgtttattagagaatgaatatatgaatggataatacaccttgtgtgtataatctcttattccttatgaatc

SEQ ID NO: 16106 - DNA, 900 bp, Zea Mays
gttgtgttggcaccctgggagcccttccccactgtgttgtgtgcaaggtcagagacacctgcccatgttcagctgccttgagatcctggttgtgaaagtttattctctgtcctcgagttctatccaaggatagctacacaggtgttgtggtccttgtgctcctgctagtattaataccctccctagttcctaagtgggtctgttccagggttagccctgtccagagttttgtgccatccccttcagactggtgaccattgccaccagtttcttcacctcacgtagccaggaatttcgggagatttgctcgaccatgtggtgtttgttccatactcaactgatgctgaggacagccttgccgtcgacccgttcaaccgcgtcttcctcgagcaatttcgcgcaagcactgaggagcttcgtcaccataaatgcttcggtataacacaagaggagcgaagcaagcttcgtccaacaggcttcatcacggtgaaatgggttgacaacgtggcttcggcataatgaaaaggaagtacaacgaagcacgcttcatcaagcaggcttcgtcatgacgaaataatgagacgatgcaaggagaaggtgtttctcaagttattaaatacaaatggcgatgttgcccttgcgacatcttgtaaactttatatgtaattattgagggcataaatgtaatagcgtatgaaaccttacggttgcctataaatagatgaatagtaccctcgtactgttcacgctggattgtaattgctctcgcatcatcaccttgaaacaagccgaaggtatcaatgtaatataatttctgttaatgttaatatgtttattagagaatgaatatatgaatggataatacaccttgtgtgtataatctcttattccttatgaatc

SEQ ID NO: 16107 - DNA, 2362 bp, Zea Mays
gttgtgttggcaccctgggagcccttccccactgtgttgtgtgcaaggtcagagacacctgcccatgttcagctgccttgagatcctggttgtgaaagtttattctctgtcctcgagttctatccaaggatagctacacaggtgttgtggtccttgtgctcctgctagtattaataccctccctagttcctaagtgggtctgttccagggttagccctgtccagagttttgtgccatccccttcagactggtgaccattgccaccagtttcttcacctcacgtagccaggaatttcgggagatttgctcgaccatgtggtgtttgttccatactcaactgatgctgaggacagccttgccgtcgacccgttcaaccgcgtcttcctcgagcaatttcgcgcaagcactgagaacacctagaagaagtggtgtttgaaggaggaccctacttcagctgatcaagtggaggaaccatctaaatggtatttgatagagggatctagaacctcttcactacaacaaaggcatgccccactgcatttgcccattcattgtatttttaaaagacttttatacactttaagtctagtgaaatgtgcactaagtttataggagttgcttggaaactatttgattcattgactaccttgatatccattccttttatagatacttctttgcaagtatcaaatattgtttacaaaattgcttagccctacctagagataagtcttgtagatagagtttgtcctttgcactaatgtgtagctcagggtttattctaaggaaggatgactctacctacaagaatattttcaccaggatcatggggagatctaatgcaaggttccctgtgatgttttaatcatcctaaggtacacaaataagtcctaaggatgaaagtacttaattcgagacttggtctaggaacaagtgatgttcttcccaggttgattaaagattatagcgaatgtaggcttgatgatcgaggactatttaactagccacatgccctggtatgggatagggtaagcctaacctcagcttgaccaatactagaaaggctaccacacaatgaaagtggagagatgacgagaatagcgtgtaccctccgtggcaagagactggacggtggagtaactgtgctcttggttggcgtgaacccgatatgatcttgagattgcaggttggcatatgcaagggttaagtgctacatatgtcatgtggttagagatccccagctaggtaaatcgatttgaatcactgttatatccttggataatggagaattgatcactaccctgcaatctaagtgatggatggaatcataatgagtaaaaatcatgtagtactgattaatgtgatgatgaagttggtctagatgcgaataaagtcaaataatacttatttcagaattaaaatgttgaaagtaaggatccactattagatgcttatttctgcaaatgagtaagcttgatttttgctaaaccttaccttgattcccaaatctagcatatcattgagagtatttttccttagttgggtaagacttgcgaaagtacacttcgtactcagggtttccgaacccatgttgttgcagttaatcaggagtattctaggtgtccctgtggctagaagatgcttccagtcttgaaggtggattagttaggtttatgtgtgagctttggaagggttctaccttcctagttttgtatgtaagttatgcactttgagttctatcaggacttgtaataaatattactctttctaacatgtaaaacttgagttttggaaatgttggggccttcctcttccgaaggttctcaaaaatacggctaaccatttgctttcagtatactactgaatattacaggagcttcgtcaccataaatgcttcggtataacacaagaggagcgaagcaagcttcgtccaacaggcttcatcacggtgaaatgggttgacaacgtggcttcggcataatgaaaaggaagtacaacgaagcacgcttcatcaagcaggcttcgtcatgacgaaataatgagacgatgcaaggagaaggtgtttctcaagttattaaatacaaatggcgatgttgcccttgcgacatcttgtaaactttatatgtaattattgagggcataaatgtaatagcgtatgaaaccttacggttgcctataaatagatgaatagtaccctcgtactgttcacgctggattgtaattgctctcgcatcatcaccttgaaacaagccgaaggtatcaatgtaatataatttctgttaatgttaatatgtttattagagaatgaatatatgaatggataatacaccttgtgtgtataatctcttattccttatgaatc

SEQ ID NO: 16108 - DNA, 951 bp, Zea Mays
ctcctgttgtgttggcaccctgggagcccttccccactgtgttgtgtgcaaggtcagagacacctgcccatgttcagctgccttgagatcctggttgtgaaagtttattctctgtcctcgagttctatccaaggatagctacacagggttagccctgtccagagttttgtgccatccccttcagactggtgaccattgccaccagtttcttcacctcacgtagccaggaatttcgggagatttgctcgaccatgtggtgtttgttccatactcaactgatgctgaggacagccttgccgtcgacccgttcaaccgcgtcttcctcgagcaatttcgcgcaagcactgagaacacctagaagaagtggtgtttgaaggaggaccctacttcagctgatcaagtggaggaaccatctaaatggtatttgatagagggatctagaacctcttcactacaacaaaggagcttcgtcaccataaatgcttcggtataacacaagaggagcgaagcaagcttcgtccaacaggcttcatcacggtgaaatgggttgacaacgtggcttcggcataatgaaaaggaagtacaacgaagcacgcttcatcaagcaggcttcgtcatgacgaaataatgagacgatgcaaggagaaggtgtttctcaagttattaaatacaaatggcgatgttgcccttgcgacatcttgtaaactttatatgtaattattgagggcataaatgtaatagcgtatgaaaccttacggttgcctataaatagatgaatagtaccctcgtactgttcacgctggattgtaattgctctcgcatcatcaccttgaaacaagccgaaggtatcaatgtaatataatttctgttaatgttaatatgtttattagagaatgaatatatgaatggataatacaccttgtgtgtataatctcttattccttatgaatc

SEQ ID NO: 16109 - DNA, 3434 bp, Zea Mays
ctcctgttgtgttggcaccctgggagcccttccccactgtgttgtgtgcaaggtcagagacacctgcccatgttcagctgccttgagatcctggttgtgaaagtttattctctgtcctcgagttctatccaaggatagctacacaggtgttgtggtccttgtgctcctgctagtattaataccctccctagttcctaagtgggtctgttccagggttagccctgtccagagttttgtgccatccccttcagactggtgaccattgccaccagtttcttcacctcacgtagccaggaatttcgggagatttgctcgaccatgtggtgtttgttccatactcaactgatgctgaggacagccttgccgtcgacccgttcaaccgcgtcttcctcgagcaatttcgcgcaagcactgaggtcatggtgaatccctcctgctctctgcgcccttgattggaactctactattctagtgtctcaggatcgggctcgccgggccgtgcatctcgccggcgtcgtgttagtgcattagattgctggacagtggtagtgaagctgtgggttccctttgccttggccgtgaacacgtgctagggggggttggtgggcgttgaagatcagcgccgctgtgtcaggttctcagctcgtcggagggagtcagggaggcagcggggcatcgggtccgagttcttgtgaaagtgataaagccgagggacagggaccgatgtgcgcttgacagtgagcgtgacaacagtagattgggcttttatttagtttgtcagtgcagttggggcctttctgcatgatgtgcggcgcgggctctcgagcgcgggccgcctgtgtctggtcgtgggccgtgtgggccagaatcggcccagagtttagatgtttttcctttattatttagctgagaccttccaaataacgcaagaaattgtagaaaatgaaaacaaattaagggaccaattttattaggtgtataaattcagaatatttctattaaaaatatttttggaatttttgaagcagttagaaaattttaagtgaattaaaggtgctcatggaaggactattggaattttagaaataagagttgaacaccaaaaatcatgggcatttttggagaagcttgttatctgatgttaaacacttggtaaaagtttggggctgtttggaatcatttttctccagaaaccttataagccccaaaatagaatggtaattcctaatcaagtgtgggttaatgctttggaaaggagataagtttatctagtgaaagttggtctgtggatgaagaaaccaaaagaatattgatctctaagtaaattcaaattagtcacttttgtcaagtattagattatagagaagtatgtgtatacttgtcatatgcttcagttcatgtgtttatgttcccacctctccttatgagagtttgcatttcacatcattacataagcattcatgtaattataattgaattgtagaacacctagaagaagtggtgtttgaaggaggaccctacttcagctgatcaagtggaggaaccatctaaatggtatttgatagagggatctagaacctcttcactacaacaaaggcatgccccactgcatttgcccattcattgtatttttaaaagacttttatacactttaagtctagtgaaatgtgcactaagtttataggagttgcttggaaactatttgattcattgactaccttgatatccattccttttatagatacttctttgcaagtatcaaatattgtttacaaaattgcttagccctacctagagataagtcttgtagatagagtttgtcctttgcactaatgtgtagctcagggtttattctaaggaaggatgactctacctacaagaatattttcaccaggatcatggggagatctaatgcaaggttccctgtgatgttttaatcatcctaaggtacacaaataagtcctaaggatgaaagtacttaattcgagacttggtctaggaacaagtgatgttcttcccaggttgattaaagattatagcgaatgtaggcttgatgatcgaggactatttaactagccacatgccctggtatgggatagggtaagcctaacctcagcttgaccaatactagaaaggctaccacacaatgaaagtggagagatgacgagaatagcgtgtaccctccgtggcaagagactggacggtggagtaactgtgctcttggttggcgtgaacccgatatgatcttgagattgcaggttggcatatgcaagggttaagtgctacatatgtcatgtggttagagatccccagctaggtaaatcgatttgaatcactgttatatccttggataatggagaattgatcactaccctgcaatctaagtgatggatggaatcataatgagtaaaaatcatgtagtactgattaatgtgatgatgaagttggtctagatgcgaataaagtcaaataatacttatttcagaattaaaatgttgaaagtaaggatccactattagatgcttatttctgcaaatgagtaagcttgatttttgctaaaccttaccttgattcccaaatctagcatatcattgagagtatttttccttagttgggtaagacttgcgaaagtacacttcgtactcagggtttccgaacccatgttgttgcagttaatcaggagtattctaggtgtccctgtggctagaagatgcttccagtcttgaaggtggattagttaggtttatgtgtgagctttggaagggttctaccttcctagttttgtatgtaagttatgcactttgagttctatcaggacttgtaataaatattactctttctaacatgtaaaacttgagttttggaaatgttggggccttcctcttccgaaggttctcaaaaatacggctaaccatttgctttcagtatactactgaatattacaggagcttcgtcaccataaatgcttcggtataacacaagaggagcgaagcaagcttcgtccaacaggcttcatcacggtgaaatgggttgacaacgtggcttcggcataatgaaaaggaagtacaacgaagcacgcttcatcaagcaggcttcgtcatgacgaaataatgagacgatgcaaggagaaggtgtttctcaagttattaaatacaaatggcgatgttgcccttgcgacatcttgtaaactttatatgtaattattgagggcataaatgtaatagcgtatgaaaccttacggttgcctataaatagatgaatagtaccctcgtactgttcacgctggattgtaattgctctcgcatcatcaccttgaaacaagccgaaggtatcaatgtaatataatttctgttaatgttaatatgtttattagagaatgaatatatgaatggataatacaccttgtgtgtataatctcttattccttatgaatc

SEQ ID NO: 16110 - DNA, 1268 bp, Zea Mays
ctttgtggttgttaaaacacggtttgtttacgttgtccaattgttgcttgatcattttacttgctgaaatgtgtcatctcactcttgcattgtttgatgcaggcacttgaactttgcttggggaaaggagggaagtagcagcacgatcactacacccctaaataattataccactgcttagtaatacttttaaacacgggtttcaggtcaaggaggttgattattatgaaatagtgtgtgccagtggtctattatgttctagtctttatggtggtcacatttttggttagctgaattaattttttcctgaatgtttatttcttcttttgcatcttgattatacactgtgtattaccttttttgcaacatgtataaactctgtatttccctcgttatgcaactttcaagggaggtgctgccgaaattttatttctgtctccattttttatgctttctaatttgtgggaagggtttttggtaacacccattgtgtgggatcaatggggtgttacaggtaatggatgcactgaacttcgagtatccagactatgaaagacttgacgagggggtcgggggagcaaaaagaaaaagcgttgtcagcggacgaagaggctctgaagaaagcaacgcctgagccgaaggcactagctcctaagaaaaggaaacttgaagagataccttctgccgaaccaaaggtagatgaagcgccggagaaaaccttgagcccttcgttgccttctactgtcgaggtgtcagaaattttgaagaagaagaaaatgccttcggtcacggaggagaaggttggagggaagaggaagcagcggattatgaatgtaatacaagcgattgagcaaacgccgccttcagcttcgttggtgaaagcagcgattcctgtcaacgctgaaagtgctggcggagccgaagctaaagaattcgtagccacaatgtcagaaattgataaacttatatcagatgtggttgaagagaagccagatgtggttgtagagaaaagcatggccgcagtgcctgataaagggaagaaaatttatgatgccccttcggaagagaaggattttgaccttcggcacctaggtggccaggaactttctgaggaagataagttagagttaaaagaatttgctatgtcttgtggttaccaactgggttccatactctttggtggggtcgatgaaaaaatcttgggatgcattcacgaccgcgccggggcaaagattgtaggcaccttatccaaaagtgttggattcctg

SEQ ID NO: 16111 - DNA, 605 bp, Zea Mays
ccgattgccccaaggacattggataaaccacttacaaccaggaccacaagattaagtaacacaaatcacacacaccaatatttttgcagcggaaatattattactaaattttacaagttacaaaaattttacattattttatcggagtgattgcaaaagtataagtttgaaatatatgctagctcaagtgaccatcctcaataagaagtatagaagggttacttagacttataagaaggccgagcccactggctacttaacaccatcagcagcagcacaaaactataacctgaaaaacaacagggaataaaaccatgagtacgaaattactcagcaagacttacccgactaaagaaaagactctcaagggtatgctggctagagagattcaaggtatggcttatcaagaatcaaagactctattttgcaaaaaacttactatgagtggatccttaaaaatccagttttacttgtcaggttaagtaaagttacctgcatctagagttctttctaccctagttcaatcacttggcctatactagtcgtctttttatcatcccttcagttcactggattgctacgtgtagggcagtgaccaagtcttc

SEQ ID NO: 16112 - DNA, 915 bp, Zea Mays
tttttgttggtttcaaaagcttttttttcttgcacaagtggacgtgcaaatgatacaaagcatgttacacttactcctgctagatgacgatcaacaacttcatgtgaaaagaaatcaaacaccgaaatatggatcatgcttgtgcaaggcaactaatttcaaacaagacgcaggcactttggaaattttaatagtaacacagcattgttcagacttcagagtgctctactggctcatcaatgcttccgaaagaaaatggcttttgattcaaattgccaccatatgtactcattcatatatccatgtctcctacgttctgatgagatcaaaaacattgtgtggactggactccaccacctacaccccaggctcagctttcctggttctcattctccctcttcattcgagaagtttaaccaaccaactgccagaaaccaaatcttcacaattcttcacaagatggttcctgatcactgtcacgtaccaactacgaccttaggatctaccgcatttgccttctctaaaaccagtactttatcaatatctatcaaaatttcaaggcatgactgagacaaagctgtacatcaattcatctcgcagcaatgctcttgaagctgaacgagaggaaaagtaaaagatgcccttttaatcggttgtctacattcttttcaatttgtttcagagttcctttggcgtggatgacattacagtactgtagtcttcgggggaagaagagattatttccttgatgctgctaacaagatgcgtagtttcctggccatgtgaaatatggctccttgagtaggtctgtgcaaatgttcacagatatcaatagaaattatgatagaaaattacttaagcatgaaaggagacataaacaaaatttcaattacctctgaagaccacaggttatca

SEQ ID NO: 16113 - DNA, 1083 bp, Zea Mays
gaataaaagaatcaacaagtattgcaagtgctgaaagttgtgactgctcaagtccaactgctttatcgcacaagttctggtgaagatacttattctagaatcttcaaaagcatcaacgttagtgttcaagaattcaaagagtaactgaagatggaagactaagatgacatttatggagatctatttttgtaaatgggcttagtacctgtttctgtttggtaaaggagttcggtgatgctgttcataatcatgtgccttcatattgaggaagcatgcaacctgatacaaaagcatagatgatgggatcatggataagcatttgaagacccttgccccagtctacgtgggaacaaaattcgtcaagcttgatgctgaaatctgtatactaccacttggctataaactacatccttttaataatcatggagcctaattccatatgtaactaactgcagaatgctccattctttgtggccaaactggcaatcaagacactgccatgtgtaatattgttcaagaagggaattgttgttgaccaattagttgggtttcaagatctcagaagtaaagaagattttctgacaatagcattggaacatattcttattctcaagacgaaagggataatcgatgagaagaagacagataacgacgatgacgatgaagaaagcgaggctaagaataggagggttaggtcctcaactgctcaagactctgactcaaactgaacctgagatgaggattgaggacgcaccgttttttgcactttggattttgtttgtttatttgtttgttctgtgtttgtgttgtattgtactgtaattgatttttgtaaccatgtatcggtaccagacaccacaacaataacatgtacaagagattctttagcatccattgtgtgtaaaagctagggtttgtggctgccttttatttcgtttttcctcagctgtcataggatggtacaccacaacaagaacatgtacaagtatgccatagcttgtctttcttgcttcttaagacattgttctgccttttggcacttatggcatatgactttttcacaaatggattacaaaacatttt

SEQ ID NO: 16114 - DNA, 1508 bp, Zea Mays
acactcgaataaaagaatcaacaagtattgcaagtgctgaaagttgtgactgctcaagtccaactgctttatcgcacaagttctggtgaagatacttattctagaatcttcaaaagcatcaacgttagtgttcaagaattcaaagagtaactgaagatggaagactaagatgacatttatggagatctatttttgtaaatgggcttagtacctgtttctgtttggtaaaggagttcggtgatgctgttcataatcatgtgccttcatattgaggaagcatgcaacctgatacaaaagcatagatgatgggtaagagtgtttgtgcttatgctcaaatgttagatatgcttttttcaaatatcgacagccatatggacacatatgttaatggctgccaaaaaaactttaaagtccacatgttaactataagtttagacatccgtggtaggacatttatcattttagatagctacaaacgtaacttaactttcaactacctatgtaccagacccatcacatgtctatgttatcattttattcagatcgttcatgatttatagttaacatgttgtcgtggctcaacattccatctggtccagttatggaaggtccatttgattcatgtgtgctcctagattatcatttgcacctgacagtaatatgtgtatgtactacaatgatcatcttctgttgccagtctagcgcatgttatgcttcttgatgttatgacttcacatcaatctatccacccatctactgttagtcatatgccatttttaccaccgtgaattttaccgttgcaagatcatggataagcatttgaagacccttgccccagtctacgtgggaacaaaattcgtcaagcttgatgctgaaatctaatgctccattctttgtggccaaactggcaatcaagacactgccatgtgtaatattgttcaagaagggaattgttgttgaccaattagttgggtttcaagatctcagaagtaaagaagattttctgacaatagcattggaacatattcttattctcaagacgaaagggataatcgatgagaagaagacagataacgacgatgacgatgaagaaagcgaggctaagaataggagggttaggtcctcaactgctcaagactctgactcaaactgaacctgagatgaggattgaggacgcaccgttttttgcactttggattttgtttgtttatttgtttgttctgtgtttgtgttgtattgtactgtaattgatttttgtaaccatgtatcggtaccagacaccacaacaataacatgtacaagagattctttagcatccattgtgtgtaaaagctagggtttgtggctgccttttatttcgtttttcctcagctgtcataggatggtacaccacaacaagaacatgtacaagtatgccatagcttgtctttcttgcttcttaagacattgttctgccttttggcacttatggcatatgactttttcacaaatggattacaaaacatttt

SEQ ID NO: 16115 - DNA, 998 bp, Zea Mays
atcaacttgacactcgaataaaagaatcaacaagtattgcaagtgctgaaagttgtgactgctcaagtccaactgctttatcgcacaagttctggtgaagatacttattctagaatcttcaaaagcatcaacgttagtgttcaagaattcaaagagtaactgaagatggaagactaagatgacatttatggagatctatttttgtaaatgggcttagtacctgtttctgtttggtaaaggaggtaaccggtcaatcctatttactttgtgacaccacatcaatcataaaggaggatcatggataagcatttgaagacccttgccccagtctacgtgggaacaaaattcgtcaagcttgatgctgaaatctaatgctccattctttgtggccaaactggcaatcaagacactgccatgtgtaatattgttcaagaagggaattgttgttgaccaattagttgggtttcaagatctcagaagtaaagaagattttctgacaatagcattggaacatattcttattctcaagacgaaagggataatcgatgagaagaagacagataacgacgatgacgatgaagaaagcgaggctaagaataggagggttaggtcctcaactgctcaagactctgactcaaactgaacctgagatgaggattgaggacgcaccgttttttgcactttggattttgtttgtttatttgtttgttctgtgtttgtgttgtattgtactgtaattgatttttgtaaccatgtatcggtaccagacaccacaacaataacatgtacaagagattctttagcatccattgtgtgtaaaagctagggtttgtggctgccttttatttcgtttttcctcagctgtcataggatggtacaccacaacaagaacatgtacaagtatgccatagcttgtctttcttgcttcttaagacattgttctgccttttggcacttatggcatatgactttttcacaaatggattacaaaacatttt

SEQ ID NO: 16116 - DNA, 1149 bp, Zea Mays
atcaacttgacactcgaataaaagaatcaacaagtattgcaagtgctgaaagttgtgactgctcaagtccaactgctttatcgcacaagttctggtgaagatacttattctagaatcttcaaaagcatcaacgttagtgttcaagaattcaaagagtaactgaagatggaagactaagatgacatttatggagatctatttttgtaaatgggcttagtacctgtttctgtttggtaaaggaggtaaccggtcaatcctatttactttgtgacaccacatcaatcataaaggagttcggtgatgctgttcataatcatgtgccttcatattgaggaagcatgcaacctgatacaaaagcatagatgatgggatcatggataagcatttgaagacccttgccccagtctacgtgggaacaaaattcgtcaagcttgatgctgaaatctgtatactaccacttggctataaactacatccttttaataatcatggagcctaattccatatgtaactaactgcagaatgctccattctttgtggccaaactggcaatcaagacactgccatgtgtaatattgttcaagaagggaattgttgttgaccaattagttgggtttcaagatctcagaagtaaagaagattttctgacaatagcattggaacatattcttattctcaagacgaaagggataatcgatgagaagaagacagataacgacgatgacgatgaagaaagcgaggctaagaataggagggttaggtcctcaactgctcaagactctgactcaaactgaacctgagatgaggattgaggacgcaccgttttttgcactttggattttgtttgtttatttgtttgttctgtgtttgtgttgtattgtactgtaattgatttttgtaaccatgtatcggtaccagacaccacaacaataacatgtacaagagattctttagcatccattgtgtgtaaaagctagggtttgtggctgccttttatttcgtttttcctcagctgtcataggatggtacaccacaacaagaacatgtacaagtatgccatagcttgtctttcttgcttcttaagacattgttctgccttttggcacttatggcatatgactttttcacaaatggattacaaaacatttt

SEQ ID NO: 16117 - DNA, 4938 bp, Zea Mays
ctcaccgcctccccagcccgcagtctctcctcaacctccctgcctcctcataaatctccttccttccctcaatcgcacgccaggaatctcactcgaaaccctagcgcagccgaaccccactgtcgtcttcttaatcgccatcgtcttcgtcgtgttcctcccagggtcgggcatcatcgagaggcccaagctgacgctcctctcgaaccgcgtgggagagggacgcgtcagaggcaggattgaggacgacagccacgacgagcgatctgtggactatgggagcgtgccatgagatgtacccattggcttttacgccgcctgtaccaccggaggaatcgccagctgtgggctcacccacatggtcgtcacgacgctcggcctcgccaaatgcaacatgcagatatgcatggggtggtgagactcatcacagtgttgggaaaataattgacatcgagagtgatggcctgctcaccattgatattcctaattgggcaacaccatggcaggcagatccatcagacatggaaaagattgagaactctaatgtgagcaattggattagagtcaaagcgatagttccttcacccaaatatggatgggagaatgtgactcgtaatagtattgtgatagttcatagtctataggatgagaaaatgttatgtaattctgaccagcaggtgagggtgcccttgctttcttcgatggactcctcatgttattctgtaaatctcagctttgttattagcactaaatcagatgtttctttcgctacttggagtcgtgaattggtctagcaggtaagcatccaaggaatatttttagttcaactttcagcaaacaatacaatcgttacctatccacttaccaaatggtttactctgcacgtgttattatcttggttcaatcctacgattaggtttggaattttggactgcttggtaaatcctaaattacacttttttgtaaatatgtatcttgatcaatatggattcttgcgacagttgatatccaacgataatagtttaggtgcatgtttaaattaatagaacaaataatataatgaaattgttttgctggatttgcttctcatggttttactctgcaagtttaacctgcaaattttcagtaattttctgtaccttctcgctggggtggagcggagatcggatctgccaggagctgattccttctctcgcaggtgagggtgcccttgctttcttcgatggactcctcatgttattctataaatctcagctttgttattagcactaaatcagatgtttctttcgctacttggagtcatgaattggtctagcaggtaagcatccaaggaatatttttagttcaactttcagcaaacaatataatcgttacctatccacttaccaaatgttttactctgcacgtgttattatcttggttcaatgctacgattaggtttggaattttggactgcttggtaaatcctaaattacaccttttttgtaaatatgtatcttgatcaatatggattcttgcgacagttgatatccaacgataatagtttaggtgcatgtttaaatttacagaacaaataatataatgaaattgttttgctggatttgcttctcgtggttttactctgcaggtttaacatgcaaattttcagtaattttttagtgcccttctgattccttttttacaatgatgtggcaggaacttgatcatgttgtgcctctgatcagagctttggctcttcttaattctcatacttcttctacctcaagttggtaggctcaagactcttgattcactaaagaatataggtgtaaacccctatcctcataagttcctggttagttttgagcctagaggaatatgaatgctggctacttactgataatgttttcttttgtgtgcaaacatgtcctctgatgcttagggttttcacaagggtaagcatgcttatgtcttcttgtttctatcttaatgaatttatttattggttaccctgtgctgattagcacttcacttcagtttagatatttatatattgtggcatttttctaggacttcggttaacatgtttagacattgttcttgtgtttcctagtgggggtgcttagatccagttgagatctatgtccgtgtattggtcgttatttgttttctctaattactcggtggctctgcataatgctgtaggatttaaaattttcaaagtatgctctctgctttaaacatgtaaaaatacactcatgttttatccacaaatttgtaccagttttgtttgattacttacttcgcttatcttgtcatgcttgtgcttgcttggcctgtgatcgcgttgttgtatattagaataatgcaaaggagatgctatgctataaactttgcctatcaatgtattcattcacaaactcgccatcattgcatacatatttggtttggagaaatcgagtgagatcctcaatccagctctaacaattctccttttattcagtcgatgcactggtcaacagtagcttggcgaaattgggctatgagtatgttattatagttctagatcatgatccatagctgaaaggtttttcatatcttctttcatatgattgttgggcaaagtctgcctgggactaccaggttagaagatcaagtttgcctatagatgcactattctaaccactaaccaccccaataattttcagcgttaatatcagtgcaagaaaaaatactctacttttattttcctcatacaggatgactagactacattttaggattgaaggtctttcactattgataaatttgcatttttattgcacagcgaaactttgttgcaaatagataaaaaccttcccatcttgcaaaagggttgaagcttggcctctacaatgacgcggggacacaaacctgcagccaaaaaatggcagtatcacttgatcatgaagaccaaatgtgaaaattttcatcttgggctaaaaaatgctagtatcacttgatcacaaagagcaagatgtggaaaaaaacatcatgggtaaatctatttatgtttatttcctgacaactgtgacaagtcaacagtgacaaaagtatctgatcgtctcttgttctaagttcctgtggagattgaagttgatcaacttgacactcgaataaaagaatcaacaagtattgcaagtgctgaaagttgtgactgctcaagtccaactgctttatcgcacaagttctggtgaagatacttattctagaatcttcaaaagcatcaacgttagtgttcaagaattcaaagagtaactgaagatggaagactaagatgacatttatggagatctatttttgtaaatgggcttagtacctgtttctgtttggtaaaggaggtaaccggtcaatcctatttactttgtgacaccacatcaatcataaaggaggtaaccgattttcttagactggcattcatatagccagcctaccacacaatccccatcctccacttcaacaaccaatttctaaatggatccatcaaccaatttctaaatcgatgatttttgattgtttgattttggtgtagactctcgatttaaacaatttcaagtgcctgtagaatgtagtttggatgtgaactgaagtagtgatagttgctactgacctgccttcataatttttgcaaatggtctgggatagttcggtgatgctgttcataatcatgtgccttcatattgaggaagcatgcaacctgatacaaaagcatagatgatgggtaagagtgtttgtgcttatgctcaaatgttagatatgcttttttcaaatatcgacagccatatggacacatatgttaatggctgccaaaaaaactttaaagtccacatgttaactataagtttagacatccgtggtaggacatttatcattttagatagctacaaacgtaacttaactttcaactacctatgtaccagacccatcacatgtctatgttatcattttattcagatcgttcatgatttatagttaacatgttgtcgtggctcaacattccatctggtccagttatggaaggtccatttgattcatgtgtgctcctagattatcatttgcacctgacagtaatatgtgtatgtactacaatgatcatcttctgttgccagtctagcgcatgttatgcttcttgatgttatgacttcacatcaatctatccacccatctactgttagtcatatgccatttttaccaccgtgaattttaccgttgcaagatcatggataagcatttgaagacccttgccccagtctacgtgggaacaaaattcgtcaagcttgatgctgaaatctaatgctccattctttgtggccaaactggcaatcaagacactgccatgtgtaatattgttcaagaagggaattgttgttgaccaattagttgggtttcaagatctcagaagtaaagaagattttctgacaatagcattggaacatattcttattctcaagacgaaagggataatcgatgagaagaagacagataacgacgatgacgatgaagaaagcgaggctaagaataggagggttaggtcctcaactgctcaagactctgactcaaactgaacctgagatgaggattgaggacgcaccgttttttgcactttggattttgtttgtttatttgtttgttctgtgtttgtgttgtattgtactgtaattgatttttgtaaccatgtatcggtaccagacaccacaacaataacatgtacaagagattctttagcatccattgtgtgtaaaagctagggtttgtggctgccttttatttcgtttttcctcagctgtcataggatggtacaccacaacaagaacatgtacaagtatgccatagcttgtctttcttgcttcttaagacattgttctgccttttggcacttatggcatatgactttttcacaaatggattacaaaacatttt

SEQ ID NO: 16118 - DNA, 5361 bp, Zea Mays
gttctgccatctaccccgcgatgtccgcgcctgcccccgcctcccccgtccgcaccgtgcacccgccttcgccgcccgttgccgagaaatctgcgccggtcaccgagaaatccgccctctcctagccgcccgcagatggaaaccctacgacccctccctcccctcaccgcctccccagcccgcagtctctcctcaacctccctgcctcctcataaatctccttccttccctcaatcgcacgccaggaatctcactcgaaaccctagcgcagccgaaccccactgtcgtcttcttaatcgccatcgtcttcgtcgtgttcctcccagggtcgggcatcatcgagaggcccaagctgacgctcctctcgaaccgcgtgggagagggacgcgtcagaggcaggattgaggacgacagccacgacgagcgatctgtggactatgggagcgtgccatgagatgtacccattggcttttacgccgcctgtaccaccggaggaatcgccagctgtgggctcacccacatggtcgtcacgacgctcggcctcgccaaatgcaacatgcagatatgcatggggtggtgagactcatcacagtgttgggaaaataattgacatcgagagtgatggcctgctcaccattgatattcctaattgggcaacaccatggcaggcagatccatcagacatggaaaagattgagaactctaatgtgagcaattggattagagtcaaagcgatagttccttcacccaaatatggatgggagaatgtgactcgtaatagtattgtgatagttcatagtctataggatgagaaaatgttatgtaattctgaccagcagtgtggtggttggtcaccaagtagtgggagcggagatcggatctgcaaggagctgattccttctctcgcaggtgagggtgcccttgctttcttcgatggactcctcatgttattctgtaaatctcagctttgttattagcactaaatcagatgtttctttcgctacttggagtcgtgaattggtctagcagtaattttctgtaccttctcgctggggtggagcggagatcggatctgccaggagctgattccttctctcgcaggaacttgatcatgttgtgcctctgatcagagctttggctcttcttaattctcatacttcttctacctcaagttggtaggctcaagactcttgattcactaaagaatataggtgtaaacccctatcctcataagttcctggttagttttgagcctagaggaatatgaatgctggctacttactgataatgttttcttttgtgtgcaaacatgtcctctgatgcttagggttttcacaagggtaagcatgcttatgtcttcttgtttctatcttaatgaatttatttattggttaccctgtgctgattagcacttcacttcagtttagatatttatatattgtggcatttttctaggacttcggttaacatgtttagacattgttcttgtgtttcctagtgggggtgcttagatccagttgagatctatgtccgtgtattggtcgttatttgttttctctaattactcggtggctctgcataatgctgtaggatttaaaattttcaaagtatgctctctgctttaaacatgtaaaaatacactcatgttttatccacaaatttgtaccagttttgtttgattacttacttcgcttatcttgtcatgcttgtgcttgcttggcctgtgatcgcgttgttgtatattagaataatgcaaaggagatgctatgctataaactttgcctatcaatgtattcattcacaaactcgccatcattgcatacatatttggtttggagaaatcgagtgagatcctcaatccagctctaacaattctccttttattcagtcgatgcactggtcaacagtagcttggcgaaattgggctatgagtatgttattatagttctagatcatgatccatagctgaaaggtttttcatatcttctttcatatgattgttgggcaaagtctgcctgggactaccaggttagaagatcaagtttgcctatagatgcactattctaaccactaaccaccccaataattttcagcgttaatatcagtgcaagaaaaaatactctacttttattttcctcatacaggatgactagactacattttaggattgaaggtctttcactattgataaatttgcatttttattgcacagcgaaactttgttgcaaatagataaaaaccttcccatcttgcaaaagggttgaagcttggcctctacaatgacgcggggacacaaacctgcagccaaaaaatggcagtatcacttgatcatgaagaccaaatgtgaaaattttcatcttgggctaaaaaatgctagtatcacttgatcacaaagagcaagatgtggaaaaaaacatcatgggtaaatctatttatgtttatttcctgacaactgtgacaagtcaacagtgacaaaagtatctgatcgtctcttgttctaagttcctggtattgttccaactcttcttcattctatttaatatctgatcatctatttattgtacgtactgattaaaaatatgatgactataataatgctggtaggagtgtgacagagatgtaaacaagaacaatgattccctgagttgtagttggcggggtcagagtcgatgaagaatctatcatcgttaacccatgtccgccagaatgtgacattgaatggagtgactctgtgctagatgacattgatcatgtagtctcaaacatctgagacgatatccagtctatctgagttgtgttgcctgatgtgatgtaggtaatccaacttgctgcagcaggcgaggagcgagtgcccctgctagaagagtgctagctctacgcatacggtcgcttgacaaacatgtgttgttaactgttgtatacaatgttactaattattgtcctttattctcttatgctacttctgtagttgatgctcacattgttctctcatttccgtctaaattttgtatgttatgccaaaagaccatatgttttttgtagttttttttaaaaaaaactagctctctgtttttatgattgtgtcgtcgcaacgccaagccctctgccgcctccactgttcgccctgccaacctaggtatgcgaatctccaatccatgtgaggattcagagctagactagatgtagcttccggcctatatgattagttgtacttgtattgtaatcgatcagtgcaggcaccgcagatgtgctgccgtatgtggggagcagacagtcaatttacgtctaggtctaaataaaatagtagtgattaaatctttgaatctgtagatcaaaccatctcaagtaattttagttttgttatgaaaatttttagctcagatgagataattgcattttgattattaagatttaacatacatctggttctatgaggaaggaaatcataagtggagattgaagttgatcaacttgacactcgaataaaagaatcaacaagtattgcaagtgctgaaagttgtgactgctcaagtccaactgctttatcgcacaagttctggtgaagatacttattctagaatcttcaaaagcatcaacgttagtgttcaagaattcaaagagtaactgaagatggaagactaagatgacatttatggagatctatttttgtaaatgggcttagtacctgtttctgtttggtaaaggaggtaaccggtcaatcctatttactttgtgacaccacatcaatcataaaggaggtaaccgattttcttagactggcattcatatagccagcctaccacacaatccccatcctccacttcaacaaccaatttctaaatggatccatcaaccaatttctaaatcgatgatttttgattgtttgattttggtgtagactctcgatttaaacaatttcaagtgcctgtagaatgtagtttggatgtgaactgaagtagtgatagttgctactgacctgccttcataatttttgcaaatggtctgggatagttcggtgatgctgttcataatcatgtgccttcatattgaggaagcatgcaacctgatacaaaagcatagatgatgggtaagagtgtttgtgcttatgctcaaatgttagatatgcttttttcaaatatcgacagccatatggacacatatgttaatggctgccaaaaaaactttaaagtccacatgttaactataagtttagacatccgtggtaggacatttatcattttagatagctacaaacgtaacttaactttcaactacctatgtaccagacccatcacatgtctatgttatcattttattcagatcgttcatgatttatagttaacatgttgtcgtggctcaacattccatctggtccagttatggaaggtccatttgattcatgtgtgctcctagattatcatttgcacctgacagtaatatgtgtatgtactacaatgatcatcttctgttgccagtctagcgcatgttatgcttcttgatgttatgacttcacatcaatctatccacccatctactgttagtcatatgccatttttaccaccgtgaattttaccgttgcaagatcatggataagcatttgaagacccttgccccagtctacgtgggaacaaaattcgtcaagcttgatgctgaaatctgtatactaccacttggctataaactacatccttttaataatcatggagcctaattccatatgtaactaactgcagaatgctccattctttgtggccaaactggcaatcaagacactgccatgtgtaatattgttcaagaagggaattgttgttgaccaattagttgggtttcaagatctcagaagtaaagaagattttctgacaatagcattggaacatattcttattctcaagacgaaagggataatcgatgagaagaagacagataacgacgatgacgatgaagaaagcgaggctaagaataggagggttaggtcctcaactgctcaagactctgactcaaactgaacctgagatgaggattgaggacgcaccgttttttgcactttggattttgtttgtttatttgtttgttctgtgtttgtgttgtattgtactgtaattgatttttgtaaccatgtatcggtaccagacaccacaacaataacatgtacaagagattctttagcatccattgtgtgtaaaagctagggtttgtggctgccttttatttcgtttttcctcagctgtcataggatggtacaccacaacaagaacatgtacaagtatgccatagcttgtctttcttgcttcttaagacattgttctgccttttggcacttatggcatatgactttttcacaaatggattacaaaacatttt

SEQ ID NO: 16119 - DNA, 4871 bp, Zea Mays
aaaaccttagtgtaggcgtccacagcaccaaccgtgcacggttctgccatctaccccgcgatgtccgcgcctgcccccgcctcccccgtccgcaccgtgcacccgccttcgccgcccgttgccgagaaatctgcgccggtcaccgagaaatccgccctctcctagccgcccgcagatggaaaccctacgacccctccctcccctcaccgcctccccagcccgcagtctctcctcaacctccctgcctcctcataaatctccttccttccctcaatcgcacgccaggaatctcactcgaaaccctagcgcagccgaaccccactgtcgtcttcttaatcgccatcgtcttcgtcgtgttcctcccagggtcgggcatcatcgagaggcccaagctgacgctcctctcgaaccgcgtgggagagggacgcgtcagaggcaggattgaggacgacagccacgacgagcgatctgtggactatgggagcgtgccatgagatgtacccattggcttttacgccgcctgtaccaccggaggaatcgccagctgtgggctcacccacatggtcgtcacgacgctcggcctcgccaaatgcaacatgcagatatgcatggggtggtgagactcatcacagtgttgggaaaataattgacatcgagagtgatggcctgctcaccattgatattcctaattgggcaacaccatggcaggcagatccatcagacatggaaaagattgagaactctaatgtgagcaattggattagagtcaaagcgatagttccttcacccaaatatggatgggagaatgtgactcgtaatagtattgtgatagttcatagtctataggatgagaaaatgttatgtaattctgaccagcaggtaaagattgatgtgtagctaattataaccattccgttacatttgaatatctgactaacgagaatttagagatattttccatggagctgcaaaatgcataagatctttttgtgggcattttgatctatattaatgttgtaaaaaggtattttgacaattcttttaactggaaacaatcttcattcaattggcgacctgtagtacaattatatacctacattgttattattttacataattttttttggactgatatggccttgaatgtcctttatattcactcttgactgttacaagtgtcatctagctagaaaacacatttgtagtgtggtggttggtcaccaagtagtgggaccaactagctgggtaataacagtggtcatcgaccttggttaccctatgccctatggggtgaggctaggactcagggtctaaaaattagcataacatctttttgtgggcattttgatctatattaatgttgtaaaaaggtgtgtttgacaattcttttaactggaaacaatcttcattcaattggcgacctgtagtacaactatatgcttacattgttattattttacataatctttttttggactgatatggccttgaatgtcctttatattcactcttgactgttacaagtgtcatctagctagaaaacacatttgtagtgtggtggttggtcaccaagtagtgggagcggagatcggatctgcaaggagctgattccttctctcgcagtaattttctgtaccttctcgctggggtggagcggagatcggatctgccaggagctgattccttctctcgcaggaacttgatcatgttgtgcctctgatcagagctttggctcttcttaattctcatacttcttctacctcaagttggtaggctcaagactcttgattcactaaagaatatagggttttcacaagggtaagcatgcttatgtcttcttgtttctatcttaatgaatttatttattggttaccctgtgctgattagcacttcacttcagtttagatatttatatattgtggcatttttctaggacttcggttaacatgtttagacattgttcttgtgtttcctagtgggggtgcttagatccagttgagatctatgtccgtgtattggtcgttatttgttttctctaattactcggtggctctgcataatgctgtaggatttaaaattttcaaagtatgctctctgctttaaacatgtaaaaatacactcatgttttatccacaaatttgtaccagttttgtttgattacttacttcgcttatcttgtcatgcttgtgcttgcttggcctgtgatcgcgttgttgtatattagaataatgcaaaggagatgctatgctataaactttgcctatcaatgtattcattcacaaactcgccatcattgcatacatatttggtttggagaaatcgagtgagatcctcaatccagctctaacaattctccttttattcagtcgatgcactggtcaacagtagcttggcgaaattgggctatgagtatgttattatagttctagatcatgatccatagctgaaaggtttttcatatcttctttcatatgattgttgggcaaagtctgcctgggactaccaggttagaagatcaagtttgcctatagatgcactattctaaccactaaccaccccaataattttcagcgttaatatcagtgcaagaaaaaatactctacttttattttcctcatacaggatgactagactacattttaggattgaaggtctttcactattgataaatttgcatttttattgcacagcgaaactttgttgcaaatagataaaaaccttcccatcttgcaaaagggttgaagcttggcctctacaatgacgcggggacacaaacctgcagccaaaaaatggcagtatcacttgatcatgaagaccaaatgtgaaaattttcatcttgggctaaaaaatgctagtatcacttgatcacaaagagcaagatgtggaaaaaaacatcatgggtaaatctatttatgtttatttcctgacaactgtgacaagtcaacagtgacaaaagtatctgatcgtctcttgttctaagttcctggagtgtgacagagatgtaaacaagaacaatgattccctgagttgtagttggcggggtcagagtcgatgaagaatctatcatcgttaacccatgtccgccagaatgtgacattgaatggagtgactctgtgctagatgacattgatcatgtagtctcaaacatctgagacgatatccagtctatctgagttgtgttgcctgatgtgatgtaggtaatccaacttgctgcagcaggcgaggagcgagtgcccctgctagaagagtgctagctctacgcatacggtcgcttgacaaacatgtgttgttaactgttgtatacaatgttactaattattgtcctttattctcttatgctacttctgtagttgatgctcacattgttctctcatttccgtctaaattttgtatgttatgccaaaagaccatatgttttttgtagttttttttaaaaaaaactagctctctgtttttatgattgtgtcgtcgcaacgccaagccctctgccgcctccactgttcgccctgccaacctaggaaatcataagtggagattgaagttgatcaacttgacactcgaataaaagaatcaacaagtattgcaagtgctgaaagttgtgactgctcaagtccaactgctttatcgcacaagttctggtgaagatacttattctagaatcttcaaaagcatcaacgttagtgttcaagaattcaaagagtaactgaagatggaagactaagatgacatttatggagatctatttttgtaaatgggcttagtacctgtttctgtttggtaaaggaggtaaccggtcaatcctatttactttgtgacaccacatcaatcataaaggaggtaaccgattttcttagactggcattcatatagccagcctaccacacaatccccatcctccacttcaacaaccaatttctaaatggatccatcaaccaatttctaaatcgatgatttttgattgtttgattttggtgtagactctcgatttaaacaatttcaagtgcctgtagaatgtagtttggatgtgaactgaagtagtgatagttgctactgacctgccttcataatttttgcaaatggtctgggatagttcggtgatgctgttcataatcatgtgccttcatattgaggaagcatgcaacctgatacaaaagcatagatgatgggatcatggataagcatttgaagacccttgccccagtctacgtgggaacaaaattcgtcaagcttgatgctgaaatctaatgctccattctttgtggccaaactggcaatcaagacactgccatgtgtaatattgttcaagaagggaattgttgttgaccaattagttgggtttcaagatctcagaagtaaagaagattttctgacaatagcattggaacatattcttattctcaagacgaaagggataatcgatgagaagaagacagataacgacgatgacgatgaagaaagcgaggctaagaataggagggttaggtcctcaactgctcaagactctgactcaaactgaacctgagatgaggattgaggacgcaccgttttttgcactttggattttgtttgtttatttgtttgttctgtgtttgtgttgtattgtactgtaattgatttttgtaaccatgtatcggtaccagacaccacaacaataacatgtacaagagattctttagcatccattgtgtgtaaaagctagggtttgtggctgccttttatttcgtttttcctcagctgtcataggatggtacaccacaacaagaacatgtacaagtatgccatagcttgtctttcttgcttcttaagacattgttctgccttttggcacttatggcatatgactttttcacaaatggattacaaaacatttt

SEQ ID NO: 16120 - DNA, 5176 bp, Zea Mays
gttctgtaaagcactccttgcgtaatgtctgctacttcttaaaaccttagtgtaggcgtccacagcaccaaccgtgcacggttctgccatctaccccgcgatgtccgcgcctgcccccgcctcccccgtccgcaccgtgcacccgccttcgccgcccgttgccgagaaatctgcgccggtcaccgagaaatccgccctctcctagccgcccgcagatggaaaccctacgacccctccctcccctcaccgcctccccagcccgcagtctctcctcaacctccctgcctcctcataaatctccttccttccctcaatcgcacgccaggaatctcactcgaaaccctagcgcagccgaaccccactgtcgtcttcttaatcgccatcgtcttcgtcgtgttcctcccagggtcgggcatcatcgagaggcccaagctgacgctcctctcgaaccgcgtgggagagggacgcgtcagaggcaggattgaggacgacagccacgacgagcgatctgtggactatgggagcgtgccatgagatgtacccattggcttttacgccgcctgtaccaccggaggaatcgccagctgtgggctcacccacatggtcgtcacgacgctcggcctcgccaaatgcaacatgcagatatgcatggggtggtgagactcatcacagtgttgggaaaataattgacatcgagagtgatggcctgctcaccattgatattcctaattgggcaacaccatggcaggcagatccatcagacatggaaaagattgagaactctaatgtgagcaattggattagagtcaaagcgatagttccttcacccaaatatggatgggagaatgtgactcgtaatagtattgtgatagttcatagtctataggatgagaaaatgttatgtaattctgaccagcaggtaaagattgatgtgtagctaattataaccattccgttacatttgaatatctgactaacgagaatttagagatattttccatggagctgcaaaatgcataagatctttttgtgggcattttgatctatattaatgttgtaaaaaggtattttgacaattcttttaactggaaacaatcttcattcaattggcgacctgtagtacaattatatacctacattgttattattttacataattttttttggactgatatggccttgaatgtcctttatattcactcttgactgttacaagtgtcatctagctagaaaacacatttgtagtgtggtggttggtcaccaagtagtgggaccaactagctgggtaataacagtggtcatcgaccttggttaccctatgccctatggggtgaggctaggactcagggtctaaaaattagcataacatctttttgtgggcattttgatctatattaatgttgtaaaaaggtgtgtttgacaattcttttaactggaaacaatcttcattcaattggcgacctgtagtacaactatatgcttacattgttattattttacataatctttttttggactgatatggccttgaatgtcctttatattcactcttgactgttacaagtgtcatctagctagaaaacacatttgtagtgtggtggttggtcaccaagtagtgggagcggagatcggatctgcaaggagctgattccttctctcgcaggtgagggtgcccttgctttcttcgatggactcctcatgttattctgtaaatctcagctttgttattagcactaaatcagatgtttctttcgctacttggagtcgtgaattggtctagcaggtaagcatccaaggaatatttttagttcaactttcagcaaacaatacaatcgttacctatccacttaccaaatggtttactctgcacgtgttattatcttggttcaatcctacgattaggtttggaattttggactgcttggtaaatcctaaattacacttttttgtaaatatgtatcttgatcaatatggattcttgcgacagttgatatccaacgataatagtttaggtgcatgtttaaattaatagaacaaataatataatgaaattgttttgctggatttgcttctcatggttttactctgcaagtttaacctgcaaattttcagtaattttctgtaccttctcgctggggtggagcggagatcggatctgccaggagctgattccttctctcgcaggaacttgatcatgttgtgcctctgatcagagctttggctcttcttaattctcatacttcttctacctcaagttggtaggctcaagactcttgattcactaaagaatatagggttttcacaagggtaagcatgcttatgtcttcttgtttctatcttaatgaatttatttattggttaccctgtgctgattagcacttcacttcagtttagatatttatatattgtggcatttttctaggacttcggttaacatgtttagacattgttcttgtgtttcctagtgggggtgcttagatccagttgagatctatgtccgtgtattggtcgttatttgttttctctaattactcggtggctctgcataatgctgtaggatttaaaattttcaaagtatgctctctgctttaaacatgtaaaaatacactcatgttttatccacaaatttgtaccagttttgtttgattacttacttcgcttatcttgtcatgcttgtgcttgcttggcctgtgatcgcgttgttgtatattagaataatgcaaaggagatgctatgctataaactttgcctatcaatgtattcattcacaaactcgccatcattgcatacatatttggtttggagaaatcgagtgagatcctcaatccagctctaacaattctccttttattcagtcgatgcactggtcaacagtagcttggcgaaattgggctatgagtatgttattatagttctagatcatgatccatagctgaaaggtttttcatatcttctttcatatgattgttgggcaaagtctgcctgggactaccagcgaaactttgttgcaaatagataaaaaccttcccatcttgcaaaagggttgaagcttggcctctacaatgacgcggggacacaaacctgcagccaaaaaatggcagtatcacttgatcatgaagaccaaatgtgaaaattttcatcttgggctaaaaaatgctagtatcacttgatcacaaagagcaagatgtggaaaaaaacatcatgggtaaatctatttatgtttatttcctgacaactgtgacaagtcaacagtgacaaaagtatctgatcgtctcttgttctaagttcctggagtgtgacagagatgtaaacaagaacaatgattccctgagttgtagttggcggggtcagagtcgatgaagaatctatcatcgttaacccatgtccgccagaatgtgacattgaatggagtgactctgtgctagatgacattgatcatgtagtctcaaacatctgagacgatatccagtctatctgagttgtgttgcctgatgtgatgtaggtaatccaacttgctgcagcaggcgaggagcgagtgcccctgctagaagagtgctagctctacgcatacggtcgcttgacaaacatgtgttgttaactgttgtatacaatgttactaattattgtcctttattctcttatgctacttctgtagttgatgctcacattgttctctcatttccgtctaaattttgtatgttatgccaaaagaccatatgttttttgtagttttttttaaaaaaaactagctctctgtttttatgattgtgtcgtcgcaacgccaagccctctgccgcctccactgttcgccctgccaacctaggaaatcataagtggagattgaagttgatcaacttgacactcgaataaaagaatcaacaagtattgcaagtgctgaaagttgtgactgctcaagtccaactgctttatcgcacaagttctggtgaagatacttattctagaatcttcaaaagcatcaacgttagtgttcaagaattcaaagagtaactgaagatggaagactaagatgacatttatggagatctatttttgtaaatgggcttagtacctgtttctgtttggtaaaggaggtaaccggtcaatcctatttactttgtgacaccacatcaatcataaaggaggtaaccgattttcttagactggcattcatatagccagcctaccacacaatccccatcctccacttcaacaaccaatttctaaatggatccatcaaccaatttctaaatcgatgatttttgattgtttgattttggtgtagactctcgatttaaacaatttcaagtgcctgtagaatgtagtttggatgtgaactgaagtagtgatagttgctactgacctgccttcataatttttgcaaatggtctgggatagttcggtgatgctgttcataatcatgtgccttcatattgaggaagcatgcaacctgatacaaaagcatagatgatgggatcatggataagcatttgaagacccttgccccagtctacgtgggaacaaaattcgtcaagcttgatgctgaaatctaatgctccattctttgtggccaaactggcaatcaagacactgccatgtgtaatattgttcaagaagggaattgttgttgaccaattagttgggtttcaagatctcagaagtaaagaagattttctgacaatagcattggaacatattcttattctcaagacgaaagggataatcgatgagaagaagacagataacgacgatgacgatgaagaaagcgaggctaagaataggagggttaggtcctcaactgctcaagactctgactcaaactgaacctgagatgaggattgaggacgcaccgttttttgcactttggattttgtttgtttatttgtttgttctgtgtttgtgttgtattgtactgtaattgatttttgtaaccatgtatcggtaccagacaccacaacaataacatgtacaagagattctttagcatccattgtgtgtaaaagctagggtttgtggctgccttttatttcgtttttcctcagctgtcataggatggtacaccacaacaagaacatgtacaagtatgccatagcttgtctttcttgcttcttaagacattgttctgccttttggcacttatggcatatgactttttcacaaatggattacaaaacatttt

SEQ ID NO: 16121 - DNA, 2323 bp, Zea Mays
cttcgccgcccgttgccgagaaatctgcgccggtcaccgagaaatccgccctctcctagccgcccgcagatggaaaccctacgacccctccctcccctcaccgcctccccagcccgcagtctctcctcaacctccctgcctcctcataaatctccttccttccctcaatcgcacgccaggaatctcactcgaaaccctagcgcagccgaaccccactgtcgtcttcttaatcgccatcgtcttcgtcgtgttcctcccagggtcgggcatcatcgagaggcccaagctgacgctcctctcgaaccgcgtgggagagggacgcgtcagaggcaggattgaggacgacagccacgacgagcgatctgtggactatgggagcgtgccatgagatgtacccattggcttttacgccgcctgtaccaccggaggaatcgccagctgtgggctcacccacatggtcgtcacgacgctcggcctcgccaaatgcaacatgcagatatgcatggggtggtgagactcatcacagtgttgggaaaataattgacatcgagagtgatggcctgctcaccattgatattcctaattgggcaacaccatggcaggcagatccatcagacatggaaaagattgagaactctaatgtgagcaattggattagagtcaaagcgatagttccttcacccaaatatggatgggagaatgtgactcgtaatagtattgtgatagttcatagtctataggatgagaaaatgttatgtaattctgaccagcagtgtggtggttggtcaccaagtagtgggagcggagatcggatctgcaaggagctgattccttctctcgcagtaattttctgtaccttctcgctggggtggagcggagatcggatctgccaggagctgattccttctctcgcaggaacttgatcatgttgtgcctctgatcagagctttggctcttcttaattctcatacttcttctacctcaagttggtaggctcaagactcttgattcactaaagaatataggtgtaaacccctatcctcataagttcctggttagttttgagcctagaggaatatgaatgctggctacttactgataatgttttcttttgtgtgcaaacatgtcctctgatgcttagggttttcacaaggcgaaactttgttgcaaatagataaaaaccttcccatcttgcaaaagggttgaagcttggcctctacaatgacgcggggacacaaacctgcagccaaaaaatggcagtatcacttgatcatgaagaccaaatgtgaaaattttcatcttgggctaaaaaatgctagtatcacttgatcacaaagagcaagatgtggaaaaaaacatcatgggtaaatctatttatgtttatttcctgacaactgtgacaagtcaacagtgacaaaagtatctgatcgtctcttgttctaagttcctggtattgttccaactcttcttcattctatttaatatctgatcatctatttattgtacgtactgattaaaaatatgatgactataataatgctggtaggagtgtgacagagatgtaaacaagaacaatgattccctgagttgtagttggcggggtcagagtcgatgaagaatctatcatcgttaacccatgtccgccagaatgtgacattgaatggagtgactctgtgctagatgacattgatcatgtagtctcaaacatctgagacgatatccagtctatctgagttgtgttgcctgatgtgatgtaggtaatccaacttgctgcagcaggcgaggagcgagtgcccctgctagaagagtgctagctctacgcatacggtcgcttgacaaacatgtgttgttaactgttgtatacaatgttactaattattgtcctttattctcttatgctacttctgtagttgatgctcacattgttctctcatttccgtctaaattttgtatgttatgccaaaagaccatatgttttttgtagttttttttaaaaaaaactagctctctgtttttatgattgtgtcgtcgcaacgccaagccctctgccgcctccactgttcgccctgccaacctaggtatgcgaatctccaatccatgtgaggattcagagctagactagatgtagcttccggcctatatgattagttgtacttgtattgtaatcgatcagtgcaggcaccgcagatgtgctgccgtatgtggggagcagacagtcaatttacgtctaggtctaaataaaatagtagtgattaaatctttgaatctgtagatcaaaccatctcaagtaattttagttttgttatgaaaatttttagctcag

SEQ ID NO: 16122 - DNA, 2721 bp, Zea Mays
gtccgcaccgtgcacccgccttcgccgcccgttgccgagaaatctgcgccggtcaccgagaaatccgccctctcctagccgcccgcagatggaaaccctacgacccctccctcccctcaccgcctccccagcccgcagtctctcctcaacctccctgcctcctcataaatctccttccttccctcaatcgcacgccaggaatctcactcgaaaccctagcgcagccgaaccccactgtcgtcttcttaatcgccatcgtcttcgtcgtgttcctcccagggtcgggcatcatcgagaggcccaagctgacgctcctctcgaaccgcgtgggagagggacgcgtcagaggcaggattgaggacgacagccacgacgagcgatctgtggactatgggagcgtgccatgagatgtacccattggcttttacgccgcctgtaccaccggaggaatcgccagctgtgggctcacccacatggtcgtcacgacgctcggcctcgccaaatgcaacatgcagatatgcatggggtggtgagactcatcacagtgttgggaaaataattgacatcgagagtgatggcctgctcaccattgatattcctaattgggcaacaccatggcaggcagatccatcagacatggaaaagattgagaactctaatgtgagcaattggattagagtcaaagcgatagttccttcacccaaatatggatgggagaatgtgactcgtaatagtattgtgatagttcatagtctataggatgagaaaatgttatgtaattctgaccagcaggtgagggtgcccttgctttcttcgatggactcctcatgttattctgtaaatctcagctttgttattagcactaaatcagatgtttctttcgctacttggagtcgtgaattggtctagcaggtaagcatccaaggaatatttttagttcaactttcagcaaacaatacaatcgttacctatccacttaccaaatggtttactctgcacgtgttattatcttggttcaatcctacgattaggtttggaattttggactgcttggtaaatcctaaattacacttttttgtaaatatgtatcttgatcaatatggattcttgcgacagttgatatccaacgataatagtttaggtgcatgtttaaattaatagaacaaataatataatgaaattgttttgctggatttgcttctcatggttttactctgcaagtttaacctgcaaattttcagtaattttctgtaccttctcgctggggtggagcggagatcggatctgccaggagctgattccttctctcgcaggaacttgatcatgttgtgcctctgatcagagctttggctcttcttaattctcatacttcttctacctcaagttggtaggctcaagactcttgattcactaaagaatataggtgtaaacccctatcctcataagttcctggttagttttgagcctagaggaatatgaatgctggctacttactgataatgttttcttttgtgtgcaaacatgtcctctgatgcttagggttttcacaaggcgaaactttgttgcaaatagataaaaaccttcccatcttgcaaaagggttgaagcttggcctctacaatgacgcggggacacaaacctgcagccaaaaaatggcagtatcacttgatcatgaagaccaaatgtgaaaattttcatcttgggctaaaaaatgctagtatcacttgatcacaaagagcaagatgtggaaaaaaacatcatgggtaaatctatttatgtttatttcctgacaactgtgacaagtcaacagtgacaaaagtatctgatcgtctcttgttctaagttcctggtattgttccaactcttcttcattctatttaatatctgatcatctatttattgtacgtactgattaaaaatatgatgactataataatgctggtaggagtgtgacagagatgtaaacaagaacaatgattccctgagttgtagttggcggggtcagagtcgatgaagaatctatcatcgttaacccatgtccgccagaatgtgacattgaatggagtgactctgtgctagatgacattgatcatgtagtctcaaacatctgagacgatatccagtctatctgagttgtgttgcctgatgtgatgtaggtaatccaacttgctgcagcaggcgaggagcgagtgcccctgctagaagagtgctagctctacgcatacggtcgcttgacaaacatgtgttgttaactgttgtatacaatgttactaattattgtcctttattctcttatgctacttctgtagttgatgctcacattgttctctcatttccgtctaaattttgtatgttatgccaaaagaccatatgttttttgtagttttttttaaaaaaaactagctctctgtttttatgattgtgtcgtcgcaacgccaagccctctgccgcctccactgttcgccctgccaacctaggtatgcgaatctccaatccatgtgaggattcagagctagactagatgtagcttccggcctatatgattagttgtacttgtattgtaatcgatcagtgcaggcaccgcagatgtgctgccgtatgtggggagcagacagtcaatttacgtctaggtctaaataaaatagtagtgattaaatctttgaatctgtagatcaaaccatctcaagtaattttagttttgttatgaaaatttttagctcag

SEQ ID NO: 16123 - DNA, 2796 bp, Zea Mays
cccccgtccgcaccgtgcacccgccttcgccgcccgttgccgagaaatctgcgccggtcaccgagaaatccgccctctcctagccgcccgcagatggaaaccctacgacccctccctcccctcaccgcctccccagcccgcagtctctcctcaacctccctgcctcctcataaatctccttccttccctcaatcgcacgccaggaatctcactcgaaaccctagcgcagccgaaccccactgtcgtcttcttaatcgccatcgtcttcgtcgtgttcctcccagggtcgggcatcatcgagaggcccaagctgacgctcctctcgaaccgcgtgggagagggacgcgtcagaggcaggattgaggacgacagccacgacgagcgatctgtggactatgggagcgtgccatgagatgtacccattggcttttacgccgcctgtaccaccggaggaatcgccagctgtgggctcacccacatggtcgtcacgacgctcggcctcgccaaatgcaacatgcagatatgcatggggtggtgagactcatcacagtgttgggaaaataattgacatcgagagtgatggcctgctcaccattgatattcctaattgggcaacaccatggcaggcagatccatcagacatggaaaagattgagaactctaatgtgagcaattggattagagtcaaagcgatagttccttcacccaaatatggatgggagaatgtgactcgtaatagtattgtgatagttcatagtctataggatgagaaaatgttatgtaattctgaccagcagtgtggtggttggtcaccaagtagtgggagcggagatcggatctgcaaggagctgattccttctctcgcagtaattttctgtaccttctcgctggggtggagcggagatcggatctgccaggagctgattccttctctcgcaggaacttgatcatgttgtgcctctgatcagagctttggctcttcttaattctcatacttcttctacctcaagttggtaggctcaagactcttgattcactaaagaatatagggttttcacaagggtaagcatgcttatgtcttcttgtttctatcttaatgaatttatttattggttaccctgtgctgattagcacttcacttcagtttagatatttatatattgtggcatttttctaggacttcggttaacatgtttagacattgttcttgtgtttcctagtgggggtgcttagatccagttgagatctatgtccgtgtattggtcgttatttgttttctctaattactcggtggctctgcataatgctgtaggatttaaaattttcaaagtatgctctctgctttaaacatgtaaaaatacactcatgttttatccacaaatttgtaccagttttgtttgattacttacttcgcttatcttgtcatgcttgtgcttgcttggcctgtgatcgcgttgttgtatattagaataatgcaaaggagatgctatgctataaactttgcctatcaatgtattcattcacaaactcgccatcattgcatacatatttggtttggagaaatcgagtgagatcctcaatccagctctaacaattctccttttattcagtcgatgcactggtcaacagtagcttggcgaaattgggctatgagtatgttattatagttctagatcatgatccatagctgaaaggtttttcatatcttctttcatatgattgttgggcaaagtctgcctgggactaccaggttagaagatcaagtttgcctatagatgcactattctaaccactaaccaccccaataattttcagcgttaatatcagtgcaagaaaaaatactctacttttattttcctcatacaggatgactagactacattttaggattgaaggtctttcactattgataaatttgcatttttattgcacagcgaaactttgttgcaaatagataaaaaccttcccatcttgcaaaagggttgaagcttggcctctacaatgacgcggggacacaaacctgcagccaaaaaatggcagtatcacttgatcatgaagaccaaatgtgaaaattttcatcttgggctaaaaaatgctagtatcacttgatcacaaagagcaagatgtggaaaaaaacatcatgggtaaatctatttatgtttatttcctgacaactgtgacaagtcaacagtgacaaaagtatctgatcgtctcttgttctaagttcctggtaatccaacttgctgcagcaggcgaggagcgagtgcccctgctagaagagtgctagctctacgcatacggtcgcttgacaaacatgtgttgttaactgttgtatacaatgttactaattattgtcctttattctcttatgctacttctgtagttgatgctcacattgttctctcatttccgtctaaattttgtatgttatgccaaaagaccatatgttttttgtagttttttttaaaaaaaactagctctctgtttttatgattgtgtcgtcgcaacgccaagccctctgccgcctccactgttcgccctgccaacctaggtatgcgaatctccaatccatgtgaggattcagagctagactagatgtagcttccggcctatatgattagttgtacttgtattgtaatcgatcagtgcaggcaccgcagatgtgctgccgtatgtggggagcagacagtcaatttacgtctaggtctaaataaaatagtagtgattaaatctttgaatctgtagatcaaaccatctcaagtaattttagttttgttatgaaaatttttagctcag

SEQ ID NO: 16124 - DNA, 3109 bp, Zea Mays
gcgatgtccgcgcctgcccccgcctcccccgtccgcaccgtgcacccgccttcgccgcccgttgccgagaaatctgcgccggtcaccgagaaatccgccctctcctagccgcccgcagatggaaaccctacgacccctccctcccctcaccgcctccccagcccgcagtctctcctcaacctccctgcctcctcataaatctccttccttccctcaatcgcacgccaggaatctcactcgaaaccctagcgcagccgaaccccactgtcgtcttcttaatcgccatcgtcttcgtcgtgttcctcccagggtcgggcatcatcgagaggcccaagctgacgctcctctcgaaccgcgtgggagagggacgcgtcagaggcaggattgaggacgacagccacgacgagcgatctgtggactatgggagcgtgccatgagatgtacccattggcttttacgccgcctgtaccaccggaggaatcgccagctgtgggctcacccacatggtcgtcacgacgctcggcctcgccaaatgcaacatgcagtgtggtggttggtcaccaagtagtgggagcggagatcggatctgcaaggagctgattccttctctcgcaggtgagggtgcccttgctttcttcgatggactcctcatgttattctgtaaatctcagctttgttattagcactaaatcagatgtttctttcgctacttggagtcgtgaattggtctagcaggtaagcatccaaggaatatttttagttcaactttcagcaaacaatacaatcgttacctatccacttaccaaatggtttactctgcacgtgttattatcttggttcaatcctacgattaggtttggaattttggactgcttggtaaatcctaaattacacttttttgtaaatatgtatcttgatcaatatggattcttgcgacagttgatatccaacgataatagtttaggtgcatgtttaaattaatagaacaaataatataatgaaattgttttgctggatttgcttctcatggttttactctgcaagtttaacctgcaaattttcagtaattttctgtaccttctcgctggggtggagcggagatcggatctgccaggagctgattccttctctcgcaggaacttgatcatgttgtgcctctgatcagagctttggctcttcttaattctcatacttcttctacctcaagttggtaggctcaagactcttgattcactaaagaatataggtgtaaacccctatcctcataagttcctggttagttttgagcctagaggaatatgaatgctggctacttactgataatgttttcttttgtgtgcaaacatgtcctctgatgcttagggttttcacaagggtaagcatgcttatgtcttcttgtttctatcttaatgaatttatttattggttaccctgtgctgattagcacttcacttcagtttagatatttatatattgtggcatttttctaggacttcggttaacatgtttagacattgttcttgtgtttcctagtgggggtgcttagatccagttgagatctatgtccgtgtattggtcgttatttgttttctctaattactcggtggctctgcataatgctgtaggatttaaaattttcaaagtatgctctctgctttaaacatgtaaaaatacactcatgttttatccacaaatttgtaccagttttgtttgattacttacttcgcttatcttgtcatgcttgtgcttgcttggcctgtgatcgcgttgttgtatattagaataatgcaaaggagatgctatgctataaactttgcctatcaatgtattcattcacaaactcgccatcattgcatacatatttggtttggagaaatcgagtgagatcctcaatccagctctaacaattctccttttattcagtcgatgcactggtcaacagtagcttggcgaaattgggctatgagtatgttattatagttctagatcatgatccatagctgaaaggtttttcatatcttctttcatatgattgttgggcaaagtctgcctgggactaccaggttagaagatcaagtttgcctatagatgcactattctaaccactaaccaccccaataattttcagcgttaatatcagtgcaagaaaaaatactctacttttattttcctcatacaggatgactagactacattttaggattgaaggtctttcactattgataaatttgcatttttattgcacagcgaaactttgttgcaaatagataaaaaccttcccatcttgcaaaagggttgaagcttggcctctacaatgacgcggggacacaaacctgcagccaaaaaatggcagtatcacttgatcatgaagaccaaatgtgaaaattttcatcttgggctaaaaaatgctagtatcacttgatcacaaagagcaagatgtggaaaaaaacatcatgggtaaatctatttatgtttatttcctgacaactgtgacaagtcaacagtgacaaaagtatctgatcgtctcttgttctaagttcctggtaatccaacttgctgcagcaggcgaggagcgagtgcccctgctagaagagtgctagctctacgcatacggtcgcttgacaaacatgtgttgttaactgttgtatacaatgttactaattattgtcctttattctcttatgctacttctgtagttgatgctcacattgttctctcatttccgtctaaattttgtatgttatgccaaaagaccatatgttttttgtagttttttttaaaaaaaactagctctctgtttttatgattgtgtcgtcgcaacgccaagccctctgccgcctccactgttcgccctgccaacctaggtatgcgaatctccaatccatgtgaggattcagagctagactagatgtagcttccggcctatatgattagttgtacttgtattgtaatcgatcagtgcaggcaccgcagatgtgctgccgtatgtggggagcagacagtcaatttacgtctaggtctaaataaaatagtagtgattaaatctttgaatctgtagatcaaaccatctcaagtaattttagttttgttatgaaaatttttagctcag

SEQ ID NO: 16125 - DNA, 2910 bp, Zea Mays
cttagtgtaggcgtccacagcaccaaccgtgcacggttctgccatctaccccgcgatgtccgcgcctgcccccgcctcccccgtccgcaccgtgcacccgccttcgccgcccgttgccgagaaatctgcgccggtcaccgagaaatccgccctctcctagccgcccgcagatggaaaccctacgacccctccctcccctcaccgcctccccagcccgcagtctctcctcaacctccctgcctcctcataaatctccttccttccctcaatcgcacgccaggaatctcactcgaaaccctagcgcagccgaaccccactgtcgtcttcttaatcgccatcgtcttcgtcgtgttcctcccagggtcgggcatcatcgagaggcccaagctgacgctcctctcgaaccgcgtgggagagggacgcgtcagaggcaggattgaggacgacagccacgacgagcgatctgtggactatgggagcgtgccatgagatgtacccattggcttttacgccgcctgtaccaccggaggaatcgccagctgtgggctcacccacatggtcgtcacgacgctcggcctcgccaaatgcaacatgcagatatgcatggggtggtgagactcatcacagtgttgggaaaataattgacatcgagagtgatggcctgctcaccattgatattcctaattgggcaacaccatggcaggcagatccatcagacatggaaaagattgagaactctaatgtgagcaattggattagagtcaaagcgatagttccttcacccaaatatggatgggagaatgtgactcgtaatagtattgtgatagttcatagtctataggatgagaaaatgttatgtaattctgaccagcaggtaaagattgatgtgtagctaattataaccattccgttacatttgaatatctgactaacgagaatttagagatattttccatggagctgcaaaatgcataagatctttttgtgggcattttgatctatattaatgttgtaaaaaggtattttgacaattcttttaactggaaacaatcttcattcaattggcgacctgtagtacaattatatacctacattgttattattttacataattttttttggactgatatggccttgaatgtcctttatattcactcttgactgttacaagtgtcatctagctagaaaacacatttgtagtgtggtggttggtcaccaagtagtgggaccaactagctgggtaataacagtggtcatcgaccttggttaccctatgccctatggggtgaggctaggactcagggtctaaaaattagcataacatctttttgtgggcattttgatctatattaatgttgtaaaaaggtgtgtttgacaattcttttaactggaaacaatcttcattcaattggcgacctgtagtacaactatatgcttacattgttattattttacataatctttttttggactgatatggccttgaatgtcctttatattcactcttgactgttacaagtgtcatctagctagaaaacacatttgtagtgtggtggttggtcaccaagtagtgggagcggagatcggatctgcaaggagctgattccttctctcgcaggaacttgatcatgttgtgcctctgatcagagctttggctcttcttaattctcatacttcttctacctcaagttggtaggctcaagactcttgattcactaaagaatatagggttttcacaaggcgaaactttgttgcaaatagataaaaaccttcccatcttgcaaaagggttgaagcttggcctctacaatgacgcggggacacaaacctgcagccaaaaaatggcagtatcacttgatcatgaagaccaaatgtgaaaattttcatcttgggctaaaaaatgctagtatcacttgatcacaaagagcaagatgtggaaaaaaacatcatgggtaaatctatttatgtttatttcctgacaactgtgacaagtcaacagtgacaaaagtatctgatcgtctcttgttctaagttcctggtattgttccaactcttcttcattctatttaatatctgatcatctatttattgtacgtactgattaaaaatatgatgactataataatgctggtaggagtgtgacagagatgtaaacaagaacaatgattccctgagttgtagttggcggggtcagagtcgatgaagaatctatcatcgttaacccatgtccgccagaatgtgacattgaatggagtgactctgtgctagatgacattgatcatgtagtctcaaacatctgagacgatatccagtctatctgagttgtgttgcctgatgtgatgtaggtaatccaacttgctgcagcaggcgaggagcgagtgcccctgctagaagagtgctagctctacgcatacggtcgcttgacaaacatgtgttgttaactgttgtatacaatgttactaattattgtcctttattctcttatgctacttctgtagttgatgctcacattgttctctcatttccgtctaaattttgtatgttatgccaaaagaccatatgttttttgtagttttttttaaaaaaaactagctctctgtttttatgattgtgtcgtcgcaacgccaagccctctgccgcctccactgttcgccctgccaacctaggtatgcgaatctccaatccatgtgaggattcagagctagactagatgtagcttccggcctatatgattagttgtacttgtattgtaatcgatcagtgcaggcaccgcagatgtgctgccgtatgtggggagcagacagtcaatttacgtctaggtctaaataaaatagtagtgattaaatctttgaatctgtagatcaaaccatctcaagtaattttagttttgttatgaaaatttttagctcag

SEQ ID NO: 16126 - DNA, 4609 bp, Zea Mays
cttagtgtaggcgtccacagcaccaaccgtgcacggttctgccatctaccccgcgatgtccgcgcctgcccccgcctcccccgtccgcaccgtgcacccgccttcgccgcccgttgccgagaaatctgcgccggtcaccgagaaatccgccctctcctagccgcccgcagatggaaaccctacgacccctccctcccctcaccgcctccccagcccgcagtctctcctcaacctccctgcctcctcataaatctccttccttccctcaatcgcacgccaggaatctcactcgaaaccctagcgcagccgaaccccactgtcgtcttcttaatcgccatcgtcttcgtcgtgttcctcccagggtcgggcatcatcgagaggcccaagctgacgctcctctcgaaccgcgtgggagagggacgcgtcagaggcaggattgaggacgacagccacgacgagcgatctgtggactatgggagcgtgccatgagatgtacccattggcttttacgccgcctgtaccaccggaggaatcgccagctgtgggctcacccacatggtcgtcacgacgctcggcctcgccaaatgcaacatgcagatatgcatggggtggtgagactcatcacagtgttgggaaaataattgacatcgagagtgatggcctgctcaccattgatattcctaattgggcaacaccatggcaggcagatccatcagacatggaaaagattgagaactctaatgtgagcaattggattagagtcaaagcgatagttccttcacccaaatatggatgggagaatgtgactcgtaatagtattgtgatagttcatagtctataggatgagaaaatgttatgtaattctgaccagcaggtaaagattgatgtgtagctaattataaccattccgttacatttgaatatctgactaacgagaatttagagatattttccatggagctgcaaaatgcataagatctttttgtgggcattttgatctatattaatgttgtaaaaaggtattttgacaattcttttaactggaaacaatcttcattcaattggcgacctgtagtacaattatatacctacattgttattattttacataattttttttggactgatatggccttgaatgtcctttatattcactcttgactgttacaagtgtcatctagctagaaaacacatttgtagtgtggtggttggtcaccaagtagtgggaccaactagctgggtaataacagtggtcatcgaccttggttaccctatgccctatggggtgaggctaggactcagggtctaaaaattagcataacatctttttgtgggcattttgatctatattaatgttgtaaaaaggtgtgtttgacaattcttttaactggaaacaatcttcattcaattggcgacctgtagtacaactatatgcttacattgttattattttacataatctttttttggactgatatggccttgaatgtcctttatattcactcttgactgttacaagtgtcatctagctagaaaacacatttgtagtgtggtggttggtcaccaagtagtgggagcggagatcggatctgcaaggagctgattccttctctcgcaggtgagggtgcccttgctttcttcgatggactcctcatgttattctgtaaatctcagctttgttattagcactaaatcagatgtttctttcgctacttggagtcgtgaattggtctagcaggtaagcatccaaggaatatttttagttcaactttcagcaaacaatacaatcgttacctatccacttaccaaatggtttactctgcacgtgttattatcttggttcaatcctacgattaggtttggaattttggactgcttggtaaatcctaaattacacttttttgtaaatatgtatcttgatcaatatggattcttgcgacagttgatatccaacgataatagtttaggtgcatgtttaaattaatagaacaaataatataatgaaattgttttgctggatttgcttctcatggttttactctgcaagtttaacctgcaaattttcagtaattttctgtaccttctcgctggggtggagcggagatcggatctgccaggagctgattccttctctcgcaggtgagggtgcccttgctttcttcgatggactcctcatgttattctataaatctcagctttgttattagcactaaatcagatgtttctttcgctacttggagtcatgaattggtctagcaggtaagcatccaaggaatatttttagttcaactttcagcaaacaatataatcgttacctatccacttaccaaatgttttactctgcacgtgttattatcttggttcaatgctacgattaggtttggaattttggactgcttggtaaatcctaaattacaccttttttgtaaatatgtatcttgatcaatatggattcttgcgacagttgatatccaacgataatagtttaggtgcatgtttaaatttacagaacaaataatataatgaaattgttttgctggatttgcttctcgtggttttactctgcaggtttaacatgcaaattttcagtaattttttagtgcccttctgattccttttttacaatgatgtggcaggaacttgatcatgttgtgcctctgatcagagctttggctcttcttaattctcatacttcttctacctcaagttggtaggctcaagactcttgattcactaaagaatataggtgtaaacccctatcctcataagttcctggttagttttgagcctagaggaatatgaatgctggctacttactgataatgttttcttttgtgtgcaaacatgtcctctgatgcttagggttttcacaagggtaagcatgcttatgtcttcttgtttctatcttaatgaatttatttattggttaccctgtgctgattagcacttcacttcagtttagatatttatatattgtggcatttttctaggacttcggttaacatgtttagacattgttcttgtgtttcctagtgggggtgcttagatccagttgagatctatgtccgtgtattggtcgttatttgttttctctaattactcggtggctctgcataatgctgtaggatttaaaattttcaaagtatgctctctgctttaaacatgtaaaaatacactcatgttttatccacaaatttgtaccagttttgtttgattacttacttcgcttatcttgtcatgcttgtgcttgcttggcctgtgatcgcgttgttgtatattagaataatgcaaaggagatgctatgctataaactttgcctatcaatgtattcattcacaaactcgccatcattgcatacatatttggtttggagaaatcgagtgagatcctcaatccagctctaacaattctccttttattcagtcgatgcactggtcaacagtagcttggcgaaattgggctatgagtatgttattatagttctagatcatgatccatagctgaaaggtttttcatatcttctttcatatgattgttgggcaaagtctgcctgggactaccaggttagaagatcaagtttgcctatagatgcactattctaaccactaaccaccccaataattttcagcgttaatatcagtgcaagaaaaaatactctacttttattttcctcatacaggatgactagactacattttaggattgaaggtctttcactattgataaatttgcatttttattgcacagcgaaactttgttgcaaatagataaaaaccttcccatcttgcaaaagggttgaagcttggcctctacaatgacgcggggacacaaacctgcagccaaaaaatggcagtatcacttgatcatgaagaccaaatgtgaaaattttcatcttgggctaaaaaatgctagtatcacttgatcacaaagagcaagatgtggaaaaaaacatcatgggtaaatctatttatgtttatttcctgacaactgtgacaagtcaacagtgacaaaagtatctgatcgtctcttgttctaagttcctggtaatccaacttgctgcagcaggcgaggagcgagtgcccctgctagaagagtgctagctctacgcatacggtcgcttgacaaacatgtgttgttaactgttgtatacaatgttactaattattgtcctttattctcttatgctacttctgtagttgatgctcacattgttctctcatttccgtctaaattttgtatgttatgccaaaagaccatatgttttttgtagttttttttaaaaaaaactagctctctgtttttatgattgtgtcgtcgcaacgccaagccctctgccgcctccactgttcgccctgccaacctaggtatgcgaatctccaatccatgtgaggattcagagctagactagatgtagcttccggcctatatgattagttgtacttgtattgtaatcgatcagtgcaggcaccgcagatgtgctgccgtatgtggggagcagacagtcaatttacgtctaggtctaaataaaatagtagtgattaaatctttgaatctgtagatcaaaccatctcaagtaattttagttttgttatgaaaatttttagctcag

SEQ ID NO: 16127 - DNA, 2675 bp, Zea Mays
cttagtgtaggcgtccacagcaccaaccgtgcacggttctgccatctaccccgcgatgtccgcgcctgcccccgcctcccccgtccgcaccgtgcacccgccttcgccgcccgttgccgagaaatctgcgccggtcaccgagaaatccgccctctcctagccgcccgcagatggaaaccctacgacccctccctcccctcaccgcctccccagcccgcagtctctcctcaacctccctgcctcctcataaatctccttccttccctcaatcgcacgccaggaatctcactcgaaaccctagcgcagccgaaccccactgtcgtcttcttaatcgccatcgtcttcgtcgtgttcctcccagggtcgggcatcatcgagaggcccaagctgacgctcctctcgaaccgcgtgggagagggacgcgtcagaggcaggattgaggacgacagccacgacgagcgatctgtggactatgggagcgtgccatgagatgtacccattggcttttacgccgcctgtaccaccggaggaatcgccagctgtgggctcacccacatggtcgtcacgacgctcggcctcgccaaatgcaacatgcagatatgcatggggtggtgagactcatcacagtgttgggaaaataattgacatcgagagtgatggcctgctcaccattgatattcctaattgggcaacaccatggcaggcagatccatcagacatggaaaagattgagaactctaatgtgagcaattggattagagtcaaagcgatagttccttcacccaaatatggatgggagaatgtgactcgtaatagtattgtgatagttcatagtctataggatgagaaaatgttatgtaattctgaccagcaggtaaagattgatgtgtagctaattataaccattccgttacatttgaatatctgactaacgagaatttagagatattttccatggagctgcaaaatgcataagatctttttgtgggcattttgatctatattaatgttgtaaaaaggtattttgacaattcttttaactggaaacaatcttcattcaattggcgacctgtagtacaattatatacctacattgttattattttacataattttttttggactgatatggccttgaatgtcctttatattcactcttgactgttacaagtgtcatctagctagaaaacacatttgtagtgtggtggttggtcaccaagtagtgggaccaactagctgggtaataacagtggtcatcgaccttggttaccctatgccctatggggtgaggctaggactcagggtctaaaaattagcataacatctttttgtgggcattttgatctatattaatgttgtaaaaaggtgtgtttgacaattcttttaactggaaacaatcttcattcaattggcgacctgtagtacaactatatgcttacattgttattattttacataatctttttttggactgatatggccttgaatgtcctttatattcactcttgactgttacaagtgtcatctagctagaaaacacatttgtagtgtggtggttggtcaccaagtagtgggagcggagatcggatctgcaaggagctgattccttctctcgcagtaattttctgtaccttctcgctggggtggagcggagatcggatctgccaggagctgattccttctctcgcaggaacttgatcatgttgtgcctctgatcagagctttggctcttcttaattctcatacttcttctacctcaagttggtaggctcaagactcttgattcactaaagaatatagggttttcacaaggcgaaactttgttgcaaatagataaaaaccttcccatcttgcaaaagggttgaagcttggcctctacaatgacgcggggacacaaacctgcagccaaaaaatggcagtatcacttgatcatgaagaccaaatgtgaaaattttcatcttgggctaaaaaatgctagtatcacttgatcacaaagagcaagatgtggaaaaaaacatcatgggtaaatctatttatgtttatttcctgacaactgtgacaagtcaacagtgacaaaagtatctgatcgtctcttgttctaagttcctggtaatccaacttgctgcagcaggcgaggagcgagtgcccctgctagaagagtgctagctctacgcatacggtcgcttgacaaacatgtgttgttaactgttgtatacaatgttactaattattgtcctttattctcttatgctacttctgtagttgatgctcacattgttctctcatttccgtctaaattttgtatgttatgccaaaagaccatatgttttttgtagttttttttaaaaaaaactagctctctgtttttatgattgtgtcgtcgcaacgccaagccctctgccgcctccactgttcgccctgccaacctaggtatgcgaatctccaatccatgtgaggattcagagctagactagatgtagcttccggcctatatgattagttgtacttgtattgtaatcgatcagtgcaggcaccgcagatgtgctgccgtatgtggggagcagacagtcaatttacgtctaggtctaaataaaatagtagtgattaaatctttgaatctgtagatcaaaccatctcaagtaattttagttttgttatgaaaatttttagctcag

SEQ ID NO: 16128 - DNA, 3335 bp, Zea Mays
cttagtgtaggcgtccacagcaccaaccgtgcacggttctgccatctaccccgcgatgtccgcgcctgcccccgcctcccccgtccgcaccgtgcacccgccttcgccgcccgttgccgagaaatctgcgccggtcaccgagaaatccgccctctcctagccgcccgcagatggaaaccctacgacccctccctcccctcaccgcctccccagcccgcagtctctcctcaacctccctgcctcctcataaatctccttccttccctcaatcgcacgccaggaatctcactcgaaaccctagcgcagccgaaccccactgtcgtcttcttaatcgccatcgtcttcgtcgtgttcctcccagggtcgggcatcatcgagaggcccaagctgacgctcctctcgaaccgcgtgggagagggacgcgtcagaggcaggattgaggacgacagccacgacgagcgatctgtggactatgggagcgtgccatgagatgtacccattggcttttacgccgcctgtaccaccggaggaatcgccagctgtgggctcacccacatggtcgtcacgacgctcggcctcgccaaatgcaacatgcagatatgcatggggtggtgagactcatcacagtgttgggaaaataattgacatcgagagtgatggcctgctcaccattgatattcctaattgggcaacaccatggcaggcagatccatcagacatggaaaagattgagaactctaatgtgagcaattggattagagtcaaagcgatagttccttcacccaaatatggatgggagaatgtgactcgtaatagtattgtgatagttcatagtctataggatgagaaaatgttatgtaattctgaccagcaggtaaagattgatgtgtagctaattataaccattccgttacatttgaatatctgactaacgagaatttagagatattttccatggagctgcaaaatgcataagatctttttgtgggcattttgatctatattaatgttgtaaaaaggtattttgacaattcttttaactggaaacaatcttcattcaattggcgacctgtagtacaattatatacctacattgttattattttacataattttttttggactgatatggccttgaatgtcctttatattcactcttgactgttacaagtgtcatctagctagaaaacacatttgtagtgtggtggttggtcaccaagtagtgggaccaactagctgggtaataacagtggtcatcgaccttggttaccctatgccctatggggtgaggctaggactcagggtctaaaaattagcataacatctttttgtgggcattttgatctatattaatgttgtaaaaaggtgtgtttgacaattcttttaactggaaacaatcttcattcaattggcgacctgtagtacaactatatgcttacattgttattattttacataatctttttttggactgatatggccttgaatgtcctttatattcactcttgactgttacaagtgtcatctagctagaaaacacatttgtagtgtggtggttggtcaccaagtagtgggagcggagatcggatctgcaaggagctgattccttctctcgcaggtgagggtgcccttgctttcttcgatggactcctcatgttattctgtaaatctcagctttgttattagcactaaatcagatgtttctttcgctacttggagtcgtgaattggtctagcaggtaagcatccaaggaatatttttagttcaactttcagcaaacaatacaatcgttacctatccacttaccaaatggtttactctgcacgtgttattatcttggttcaatcctacgattaggtttggaattttggactgcttggtaaatcctaaattacacttttttgtaaatatgtatcttgatcaatatggattcttgcgacagttgatatccaacgataatagtttaggtgcatgtttaaattaatagaacaaataatataatgaaattgttttgctggatttgcttctcatggttttactctgcaagtttaacctgcaaattttcagtaattttctgtaccttctcgctggggtggagcggagatcggatctgccaggagctgattccttctctcgcaggaacttgatcatgttgtgcctctgatcagagctttggctcttcttaattctcatacttcttctacctcaagttggtaggctcaagactcttgattcactaaagaatatagggttttcacaaggcgaaactttgttgcaaatagataaaaaccttcccatcttgcaaaagggttgaagcttggcctctacaatgacgcggggacacaaacctgcagccaaaaaatggcagtatcacttgatcatgaagaccaaatgtgaaaattttcatcttgggctaaaaaatgctagtatcacttgatcacaaagagcaagatgtggaaaaaaacatcatgggtaaatctatttatgtttatttcctgacaactgtgacaagtcaacagtgacaaaagtatctgatcgtctcttgttctaagttcctggagtgtgacagagatgtaaacaagaacaatgattccctgagttgtagttggcggggtcagagtcgatgaagaatctatcatcgttaacccatgtccgccagaatgtgacattgaatggagtgactctgtgctagatgacattgatcatgtagtctcaaacatctgagacgatatccagtctatctgagttgtgttgcctgatgtgatgtaggtaatccaacttgctgcagcaggcgaggagcgagtgcccctgctagaagagtgctagctctacgcatacggtcgcttgacaaacatgtgttgttaactgttgtatacaatgttactaattattgtcctttattctcttatgctacttctgtagttgatgctcacattgttctctcatttccgtctaaattttgtatgttatgccaaaagaccatatgttttttgtagttttttttaaaaaaaactagctctctgtttttatgattgtgtcgtcgcaacgccaagccctctgccgcctccactgttcgccctgccaacctaggtatgcgaatctccaatccatgtgaggattcagagctagactagatgtagcttccggcctatatgattagttgtacttgtattgtaatcgatcagtgcaggcaccgcagatgtgctgccgtatgtggggagcagacagtcaatttacgtctaggtctaaataaaatagtagtgattaaatctttgaatctgtagatcaaaccatctcaagtaattttagttttgttatgaaaatttttagctcag

SEQ ID NO: 16129 - DNA, 3140 bp, Zea Mays
ctacttcttaaaaccttagtgtaggcgtccacagcaccaaccgtgcacggttctgccatctaccccgcgatgtccgcgcctgcccccgcctcccccgtccgcaccgtgcacccgccttcgccgcccgttgccgagaaatctgcgccggtcaccgagaaatccgccctctcctagccgcccgcagatggaaaccctacgacccctccctcccctcaccgcctccccagcccgcagtctctcctcaacctccctgcctcctcataaatctccttccttccctcaatcgcacgccaggaatctcactcgaaaccctagcgcagccgaaccccactgtcgtcttcttaatcgccatcgtcttcgtcgtgttcctcccagggtcgggcatcatcgagaggcccaagctgacgctcctctcgaaccgcgtgggagagggacgcgtcagaggcaggattgaggacgacagccacgacgagcgatctgtggactatgggagcgtgccatgagatgtacccattggcttttacgccgcctgtaccaccggaggaatcgccagctgtgggctcacccacatggtcgtcacgacgctcggcctcgccaaatgcaacatgcagatatgcatggggtggtgagactcatcacagtgttgggaaaataattgacatcgagagtgatggcctgctcaccattgatattcctaattgggcaacaccatggcaggcagatccatcagacatggaaaagattgagaactctaatgtgagcaattggattagagtcaaagcgatagttccttcacccaaatatggatgggagaatgtgactcgtaatagtattgtgatagttcatagtctataggatgagaaaatgttatgtaattctgaccagcaggtaaagattgatgtgtagctaattataaccattccgttacatttgaatatctgactaacgagaatttagagatattttccatggagctgcaaaatgcataagatctttttgtgggcattttgatctatattaatgttgtaaaaaggtattttgacaattcttttaactggaaacaatcttcattcaattggcgacctgtagtacaattatatacctacattgttattattttacataattttttttggactgatatggccttgaatgtcctttatattcactcttgactgttacaagtgtcatctagctagaaaacacatttgtagtgtggtggttggtcaccaagtagtgggaccaactagctgggtaataacagtggtcatcgaccttggttaccctatgccctatggggtgaggctaggactcagggtctaaaaattagcataacatctttttgtgggcattttgatctatattaatgttgtaaaaaggtgtgtttgacaattcttttaactggaaacaatcttcattcaattggcgacctgtagtacaactatatgcttacattgttattattttacataatctttttttggactgatatggccttgaatgtcctttatattcactcttgactgttacaagtgtcatctagctagaaaacacatttgtagtgtggtggttggtcaccaagtagtgggagcggagatcggatctgcaaggagctgattccttctctcgcaggtgagggtgcccttgctttcttcgatggactcctcatgttattctgtaaatctcagctttgttattagcactaaatcagatgtttctttcgctacttggagtcgtgaattggtctagcaggtaagcatccaaggaatatttttagttcaactttcagcaaacaatacaatcgttacctatccacttaccaaatggtttactctgcacgtgttattatcttggttcaatcctacgattaggtttggaattttggactgcttggtaaatcctaaattacacttttttgtaaatatgtatcttgatcaatatggattcttgcgacagttgatatccaacgataatagtttaggtgcatgtttaaattaatagaacaaataatataatgaaattgttttgctggatttgcttctcatggttttactctgcaagtttaacctgcaaattttcagtaattttctgtaccttctcgctggggtggagcggagatcggatctgccaggagctgattccttctctcgcaggaacttgatcatgttgtgcctctgatcagagctttggctcttcttaattctcatacttcttctacctcaagttggtaggctcaagactcttgattcactaaagaatatagagggttttcacaaggcgaaactttgttgcaaatagataaaaaccttcccatcttgcaaaagggttgaagcttggcctctacaatgacgcggggacacaaacctgcagccaaaaaatggcagtatcacttgatcatgaagaccaaatgtgaaaattttcatcttgggctaaaaaatgctagtatcacttgatcacaaagagcaagatgtggaaaaaaacatcatgggtaaatctatttatgtttatttcctgacaactgtgacaagtcaacagtgacaaaagtatctgatcgtctcttgttctaagttcctggtaatccaacttgctgcagcaggcgaggagcgagtgcccctgctagaagagtgctagctctacgcatacggtcgcttgacaaacatgtgttgttaactgttgtatacaatgttactaattattgtcctttattctcttatgctacttctgtagttgatgctcacattgttctctcatttccgtctaaattttgtatgttatgccaaaagaccatatgttttttgtagttttttttaaaaaaaactagctctctgtttttatgattgtgtcgtcgcaacgccaagccctctgccgcctccactgttcgccctgccaacctaggtatgcgaatctccaatccatgtgaggattcagagctagactagatgtagcttccggcctatatgattagttgtacttgtattgtaatcgatcagtgcaggcaccgcagatgtgctgccgtatgtggggagcagacagtcaatttacgtctaggtctaaataaaatagtagtgattaaatctttgaatctgtagatcaaaccatctcaagtaattttagttttgttatgaaaatttttagctcag

SEQ ID NO: 16130 - DNA, 4041 bp, Zea Mays
gttctgtaaagcactccttgcgtaatgtctgctacttcttaaaaccttagtgtaggcgtccacagcaccaaccgtgcacggttctgccatctaccccgcgatgtccgcgcctgcccccgcctcccccgtccgcaccgtgcacccgccttcgccgcccgttgccgagaaatctgcgccggtcaccgagaaatccgccctctcctagccgcccgcagatggaaaccctacgacccctccctcccctcaccgcctccccagcccgcagtctctcctcaacctccctgcctcctcataaatctccttccttccctcaatcgcacgccaggaatctcactcgaaaccctagcgcagccgaaccccactgtcgtcttcttaatcgccatcgtcttcgtcgtgttcctcccagggtcgggcatcatcgagaggcccaagctgacgctcctctcgaaccgcgtgggagagggacgcgtcagaggcaggattgaggacgacagccacgacgagcgatctgtggactatgggagcgtgccatgagatgtacccattggcttttacgccgcctgtaccaccggaggaatcgccagctgtgggctcacccacatggtcgtcacgacgctcggcctcgccaaatgcaacatgcagatatgcatggggtggtgagactcatcacagtgttgggaaaataattgacatcgagagtgatggcctgctcaccattgatattcctaattgggcaacaccatggcaggcagatccatcagacatggaaaagattgagaactctaatgtgagcaattggattagagtcaaagcgatagttccttcacccaaatatggatgggagaatgtgactcgtaatagtattgtgatagttcatagtctataggatgagaaaatgttatgtaattctgaccagcaggtaaagattgatgtgtagctaattataaccattccgttacatttgaatatctgactaacgagaatttagagatattttccatggagctgcaaaatgcataagatctttttgtgggcattttgatctatattaatgttgtaaaaaggtattttgacaattcttttaactggaaacaatcttcattcaattggcgacctgtagtacaattatatacctacattgttattattttacataattttttttggactgatatggccttgaatgtcctttatattcactcttgactgttacaagtgtcatctagctagaaaacacatttgtagtgtggtggttggtcaccaagtagtgggaccaactagctgggtaataacagtggtcatcgaccttggttaccctatgccctatggggtgaggctaggactcagggtctaaaaattagcataacatctttttgtgggcattttgatctatattaatgttgtaaaaaggtgtgtttgacaattcttttaactggaaacaatcttcattcaattggcgacctgtagtacaactatatgcttacattgttattattttacataatctttttttggactgatatggccttgaatgtcctttatattcactcttgactgttacaagtgtcatctagctagaaaacacatttgtagtgtggtggttggtcaccaagtagtgggagcggagatcggatctgcaaggagctgattccttctctcgcaggtgagggtgcccttgctttcttcgatggactcctcatgttattctgtaaatctcagctttgttattagcactaaatcagatgtttctttcgctacttggagtcgtgaattggtctagcaggtaagcatccaaggaatatttttagttcaactttcagcaaacaatacaatcgttacctatccacttaccaaatggtttactctgcacgtgttattatcttggttcaatcctacgattaggtttggaattttggactgcttggtaaatcctaaattacacttttttgtaaatatgtatcttgatcaatatggattcttgcgacagttgatatccaacgataatagtttaggtgcatgtttaaattaatagaacaaataatataatgaaattgttttgctggatttgcttctcatggttttactctgcaagtttaacctgcaaattttcagtaattttctgtaccttctcgctggggtggagcggagatcggatctgccaggagctgattccttctctcgcaggaacttgatcatgttgtgcctctgatcagagctttggctcttcttaattctcatacttcttctacctcaagttggtaggctcaagactcttgattcactaaagaatatagggttttcacaagggtaagcatgcttatgtcttcttgtttctatcttaatgaatttatttattggttaccctgtgctgattagcacttcacttcagtttagatatttatatattgtggcatttttctaggacttcggttaacatgtttagacattgttcttgtgtttcctagtgggggtgcttagatccagttgagatctatgtccgtgtattggtcgttatttgttttctctaattactcggtggctctgcataatgctgtaggatttaaaattttcaaagtatgctctctgctttaaacatgtaaaaatacactcatgttttatccacaaatttgtaccagttttgtttgattacttacttcgcttatcttgtcatgcttgtgcttgcttggcctgtgatcgcgttgttgtatattagaataatgcaaaggagatgctatgctataaactttgcctatcaatgtattcattcacaaactcgccatcattgcatacatatttggtttggagaaatcgagtgagatcctcaatccagctctaacaattctccttttattcagtcgatgcactggtcaacagtagcttggcgaaattgggctatgagtatgttattatagttctagatcatgatccatagctgaaaggtttttcatatcttctttcatatgattgttgggcaaagtctgcctgggactaccaggttagaagatcaagtttgcctatagatgcactattctaaccactaaccaccccaataattttcagcgttaatatcagtgcaagaaaaaatactctacttttattttcctcatacaggatgactagactacattttaggattgaaggtctttcactattgataaatttgcatttttattgcacagcgaaactttgttgcaaatagataaaaaccttcccatcttgcaaaagggttgaagcttggcctctacaatgacgcggggacacaaacctgcagccaaaaaatggcagtatcacttgatcatgaagaccaaatgtgaaaattttcatcttgggctaaaaaatgctagtatcacttgatcacaaagagcaagatgtggaaaaaaacatcatgggtaaatctatttatgtttatttcctgacaactgtgacaagtcaacagtgacaaaagtatctgatcgtctcttgttctaagttcctggtaatccaacttgctgcagcaggcgaggagcgagtgcccctgctagaagagtgctagctctacgcatacggtcgcttgacaaacatgtgttgttaactgttgtatacaatgttactaattattgtcctttattctcttatgctacttctgtagttgatgctcacattgttctctcatttccgtctaaattttgtatgttatgccaaaagaccatatgttttttgtagttttttttaaaaaaaactagctctctgtttttatgattgtgtcgtcgcaacgccaagccctctgccgcctccactgttcgccctgccaacctaggtatgcgaatctccaatccatgtgaggattcagagctagactagatgtagcttccggcctatatgattagttgtacttgtattgtaatcgatcagtgcaggcaccgcagatgtgctgccgtatgtggggagcagacagtcaatttacgtctaggtctaaataaaatagtagtgattaaatctttgaatctgtagatcaaaccatctcaagtaattttagttttgttatgaaaatttttagctcag

SEQ ID NO: 16131 - DNA, 2483 bp, Zea Mays
aaaagctttaggtacaaattccatggcagtcttgtcttgtgcatgtgtaaggttttgggtgactatacagtatacacgtttagaaaaaaatgttttctgggactaccatatagtttttatgctgtatggcggaagtgccgagtgttatagttggtgtgataaaatactctgcaaaaattgatgaaattgagcattaatgaagttgtctgttttgatgtagcatagaaagtaattgacaggattgcatatgatccacgctagtttattctgcgctttaagtgaatagggatcaaggatatcgtacacaacagttttgctttatgctggttcatttgtctacggacaatggactagttgctgcactgtttctgtgattcaccatgggaagcagtggagcagatacaccgtctaaggagcagcagccacctgctacctcaggtgctgcaataccacctgtttatccagattggtctagcttccaggcatatcccccaatcccaccacatggattcttcccctcacctgtggcatcaagtccacagggtcatcctttcatgtggggagctcaagctatgattccaccttatggaacaccgccaccatatgtcatgtacccccctggagtatatgcccacccatctatgcccccgggtgcacatccatttactccttatgccattacttctccaaatggcaatgctgatgctactgtaagggaactactgttgcagctggtaatactgatggcaagccctctgaaggcaaagataaaagtccaacaaagcgatccaaaggaagtttgggcagcttgaacatgcttactggaaagaatcccagtgaacatggtaagtcctcaggtgcatcgggtaatggagtcacttctcaaagtggcgaaagtggcagtgacagttcaagcgaagggagtgaaggaaattctcacaatgattcacatcacaaggaaagtggacaggaacacgatggggatgttcgaagttcccggaatggtgtatcacgtttgcaatctgagggaaaattgaaccaagctatggcaatcttgcccataccatcaagtggcccagcaactgatccaactacaaacctaaatattgggatggactattgggccaacacagcaagctctgctcctgcaattcatggcaaagcgacgtcaacaacagttccaggggctgtggtcccagcagagcagtggacacaggatgaacatgaactcaaaaagcaaagaagaaagcagtccaatagggagtctgcacgtagatctaggttacgtaaacaggctgaatgtgaggaattggctcaacgtgctgatgttttaaagcaggaaaatgcttcacttagagatgaagtaaaccgtatcagaaaagagtacgaggaacttctatcaaggaataactcactaaaggaaaaacttgaaggcaaacaacacaaaactgatgaggcaggacttaacaacaagctgcaacattctggtgatgacagccagaaaaaaggaaactaatgctatcatgcaatgcttgcctacattggtcctaactagattattgggaggtgcaattgtagtatgcacattaactccttactttattgcagttaattgttaccaggttgtgataatgttgatgccaaccttttgtgtgggtgtttcctgtttcagatctatcttggcttatcttttagaagccaagatgtgactgaagctataggctgtgacccaattcactatatctgttagaaatagtggataaagtcaaactttcaaatttgaagtgctgactaatattgttatgtatacctggcaaaagactggtttccttttaattcagtctggttgaacattttgctgggctttcactactgcctagtttatgtacattgttgttcatatcggttgttcctagttattttttgtaataattaacaaatagatgagggacactgtctcaacctctgcaccaatatatatatggacacacacacacacacacacctcttttttgcgtctattttctgttttacttcaaagtttgcaggtttgtttcagccctgtttgattgtgagccttggcgctggcggtattttttttaagtttaaatgatccacctgctgtaggtaagtttggttaaaagacattcctatttttctgtttagtgacactgatattagtaatccttttttttcatccatctatttaagtgtcagcagaatcgtttgttaaacttgctttcctgaacttgctcttgattctggtaagtttttgggctcctggcactttacttttatgatcttattttgatttgctttttacaggaaaatggttctggactatgtcttagatgggaagcatagttcattagtatgtctgccttacaggttcttaagcagggatcgtggaagaacctgtgttgggaggtggtagagaagatgtgccaatgattggtttttggtcaatgtcttctctggtgccg

SEQ ID NO: 16132 - DNA, 2675 bp, Zea Mays
agatgatccgacatttactgcagtttctatattcatagcaagtattcgtgccgtgagatcatttgtatgtggtttaggtcaaagctgtttgtttttaaaactaaaaagctttaggtacaaattccatggcagtcttgtcttgtgcatgtgtaaggttttgggtgactatacagtatacacgtttagaaaaaaatgttttctgggactaccatatagtttttatgctgtatggcggaagtgccgagtgttatagttggtgtgataaaatactctgcaaaaattgatgaaattgagcattaatgaagttgtctgttttgatgtagcatagaaagtaattgacaggattgcatatgatccacgctagtttattctgcgctttaagtgaatagggatcaaggatatcgtacacaacagttttgctttatgctggttcatttgtctacggacaatggactagttgctgcactgtttctgtgattcaccatgggaagcagtggagcagatacaccgtctaaggagcagcagccacctgctacctcaggtgctgcaataccacctgtttatccagattggtctagcttccaggcatatcccccaatcccaccacatggattcttcccctcacctgtggcatcaagtccacagggtcatcctttcatgtggggagctcaagctatgattccaccttatggaacaccgccaccatatgtcatgtacccccctggagtatatgcccacccatctatgcccccgggtgcacatccatttactccttatgccattacttctccaaatggcaatgctgatgctactggaactactgttgcagctggtaatactgatggcaagccctctgaaggcaaagataaaagtccaacaaagcgatccaaaggaagtttgggcagcttgaacatgcttactggaaagaatcccagtgaacatggtaagtcctcaggtgcatcgggtaatggagtcacttctcaaaggtatttttgctgtaaccttaaacaccttatattcttgtgtgcatccgtctttaagtatatcagtgaatgagttgctgtttctctttgtagtggcgaaagtggcagtgacagttcaagcgaagggagtgaaggaaattctcacaatgattcacatcacaaggaaagtggacaggaacacgatgggggtatatgttcgaagttcccggaatggtgtatcacgtttgcaatctgagggaaaattgaaccaagctatggcaatcttgcccataccatcaagtggcccagcaactgatccaactacaaacctaaatattgggatggactattgggccaacacagcaagctctgctcctgcaattcatggcaaagcgacgtcaacaacagttccaggggctgtggtcccagcagagcagtggacacaggatgaacatgaactcaaaaagcaaagaagaaagcagtccaatagggagtctgcacgtagatctaggttacgtaaacaggctgaatgtgaggaattggctcaacgtgctgatgttttaaagcaggaaaatgcttcacttagagatgaagtaaaccgtatcagaaaagagtacgaggaacttctatcaaggaataactcactaaaggaaaaacttgaaggcaaacaacacaaaactgatgaggcaggacttaacaacaagctgcaacattctggtgatgacagccagaaaaaaggaaactaatgctatcatgcaatgcttgcctacattggtcctaactagattattgggaggtgcaattgtagtatgcacattaactccttactttattgcagttaattgttaccaggttgtgataatgttgatgccaaccttttgtgtgggtgtttcctgtttcagatctatcttggcttatcttttagaagccaagatgtgactgaagctataggctgtgacccaattcactatatctgttagaaatagtggataaagtcaaactttcaaatttgaagtgctgactaatattgttatgtatacctggcaaaagactggtttccttttaattcagtctggttgaacattttgctgggctttcactactgcctagtttatgtacattgttgttcatatcggttgttcctagttattttttgtaataattaacaaatagatgagggacactgtctcaacctctgcaccaatatatatatggacacacacacacacacacacctcttttttgcgtctattttctgttttacttcaaagtttgcaggtttgtttcagccctgtttgattgtgagccttggcgctggcggtattttttttaagtttaaatgatccacctgctgtaggtaagtttggttaaaagacattcctatttttctgtttagtgacactgatattagtaatccttttttttcatccatctatttaagtgtcagcagaatcgtttgttaaacttgctttcctgaacttgctcttgattctggtaagtttttgggctcctggcactttacttttatgatcttattttgatttgctttttacaggaaaatggttctggactatgtcttagatgggaagcatagttcattagtatgtctgccttacaggttcttaagcagggatcgtggaagaacctgtgttgggaggtggtagagaagatgtgccaatgattggtttttggtcaatgtcttctctggtgccg

SEQ ID NO: 16133 - DNA, 2616 bp, Zea Mays
gttataactgacatgcttataatttcaaaagtgtttagtttggttaactgcagctcatgggagctggagggacctcattcagatgatccgacatttactgcagtttctatattcatagcaagtattcgtgccgtgagatcatttgtatgtggtttaggtcaaagctgtttgtttttaaaactaaaaagctttaggtacaaattccatggcagtcttgtcttgtgcatgtgtaaggttttgggtgactatacagtatacacgtttagaaaaaaatgttttctgggactaccatatagtttttatgctgtatggcggaagtgccgagtgttatagttggtgtgataaaatactctgcaaaaattgatgaaattgagcattaatgaagttgtctgttttgatgtagcatagaaagtaattgacaggattgcatatgatccacgctagtttattctgcgctttaagtgaatagggatcaaggatatcgtacacaacagttttgctttatgctggttcatttgtctacggacaatggactagttgctgcactgtttctgtgattcaccatgggaagcagtggagcagatacaccgtctaaggagcagcagccacctgctacctcaggtgctgcaataccacctgtttatccagattggtctagcttccaggcatatcccccaatcccaccacatggattcttcccctcacctgtggcatcaagtccacagggtcatcctttcatgtggggagctcaagctatgattccaccttatggaacaccgccaccatatgtcatgtacccccctggagtatatgcccacccatctatgcccccgggtgcacatccatttactccttatgccattacttctccaaatggcaatgctgatgctactggaactactgttgcagctggtaatactgatggcaagccctctgaaggcaaagataaaagtccaacaaagcgatccaaaggaagtttgggcagcttgaacatgcttactggaaagaatcccagtgaacatggtaagtcctcaggtgcatcgggtaatggagtcacttctcaaagtggcgaaagtggcagtgacagttcaagcgaagggagtgaaggaaattctcacaatgattcacatcacaaggaaagtggacaggaacacgatggggatgttcgaagttcccggaatggtgtatcacgtttgcaatctgagggaaaattgaaccaagctatggcaatcttgcccataccatcaagtggcccagcaactgatccaactacaaacctaaatattgggatggactattgggccaacacagcaagctctgctcctgcaattcatggcaaagcgacgtcaacaacagttccaggggctgtggtcccagcagagcagtggacacaggatgaacatgaactcaaaaagcaaagaagaaagcagtccaatagggagtctgcacgtagatctaggttacgtaaacaggaaaatgcttcacttagagatgaagtaaaccgtatcagaaaagagtacgaggaacttctatcaaggaataactcactaaaggaaaaacttgaaggcaaacaacacaaaactgatgaggcaggacttaacaacaagctgcaacattctggtgatgacagccagaaaaaaggaaactaatgctatcatgcaatgcttgcctacattggtcctaactagattattgggaggtgcaattgtagtatgcacattaactccttactttattgcagttaattgttaccaggttgtgataatgttgatgccaaccttttgtgtgggtgtttcctgtttcagatctatcttggcttatcttttagaagccaagatgtgactgaagctataggctgtgacccaattcactatatctgttagaaatagtggataaagtcaaactttcaaatttgaagtgctgactaatattgttatgtatacctggcaaaagactggtttccttttaattcagtctggttgaacattttgctgggctttcactactgcctagtttatgtacattgttgttcatatcggttgttcctagttattttttgtaataattaacaaatagatgagggacactgtctcaacctctgcaccaatatatatatggacacacacacacacacacacctcttttttgcgtctattttctgttttacttcaaagtttgcaggtttgtttcagccctgtttgattgtgagccttggcgctggcggtattttttttaagtttaaatgatccacctgctgtaggtaagtttggttaaaagacattcctatttttctgtttagtgacactgatattagtaatccttttttttcatccatctatttaagtgtcagcagaatcgtttgttaaacttgctttcctgaacttgctcttgattctggtaagtttttgggctcctggcactttacttttatgatcttattttgatttgctttttacaggaaaatggttctggactatgtcttagatgggaagcatagttcattagtatgtctgccttacaggttcttaagcagggatcgtggaagaacctgtgttgggaggtggtagagaagatgtgccaatgattggtttttggtcaatgtcttctctggtgccg

SEQ ID NO: 16134 - DNA, 3038 bp, Zea Mays
actcgcgtcgcacggatctctccttccctccaggctccagctccaaagcctcgtcgtcttcttcgccccgccacccgtcctgcacactcacaactagacatcgtaccacccaggtgatctcgcgcgccactccctccttccatcccttagccccagctttactctcccctcccgcgcccagatcccgaggctcctacccctcgatcgccgccttccagcggccgatccggcgctggctcgcggcccccgacaggcaccctacccaccgaccggatctagccgccgcgtggtttttgaattgagctcccctcgcgtcgcatggcgctggcgcgggccgcgcgggttcctctctgggctgctgccggatcgacggcgatgctagggtttaggtgtggttcgtgtctagttagctgagtggcgcgtacgcgtttcgttttgtcttggggagccaagcgtggcccgaaatttatctggagcaggtgcagcagccttttggagtgacgggctttgagatttccagtttagggttcgttttgggttggtgggagctcgggtgtgttatggccattctgtgcgttataactgacatgcttataatttcaaaagtgtttagtttggttaactgcagctcatgggagctggagggacctcattcagatgatccgacatttactgcagtttctatattcatagcaagtattcgtgccgtgagatcatttgtatgtggtttaggtcaaagctgtttgtttttaaaactaaaaagctttaggtacaaattccatggcagtcttgtcttgtgcatgtgtaaggttttgggtgactatacagtatacacgtttagaaaaaaatgttttctgggactaccatatagtttttatgctgtatggcggaagtgccgagtgttatagttggtgtgataaaatactctgcaaaaattgatgaaattgagcattaatgaagttgtctgttttgatgtagcatagaaagtaattgacaggattgcatatgatccacgctagtttattctgcgctttaagtgaatagggatcaaggatatcgtacacaacagttttgctttatgctggttcatttgtctacggacaatggactagttgctgcactgtttctgtgattcaccatgggaagcagtggagcagatacaccgtctaaggagcagcagccacctgctacctcaggtgctgcaataccacctgtttatccagattggtctagcttccaggcatatcccccaatcccaccacatggattcttcccctcacctgtggcatcaagtccacagggtcatcctttcatgtggggagctcaagctatgattccaccttatggaacaccgccaccatatgtcatgtacccccctggagtatatgcccacccatctatgcccccgggtgcacatccatttactccttatgccattacttctccaaatggcaatgctgatgctactggaactactgttgcagctggtaatactgatggcaagccctctgaaggcaaagataaaagtccaacaaagcgatccaaaggaagtttgggcagcttgaacatgcttactggaaagaatcccagtgaacatggtaagtcctcaggtgcatcgggtaatggagtcacttctcaaagtggcgaaagtggcagtgacagttcaagcgaagggagtgaaggaaattctcacaatgattcacatcacaaggaaagtggacaggaacacgatggggatgttcgaagttcccggaatggtgtatcacgtttgcaatctgagggaaaattgaaccaagctatggcaatcttgcccataccatcaagtggcccagcaactgatccaactacaaacctaaatattgggatggactattgggccaacacagcaagctctgctcctgcaattcatggcaaagcgacgtcaacaacagttccaggggctgtggtcccagcagagcagtggacacaggatgaacatgaactcaaaaagcaaagaagaaagcagtccaatagggagtctgcacgtagatctaggttacgtaaacaggctgaatgtgaggaattggctcaacgtgctgatgttttaaagcaggaaaatgcttcacttagagatgaagtaaaccgtatcagaaaagagtacgaggaacttctatcaaggaataactcactaaaggaaaaacttgaaggcaaacaacacaaaactgatgaggcaggacttaacaacaagctgcaacattctggtgatgacagccagaaaaaaggaaactaatgctatcatgcaatgcttgcctacattggtcctaactagattattgggaggtgcaattgtagtatgcacattaactccttactttattgcagttaattgttaccaggttgtgataatgttgatgccaaccttttgtgtgggtgtttcctgtttcagatctatcttggcttatcttttagaagccaagatgtgactgaagctataggctgtgacccaattcactatatctgttagaaatagtggataaagtcaaactttcaaatttgaagtgctgactaatattgttatgtatacctggcaaaagactggtttccttttaattcagtctggttgaacattttgctgggctttcactactgcctagtttatgtacattgttgttcatatcggttgttcctagttattttttgtaataattaacaaatagatgagggacactgtctcaacctctgcaccaatatatatatggacacacacacacacacacacctcttttttgcgtctattttctgttttacttcaaagtttgcaggtttgtttcagccctgtttgattgtgagccttggcgctggcggtattttttttaagtttaaatgatccacctgctgtaggaaaatggttctggactatgtcttagatgggaagcatagttcattagtatgtctgccttacaggttcttaagcagggatcgtggaagaacctgtgttgggaggtggtagagaagatgtgccaatgattggtttttggtcaatgtcttctctggtgccg

SEQ ID NO: 16135 - DNA, 2223 bp, Zea Mays
actcgcgtcgcacggatctctccttccctccaggctccagctccaaagcctcgtcgtcttcttcgccccgccacccgtcctgcacactcacaactagacatcgtaccacccaggtgatctcgcgcgccactccctccttccatcccttagccccagctttactctcccctcccgcgcccagatcccgaggctcctacccctcgatcgccgccttccagcggccgatccggcgctggctcgcggcccccgacaggttttgctttatgctggttcatttgtctacggacaatggactagttgctgcactgtttctgtgattcaccatgggaagcagtggagcagatacaccgtctaaggagcagcagccacctgctacctcaggtgctgcaataccacctgtttatccagattggtctagcttccaggcatatcccccaatcccaccacatggattcttcccctcacctgtggcatcaagtccacagggtcatcctttcatgtggggagctcaagctatgattccaccttatggaacaccgccaccatatgtcatgtacccccctggagtatatgcccacccatctatgcccccgggtgcacatccatttactccttatgccattacttctccaaatggcaatgctgatgctactggaactactgttgcagctggtaatactgatggcaagccctctgaaggcaaagataaaagtccaacaaagcgatccaaaggaagtttgggcagcttgaacatgcttactggaaagaatcccagtgaacatggtaagtcctcaggtgcatcgggtaatggagtcacttctcaaagtggcgaaagtggcagtgacagttcaagcgaagggagtgaaggaaattctcacaatgattcacatcacaaggaaagtggacaggaacacgatggggatgttcgaagttcccggaatggtgtatcacgtttgcaatctgagggaaaattgaaccaagctatggcaatcttgcccataccatcaagtggcccagcaactgatccaactacaaacctaaatattgggatggactattgggccaacacagcaagctctgctcctgcaattcatggcaaagcgacgtcaacaacagttccaggggctgtggtcccagcagagcagtggacacaggatgaacatgaactcaaaaagcaaagaagaaagcagtccaatagggagtctgcacgtagatctaggttacgtaaacaggctgaatgtgaggaattggctcaacgtgctgatgttttaaagcaggaaaatgcttcacttagagatgaagtaaaccgtatcagaaaagagtacgaggaacttctatcaaggaataactcactaaaggaaaaacttgaaggcaaacaacacaaaactgatgaggcaggacttaacaacaagctgcaacattctggtgatgacagccagaaaaaaggaaactaatgctatcatgcaatgcttgcctacattggtcctaactagattattgggaggtgcaattgtagtatgcacattaactccttactttattgcagttaattgttaccaggttgtgataatgttgatgccaaccttttgtgtgggtgtttcctgtttcagatctatcttggcttatcttttagaagccaagatgtgactgaagctataggctgtgacccaattcactatatctgttagaaatagtggataaagtcaaactttcaaatttgaagtgctgactaatattgttatgtatacctggcaaaagactggtttccttttaattcagtctggttgaacattttgctgggctttcactactgcctagtttatgtacattgttgttcatatcggttgttcctagttattttttgtaataattaacaaatagatgagggacactgtctcaacctctgcaccaatatatatatggacacacacacacacacacacctcttttttgcgtctattttctgttttacttcaaagtttgcaggtttgtttcagccctgtttgattgtgagccttggcgctggcggtattttttttaagtttaaatgatccacctgctgtaggaaaatggttctggactatgtcttagatgggaagcatagttcattagtatgtctgccttacaggttcttaagcagggatcgtggaagaacctgtgttgggaggtggtagagaagatgtgccaatgattggtttttggtcaatgtcttctctggtgccg

SEQ ID NO: 16136 - DNA, 2161 bp, Zea Mays
cctgctgccagccagccctgccgtacggtaggttcccacgcagcacagaactgcccacgcagcacaccccactgcgccactcgcgtcgcacggatctctccttccctccaggctccagctccaaagcctcgtcgtcttcttcgccccgccacccgtcctgcacactcacaactagacatcgtaccacccaggttttgctttatgctggttcatttgtctacggacaatggactagttgctgcactgtttctgtgattcaccatgggaagcagtggagcagatacaccgtctaaggagcagcagccacctgctacctcaggtgctgcaataccacctgtttatccagattggtctagcttccaggcatatcccccaatcccaccacatggattcttcccctcacctgtggcatcaagtccacagggtcatcctttcatgtggggagctcaagctatgattccaccttatggaacaccgccaccatatgtcatgtacccccctggagtatatgcccacccatctatgcccccgggtgcacatccatttactccttatgccattacttctccaaatggcaatgctgatgctactggaactactgttgcagctggtaatactgatggcaagccctctgaaggcaaagataaaagtccaacaaagcgatccaaaggaagtttgggcagcttgaacatgcttactggaaagaatcccagtgaacatggtaagtcctcaggtgcatcgggtaatggagtcacttctcaaagtggcgaaagtggcagtgacagttcaagcgaagggagtgaaggaaattctcacaatgattcacatcacaaggaaagtggacaggaacacgatggggatgttcgaagttcccggaatggtgtatcacgtttgcaatctgagggaaaattgaaccaagctatggcaatcttgcccataccatcaagtggcccagcaactgatccaactacaaacctaaatattgggatggactattgggccaacacagcaagctctgctcctgcaattcatggcaaagcgacgtcaacaacagttccaggggctgtggtcccagcagagcagtggacacaggatgaacatgaactcaaaaagcaaagaagaaagcagtccaatagggagtctgcacgtagatctaggttacgtaaacaggctgaatgtgaggaattggctcaacgtgctgatgttttaaagcaggaaaatgcttcacttagagatgaagtaaaccgtatcagaaaagagtacgaggaacttctatcaaggaataactcactaaaggaaaaacttgaaggcaaacaacacaaaactgatgaggcaggacttaacaacaagctgcaacattctggtgatgacagccagaaaaaaggaaactaatgctatcatgcaatgcttgcctacattggtcctaactagattattgggaggtgcaattgtagtatgcacattaactccttactttattgcagttaattgttaccaggttgtgataatgttgatgccaaccttttgtgtgggtgtttcctgtttcagatctatcttggcttatcttttagaagccaagatgtgactgaagctataggctgtgacccaattcactatatctgttagaaatagtggataaagtcaaactttcaaatttgaagtgctgactaatattgttatgtatacctggcaaaagactggtttccttttaattcagtctggttgaacattttgctgggctttcactactgcctagtttatgtacattgttgttcatatcggttgttcctagttattttttgtaataattaacaaatagatgagggacactgtctcaacctctgcaccaatatatatatggacacacacacacacacacacctcttttttgcgtctattttctgttttacttcaaagtttgcaggtttgtttcagccctgtttgattgtgagccttggcgctggcggtattttttttaagtttaaatgatccacctgctgtaggaaaatggttctggactatgtcttagatgggaagcatagttcattagtatgtctgccttacaggttcttaagcagggatcgtggaagaacctgtgttgggaggtggtagagaagatgtgccaatgattggtttttggtcaatgtcttctctggtgccg

SEQ ID NO: 16137 - DNA, 1544 bp, Zea Mays
actcgcgtcgcacggatctctccttccctccaggctccagctccaaagcctcgtcgtcttcttcgccccgccacccgtcctgcacactcacaactagacatcgtaccacccaggtgatctcgcgcgccactccctccttccatcccttagccccagctttactctcccctcccgcgcccagatcccgaggctcctacccctcgatcgccgccttccagcggccgatccggcgctggctcgcggcccccgacaggttttgctttatgctggttcatttgtctacggacaatggactagttgctgcactgtttctgtgattcaccatgggaagcagtggagcagatacaccgtctaaggagcagcagccacctgctacctcaggtgctgcaataccacctgtttatccagattggtctagcttccaggcatatcccccaatcccaccacatggattcttcccctcacctgtggcatcaagtccacagggtcatcctttcatgtggggagctcaagctatgattccaccttatggaacaccgccaccatatgtcatgtacccccctggagtatatgcccacccatctatgcccccgggtgcacatccatttactccttatgccattacttctccaaatggcaatgctgatgctactggaactactgttgcagctggtaatactgatggcaagccctctgaaggcaaagataaaagtccaacaaagcgatccaaaggaagtttgggcagcttgaacatgcttactggaaagaatcccagtgaacatggtaagtcctcaggtgcatcgggtaatggagtcacttctcaaagtggcgaaagtggcagtgacagttcaagcgaagggagtgaaggaaattctcacaatgattcacatcacaaggaaagtggacaggaacacgatggggatgttcgaagttcccggaatggtgtatcacgtttgcaatctgagggaaaattgaaccaagctatggcaatcttgcccataccatcaagtggcccagcaactgatccaactacaaacctaaatattgggatggactattgggccaacacagcaagctctgctcctgcaattcatggcaaagcgacgtcaacaacagttccaggggctgtggtcccagcagagcagtggacacaggatgaacatgaactcaaaaagcaaagaagaaagcagtccaatagggagtctgcacgtagatctaggttacgtaaacaggctgaatgtgaggaattggctcaacgtgctgatgttttaaagcaggaaaatgcttcacttagagatgaagtaaaccgtatcagaaaagagtacgaggaacttctatcaaggaataactcactaaaggaaaaacttgaaggcaaacaacacaaaactgatgaggcaggacttaacaacaagctgcaacattctggtgatgacagccagaaaaaaggaaactaatgctatcatgcaatgcttgcctacattggtcctaactagattattgggagccctgtttgattgtgagccttggcgctggcggtatttttt

SEQ ID NO: 16138 - DNA, 1335 bp, Zea Mays
ccactgcgccactcgcgtcgcacggatctctccttccctccaggctccagctccaaagcctcgtcgtcttcttcgccccgccacccgtcctgcacactcacaactagacatcgtaccacccaggttttgctttatgctggttcatttgtctacggacaatggactagttgctgcactgtttctgtgattcaccatgggaagcagtggagcagatacaccgtctaaggagcagcagccacctgctacctcaggtgctgcaataccacctgtttatccagattggtctagcttccaggcatatcccccaatcccaccacatggattcttcccctcacctgtggcatcaagtccacagggtcatcctttcatgtggggagctcaagctatgattccaccttatggaacaccgccaccatatgtcatgtacccccctggagtatatgcccacccatctatgcccccgggtgcacatccatttactccttatgccattacttctccaaatggcaatgctgatgctactggaactactgttgcagctggtaatactgatggcaagccctctgaaggcaaagataaaagtccaacaaagcgatccaaaggaagtttgggcagcttgaacatgcttactggaaagaatcccagtgaacatggtaagtcctcaggtgcatcgggtaatggagtcacttctcaaagtggcgaaagtggcagtgacagttcaagcgaagggagtgaaggaaattctcacaatgattcacatcacaaggaaagtggacaggaacacgatggggatgttcgaagttcccggaatggtgtatcacgtttgcaatctgagggaaaattgaaccaagctatggcaatcttgcccataccatcaagtggcccagcaactgatccaactacaaacctaaatattgggatggactattgggccaacacagcaagctctgctcctgcaattcatggcaaagcgacgtcaacaacagttccaggggctgtggtcccagcagagcagtggacacaggatgaacatgaactcaaaaagcaaagaagaaagcagtccaatagggagtctgcacgtagatctaggttacgtaaacaggctgaatgtgaggaattggctcaacgtgctgatgttttaaagcaggaaaatgcttcacttagagatgaagtaaaccgtatcagaaaagagtacgaggaacttctatcaaggaataactcactaaaggaaaaacttgaaggcaaacaacacaaaactgatgaggcaggacttaacaacaagctgcaacattctgccctgtttgattgtgagccttggcgctggcggtatttttt

SEQ ID NO: 16139 - DNA, 1507 bp, Zea Mays
gcggctcagatccagactcctccggtgtgggcgggcgctagttcccccggcggcgcggccctagcagcggccaccccggtgggcacggcttgtgcgcggccgtcctgacctgtgcgcgggcgcagcgtggccctcgacggcgcgcttgcaagcgccctaccggtgcgtgggcgggcagccacgatggcgcgcgggcgaagaccctcggcggcgcggcgggcccggctctgatccggtctcgtctggcgggcgcggccctgccccggcggctcccgtgaccctagtgcatggcaacggacaatgggcaaatgtcatggttgaacaaccccaatgatcagctatgagaagaaatgacacgtatctttgacacacacataggagccagacaaagaacatactaatgaaaagatcgatgaatgatattgatatggcatgagtgttttgaaatgtttggtaggttctgtttatatggatttttgtatgtaagattgcattgttcttttgtatgaggctgcatatggcgaggcgatgtctagttagcacggaccagactatgactggaggacctcacctattgatcctcaggctgtgtatgcaagtggtggaaaagcacatggaaggtgtagactctacatatcttatattgtttttttggttgagtgcaatacatgtattcttaatctgtcgtgatgttacttgttttgtaggtacacaatgtttgcttacgtcatcgactcgagccaggtgagggttcggcgtggaggttcgtcgaggtctgctgctcgtagctcccgtcgctccactcaagatccagcagaagtggagcaaccacgagaagaacttaggcgacatcaggattacttgaagcaacaagctacgcaacatgaatattatgctacacagattcaacaatagcaaacactcatacaagtaagttcaaaagataatagctttcactttaagatatgtattgatttaaaacactgatgtgaatgagttcgacaaatttgtagcaactagcacaggcccaagggatacacgtcccggtgcccccaccaccaccacctctcgttcattatccttggtcttcacctccaccaacacctacatctccacctaccgaacatcaggtatgcaaattcatcataatttacttgttgttagttatattatgatctaactcagcaaatatcatttgtacatgtatattagacccctccagctaccttgccaacgcatgaacgagaagacgggttagactttgttgaaaccctcttcactagtggaggtatcgaccatcactcgtcactgtaacctgatggtgatcggcgaccgtgagctttcatgttattgtgttttgatacttgagacatttattatgactatgtatgtgatattgtctcttattagtactggatgagatgtgtcttattatgactatggatgagacttttatgatgtaattgatgagactatggatttaaatattgttatgtgattgtgtgtg

SEQ ID NO: 16140 - DNA, 1432 bp, Zea Mays
ggcggctcagatccagactcctccggtgtgggcgggcgctagttcccccggcggcgcggccctagcagcggccaccccggtgggcacggcttgtgcgcggccgtcctgacctgtgcgcgggcgcagcgtggccctcgacggcgcgcttgcaagcgccctaccggtgcgtgggcgggcagccacgatggcgcgcgggcgaagaccctcggcggcgcggcgggcccggctctgatccggtctcgtctggcgggcgcggccctgccccggcggctcccgtgaccctagtgcatggcaacggacaatgggtattgatgaagcaaatgtcatggttgaacaaccccaatgatcagctatgagaagaaatgacacgtatctttgacacacacataggagccagacaaagaacatactaatgaaaagatcgatgaatgatattgatatggcatgagtgttttgaaatgtttggtaggttctgtttatatggatttttgtatgtaagattgcattgttcttttgtatgaggctgcatatggcgaggcgatgtctagttagcacggaccagactatgactggaggacctcacctattgatcctcaggctgtgtatgcaagtggtggaaaagcacatggaaggtacacaatgtttgcttacgtcatcgactcgagccaggtgagggttcggcgtggaggttcgtcgaggtctgctgctcgtagctcccgtcgctccactcaagatccagcagaagtggagcaaccacgagaagaacttaggcgacatcaggattacttgaagcaacaagctacgcaacatgaatattatgctacacagattcaacaatagcaaacactcatacaagtaagttcaaaagataatagctttcactttaagatatgtattgatttaaaacactgatgtgaatgagttcgacaaatttgtagcaactagcacaggcccaagggatacacgtcccggtgcccccaccaccaccacctctcgttcattatccttggtcttcacctccaccaacacctacatctccacctaccgaacatcaggtatgcaaattcatcataatttacttgttgttagttatattatgatctaactcagcaaatatcatttgtacatgtatattagacccctccagctaccttgccaacgcatgaacgagaagacgggttagactttgttgaaaccctcttcactagtggaggtatcgaccatcactcgtcactgtaacctgatggtgatcggcgaccgtgagctttcatgttattgtgttttgatacttgagacatttattatgactatgtatgtgatattgtctcttattagtactggatgagatgtgtcttattatgactatggatgagacttttatgatgtaattgatgagactatggatttaaatattgttatgtgattgtgtgtg

SEQ ID NO: 16141 - DNA, 1283 bp, Zea Mays
ggcggctcagatccagactcctccggtgtgggcgggcgctagttcccccggcggcgcggccctagcagcggccaccccggtgggcacggcttgtgcgcggccgtcctgacctgtgcgcgggcgcagcgtggccctcgacggcgcgcttgcaagcgccctaccggtgcgtgggcgggcagccacgatggcgcgcgggcgaagaccctcggcggcgcggcgggcccggctctgatccggtctcgtctggcgggcgcggccctgccccggcggctcccgtgaccctagtgcatggcaacggacaatgggcaaatgtcatggttgaacaaccccaatgatcagctatgagaagaaatgacacgtatctttgacacacacataggagccagacaaagaacatactaatgaaaagatcgatgaatgatattgatatggcatgagtgttttgaaatgtttggtaggttctgtttatatggatttttgtatgtacacaatgtttgcttacgtcatcgactcgagccaggtgagggttcggcgtggaggttcgtcgaggtctgctgctcgtagctcccgtcgctccactcaagatccagcagaagtggagcaaccacgagaagaacttaggcgacatcaggattacttgaagcaacaagctacgcaacatgaatattatgctacacagattcaacaatagcaaacactcatacaagtaagttcaaaagataatagctttcactttaagatatgtattgatttaaaacactgatgtgaatgagttcgacaaatttgtagcaactagcacaggcccaagggatacacgtcccggtgcccccaccaccaccacctctcgttcattatccttggtcttcacctccaccaacacctacatctccacctaccgaacatcaggtatgcaaattcatcataatttacttgttgttagttatattatgatctaactcagcaaatatcatttgtacatgtatattagacccctccagctaccttgccaacgcatgaacgagaagacgggttagactttgttgaaaccctcttcactagtggaggtatcgaccatcactcgtcactgtaacctgatggtgatcggcgaccgtgagctttcatgttattgtgttttgatacttgagacatttattatgactatgtatgtgatattgtctcttattagtactggatgagatgtgtcttattatgactatggatgagacttttatgatgtaattgatgagactatggatttaaatattgttatgtgattgtgtgtg

SEQ ID NO: 16142 - DNA, 1295 bp, Zea Mays
tggcggctcagatccagactcctccggtgtgggcgggcgctagttcccccggcggcgcggccctagcagcggccaccccggtgggcacggcttgtgcgcggccgtcctgacctgtgcgcgggcgcagcgtggccctcgacggcgcgcttgcaagcgccctaccggtgcgtgggcgggcagccacgatggcgcgcgggcgaagaccctcggcggcgcggcgggcccggctctgatccggtctcgtctggcgggcgcggccctgccccggcggctcccgtgaccctagtgcatggcaacggacaatgggtattgatgaagcaaatgtcatggttgaacaaccccaatgatcagctatgagaagaaatgacacgtatctttgacacacacataggagccagacaaagaacatactaatgaaaagatcgatgaatgatattgatatggcatgagtgttttgaaatgtttggtaggttctgtttatatggatttttgtatgtacacaatgtttgcttacgtcatcgactcgagccaggtgagggttcggcgtggaggttcgtcgaggtctgctgctcgtagctcccgtcgctccactcaagatccagcagaagtggagcaaccacgagaagaacttaggcgacatcaggattacttgaagcaacaagctacgcaacatgaatattatgctacacagattcaacaatagcaaacactcatacaagtaagttcaaaagataatagctttcactttaagatatgtattgatttaaaacactgatgtgaatgagttcgacaaatttgtagcaactagcacaggcccaagggatacacgtcccggtgcccccaccaccaccacctctcgttcattatccttggtcttcacctccaccaacacctacatctccacctaccgaacatcaggtatgcaaattcatcataatttacttgttgttagttatattatgatctaactcagcaaatatcatttgtacatgtatattagacccctccagctaccttgccaacgcatgaacgagaagacgggttagactttgttgaaaccctcttcactagtggaggtatcgaccatcactcgtcactgtaacctgatggtgatcggcgaccgtgagctttcatgttattgtgttttgatacttgagacatttattatgactatgtatgtgatattgtctcttattagtactggatgagatgtgtcttattatgactatggatgagacttttatgatgtaattgatgagactatggatttaaatattgttatgtgattgtgtgtg

SEQ ID NO: 16143 - DNA, 993 bp, Zea Mays
tgacgataatcgaccagaatggtctgctcaatataaaccaatgagaaaagcagctgatgtagcaatgataatattttggtttggacaatgtaaacggatggtaaaacagcatggtgaactccccaccaaacacccatctgtctgcaatcactgggaaacagatgtttttatttctaaatcaagcaggcaactactcagatacccttctccagcatcgcccggacccgtgtcggtaggccgtacagcctgatgaacccctcggcgtcagcttggttgtagatctccccgttctcaaacgaggagatatcttccctgtacaggctgtaggggctcttccgggacgcgacgttcacggaacccttgtacagcttcagggtcactgaaccagtggtcgtcgcggtaaccttctccatgaaggcatcaaaggactgccggagcgggtcaaaccagcggccagcatagaccagctcggcgtacttgagggcaatgatgtccttccactgcatggtctccctgtccagggtcagggactccaactcgcgtaccgcggctgccatgatggtgccaccgggggtctcatagaccccacgtgacttcatgccgaccagcctgttttccaccatgtcgatacgcccaatcccatgctttccaccgatttcattgagctccgcgaggagggatgctggtgagagggcgcattttctggagcaatcgacatcatatacatatcttcctttggctcatttgctgggtcctccaggatgtcaccctgcaatgtagagaatgattcacttcatctcgcatcaaagatgggcgtcatgttgtttggttaaaggtgtcgacaagtgcaggacattaattcagaacactaatgtggcattttgcatatattggcttaaaagttggaacgtaaccatcttgtaaagttctggtaactaagattctgtcctacatgtaaagaaaaagatattaaactacaaaaaatgctttgat

SEQ ID NO: 16144 - DNA, 3422 bp, Zea Mays
ctccctttgcttcatcgactcatgcgtccgtattatttgggttttacgctaccttgttctttttgctgaaaattttgtattttaacgaagtttttctattcactgcatccccactaggatcatctgcttctgctgctgctattattattagcattagggacttcgcatccattgtgtctgatttcttctattcagagtgaattgcagaagtagactggtttcttcttcatccagtaagctcagtctgtaccctgcactgcaacaatggtgctaggcctccgaaccaagacaaggaaggattctgccttccatgtggatttcaatattctcatccaagaaatcagcccatggcccccttctgaatcgttgaagtctttgcgctccgtagtactcttctgggaaaatggcgagcgcaattcaggaaagacgagcactgttgcgccttcaattgggtcaggttccacagcagggaagattgaatttaatgagttcataaacttacaggctattttccagaaggaggggtcatccaagagtggaaagtggcagaagaacctgcttgaattgaacttgtatgagccgaggagggagaagctgaagggccagcatttggggtctgcaacactagaccttgcagagcatgcaatgtttcatgaggacaccagtgttcctgtgcctctcagttccaagagaagtttcaaaaacaatgcccaacccatggtttacctccgaatccagcctttggatggcgataactcaagcgtttcttcaagagatgcattatcacaagaggcatcagttgataaagattcaaaggaatttgtctcagcaacggtgagtgaggagtatactgaagatacagagtttgcttcctttactgatgaagaagaagcaactccatacctgtaccgctcgggtgtaactgctctcacaggtagcaatagatctcatgaatccctcaagggcaaggatatcaggttaactaataatgaaggtaccagctcatcgttggattctcaacatgaagcaacagtatcctgtatgaaagtgaggaatgaagaagttgaaaagtttccaattcaagtgcaaaagcaaaatggccatccagaaaatctgtctctctcatcagatttgcccagagaacaaagtccgtctcttccaccacacaatgcattcagaagtggtcgtaaaatgtcatttgcatatggtatgactgaatctaaccaaagacagtttggggagagaacttatagcactttaactactgatagagcaaggaatgcgaggttcagtatgagagttccagatgttaatggaagtatcataaataagaaagttgattcccaggatattgcaattactcatgagaataaggccagtgttgatgatggattgcaagtccaggaaccaatacgcatttcaaataatcgaaatgacaacaaagttcgagaactagaacttaaaattgagttgcttgaagcagagctaagggaagctgccgctgctgagataggcctttattcaataattgcagaacatggtagttcagtaaacaaggttcatacaccggcacggaggctctccaggcattttgtgcatgcactaaaaaactgttcaagagacaagatgggaagtgcagcaaggaacacaacctctgggctggttttggttgcaaaagcttgtggatatgacattgcaaggttgagtttctggttgtcaaactgtgttgtactgcgagcaattgttactgaaacttctaggcaatcgggcactgtaaatagcagcaattatggtgattataattccaaaacaacatacaggaaaaactctgcatcaatgtgggagtcacttaataggaagaaaggaaaattactttcccctgagtttgataactgggaagatgttgacacatttatagctgcactaaagaagatcgaatcatggatattttctcgaattgttgaaaccctttggtggcagacattcacaccacatatgcaatctgctgatataactggtggtttgagaagtactccaaatccaaaaaaaggctatggaaagattcctgttgtgggcaaccagcaacaagcaaccatatcaatggacatatggaagaaagcctttaaggaagcgtcagaacggctttgcccagtaagggcagctggtcatgagtgtggatgtctgcctatgttaaccaagttggtgatggagcagtgcatagctaggttggatgtagcaatgttcaatgctattttgcgtgaatcagatgatgaaattccaacagacccgctgtctgatcccataactgatcctaaagttcttccaatcccatctgggaaattcagcttcggtgctggggtccaactgaaaaatgctattggcagctggtctagatgtcttactgacttgtttggcatggatatggacgactatcaagaacttgacaatgaaggtggtgaaaatggctttggtgaatctgtaaagccattctatcacctgaatgcactgagtgatctcctaatgcttcccaaggatgtgctcatggataccagtagcaggaaagagctttgccctacctttagctcatcaatcatcaagaacatcctggatgtctttttaccagatgaattttgtccagatcccattcaaggttctttacttcaagcactagagttggaggaccacctggaggttaacaagggcatacggtcgatcccgtgcagcgcatcgccaattttgtacaatgcccctgtatctggggcaatactaagcgtcatcggtgatcctaggaagagcgggtccgccatccttcacaagtccaacacgagcgatgacgagcttgatgagctgagctccccacttaccttcatctccaacacctcatcagacccgcttgcgaagctgaagcggatcagcaactcgaccacagcgaggtataggcttctccatgaggtgtggaagctggatgaccagtaggacttgatcctatcaccaccatggttctcccctctgtatataggtttgtttttttgcatatgattccggctcatgtataagatttcagtctatttgttatgttatgttacaagaagatgaggggcaagcgttgaatcttaataaatccgctgtgtctaaatgcaagagtgttcggtatgtgttgtgctagggtgtgaatcatgtgttttgcagatgtaggcaattcaagtggcccaacgtgcaggcccatttcttctactccccacccgcagtgcagcggtgctgacgcagtgaaaatttattgtagtcccatactgctggccggtgatctgatagacaagtgtaacggtcagaggggttctatgtaacacctgcacccatgtgctattctatccctaaaccttacttggctctcacagaatagtaaggttgaatgcaccttcttc

SEQ ID NO: 16145 - DNA, 3173 bp, Zea Mays
gtctcagtccagtccggtcaaagtcgtctcttctctcagatctcgtgctgtccctagcattttccctagtttaactagggacttcgcatccattgtgtctgatttcttctattcagagtgaattgcagaagtagactggtttcttcttcatccagtaagctcagtctgtaccctgcactgcaacaatggtgctaggcctccgaaccaagacaaggaaggattctgccttccatgtggatttcaatattctcatccaagaaatcagcccatggcccccttctgaatcgttgaagtctttgcgctccgtagtactcttctgggaaaatggcgagcgcaattcaggaaagacgagcactgttgcgccttcaattgggtcaggttccacagcagggaagattgaatttaatgagttcataaacttacaggctattttccagaaggaggggtcatccaagagtggaaagtggcagaagaacctgcttgaattgaacttgtatgagccgaggagggagaagctgaagggccagcatttggggtctgcaacactagaccttgcagagcatgcaatgtttcatgaggacaccagtgttcctgtgcctctcagttccaagagaagtttcaaaaacaatgcccaacccatggtttacctccgaatccagcctttggatggcgataactcaagcgtttcttcaagagatgcattatcacaagaggcatcagttgataaagattcaaaggaatttgtctcagcaacggtgagtgaggagtatactgaagatacagagtttgcttcctttactgatgaagaagaagcaactccatacctgtaccgctcgggtgtaactgctctcacaggtagcaatagatctcatgaatccctcaagggcaaggatatcaggttaactaataatgaaggtaccagctcatcgttggattctcaacatgaagcaacagtatcctgtatgaaagtgaggaatgaagaagttgaaaagtttccaattcaagtgcaaaagcaaaatggccatccagaaaatctgtctctctcatcagatttgcccagagaacaaagtccgtctcttccaccacacaatgcattcagaagtggtcgtaaaatgtcatttgcatatggtatgactgaatctaaccaaagacagtttggggagagaacttatagcactttaactactgatagagcaaggaatgcgaggttcagtatgagagttccagatgttaatggaagtatcataaataagaaagttgattcccaggatattgcaattactcatgagaataaggccagtgttgatgatggattgcaagtccaggaaccaatacgcatttcaaataatcgaaatgacaacaaagttcgagaactagaacttaaaattgagttgcttgaagcagagctaagggaagctgccgctgctgagataggcctttattcaataattgcagaacatggtagttcagtaaacaaggttcatacaccggcacggaggctctccaggcattttgtgcatgcactaaaaaactgttcaagagacaagatgggaagtgcagcaaggaacacaacctctgggctggttttggttgcaaaagcttgtggatatgacattgcaaggttgagtttctggttgtcaaactgtgttgtactgcgagcaattgttactgaaacttctaggcaatcgggcactgtaaatagcagcaattatggtgattataattccaaaacaacatacaggaaaaactctgcatcaatgtgggagtcacttaataggaagaaaggaaaattactttcccctgagtttgataactgggaagatgttgacacatttatagctgcactaaagaagatcgaatcatggatattttctcgaattgttgaaaccctttggtggcagacattcacaccacatatgcaatctgctgatataactggtggtttgagaagtactccaaatccaaaaaaaggctatggaaagattcctgttgtgggcaaccagcaacaagcaaccatatcaatggacatatggaagaaagcctttaaggaagcgtcagaacggctttgcccagtaagggcagctggtcatgagtgtggatgtctgcctatgttaaccaagttggtgatggagcagtgcatagctaggttggatgtagcaatgttcaatgctattttgcgtgaatcagatgatgaaattccaacagacccgctgtctgatcccataactgatcctaaagttcttccaatcccatctgggaaattcagcttcggtgctggggtccaactgaaaaatgctattggcagctggtctagatgtcttactgacttgtttggcatggatatggacgactatcaagaacttgacaatgaaggtggtgaaaatggctttggtgaatctgtaaagccattctatcacctgaatgcactgagtgatctcctaatgcttcccaaggatgtgctcatggataccagtagcaggaaagagctttgccctacctttagctcatcaatcatcaagaacatcctggatgtctttttaccagatgaattttgtccagatcccattcaaggttctttacttcaagcactagagttggaggaccacctggaggttaacaagggcatacggtcgatcccgtgcagcgcatcgccaattttgtacaatgcccctgtatctggggcaatactaagcgtcatcggtgatcctaggaagagcgggtccgccatccttcacaagtccaacacgagcgatgacgagcttgatgagctgagctccccacttaccttcatctccaacacctcatcagacccgcttgcgaagctgaagcggatcagcaactcgaccacagcgaggtataggcttctccatgaggtgtggaagctggatgaccagtaggacttgatcctatcaccaccatggttctcccctctgtatatagatgtaggcaattcaagtggcccaacgtgcaggcccatttcttctactccccacccgcagtgcagcggtgctgacgcagtgaaaatttattgtagtcccatactgctggccggtgatctgatagacaagtgtaacggtcagaggggttctatgtaacacctgcacccatgtgctattctatccctaaaccttacttggctctcacagaatagtaaggttgaatgcaccttcttc

SEQ ID NO: 16146 - DNA, 2884 bp, Zea Mays
gactcgagctccctagatttcgattagaaaactcgatcagattcttttctttcctctcctccggaatagtttattccgctttgctttgggtccacgatctcttcttcgtctcctcctcgaggcagaggaagacgtccggcttcttgtatccgccttgttagccccacacaccgacaacctggactgcgcgtccacgaactcactcgccgaacagacatcattccccttaccccgacgtttgaaatcctctccagccgatgcatcctccccatcaatcttctccggttcgttgcattgcgtctggattggcctgcccctgctagattcagggacttcgcatccattgtgtctgatttcttctattcagagtgaattgcagaagtagactggtttcttcttcatccagtaagctcagtctgtaccctgcactgcaacaatggtgctaggcctccgaaccaagacaaggaaggattctgccttccatgtggatttcaatattctcatccaagaaatcagcccatggcccccttctgaatcgttgaagtctttgcgctccgtagtactcttctgggaaaatggcgagcgcaattcaggaaagacgagcactgttgcgccttcaattgggtcaggttccacagcagggaagattgaatttaatgagttcataaacttacaggctattttccagaaggaggggtcatccaagagtggaaagtggcagaagaacctgcttgaattgaacttgtatgagccgaggagggagaagctgaagggccagcatttggggtctgcaacactagaccttgcagagcatgcaatgtttcatgaggacaccagtgttcctgtgcctctcagttccaagagaagtttcaaaaacaatgcccaacccatggtttacctccgaatccagcctttggatggcgataactcaagcgtttcttcaagagatgcattatcacaagaggcatcagttgataaagattcaaaggaatttgtctcagcaacggtgagtgaggagtatactgaagatacagagtttgcttcctttactgatgaagaagaagcaactccatacctgtaccgctcgggtgtaactgctctcacaggtagcaatagatctcatgaatccctcaagggcaaggatatcaggttaactaataatgaaggtaccagctcatcgttggattctcaacatgaagcaacagtatcctgtatgaaagtgaggaatgaagaagttgaaaagtttccaattcaagtgcaaaagcaaaatggccatccagaaaatctgtctctctcatcagatttgcccagagaacaaagtccgtctcttccaccacacaatgcattcagaagtggtcgtaaaatgtcatttgcatatggtatgactgaatctaaccaaagacagtttggggagagaacttatagcactttaactactgatagagcaaggaatgcgaggttcagtatgagagttccagatgttaatggaagtatcataaataagaaagttgattcccaggatattgcaattactcatgagaataaggccagtgttgatgatggattgcaagtccaggaaccaatacgcatttcaaataatcgaaatgacaacaaagttcgagaactagaacttaaaattgagttgcttgaagcagagctaagggaagctgccgctgctgagataggcctttattcaataattgcagaacatggtagttcagtaaacaaggttcatacaccggcacggaggctctccaggcattttgtgcatgcactaaaaaactgttcaagagacaagatgggaagtgcagcaaggaacacaacctctgggctggttttggttgcaaaagcttgtggatatgacattgcaaggttgagtttctggttgtcaaactgtgttgtactgcgagcaattgttactgaaacttctaggcaatcgggcactgtaaatagcagcaattatggtgattataattccaaaacaacatacaggaaaaactctgcatcaatgtgggagtcacttaataggaagaaaggaaaattactttcccctgagtttgataactgggaagatgttgacacatttatagctgcactaaagaagatcgaatcatggatattttctcgaattgttgaaaccctttggtggcagacattcacaccacatatgcaatctgctgatataactggtggtttgagaagtactccaaatccaaaaaaaggctatggaaagattcctgttgtgggcaaccagcaacaagcaaccatatcaatggacatatggaagaaagcctttaaggaagcgtcagaacggctttgcccagtaagggcagctggtcatgagtgtggatgtctgcctatgttaaccaagttggtgatggagcagtgcatagctaggttggatgtagcaatgttcaatgctattttgcgtgaatcagatgatgaaattccaacagacccgctgtctgatcccataactgatcctaaagttcttccaatcccatctgggaaattcagcttcggtgctggggtccaactgaaaaatgctattggcagctggtctagatgtcttactgacttgtttggcatggatatggacgactatcaagaacttgacaatgaaggtggtgaaaatggctttggtgaatctgtaaagccattctatcacctgaatgcactgagtgatctcctaatgcttcccaaggatgtgctcatggataccagtagcaggaaagagctttgccctacctttagctcatcaatcatcaagaacatcctggatgtctttttaccagatgaattttgtccagatcccattcaagggggtatatcttcgcattaggctgctagtttcacaggaagggaactacagtaaaagaagcac

SEQ ID NO: 16147 - DNA, 2351 bp, Zea Mays
ctccagttcgcctctctccctgagctccctcacgccgtgcgccccctgcttttccttggccagagcttcctcctctccctgccatggccgcgtcctccctccactccggccctaagctcctctcggtaaatccctctgttgcccctttttttcgtcggtggtgtccgcctcaagctcgtcttcttcgtgcttgcccctgctcaatcgtgcccaacctgctcgccagggccgccgcgcccagccaccagcgccggccctagtttggtccctcccatggcgctcggtgtcacctatgtctcccacgcgcaccccttcgatctcttcgtcgtgctgacatcgattcgtcccaccgttatgttagtagccatggaggcacctgctctagctccacttctatggttcaccattgtgagcgctacttcgtcgtgtcgatgtcaggttcccctgcgtcagtcaccctccacgctcagcgcccaggattcctcctcgacgttcttccctgctccaactgcgtccgctcagccaccatgcaccccctgcttcatcctcgccgtggacgcgtacggctcctgtcctctcccatgccgcgtgctggtagcattcgggcagctgtgggcgcaagagctctggtcgtgctccctactgccgttcgccatagtcgcggtgtccctctccctcgccatggaagctcccgtgcgagcttttctgttggccggctgttctgaccgtggtctgctgctccctcggccatggcgtggacaaccgcgtctcgtctcatggaaccgccatggactcaccaagacaccagtcgtgctcctcctcatcgctagcgccctgtgcgcgctcgctggccattcttgtcttcctcgccgatcatggctttctagtgctcgcttcctccgagctcggccatgacgccggctgctcatgcgtctttcccctcgccggcgcctccccagctcgccgtcggtcttcacctcgtgtgcgcgctattgtctgcaggtagcaccgaccttcgccttgactgctcgctcggactttgtccctacccgagctcgccagcactcaagctgccaccagccgtctgctcgccagtacctgctcccacacacggctcctcgccatggctgtttgccgctgccccgtagttctgtgtgccttcgtcccaactcatcgccatcgaccttgcctagtcttggtcgtcgttgcgatcttgtctctgccatcgacttcgctttacatctacgctcccgctatcgcggagaccctgccagccctgcacgccgtgccgcgccatcatcacctcctgtcgcgagctcgatccccgttgtcgtcgcttcaccgtgctcgctggtcgtacgcccttgcagctccctgctcggtaaaataaatgaaccggtgatcatcctcgacctagcgagattcaagttctatttagtgtgcatatcaaataggtatgctagataattatgcgatatgaagggcatggacagactggaccacaagatgatattgacggaccaacctcaagatggatgatctgacccagtgccaggatgggagatactcgccaagcgagtatcatctaacaacactaacctagtgtatcctaggcaagccccggtgcatgcaaccccttccttgtgtttttaaattatttttacacactttaagtctagtgaatgtgcattaggtttataggagttgcttgaaaaccctttgataaattggctaccttgaactccatcccttttatagatacttttggagaagtatcaaaatatgatttacaaaaaaatgcttagccctgcttataagcagatagagtttgtcctttgctcttatgcctagctcaggtttatcctgaggaaggatggcttctacttgcaagaatattttcattgggagcatggtgggatcttactgcaaagttctctataatgctcttttcatccttaggaacacaaaacaatcctaagggtggaagtagttaactcgagacttgggctaggaacaggtgatgctccacccaagttaattaaggattggatgtgtatgtaggcgtgtatgatcaaggactatcttaactggccacatgccctggatatgggacagggtaagcttgaacccggctattccatacatgaaaagacaaccgcgcactagacgtgggagatggtgggagtagcgtgtaccctcctggctggaggctggatggaggagtactgtgctcccgggtagcgcggaccggttcatgttgtggaggatctgtgggaacggttgacatatgcaagggttaagtgctacatatgtcgtgtggttagagatcctcagctgagtaaatcgattcg

SEQ ID NO: 16148 - DNA, 2909 bp, Zea Mays
ctccagttcgcctctctccctgagctccctcacgccgtgcgccccctgcttttccttggccagagcttcctcctctccctgccatggccgcgtcctccctccactccggccctaagctcctctcggtaaatccctctgttgcccctttttttcgtcggtggtgtccgcctcaagctcgtcttcttcgtgcttgcccctgctcaatcgtgcccaacctgctcgccagggccgccgcgcccagccaccagcgccggccctagtttggtccctcccatggcgctcggtgtcacctatgtctcccacgcgcaccccttcgatctcttcgtcgtgctgacatcgattcgtcccaccgttatgttagtagccatggaggcacctgctctagctccacttctatggttcaccattgtgagcgctacttcgtcgtgtcgatgtcaggttcccctgcgtcagtcaccctccacgctcagcgcccaggattcctcctcgacgttcttccctgctccaactgcgtccgctcagccaccatgcaccccctgcttcatcctcgccgtggacgcgtacggctcctgtcctctcccatgccgcgtgctggtagcattcgggcagctgtgggcgcaagagctctggtcgtgctccctactgccgttcgccatagtcgcggtgtccctctccctcgccatggaagctcccgtgcgagcttttctgttggccggctgttctgaccgtggtctgctgctccctcggccatggcgtggacaaccgcgtctcgtctcatggaaccgccatggactcaccaagacaccagtcgtgctcctcctcatcgctagcgccctgtgcgcgctcgctggccattcttgtcttcctcgccgatcatggctttctagtgctcgcttcctccgagctcggccatgacgccggctgctcatgcgtctttcccctcgccggcgcctccccagctcgccgtcggtcttcacctcgtgtgcgcgctattgtctgcaggtagcaccgaccttcgccttgactgctcgctcggactttgtccctacccgagctcgccagcactcaagctgccaccagccgtctgctcgccagtacctgctcccacacacggctcctcgccatggctgtttgccgctgccccgtagttctgtgtgccttcgtcccaactcatcgccatcgaccttgcctagtcttggtcgtcgttgcgatcttgtctctgccatcgacttcgctttacatctacgctcccgctatcgcggagaccctgccagccctgcacgccgtgccgcgccatcatcacctcctgtcgcgagctcgatccccgttgtcgtcgcttcaccgtgctcgctggtcgtacgcccttgcagctccctgctcggtaaaataaatgaaccggtgatcatcctcgacctagcgagattcaagttctatttagtgtggtaagtcgattcactatttatgctagcggttcaatgatcggattaattaactatattaatacatcggttcttttatcggtagcatatgcgttgtgattgtattagatacttgctataatgtctcgtttatacggtgtgggtgtgggcataattatgaaataggcgtattataactaggtggaaaagaaaaccagagcgacccttaccgtgtgtataatgcattgccttagttacttgtaatgctatagtcgtattttgcaattattaagcatatatattgttaggtgtctgataacggcgagtcttaatattgttagtctttattattatgctttggttaggaagagcataggacgtgtgaataaacgtattattttgtaatgtttgaattagcctgaataggttggagaagtgtaattagtatgcttagtgatatatcgataactagtgtttatttgcgaatgtttcaatgtcatgaaattaggagtttaatttattatcgtgcgtctttgtttagccttatgttattcatctttataaacattcatgtgcatctagcatatcaaataggtatgctagataattatgcgatatgaagggcatggacagactggaccacaagatgatattgacggaccaacctcaagatggatgatctgacccagtgccaggatgggagatactcgccaagcgagtatcatctaacaacactaacctagtgtatcctaggcaagccccggtgcatgcaaccccttccttgtgtttttaaattatttttacacactttaagtctagtgaatgtgcattaggtttataggagttgcttgaaaaccctttgataaattggctaccttgaactccatcccttttatagatacttttggagaagtatcaaaatatgatttacaaaaaaatgcttagccctgcttataagcagatagagtttgtcctttgctcttatgcctagctcaggtttatcctgaggaaggatggcttctacttgcaagaatattttcattgggagcatggtgggatcttactgcaaagttctctataatgctcttttcatccttaggaacacaaaacaatcctaagggtggaagtagttaactcgagacttgggctaggaacaggtgatgctccacccaagttaattaaggattggatgtgtatgtaggcgtgtatgatcaaggactatcttaactggccacatgccctggatatgggacagggtaagcttgaacccggctattccatacatgaaaagacaaccgcgcactagacgtgggagatggtgggagtagcgtgtaccctcctggctggaggctggatggaggagtactgtgctcccgggtagcgcggaccggttcatgttgtggaggatctgtgggaacggttgacatatgcaagggttaagtgctacatatgtcgtgtggttagagatcctcagctgagtaaatcgattcg

SEQ ID NO: 16149 - DNA, 1904 bp, Zea Mays
caactagtcattaaaggcctttttagaagtggagtattttctctgttttttagataatactgtagtatttgagaagggtaaaattgagaaaaaaacacgactaactgtaaaagtgaggacaccagtaaaacctagaacaccagcttaaaaaacctttttttctaatacagtttttggtagactcttcaaaagatatgttttcgaaactgcagttttgactatattgcactactttcacagttttaaaaacttaactccaaaaattttcaatacttgggcctagctgatgctcttagggaggtaggatagagtctgttctttattgtgctgtaatctgtagtttttgttttagttgttagtgtgtgcagtgtgtgtgtgcgtgcaggtgtccctaacctatacctctcttgtaagaccctttcttctatcttatctataaagacgtgcaagtctcatgtttctttcaaaaaaaagttttaatactatggtaaaaaatattgtgagtatgtcttgacatttcaaaactgaagtatttcaaaactatagctttcaaatactttgtttccaaataggacctaattgtaaattagtccggtcgattggagtcttcaactatccaccagttgcaaattcaatctataagttaattgtaattttcctttccaatgtattatcaattggaatacccgaatgcttttgaactgccactgtgatttggcggcagctctctcaatatcaccacaggaacaaaggatcagaaatggctatgcaggccgcaaggaggctagcatctttgaaactccaacgacgcctactccttccctctcaggccgagtccccaagcataagcatcccaaccgcagcggcggcggcagccttcctccactcccatgccaccagcttcgggtacaagcaggttcgcgaagaggataagagcaaattggttggcaacgtgttcagcagcgtggcttctagctacgacctcatgaacgatctcatgagtgtcggcctgcataggctgtggaaggacaggcttatttccaagctgaaccccttttcggggatgaagcatctcgatgtggctggtggaacaggttatagcgaagaacattgtcttagctggatacaaggagatgcagaagctctgagttttgaggatggatctatggatggttacactatcgcatttgggatcagaaatgtgacgcacattgagaaagctctgtcagaagcttacagggttctaaagcaaggggggaggttcctatgcttggagttgagtcatgtggatgtccctatttttaaagagatgtaagtttcgtcaatcatgtttactcgtcaatctttaactgctctttcagattttctgcccttcttttttcagttatgatgtttactcgttttctatggttccggctattggagagctggttgctggtgatcggcagtcgtaccaatacttggttgagagcatccgtcggtttccgaatcaggaaaagtttgctcagatgattcaggaagccggattccagagggtggaatatgagaacctcgtgggtggtgtagttgccattcattctggactgaaactgtagagctgaatacggatggatattttttcatacgtgcaccgcttctacaattagtagtatttgttttttaaattaattctataataggttcggtggcttgtaaaagcagctggtgctggctgtcagcatcagcacaataagtagtatttgctaataagtagtatttgcgagaagtatatgctggagcagtagcgtcagtggctattttggcttttaagctagctgacctcttccatttgtaaagttttttcttgaaaacgtgaaaccatccagaacatcaaattagtcttatcacatacctcctgcaatata

SEQ ID NO: 16150 - DNA, 492 bp, Zea Mays
aggcacttcctatatttcttgataggatgtttcatcatgttcttgctgtaatattgtcagtgacatttgttcttgcctttggagagggatcatatctgagctcagactggggctcatgtcgctcggcctaatgtagcagcacagtcatttcaggagaccattgatagtatgatgaggtcgatgcaaaaaaaaataacaaccaccttcatcaactattaagcttcagtcgaggtcaagcgtgtccatctttaagtctgcttgaccactataggatctgtaaccttatggatgttatagtagctagtaacaatatgcttaatatttagtacttgagttgaagttataggattttctttggaattgaagttaaaggatttgtagatatatgttttgacgttatatgattctctaatggatgaaatattcgtgttcaacatattaatatgatattttggttgtgatgtgtaatattccatgatggtatgaattcat

SEQ ID NO: 16151 - DNA, 1179 bp, Zea Mays
tccggctatccctcaagaacgccctctctccacgcttgtgccaatttcttcgccctccaccagtgagcacgccaagccaccgccccttcctgttgcccagcgcccccctgcagcgcgcccgcccgcccgcctccctaccctggccgcggcggccttcgctccatgcacctgctttaggttgcgccgccgtgcgccctcgctgtgccggccgacctcgccgcggcctgacccagtcatcgtccctgcttcatctccccgtcatgctcctccatgggcgtggtgatcacctatgccgtcgtagccatgccttgggcgccacaccggccgtcagcctcatctctctgctcgcctgtctccttgcctccctgtgctcaccacgccggacgccgctcccaaccctccacacttccctccccaggccgcggcggccttcgctccagttctgcctcgccatcgactgagtccccacgtccctgcgcggcgacgtgctcgcccaggccctgccaaggactcctgcgaactccaacctcatcgcctagccccgccaccgtttctaaagtgatgatccattcagcatgtcctcgtgctcatcgcatggatcatatctgggctcacactggggctcgtcgctcggcctcgtcgagctagagatcctccaacatagcagcacagacgccaagaaggcttaggcacttcctatatttcttgataggatgtttcatcatgttcttgctgtaatattgtcagtgacatttgttcttgcctttggagagggatcatatctgagctcagactggggctcatgtcgctcggcctaatgtagcagcacagtcatttcaggagaccattgatagtatgatgaggtcgatgcaaaaaaaaataacaaccaccttcatcaactattaagcttcagtcgaggtcaagcgtgtccatctttaagtctgcttgaccactataggatctgtaaccttatggatgttatagtagctagtaacaatatgcttaatatttagtacttgagttgaagttataggattttctttggaattgaagttaaaggatttgtagatatatgttttgacgttatatgattctctaatggatgaaatattcgtgttcaacatattaatatgatattttggttgtgatgtgtaatattccatgatggtatgaattcat

SEQ ID NO: 16152 - DNA, 1361 bp, Zea Mays
gttttgctggcccacatcgtgcggcagccctggctggtcttccgtcttcctcgaaaccctgacgcggccgccacgccatgctcgccgcaagtcccctgcgccaagtgccgccgccgggcatcccatccacctcccgtcctactccctgaagatggtccttcccttgtccacctttatgaggctagccgacaaccaatgatgtttcgtgcccaatgcagccttgttgttgactgtggcttctctttcacccatgcatcccctgtacttcagaactttactcttaattatggtgttcggcgtatggaccttggcggcaaggcccttacaaactatctcaaggagctcgtctcataccgttcccttaatgttatggatgaaactctcctcattgatgatgcaaaggaaaagctatgttttgtctcgcttgatgtccctggtgatctacaccttgccaggttatcatttaaggataacccttttagatgttcttatattctccctgatggtataacatacaagaaagggtttgtcaaggatatggatgaagcacttagatatcgcaccctgcctcaagtatcagatagcaaagaccatggtatggatacaaataagtccgaggatcggaaaaaggcagaattaagtcaaaatgaatttgtcttgacaaacgagaggttccttgtcccagagatgctttttcatcccattgatcttggcataaatcaagctgggcttgctgagtgtatagttcgtgctgtacaagcttgccatccatatcttcaacctgtgctttttgagagcatcatcttgacaggtggaagcacactgttccccagattcaccgaaagattggagagggaacttcggcctcttgtccctgacgactacaaggttaagataactcgtcaagagaacccaatttttggtgtctggagaggcggatctattctagcatcaagtcctgatttcgaatcaatgtgcataacgaagtctgagtacgaggagatgggatcagcacggtgccgacgaaggttttttcactgaacagaatactgagtttttggcgaagtagcttcagtgtaggtcaatcgcttaggagaagcgagtcttgtttgtaaatactggtgttgcatgtatttagtccagatgtttgacagtttggtggtatatgaattagaagtccggttaacagtaatcatttttactctgatttgacaactgtagctcgtgagattgaaatggcaaggtggttgaccggacccttgcgtatgacagtggctcgaaaattgaaatgcatgggcccttgtttggttttatgtgatccgaaagcgattgaggaggattaaatctctatttaatttaac

SEQ ID NO: 16153 - DNA, 2098 bp, Zea Mays
gttttgctggcccacatcgtgcggcagccctggctggtcttccgtcttcctcgaaaccctgacgcggccgccacgccatgctcgccgcaagtcccctgcgccaagtgccgccgccgggcatcccatccacctcccgtcctactccctgaaggcatgaacccccgttccaagcgccctataccgccgccatctcccgttcccctttcctttgttctctttcgtctgctgggcaaaccaacgccgccagccactggtcgatcacttccagccaaggagtggcggacgcgcagggcttggagtgtggcggacaggcggatcctgtagcggcagagacaggtacggacgagagaggtgagttctccgcacgatcggctgggacaggggaacgacgcgcgcaactgtgtggcctgggggggcattaaacgcttaaacggcgatcaatcgtcgcttaatcgattgctgtcgggtactcctggcactcagaagaggttgaactaagatagggatattcaatgacgggtggatcgggtgtggtggtgatagacaatgggggtggtcttctcaaggctggctttgggggggacaatgatccaattgctgttgtccccaactgtatggccaaaccccctggtggcaatgccagctcgaagaaatggcttgtggctgaccagctgcaggcagaagatgtcgatgtgactggcatgactttgaagcgtcctattgaccgtggctatcttatcaataccgaggtgcagagggatgtgtgggaacgggttttgcgcaatcttctccaggttgatcctactaactcgtccttgttactggtggaacccatgtttaaccctccagcgatacagcatgcaactgatgagctagtgttcgaggagtttggcttcaactcgctttatgttgcagatggtccttcccttgtccacctttatgaggctagccgacaaccaatgatgtttcgtgcccaatgcagccttgttgttgactgtggcttctctttcacccatgcatcccctgtacttcagaactttactcttaattatggtgttcggcgtatggaccttggcggcaaggcccttacaaactatctcaaggagctcgtctcataccgttcccttaatgttatggatgaaactctcctcattgatgatgcaaaggaaaagctatgttttgtctcgcttgatgtccctggtgatctacaccttgccagatgttcttatattctccctgatggtataacatacaagaaagggtttgtcaaggatatggatgaagcacttagatatcgcaccctgcctcaagtatcagatagcaaagaccatggtatggatacaaataagtccgaggatcggaaaaaggcagaattaagtcaaaatgaatttgtcttgacaaacgagaggttccttgtcccagagatgctttttcatcccattgatcttggcataaatcaagctgggcttgctgagtgtatagttcgtgctgtacaagcttgccatccatatcttcaacctgtgctttttgagagcatcatcttgacaggtggaagcacactgttccccagattcaccgaaagattggagagggaacttcggcctcttgtccctgacgactacaaggttaagataactcgtcaagagaacccaatttttggtgtctggagaggcggatctattctagcatcaagtcctgatttcgaatcaatgtgcataacgaagtctgagtacgaggagatgggatcagcacggtgccgacgaaggttttttcactgaacagaatactgagtttttggcgaagtagcttcagtgtaggtcaatcgcttaggagaagcgagtcttgtttgtaaatactggtgttgcatgtatttagtccagatgtttgacagtttggtggtatatgaattagaagtccggttaacagtaatcatttttactctgatttgacaactgtagctcgtgagattgaaatggcaaggtggttgaccggacccttgcgtatgacagtggctcgaaaattgaaatgcatgggcccttgtttggttttatgtgatccgaaagcgattgaggaggattaaatctctatttaatttaac

SEQ ID NO: 16154 - DNA, 2139 bp, Zea Mays
cgcctgctggcccacgaaagtgccctagttcttcttcttcattcctgtcggcggtgaaggcccatctgttttgctggcccacatcgtgcggcagccctggctggtcttccgtcttcctcgaaaccctgacgcggccgccacgccatgctcgccgcaagtcccctgcgccaagtgccgccgccgggcatcccatccacctcccgtcctactccctgaaggcatgaacccccgttccaagcgccctataccgccgccatctcccgttcccctttcctttgttctctttcgtctgctgggcaaaccaacgccgccagccactggtcgatcacttccagccaaggagtggcggacgcgcagggcttggagtgtggcggacaggcggatcctgtagcggcagagacaggtacggacgagagaggtgagttctccgcacgatcggctgggacaggggaacgacgcgcgcaactgtgtggcctgggggggcattaaacgcttaaacggcgatcaatcgtcgcttaatcgattgctgtcgggtactcctggcactcagaagaggttgaactaagatagggatattcaatgacgggtggatcgggtgtggtggtgatagacaatgggggtggtcttctcaaggctggctttgggggggacaatgatccaattgctgttgtccccaactgtatggccaaaccccctggtggcaatgccagctcgaagaaatggcttgtggctgaccagctgcaggcagaagatgtcgatgtgactggcatgactttgaagcgtcctattgaccgtggctatcttatcaataccgaggtgcagagggatgtgtgggaacgggttttgcgcaatcttctccaggttgatcctactaactcgtccttgttactggtggaacccatgtttaaccctccagcgatacagcatgcaactgatgagctagtgttcgaggagtttggcttcaactcgctttatgttgcagatggtccttcccttgtccacctttatgaggctagccgacaaccaatgatgtttcgtgcccaatgcagccttgttgttgactgtggcttctctttcacccatgcatcccctgtacttcagaactttactcttaattatggtgttcggcgtatggaccttggcggcaaggcccttacaaactatctcaaggagctcgtctcataccgttcccttaatgttatggatgaaactctcctcattgatgatgcaaaggaaaagctatgttttgtctcgcttgatgtccctggtgatctacaccttgccaggttatcatttaaggataacccttttagatgttcttatattctccctgatggtataacatacaagaaagggtttgtcaaggatatggatgaagcacttagatatcgcaccctgcctcaagtatcagatagcaaagaccatggaatttgtcttgacaaacgagaggttccttgtcccagagatgctttttcatcccattgatcttggcataaatcaagctgggcttgctgagtgtatagttcgtgctgtacaagcttgccatccatatcttcaacctgtgctttttgagagcatcatcttgacaggtggaagcacactgttccccagattcaccgaaagattggagagggaacttcggcctcttgtccctgacgactacaaggttaagataactcgtcaagagaacccaatttttggtgtctggagaggcggatctattctagcatcaagtcctgatttcgaatcaatgtgcataacgaagtctgagtacgaggagatgggatcagcacggtgccgacgaaggttttttcactgaacagaatactgagtttttggcgaagtagcttcagtgtaggtcaatcgcttaggagaagcgagtcttgtttgtaaatactggtgttgcatgtatttagtccagatgtttgacagtttggtggtatatgaattagaagtccggttaacagtaatcatttttactctgatttgacaactgtagctcgtgagattgaaatggcaaggtggttgaccggacccttgcgtatgacagtggctcgaaaattgaaatgcatgggcccttgtttggttttatgtgatccgaaagcgattgaggaggattaaatctctatttaatttaac

SEQ ID NO: 16155 - DNA, 2170 bp, Zea Mays
gcgcctgctggcccacgaaagtgccctagttcttcttcttcattcctgtcggcggtgaaggcccatctgttttgctggcccacatcgtgcggcagccctggctggtcttccgtcttcctcgaaaccctgacgcggccgccacgccatgctcgccgcaagtcccctgcgccaagtgccgccgccgggcatcccatccacctcccgtcctactccctgaaggcatgaacccccgttccaagcgccctataccgccgccatctcccgttcccctttcctttgttctctttcgtctgctgggcaaaccaacgccgccagccactggtcgatcacttccagccaaggagtggcggacgcgcagggcttggagtgtggcggacaggcggatcctgtagcggcagagacaggtacggacgagagaggtgagttctccgcacgatcggctgggacaggggaacgacgcgcgcaactgtgtggcctgggggggcattaaacgcttaaacggcgatcaatcgtcgcttaatcgattgctgtcgggtactcctggcactcagaagaggttgaactaagatagggatattcaatgacgggtggatcgggtgtggtggtgatagacaatgggggtggtcttctcaaggctggctttgggggggacaatgatccaattgctgttgtccccaactgtatggccaaaccccctggtggcaatgccagctcgaagaaatggcttgtggctgaccagctgcaggcagaagatgtcgatgtgactggcatgactttgaagcgtcctattgaccgtggctatcttatcaataccgaggtgcagagggatgtgtgggaacgggttttgcgcaatcttctccaggttgatcctactaactcgtccttgttactggtggaacccatgtttaaccctccagcgatacagcatgcaactgatgagctagtgttcgaggagtttggcttcaactcgctttatgttgcagatggtccttcccttgtccacctttatgaggctagccgacaaccaatgatgtttcgtgcccaatgcagccttgttgttgactgtggcttctctttcacccatgcatcccctgtacttcagaactttactcttaattatggtgttcggcgtatggaccttggcggcaaggcccttacaaactatctcaaggagctcgtctcataccgttcccttaatgttatggatgaaactctcctcattgatgatgcaaaggaaaagctatgttttgtctcgcttgatgtccctggtgatctacaccttgccaggttatcatttaaggataacccttttagatgttcttatattctccctgatggtataacatacaagaaagggtttgtcaaggatatggatgaagcacttagatatcgcaccctgcctcaagtatcagatagcaaagaccatggtatggatacaaataagtccgaggatcggaaaaaggcagaattaagtcaaaatgaatttgtcttgacaaacgagaggttccttgtcccagagatgctttttcatcccattgatcttggcataaatcaagctgggcttgctgagtgtatagttcgtgctgtacaagcttgccatccatatcttcaacctgtgctttttgagagcatcatcttgacaggtggaagcacactgttccccagattcaccgaaagattggagagggaacttcggcctcttgtccctgacgactacaagcccaatttttggtgtctggagaggcggatctattctagcatcaagtcctgatttcgaatcaatgtgcataacgaagtctgagtacgaggagatgggatcagcacggtgccgacgaaggttttttcactgaacagaatactgagtttttggcgaagtagcttcagtgtaggtcaatcgcttaggagaagcgagtcttgtttgtaaatactggtgttgcatgtatttagtccagatgtttgacagtttggtggtatatgaattagaagtccggttaacagtaatcatttttactctgatttgacaactgtagctcgtgagattgaaatggcaaggtggttgaccggacccttgcgtatgacagtggctcgaaaattgaaatgcatgggcccttgtttggttttatgtgatccgaaagcgattgaggaggattaaatctctatttaatttaac

SEQ ID NO: 16156 - DNA, 1624 bp, Zea Mays
ggacactcctccatctcgtgatattttctgtcttccatatctccccagaagtcgctggacatctcctaaataatcctcagccgttacttctgctagtccgtgccatgcttatactggtgatcaagatgcctatgtctccaccaccgtcgctcagctgcttgcctctatgttggctggccggatctactgtccgacgcgccactgtttgcgctgtgcttaagcgctctcaccatcaccgcgcctctcttcgccggtgttcgccgggcatacgctcaacctcgccaccgtgggacttacctcgccttcaaaccgtgttcgccgcagcccagccatcgtctacctctacgctcagcacgaaaccgctcgccctacagcctcgtcgcgtcaccattctgcaggcactgagctccacccacctcggtgaaggccaccgtcccctttttcactgtgcactcggcatcagcttcctggtgcacaccgacacaacgctctggtcgtgcgccctccatcgcacgctcagacacttgcccctgttcgtcacctcgggactttgccgtcacccgtacttcgttggttgtcaactttgctggctgtgttcgacctccagccatgtcaccatcgtgcccttcattcgttcgaagaacacctagaagaagtgatgtttgaagaagttcacttaagtgcctgttgattcagtggtggaggtttatctaactacttaccagagtagaataattttaggatcttctcctgcaataaggcaagccccggtgcatttgccaccacccttgtgtttacaaaattttatcactttatatgttgcattaggtaataggagttgattgattaaacacttgatgcattaccatccttgaaagattgattaccataccttgtcacatgttttataaaagctagagatgcttagtcatgctgatagactaagaaaaacgtttttgatctatgactcatgttttttacaaacaagaaaataggcttgggataatgaaggaatcaagacgttgataaattcattatccaggcatgggccctctgtcaggcgccaaagttttgaaatagtttaaaatgggaccatacgttgagcaggaaaggtcgcccgtctatgtcgattaaggaccgtaccgattgttggcctgatgatctaggaccttttaactggccacatacctcatcatgggcaagcctgaacccagctattccctacgtgaaaagacaaccgtgcactgggcgtgggagatggtgggagtagcagttaccctcctggcaagaagctgaatggtagggtaatgtgctcccggatagcgcgtaccagttcatgtagtggaggatctgtgggaatggttgacatatgcaagggttaagtgctacatatgtcgtgtggttggagatccccagctgggtattaatcgattcggatcgccgttacttctcggatatgaagactggatcgctgcccttcatcgtagataacaagcgaaacaaaatttggattttaaaagcaacctagtgcatgtcaagtaaatgatctagattaggaaactactagattcaggctagaagattcaggtaataaactaacttgtgaaataaaacttggcttaag

SEQ ID NO: 16157 - DNA, 789 bp, Zea Mays
ctcaagctgtttgcctcgagcatctgcaaaattttttgggtataggcagatgttgttgcattttatgaagcgaagcaatccttccggaggaatggataacattcctcgtcgcagaagcttgtctcataggaggatcggtgaggaatgcaaagcacaccaagtatttaggctactacatgaagcatgatttggtgtcgtgcgccgcccttcgcaagggagtctttgcagcagctgctgcaatgatgatcatcaacctcctggcgtccctggtgtactactggagttactcaaaagctgcgacgggtgggttcatgaagcaccaaaatgaggttggtgtgggcatgacggattacggccttgacaagggtgtttctgggccctgagtgagatggaatcttattggcctctgtgcggtattaatactatcgtcgaaatgtatgtggatgaagttgagttgtttctctacggtgtgctgtgaatgatataccataactgtacaatggcatgggtggtgatattgtagggttcgtgctgtgaaaaatgcggtagcactagttgtgtttggtgtgctgcacgagcacgacaccgacttcttcctgctcgctgctggcggtggttgttcgcaacacaaatgcgggacttcaatgttcttggctgtcattaaattatgcaaggtggtactgtactgattttgcactaaaatggcatctgttaggcctgcaggcgaggcccggctgcatctttattcgccacatatagttttcttttgggacaattgcatggttgccc

SEQ ID NO: 16158 - DNA, 1307 bp, Zea Mays
aaagaaaaataaagaagaaaaaagtatcggtcgccgacgagctcatgtacaccggcacacgagacagccaccccaaaacgcgggacgcggattgatgatatcggtcgccgacgagcggggccggagcactctctgcttctccccctacttcccctacgtaccaggaagctaccactcccccagagtgaaggaagagagagctctccgcctctctcctccgccttagagcgacgtcgctgccggagctcgatacctatgggtggcttcgggacctcgcgccctgcctccgtcgccctctgcgccttcctcaccttcctcaacctcttcgccgtccttctcgccgtcggcgccgagcgccgccgcagcaccgggaaggtgatgccggacgagtacgacgagcggtcctactgcctctacgacactgacgcctccacggtgtacggcgtctccgctttcttcgtgctcctgctccagcaggccattgtcaacgtcgccacgtggtgcctctgcttcggacccgtgctctcctcccgcggctgtgccgtaacggcattcgtcctctcctggcttggaattgtctaccagactaccggttttacctcttccattagtgataacattcctcgtcgcagaagcttgtctcataggaggatcggtgaggaatgcaaagcacaccaagtatttaggctactacatgaagcatgatttggtgtcgtgcgccgcccttcgcaagggagtctttgcagcagctgctgcaatgatgatcatcaacctcctggcgtccctggtgtactactggagttactcaaaagctgcgacgggtgggttcatgaagcaccaaaatgaggttggtgtgggcatgacggattacggccttgacaagggtgtttctgggccctgagtgagatggaatcttattggcctctgtgcggtattaatactatcgtcgaaatgtatgtggatgaagttgagttgtttctctacggtgtgctgtgaatgatataccataactgtacaatggcatgggtggtgatattgtagggttcgtgctgtgaaaaatgcggtagcactagttgtgtttggtgtgctgcacgagcacgacaccgacttcttcctgctcgctgctggcggtggttgttcgcaacacaaatgcgggacttcaatgttcttggctgtcattaaattatgcaaggtggtactgtactgattttgcactaaaatggcatctgttaggcctgcaggcgaggcccggctgcatctttattcgccacatatagttttcttttgggacaattgcatggttgccc

SEQ ID NO: 16159 - DNA, 635 bp, Zea Mays
ctggtggtgggccaagctgtagcgaaagagaaggctttgtggtggcgggcggcggctacagctggagctggcgacgcatcctcctcgtccgacgagggccgtgccgccacttcaagcagggccacttcaagcagcgccgcccttcgctaccaagaacccgacctatgaggctgtgaggagtactacaaggttccaaggctaagagtgttgctattcctaatatggtttatgaaatggatgaacttgaggctcttgcaagaaatccttcatttgaggatgaagacctagatgatgataatgatgatggacctgaggcatcgttgtaagcttgttgatgaagatctagatgatgataatgtaccatgaatgctatgaatgtttcttattgtacttgctccataatgttttgtgaccttgcaaacttgggacttgtggacttgtggctcttgaactttatgatgaacttgttatattatgtacttgttttctttgtgatcaacttatcatattgtgaacttgtgatatatgtgatcaatttgtaatattatgaacttgtgatctttgtggtcaacctattatattgtgaacttgtggtctttgtgatcaacttgttatattgtgaacttgtggtcttt

SEQ ID NO: 16160 - DNA, 1699 bp, Zea Mays
ctggtggtgggccaagctgtagcgaaagagaaggctttgtggtggcgggcggcggctacagctggagctggcgacgcatcctcctcgtccgacgaggtatcacctaattcccagcttgttctccctcatctggcctggcgcaggtagaagcactatcgcacgtagtgccgccacttcaagcagggccgtgccgccacttcaagcagggccacttcaagcagcgccgcccttcgctaccaagaacccgacctatgaggctgtgaggagtactacaaggtattgccgcttgcttcagatgacgccctatttcctgttgcgatctattgtcccaagctagcatttgggtgttgctagctttcgatgctagttagatggaggtggttgctcttcatgtaggctacctatataacgatttgtctaggtgtactatttccaagttttgcatgtaatttgggtgctaatcttgtctccgcggtcaagtttgcatgtaatttgggtgctaatcatgtctagttgattggtgtgatagcacccatcccactattaataacatggcaacactatgatggtcaagtttgacaagtactggaataagtcaaatattgctcttgctgtggctagtgtccttatcctagatacaagaggaaaattgtagaattttacttgaaggaggtgtacccatatacatatcaaactgaactggataaatttaatggtgtcatgaaaaagatgtatcaatactatgtctctactacaccctcagcatcatctgttacaccttcctcaacttcagcagttgacatgattaagtcaagtatcgaagaagagcttgatagctatatatttgatggacaaggtcatgatgattctattgacacaagtgacttagaaaaatatttggcagatccaatactaaaggttggtaaaagtaatcaacacacttttgacatattagcatggtggaaagcacacaaagaagaatatcctctcttgggccagcttgctcatgatgtcttagctatgaaagtgtcaacagtagcttcagaatctgcttttagtgctggtggtcgtgtacttgatccattttgtactcgccttgaccctaccatggtagaagcactggtctacaccaaagattggatagctagagcaagaaaaggttatatagcagtaccttatatttatttacaatttaattagccattagttcaatacccttttactaatgcactaatggatttttatattcccaggttccaaggctaagagtgttgctattcctaatatggtttatgaaatggatgaacttgaggctcttgcaagaaatccttcatttgaggatgaagacctagatgatgataatgatgatggacctgaggcatcgttgtaagcttgttgatgaagatctagatgatgataatgtaccatgaatgctatgaatgtttcttattgtacttgctccataatgttttgtgaccttgcaaacttgggacttgtggacttgtggctcttgaactttatgatgaacttgttatattatgtacttgttttctttgtgatcaacttatcatattgtgaacttgtgatatatgtgatcaatttgtaatattatgaacttgtgatctttgtggtcaacctattatattgtgaacttgtggtctttgtgatcaacttgttatattgtgaacttgtggtcttt

SEQ ID NO: 16161 - DNA, 1039 bp, Zea Mays
ctggtggtgggccaagctgtagcgaaagagaaggctttgtggtggcgggcggcggctacagctggagctggcgacgcatcctcctcgtccgacgaggtatcacctaattcccagcttgttctccctcatctggcctggcgcaggtagaagcactatcgcacgtagtgccgccacttcaagcagggccgtgccgccacttcaagcagggccacttcaagcagcgccgcccttcgctaccaagaacccgacctatgaggctgtgaggagtactacaagttgacatgattaagtcaagtatcgaagaagagcttgatagctatatatttgatggacaaggtcatgatgattctattgacacaagtgacttagaaaaatatttggcagatccaatactaaaggttggtaaaagtaatcaacacacttttgacatattagcatggtggaaagcacacaaagaagatggtctacaccaaagattggatagctagagcaagaaaaggttatatagcagtaccttatatttatttacaatttaattagccattagttcaatacccttttactaatgcactaatggatttttatattcccaggttccaaggctaagagtgttgctattcctaatatggtttatgaaatggatgaacttgaggctcttgcaagaaatccttcatttgaggatgaagacctagatgatgataatgatgatggacctgaggcatcgttgtaagcttgttgatgaagatctagatgatgataatgtaccatgaatgctatgaatgtttcttattgtacttgctccataatgttttgtgaccttgcaaacttgggacttgtggacttgtggctcttgaactttatgatgaacttgttatattatgtacttgttttctttgtgatcaacttatcatattgtgaacttgtgatatatgtgatcaatttgtaatattatgaacttgtgatctttgtggtcaacctattatattgtgaacttgtggtctttgtgatcaacttgttatattgtgaacttgtggtcttt

SEQ ID NO: 16162 - DNA, 984 bp, Zea Mays
ctggtggtgggccaagctgtagcgaaagagaaggctttgtggtggcgggcggcggctacagctggagctggcgacgcatcctcctcgtccgacgagggccgtgccgccacttcaagcagggccacttcaagcagcgccgcccttcgctaccaagaacccgacctatgaggctgtgaggagtactacaagatccaatactaaaggttggtaaaagtaatcaacacacttttgacatattagcatggtggaaagcacacaaagaagaatatcctctcttgggccagcttgctcatgatgtcttagctatgaaagtgtcaacagtagcttcagaatctgcttttagtgctggtggtcgtgtacttgatccattttgtactcgccttgaccctaccatggtagaagcactggtctacaccaaagattggatagctagagcaagaaaaggttatatagcagtaccttatatttatttacaatttaattagccattagttcaatacccttttactaatgcactaatggatttttatattcccaggttccaaggctaagagtgttgctattcctaatatggtttatgaaatggatgaacttgaggctcttgcaagaaatccttcatttgaggatgaagacctagatgatgataatgatgatggacctgaggcatcgttgtaagcttgttgatgaagatctagatgatgataatgtaccatgaatgctatgaatgtttcttattgtacttgctccataatgttttgtgaccttgcaaacttgggacttgtggacttgtggctcttgaactttatgatgaacttgttatattatgtacttgttttctttgtgatcaacttatcatattgtgaacttgtgatatatgtgatcaatttgtaatattatgaacttgtgatctttgtggtcaacctattatattgtgaacttgtggtctttgtgatcaacttgttatattgtgaacttgtggtcttt

SEQ ID NO: 16163 - DNA, 1017 bp, Zea Mays
ctggtggtgggccaagctgtagcgaaagagaaggctttgtggtggcgggcggcggctacagctggagctggcgacgcatcctcctcgtccgacgagtgccgccacttcaagcagggccgtgccgccacttcaagcagggccacttcaagcagcgccgcccttcgctaccaagaacccgacctatgaggctgtgaggagtactacaagaaaaatatttggcagatccaatactaaaggttggtaaaagtaatcaacacacttttgacatattagcatggtggaaagcacacaaagaagaatatcctctcttgggccagcttgctcatgatgtcttagctatgaaagtgtcaacagtagcttcagaatctgcttttagtgctggtggtcgtgtacttgatccattttgtactcgccttgaccctaccatggtagaagcactggtctacaccaaagattggatagctagagcaagaaaaggttatatagcagtaccttatatttatttacaatttaattagccattagttcaatacccttttactaatgcactaatggatttttatattcccaggttccaaggctaagagtgttgctattcctaatatggtttatgaaatggatgaacttgaggctcttgcaagaaatccttcatttgaggatgaagacctagatgatgataatgatgatggacctgaggcatcgttgtaagcttgttgatgaagatctagatgatgataatgtaccatgaatgctatgaatgtttcttattgtacttgctccataatgttttgtgaccttgcaaacttgggacttgtggacttgtggctcttgaactttatgatgaacttgttatattatgtacttgttttctttgtgatcaacttatcatattgtgaacttgtgatatatgtgatcaatttgtaatattatgaacttgtgatctttgtggtcaacctattatattgtgaacttgtggtctttgtgatcaacttgttatattgtgaacttgtggtcttt

SEQ ID NO: 16164 - DNA, 1026 bp, Zea Mays
ggcagactggtggtgggccaagctgtagcgaaagagaaggctttgtggtggcgggcggcggctacagctggagctggcgacgcatcctcctcgtccgacgaggtatcacctaattcccagcttgttctccctcatctggcctggcgcaggtagaagcactatcgcacgtagtgccgccacttcaagcagggccgtgccgccacttcaagcagggccacttcaagcagcgccgcccttcgctaccaagaacccgacctatgaggctgtgaggagtactacaagcatggtggaaagcacacaaagaagaatatcctctcttgggccagcttgctcatgatgtcttagctatgaaagtgtcaacagtagcttcagaatctgcttttagtgctggtggtcgtgtacttgatccattttgtactcgccttgaccctaccatggtagaagcactggtctacaccaaagattggatagctagagcaagaaaaggttatatagcagtaccttatatttatttacaatttaattagccattagttcaatacccttttactaatgcactaatggatttttatattcccaggttccaaggctaagagtgttgctattcctaatatggtttatgaaatggatgaacttgaggctcttgcaagaaatccttcatttgaggatgaagacctagatgatgataatgatgatggacctgaggcatcgttgtaagcttgttgatgaagatctagatgatgataatgtaccatgaatgctatgaatgtttcttattgtacttgctccataatgttttgtgaccttgcaaacttgggacttgtggacttgtggctcttgaactttatgatgaacttgttatattatgtacttgttttctttgtgatcaacttatcatattgtgaacttgtgatatatgtgatcaatttgtaatattatgaacttgtgatctttgtggtcaacctattatattgtgaacttgtggtctttgtgatcaacttgttatattgtgaacttgtggtcttt

SEQ ID NO: 16165 - DNA, 771 bp, Zea Mays
ggcagactggtggtgggccaagctgtagcgaaagagaaggctttgtggtggcgggcggcggctacagctggagctggcgacgcatcctcctcgtccgacgagggccgtgccgccacttcaagcagggccacttcaagcagcgccgcccttcgctaccaagaacccgacctatgaggctgtgaggagtactacaagaaaaatatttggcagatccaatactaaaggttggtaaaagtaatcaacacacttttgacatattagcatggtggaaagcacacaaagaagatggtctacaccaaagattggatagctagagcaagaaaaggttccaaggctaagagtgttgctattcctaatatggtttatgaaatggatgaacttgaggctcttgcaagaaatccttcatttgaggatgaagacctagatgatgataatgatgatggacctgaggcatcgttgtaagcttgttgatgaagatctagatgatgataatgtaccatgaatgctatgaatgtttcttattgtacttgctccataatgttttgtgaccttgcaaacttgggacttgtggacttgtggctcttgaactttatgatgaacttgttatattatgtacttgttttctttgtgatcaacttatcatattgtgaacttgtgatatatgtgatcaatttgtaatattatgaacttgtgatctttgtggtcaacctattatattgtgaacttgtggtctttgtgatcaacttgttatattgtgaacttgtggtcttt

SEQ ID NO: 16166 - DNA, 733 bp, Zea Mays
ggcagactggtggtgggccaagctgtagcgaaagagaaggctttgtggtggcgggcggcggctacagctggagctggcgacgcatcctcctcgtccgacgagggccacttcaagcagcgccgcccttcgctaccaagaacccgacctatgaggctgtgaggagtactacaagatccaatactaaaggttggtaaaagtaatcaacacacttttgacatattagcatggtggaaagcacacaaagaagatggtctacaccaaagattggatagctagagcaagaaaaggttccaaggctaagagtgttgctattcctaatatggtttatgaaatggatgaacttgaggctcttgcaagaaatccttcatttgaggatgaagacctagatgatgataatgatgatggacctgaggcatcgttgtaagcttgttgatgaagatctagatgatgataatgtaccatgaatgctatgaatgtttcttattgtacttgctccataatgttttgtgaccttgcaaacttgggacttgtggacttgtggctcttgaactttatgatgaacttgttatattatgtacttgttttctttgtgatcaacttatcatattgtgaacttgtgatatatgtgatcaatttgtaatattatgaacttgtgatctttgtggtcaacctattatattgtgaacttgtggtctttgtgatcaacttgttatattgtgaacttgtggtcttt

SEQ ID NO: 16167 - DNA, 479 bp, Zea Mays
ggcagactggtggtgggccaagctgtagcgaaagagaaggctttgtggtggcgggcggcggctacagctggagctggcgacgcatcctcctcgtccgacgaggtatcacctaattcccagcttgttctccctcatctggcctggcgcaggtagaagcactatcgcacgtagtgccgccacttcaagcagggccgtgccgccacttcaagcagggccacttcaagcagcgccgcccttcgctaccaagaacccgacctatgaggctgtgaggagtactacaagcagttgacatgattaagtcaagtatcgaagaagagcttgatagctatatatttgatggacaaggtcatgatgattctattgacacaagtgacttagaaaaatatttggcagatccaatactaaaggttggtaaaagtaatcaacacacttttgacatattagcatggtggaaagcacacaaagaagatggtctacac

SEQ ID NO: 16168 - DNA, 2015 bp, Zea Mays
aattcatttccacagaacaatttttgccgaccaggcagacatcgaagtgcaatccctgcaccgacgggcgtgaacggggagagagggatttggcggcaacccgacaagagtaagcaaatgcgccgcaccgcactctggaaaacgcaacttgtgcggtgtccagtgcgccacaactagacggaccagaggacgctgccacactatagatcccgtgcttggctgtacaagaacaaccgcactgatgctaccgaccactggtgtccgattaagcagctcatttctaagaagccgacccaggccagccgatatcgagcaccaacgacacaccccattgacgtacagctatgatgcggccgacgtcgacccttgctatggtcgtgccgtcgctcgctgtagccatcctctgcatcctagtccggtccgcctccgcggagttctggctcgacgagttcaccacggacggcgacgtccgcagagactacgaccgttctggccggcaggtggcgtcgcttgtcctcgaccagcgttctggcgctggcttcaactccacgcgcaagtacctcttcggcgagttcagcgtggagatgaagctcgtcggcggcaactccgctgggactgtcacctccttctacctgacgtccggcgagggcgacgagatcgacatggagttcatgggcaactccagcggctccccgacggtgctcaacacgaacgtgtgggccaacggcgacggcaagaaggagcaccagttctacctgtggttcgacccggccgccgacttccacaaatacaagatcgtctggaacgacaagaacatcatcttccaggtggacgacgtgacggtgcgcgtcttcaagcgctacgatgacctgccgtacccggacgccaagcccatggcggtgcacgccacgctgtgggacggcagctactgggccacgcgcaagggcgaggtcaagatcgactggtccagcgcgcccttcgtcgtctcctaccgagactacaccgccaacgcctgcgccgtccacggccggaacggcggcggcagctcgtcgtgccccgccggtgccaacgagtggatggacaggcagtccgacgacaccgaccgtctcaccgtggcttgggcgcgccggaactgcttgcagtacaactactgcgatgacgggtggcgcttcccgcaggggttccccggagagtgcgcccgcaactgatccaccatctgccctgcagtcgcgagtctccaagtctcgccggcctcatcgcatcctcttaccgcagatataggcatactagatcgagttcattcttggattttatgttcttgtaattgtcttattgtacgtacgtacatcgtctcttccgactcacaaagagcccagcagcgtgcgtcctggatctggatgcatatcgaagttacagaatgcgatcatggagatctcgtgtccatctcgatcagagtcccagatgatgcaagcttctacggatccatgtgcgcgcgcacacggtcagcatgcacaccgacgggcgacaacatgtcatggcatgtgctctcgattgatccggtgaattgatccacagaatatgcatggttggtggtggctgggtgggtaggtgagctggtcaacaccgactggacaaaacgcgcgggatccagccaggcgcacctcatatgcatgtgccacagtgccaaacgtctagaacaagcgacgcccactgcatgatgacacggccactgctgacctggtccatgcatcgaggttagagacatcgtatatgtttgctgttggagagagagtctccggacaaagatccaagttagtaaaatcagtttttttaatggaaacaaaaggagatgagggtccctactgtataacttatattaaaataaatagagatgtgtataaattgttacatagtaaagatgggaacacaattatggataaggtggtggagtgctatatgttgtattgttcggtgtggggaaccccaaatgttaagccgagcaggtatagtatccc

SEQ ID NO: 16169 - DNA, 2341 bp, Zea Mays
gccgcgcactcgaagtggccgagcgtagggacatggtgggctagtgaggggtcgctgcgtgtggaagaggctgtctcagacgaaaggctgctcgtctgagcaggggagaaaggaacagttggagctcttgctgccgactgagtgtggggagaggcgcgggaaggagatgagcaagagatgtttaggctgcaggatagtttggctctgataccaattgtaagtaaagggactctaactctcatcaagaggatgacactatgagttggggcaattttctgtttatttcctcaaacactacacaatgccatacccttagaggggttggggacacatatttatagccctaggggctgcactaccacatcttctcacacacactacacaacaggattgtcctctagatgctaaagagactacagaggacagtcaaaagcgactgtttgtcctctagatgctaaagcgaatacagaggacagtcaaaaaacgactgctgtcctctagatgctaaagagactacagaggacagtcaagctgtcctctagatgctaaaggactacagaggacagtcaaaagcaggctgtcctctagatgctcaagacttattccatcacaaggtcctagccataataagttaataacatcaaaacacaccaggatctattactagaactctgcacacatagaaattctagaaaaccactgggtgcaacatcagttcatcacaaaaggcagtactaaaagcatgtgcaagcatacaatttcctggcacaagcagcatggtttaattgtcacataggacagagcatgttctccacatggttccacctctgaattccaataaatcggataacatatgtaataacaaaataagggcatgtttgatacacatggcaaattactagctggtcgaaaaatgagctcaaactagctatggttatctagctagtaggctaactgccagttaaacacttggctaaaaaactagccacctattagctcttctatttggatgcactagagctgttttttagctagctagcaattagctcttggatccaaacatgccctaaatctgtaacccaatatcatttttttacatgtgagggtcaaaagtccattgtatataagataattgcacagtgagcaacaaagcttacagtcctgtccatgacagcacgagtccaaaaatatataataaaaattaccacaactaccatcctgaaagaaattagaggattcaaatgaactactatctatgtccttgaccggtgcttttgaattgtgggggataaaaaggacaactaaagtttaggtagcatggtctttgttgacggtgggattgccggagtggaagtacagaaagacagcgtgcaacgcacagcaaaaacgactccttaatgccgcactatcctggtccctgtcgcaatggaatcgaagggctttttccgagagcatatcaggtgcaccatgtgcacatattaaatccatctgagatccttggggtgcggggtgcaaaatacataggacatgaaggggaggacgttggattggatgcccgtgattcaatatgtgccgacccatgtacatctgattttttttttcctggatgttgaaagctgaaacaagaatatccaaatcagtttgtacctccaccactaatgaatcaaagatccaggccctgctcatctccagaataagtcggcacaacacatacatctattccatattcacattgacccaaattggagtaattctgattctagtttcaagataacatgggacatctacccagggaagcattaataacgaccgatgtacatcggcagaaacacgccggggaaaatccctagaaaaaatcgttaaaataaaaacaggcacgcagcaaacatggaacgactacattgaacgactgatttgaaaggtaagcgggagtttggattccagcgctcaaatcaaacaaggcgagaataacgcaggccgaaacgaaacggacaagcaagtccatcctatccctttccgaaccagccaaagacgcgaagacaactggaagggaacacacaactccgtttggatctccactctgtactagaggcgtgcgtagggaagggatgcggacgcctgccgacggggaaggaatggcgggaagagacgcggttgcggcggaagcaaagatacatacctggatctggataaggcgtggccaggcggcgccgagggcggcgaggaggccactgccagacgggggacggagcggacccggcggtccttggaaagcgagagagcgtggccggtgaaccgtgcgatattgacgacggtcgaggagggggaaatccggcaaaag

SEQ ID NO: 16170 - DNA, 182 bp, Zea Mays
attgagtggtcctcctgagcgccgagaagaagatctacggtgcggagggggatgaggtgtgcagcggcaatgaggttgggaggctcaagtagaagataggggcgggtggccgccgacttgccgcgccgccagcggccgccgcaaggagaaggacgggaagcttcgggggcggctagggtagg

SEQ ID NO: 16171 - DNA, 228 bp, Zea Mays
atggcggcggcgatgtcacaggggacctctggctcttgcgggaccaggagagggctgaccttcgatcgcttgcccttcctcctggtgtatactatcccaaacctcctgctgccgtcctcgtcctcggcgacgacctcatcggcggggtgcctccggcggcgacggcgtttccttctgtacacgagcccgaaggactttgtcagagctggcaatcccggtttggggtaa

SEQ ID NO: 16172 - DNA, 193 bp, Zea Mays
gttggatttccatattatcatatttaaagtatattgttcagtagggtttgttatgcagtagtaattacattgcaataaagcttcaggctttccacgaccagcttggcttttttgtctcttgaaagatctctttcgcttcatggcagacttttgtgataaatgccctcgccttatgggtgcaccctaagattgg

SEQ ID NO: 16173 - DNA, 238 bp, Zea Mays
gtttcttctcacgaaaatgagaaccagcgcaacgctcctcatccttgtagccgcctccgggccacagcagtcgcacgtcgggtggtcctcagttcccagtcactcacttccttttactgtgcggtgtcacaaccctgggacggtggagcgcaagccaccgtcgtgagctgttgccaggcggaagcaaacttccggatgcgcttcaacaggcaagctatcgaggattaagcggtcttta

SEQ ID NO: 16174 - DNA, 4041 bp, Zea Mays
tgagcttcacgcctacttgcgagcgagccgcgctcgcgtgcgcacagcctggggcgccgcgtggcccacgatgccacgtggctgcttgctatcagtcattgccccagccttgagttgaagatagagccgacgtctacttcttcagaccgcttgctacgtctagtttatgtttcttctcacgaaaatgagaaccagcgcaacgctcctcatccttgtagccgcctccgggccacagcagtcgcacgtcgggtggtcctcagttcccagtcactcacttccttttactgtgcggtgtcacaaccctgggacggtggagcgcaagccaccgtcgtgagctgttgccaggcggaagcaaacttccggatgcgcttcaacaggtagaaacggtggaatactttctgcaattcttttttttgtcctcttatctagtatttgtccagtatatatagtacaacactagactaatacaacccactagtaaaatggccacaataggcctattactcacagattacatcttgattacagctgattacccaacaatcaagtagtgccattcctaacattaccccctcgctagagtttgattgtccacaatcaagtgcgtctgggaagcgcttcttcatcacctcatagtcttcccaagtagctgcatcttatagtaaatgagaccacaccacacgaatttgaatcacaacatgactcccttttctcaccatgcgataatcacaatgtacaaatgcttgacctctacttgagacagatccaccaactgagacagatccgaaaacacaggagctgcatttggtgtgaaagctttcaactatgaaacatggaatactggaagtaccaaagaattctcgggcagttccaaataatatgccactaacccaatcttcttcaacaccttgaatggcccaaagtacttataggctagtttagggcaaggatgattaaccactgaactttgtacataaggttgcaatttgagcagaaccaattccccttcttgaaacactcgatcagaccttctcttatcagcttgaattttcattcgattctgtgctgctgctaaccgagacttcaatatttctgaacactattgtcttccatcaacaaatcatggactgattgatccttttcctcagacaacactggtgctgcagcaaacattggatcatacccatatagcaccttaaaaagagaaaatccaagagcagtgtgataggatgaattgtaccagaattctgctaatggaagccaccttttccacttagcaggacaatcatgaatggcacaccttaagtacatttccaagcattgattaaccctttctgattggccatcagattgaggatgataagcagtggtcagagccaactttgtgtccaaagattgaaataaggacttccaaaaatggctagtaaaaatcttatccctgtctgaaaccaatgatgaagtttcaccacattatccaaaaacacttgtgccatagttgctgccgagaaagggtgtttcaaagcaaagaagtgtgcatacttggagtatctatcaaccaccaccaaaatagtatcacaccgttctgacattggaaggccttcaatgaagtccatagtcaagtcatgtcatgcaccctaaggaataggtaaaggttgtagcaatcctggtgagagaactctctcagatttagcatgttgacatactaaacactgctgcacaaacaatttgatatcagttttcaaccctttccaccaaaacaacctcttcactctgtgataagttgccaggctgccaaaatggcctcccaccatactgtcatgtagtgcagcaataatctttgttctgagagctgagttctgagcaacccaaatctgattccgttttctaatcacacctttctgcactgaaaacccttgttcattgggactatgaatgacagctcataatctctgagcttcatcatcagtcacataagagttaagcacctcttgtacccacaaaggcttcacttctgtcaaagtctgcagtgccataaaatgcccaactctagacaaagcaccagcagcaatattctctttaccttgtttatagacaattttgtattgtagtcccattaatatagccatggccttcttttgcaatttcgactgcaatacttgctcatttagaaaactcaatgccttgtgatctgttcgaatcacaaattcagctctttgtagatattgacgccacctttcctctgccattaaaagagccaagaattccttgtcataaatggatagcatctgatttttctcacatagagctttgctaagaaatgcaatgggtctgtttctttgcattaaaactgccccaatcccatccatgcaggcatcagtttctaccataaatacttcttcaaaattaggcaaagctagcactggtgtctcacacatagcttgtttcaactgctggaaagttgtttaagcaccttgactctagtgaaatgccttatgtttgagaaggttagtgagaggtttagcaatgattctataatccttcacaaatctcctataataccctgttaaaccaaaaaaacctctcaactcagtcacactggtaggtgtaggccacttctccataacctcagttttagaaggatcggtggatactcccttctgagaaataatatgccctagatacaacaactccaacttcccaaaaacacacttcaattactttaaaaagaacttgtgttccttcaacttctcaaacaccagtctcaaatgctgtaaatgatcagcccaagatgcactatagatcaatatatcgtcaatgaataccaagacaaatttacgaagaaagggtgctaacactgagttcatagcacactgaaaagttgaacgcgcattagtgagaccaaaaggcatgaccctaaattggtaatgaccttgatgagttttaaatgctgtcttgaattcatctgtctcacccattcgaatctgatgatacccaactgtaagatcaagactggtaaagaattgtgtgcctaataactcatctagaatctcttcaactagtggcataggaaatctgtaacacccaaaattctattttggaatttataactttaacaattaaaaatgtcccaaaatgaatatattgttcaaacaaaagactaaaataaaagatacttaaaaattaaattatacttggtttggattagatatagaagaattatgtgttagacttttctttttgataaaataattggaaatattctttggataggttgagataaaactatcccttagtataaaatttatttaattgtgttctttaaaacatatgatttagatatataataacaagaagatttctcatgtgttttaaaacaagtgggatgtttctttcattaactgtgtagtttaaaatattcatgaataaacaaatacagaaaaaagagaataaatgaaatatttatgcaaaaacatgttctgagcattttcaaaatttgaggtaaacttgaatcaaattctaatttgaaatataaaaagaaaaagaaaaaagaaaaaaagaaaaggaaaagcttaccttcgctcggccgaattcactaaaccggcccaacacaaacgacctgtgcgctgggtgccgccgacaggcgggccgctcctatcgaccccccgcgcgccctcgtagcactgccaccagggcccggacgggcagaactcccgagtttttccaccgcgcgtatgcttggctgactggtgggctcggcttgtcagccgaccctatacatcttcccgaacgactcctctgcgtggttccgccgccagcgccaggatagctggcttgctgcagaactcacggtccgttacatcctccttcgccttggcacgcgattcagactttaggatataaagcgtgggaccctgaacaccccctgtccatcatttgtggagcgccatagactgccgaccaagccgtgggggaaattttgagccgccaccgctgaaccgacctcacgtccgaattttttgtattttagcccttaaaccgaag

SEQ ID NO: 16175 - DNA, 2189 bp, Zea Mays
gtttatgtttcttctcacgaaaatgagaaccagcgcaacgctcctcatccttgtagccgcctccgggccacagcagtcgcacgtcgggtggtcctcagttcccagtcactcacttccttttactgtgcggtgtcacaaccctgggacggtggagcgcaagccaccgtcgtgagctgttgccaggcggaagcaaacttccggatgcgcttcaacagacaacactggtgctgcagcaaacattggatcatacccatatagcaccttaaaaagagaaaatccaagagcagtgtgataggatgaattgtaccagaattctgctaatggaagccaccttttccacttagcaggacaatcatgaatggcacaccttaagtacatttccaagcattgattaaccctttctgattggccatcagattgaggatgataagcagtggtcagagccaactttgtgtccaaagattgaaataaggacttccaaaaatggctagtaaaaatcttatccctgtctgaaaccaatgatgaagtttcaccacattatccaaaaacacttgtgccatagttgctgccgagaaagggtgtttcaaagcaaagaagtgtgcatacttggagtatctatcaaccaccaccaaaatagtatcacaccgttctgacattggaaggccttcaatgaagtccatagtcaagtcatgtcatgcaccctaaggaataggtaaaggttgtagcaatcctggtgagagaactctctcagatttagcatgttgacatactaaacactgctgcacaaacaatttgatatcagttttcaaccctttccaccaaaacaacctcttcactctgtgataagttgccaggctgccaaaatggcctcccaccatactgtcatgtagtgcagcaataatctttgttctgagagctgagttctgagcaacccaaatctgattccgttttctaatcacacctttctgcactgaaaacccttgttcattgggactatgaatgacagctcataatctctgagcttcatcatcagtcacataagagttaagcacctcttgtacccacaaaggcttcacttctgtcaaagtctgcagtgccataaaatgcccaactctagacaaagcaccagcagcaatattctctttaccttgtttatagacaattttgtattgtagtcccattaatatagccatggccttcttttgcaatttcgactgcaatacttgctcatttagaaaactcaatgccttgtgatctgttcgaatcacaaattcagctctttgtagatattgacgccacctttcctctgccattaaaagagccaagaattccttgtcataaatggatagcatctgatttttctcacatagagctttgctaagaaatgcaatgggtctgtttctttgcattaaaactgccccaatcccatccatgcaggcatcagtttctaccataaatacttcttcaaaattaggcaaagctagcactggtgtctcacacatagcttgtttcaactgctggaaagttgtttaagcaccttgactctagtgaaatgccttatgtttgagaaggttagtgagaggtttagcaatgattctataatccttcacaaatctcctataataccctgttaaaccaaaaaaacctctcaactcagtcacactggtaggtgtaggccacttctccataacctcagttttagaaggatcggtggatactcccttctgagaaataatatgccctagatacaacaactccaacttcccaaaaacacacttcaattactttaaaaagaacttgtgttccttcaacttctcaaacaccagtctcaaatgctgtaaatgatcagcccaagatgcactatagatcaatatatcgtcaatgaataccaagacaaatttacgaagaaagggtgctaacactgagttcatagcacactgaaaagttgaacgcgcattagtgagaccaaaaggcatgaccctaaattggtaatgaccttgatgagttttaaatgctgtcttgaattcatctgtctcacccattcgaatctgatgatacccaactgtaagatcaagactggtaaagaattgtgtgcctaataactcatctagaatctcttcaactagtggcataggaaatctgtaacacccaaaattctattttggaatttataactttaacaattaaaa

SEQ ID NO: 16176 - DNA, 1681 bp, Zea Mays
gatctgactgccgagggtgttagcatgggctatagtaggcaggacccttgtgttttaggtagtgcggctgcataggcatgttgccttgtgcgccctctcctagttttagttatttggttgtaataggcaaggatcttcctgattggattgtctaggattgtttcctattgtctaaagatagtttcccattgtccaggatagtttcctattcctgtgaacatccttgcctatatgtactcgagcctttgctcctattaaccattcaacattttcccaatacactgtctttcagtttggatgctagttagaagtattaaatatagtctaagtacaaaactaatcacacagatgaggactaaacgataagacgaactaattaggcttaataaatttgccttgccgtttagtcttcagctgtataattagtttataatttgactatatttaatactcgtaaaagacattcaaacatctaatatgacttaacaccgtctaagtatccaccatcctgctaactccctggactgagtcgctgccttgagggtcacaaattgaggcttcggtttgaattagatcatctcagagaagtagctaggaacagtaaagttcttttaattatatgcacaataattctaaatggcactgaaaacgatacttggtacattattggtgcatgcattttactgttttcccattgtttcaaacatgcatatgtttgcttaatctttctggaagcaatacatctactctaagtttaccaaatacctagatcattagcttaaatagtattaatttaaagcacttgaatttatctttggcattggaaaaaggggattttatctctagtctatcccaaacttggttgggactaaaaggctgttattattggcctccaggagaacagatttagatactcccaaacatcagtcatatatgtgctttaaaccagatgcatcttttatttggatgttaagttgttaactaaatgtgccccctcctattgtgtcctgtcctgcctcatcccatgaagcaaacactagaataattttggtcttcttggtgtgcttcgatgtagttaaatatcacagcagtctttactgacaatatgtatttacaggtctattcaacttcagttgcaatgcttctgacagcagttgtatctgtcttcttgttcaacttccatttatccctcgcattcttccttggatccacagttgtttccgtctcagtgtacctgcactcaattggaaaacttcaaccacagaaataagatggaatatgggattcattatcggtgtttggtgctttgaggctataagaaaagcttcagtggagatgagatttgattgcatagttgtgaaagttagtaggtggtcaaagtaagaaccagaaatgtatttttggaggggttctagctattatccggtctagtttttgttctattctatcaagtcgagttcgttgatcgctaaccgcatccgtgcctagtttttgatatatcaaacgcacatttattgtaatgctagtattttgaaatactaggtagtacccaattgttgtatggagctagttgtcttttcattctaatgtatagaattaccattctttttaccaccgagcgtgtggaccgatgttgaggccctttttactctcttgattacataatccatctaataaatct

SEQ ID NO: 16177 - DNA, 285 bp, Zea Mays
tgctcctgctcttcagcatcgtcgtcacactttttctgttatgtcgcaagcattcctgaattggtacgctagatgattatgcgaattggagggcatggatcaggatggatcacaaggtggctttgatggacccatcccgatatggacgacttgatcaagtgtcatgattttgaggctcaccaagcggacatcatctaaccacactaacctagtgttatcctaggcaagccctggtgcattacccacctccttctattttaaaaagttttatcaccttgaatgatg

SEQ ID NO: 16178 - DNA, 1721 bp, Zea Mays
gccttgtctgcctggtcgcgtttttttcttctttcggatttgggtaaacacacggtaatccgtactttgtggactcaccaactccacgttacacaacccagccaaaaagcaagatttgtcataatcctttgagcctaaatcatttatttatttttggtttctctgaagattcggttcttcccagagttactagagactagacgctctgaaggtcccgtggccgtggatgcgaatcgatggccggggttgaggaagaaggcgaggtggcggccctgcgggaggccctgaggcagcaggtgcaggccgtggaggagctgcgggcggagctggaggaggagcggcaggcggcggcgtcaggagccgatgaggcactggctatgatcctgcgtctgcaggcggagaaggcggcggagcgtatggaggcggagcagttccaccgggtggccaaggagcggatccagtatgatgaggacacgctggctttcctcagggccgtcgtcttccaccaggagatggagatcagctcgctcaaccgcaggctgctcgccgtccacgccaccggggacgatcccctttcgccggcagtcgatctcccctggctgaggaagctggccaagagcggcgtggcgtccaggaggaacgcgtccctcccggcggcacacctggaggagctctgctcggagctcgacgtcgtcgtcgacacggacgccgacaagaagagggtgggcgaccggaggccagcaaggacggtctcggacatcggcgaggtgatcagcagggagaaggagtgggcgacgagacccaatcagacggcgccaacgcccaggctgtaccggtcggcctcacactcccacggcctcccccggcgcgcgacgtgctgctccgcgcagtgtggcgtgcgctccgcaggccgggcctcgccagagatcatcgccgaggaagacgagaaatcgtgcaagagcaacgccgcactggaagccgacatcgagcagatcaaggccaccgtgctgtctctccacaccgacctcacaaagctaagagaatccaccttgtccatggcagacgcacattcccagatactagccgagatccacgcaaagctcgacggcgtcacgccgcggcgacagacgaacttcgaaccaaggtctgagctgctgctgaagaaggccaccagaggaggcagcagcaacagttcttcgtcttccaaggagcagagctaccaataccagtggcaggctgacgtgctgatgaaccatttcattgaggcagtgatgtgcataacgtgagaactgaagatctaaacgatatctattggtggtgaagattttcaggtgtgagtaaaagattgattattgctaaattcttttttttaaccctctgttggcatatacagccatcagccgtgagacaaaatcccatgtataatgctgttattatgacaagaaagatatagtttatgtaaagttattgacgataatttgtaaaggtctttaattaaatagaaatggtgatattattgttactatagctgacaataacatagtggcaccggtggaaatacactgtcaacgagcagtgaccttgtcaagtacatttaaaaaatcaccttttgggcagttcattacctgtagcatacacaacaggtaccatcagcaaggacatactcaacaaataactagaactaatcaggtctcgtatcaaacactaagggctagtttgac

SEQ ID NO: 16179 - DNA, 1318 bp, Zea Mays
tgacgcttgaagatcactcaacatcctcgtcggaaaatcggagcttccggcgtccgttccgcttcagcaacactatctctctcaaagggccgtcgtcttccaccaggagatggagatcagctcgctcaaccgcaggctgctcgccgtccacgccaccggggacgatcccctttcgccggcagtcgatctcccctggctgaggaagctggccaagagcggcgtggcgtccaggaggaacgcgtccctcccggcggcacacctggaggagctctgctcggagctcgacgtcgtcgtcgacacggacgccgacaagaagagggtgggcgaccggaggccagcaaggacggtctcggacatcggcgaggtgatcagcagggagaaggagtgggcgacgagacccaatcagacggcgccaacgcccaggctgtaccggtcggcctcacactcccacggcctcccccggcgcgcgacgtgctgctccgcgcagtgtggcgtgcgctccgcaggccgggcctcgccagagatcatcgccgaggaagacgagaaatcgtgcaagagcaacgccgcactggaagccgacatcgagcagatcaaggccaccgtgctgtctctccacaccgacctcacaaagctaagagaatccaccttgtccatggcagacgcacattcccagatactagccgagatccacgcaaagctcgacggcgtcacgccgcggcgacagacgaacttcgaaccaaggtctgagctgctgctgaagaaggccaccagaggaggcagcagcaacagttcttcgtcttccaaggagcagagctaccaataccagtggcaggctgacgtgctgatgaaccatttcattgaggcagtgatgtgcataacgtgagaactgaagatctaaacgatatctattggtggtgaagattttcaggtgtgagtaaaagattgattattgctaaattcttttttttaaccctctgttggcatatacagccatcagccgtgagacaaaatcccatgtataatgctgttattatgacaagaaagatatagtttatgtaaagttattgacgataatttgtaaaggtctttaattaaatagaaatggtgatattattgttactatagctgacaataacatagtggcaccggtggaaatacactgtcaacgagcagtgaccttgtcaagtacatttaaaaaatcaccttttgggcagttcattacctgtagcatacacaacaggtaccatcagcaaggacatactcaacaaataactagaactaatcaggtctcgtatcaaacactaagggctagtttgac

SEQ ID NO: 16180 - DNA, 1187 bp, Zea Mays
tgacgcttgaagatcactcaacatcctcgtcggaaaatcggagcttccggcgtccgttccgcttcagcaacactatctctctcaaagttactagagactagacgctctgaaggtcccgtggccgtggatgcgaatcgatggccggggttgaggaagaaggcgaggtggcggccctgcgggaggccctgaggcagcaggtgcaggccgtggaggagctgcgggcggagctggaggaggagcggcaggcggcggcgtcaggagccgatgaggcactggctatgatcctgcgtctgcaggcggagaaggcggcggagcgtatggaggcggagcagttccaccgggtggccaaggagcggatccagtatgatgaggacacgctggctttcctcagggccgtcgtcttccaccaggagatggagatcagctcgctcaaccgcaggctgctcgccgtccacgccaccggggacgatcccctttcgccggcagtcgatctcccctggctgaggaagctggccaagagcggcgtggcgtccaggaggaacgcgtccctcccggcggcacacctggaggagctctgctcggagctcgacgtcgtcgtcgacacggacgccgacaagaagagggtgggcgaccggaggccagcaaggacggtctcggacatcggcgaggtgatcagcagggagaaggagtgggcgacgagacccaatcagacggcgccaacgcccaggctgtaccggtcggcctcacactcccacggcctcccccggcgcgcgacgtgctgctccgcgcagtgtggcgtgcgctccgcaggccgggcctcgccagagatcatcgccgaggaagacgagaaatcgtgcaagagcaacgccgcactggaagccgacatcgagcagatcaaggccaccgtgctgtctctccacaccgacctcacaaagctaagagaatccaccttgtccatggcagacgcacattcccagatactagccgagatccacgcaaagctcgacggcgtcacgccgcggcgacagacgaacttcgaaccaaggtctgagctgctgctgaagaaggccaccagaggaggcagcagcaacagttcttcgtcttccaaggagcagagctaccaataccagtggcaggctgacgtgctgatgaaccatttcattgaggctatgaggtaattggctttt

SEQ ID NO: 16181 - DNA, 1449 bp, Zea Mays
tgacgcttgaagatcactcaacatcctcgtcggaaaatcggagcttccggcgtccgttccgcttcagcaacactatctctctcaaagttactagagactagacgctctgaaggtcccgtggccgtggatgcgaatcgatggccggggttgaggaagaaggcgaggtggcggccctgcgggaggccctgaggcagcaggtgcaggccgtggaggagctgcgggcggagctggaggaggagcggcaggcggcggcgtcaggagccgatgaggcactggctatgatcctgcgtctgcaggcggagaaggcggcggagcgtatggaggcggagcagttccaccgggtggccaaggagcggatccagtatgatgaggacacgctggctttcctcagggccgtcgtcttccaccaggagatggagatcagctcgctcaaccgcaggctgctcgccgtccacgccaccggggacgatcccctttcgccggcagtcgatctcccctggctgaggaagctggccaagagcggcgtggcgtccaggaggaacgcgtccctcccggcggcacacctggaggagctctgctcggagctcgacgtcgtcgtcgacacggacgccgacaagaagagggtgggcgaccggaggccagcaaggacggtctcggacatcggcgaggtgatcagcagggagaaggagtgggcgacgagacccaatcagacggcgccaacgcccaggctgtaccggtcggcctcacactcccacggcctcccccggcgcgcgacgtgctgctccgcgcagtgtggcgtgcgctccgcaggccgggcctcgccagagatcatcgccgaggaagacgagaaatcgtgcaagagcaacgccgcactggaagccgacatcgagcagatcaaggccaccgtgctgtctctccacaccgacctcacaaagctaagagaatccaccttgtccatggcagacgcacattcccagatactagccgagatccacgcaaagctcgacggcgtcacgccgcggcgacagacgaacttcgaaccaaggtctgagctgctgctgaagaaggccaccagaggaggcagcagcaacagttcttcgtcttccaaggagcagagctaccaataccagtggcaggctgacgtgctgatgaaccatttcattgaggtgcctcttgattttgggcttggccgtcgcgattagaaaagttttgattaactcctaacgtgtaagcaatgccatggtcagttctgtcagtgcaaaatttgtttttgctgtttttattagctctttatttaatcaggcattgtaataataatatatagcatctcttctgagatgaacgaaaggtgaaacaataatttgcggcctttttttacctcatcgttattattatgttacttaagaaacattcggtagcatgccaaatcaatgcacgactgcttgtttg

SEQ ID NO: 16182 - DNA, 331 bp, Zea Mays
cccaagtctcggccacaatctcgtgcatgggcggaaaccaatggggaagccagcaggagccgccatcgtcgatcagatcgatgactgctgtttaaagtcccaaggtggccagggtgcatcgctggggcacgctgtgtgagggcgtgaacatcctgagcttggtttgagccatcgaaattcttctctaaaggtcctccttcaccgccgagccaccatgcacgacgccggggcaccatgctgcacgtttgcaaggaagaacaagccgcacgcatggggcgtcagggatcggggtggtggtggccgggtggtaccctgccggcggcccgttgac

SEQ ID NO: 16183 - DNA, 547 bp, Zea Mays
cttgctgcaatttactgttcagaagaaaagaaagaagtcctgaacacgtggttgtgtaagcacagttgatttacagtgtcctatttgctgttgttatgtttacttgctgagatgtgttatctcacatcttgcattgtttgatgcaggcacctaatttctgctttggggaatagagggatgtagcagcacggccactacacctttaataaaggaaccaccatttattaatgttgttaatcaaagttggacaagtctagtgaattgctttattcttggttgagcggttattttggggtggactgagttcttatcccattcgttttacttcagttgggtcataattaagttttaccactcttgcattacagtttctactatgtgaattatatgtctttatatcttgtatgtgcgtcatgttttcccctccttgttatgctagttttcaaaggaggtgctgccggattttttcttgctttatattctttctttattacatctcttgtgttgagtaagtttggtagatgaggtttatggtattatccatttt

SEQ ID NO: 16184 - DNA, 1204 bp, Zea Mays
atcagattgagatggaaccaattgcggtgcagcaggatctgactctggagtgtcgtccggtgcgtatattggaattctcggagcgtgtgttgaggaagagatcaattaagtatgtcaaggtcttatggtctaatcagtcggagcgcgaggctacgtgggaacatgaggagttgatgcggcagaagtacccggaacttttcgttgtaggtaagtgttgttgattcgctaatcttttcttgtgtcattccgatagaagcgtcagaattcgaggtcgaattctttttaagaggggtagaatgtgatacccggtttgcaaagaagagaagttgggggttgttctttttggttttttttcctcatccagttgttgttttggggatttggaattttgtggacaacattcacaactagggcagtagaatttatttggtttgacgtttgcgttgcggtcgggagctgtcgcgtgggatagttgggctgcaattggtgtttcggcccattaactctcccaaaccctagccgcctccctcctaactaccccccccccatgtgcagccgccccccactcctcctttccccttggccgccgcccccctgcccatctcctcctctctccattgttgcagccaccaaaaccctagcccccccccaatcccctcctcccaaggtgctactccgtgccgctcggatcatcgtctcttggtgcgaatctccaatcgttttggtggagggaagaagggaggaaggaaaggtggagaacccaaggtgatttttcttttgtgttcatcccttgttcatttgcgctgcgattcaattgattagatgttgcgtttgcgattagatagaggggggctgtccagaattttgcgtggtggatgaacagcggtagttccagcagtttttagtttttttttcgtgaagatttaatggggatcaatttggggatcttgtagaactttgttttatctttccaacgagtatttatgcgctcaatttggagttataaattaaaagttatcatcgtttgaatccgggtatgtggctgtccaaaaaacagatttttcagagtgatgaacagcagcagtgttagcagtttctggggatttttcgggagtaattagtgttaatcagtatgagaatcatgtagggctttttcttatctttccaacaagtacttatgcgctcaaatcggaattatatttta

SEQ ID NO: 16185 - DNA, 176 bp, Zea Mays
cccatctcctcctctctccattgttgcagccaccaaaaccctagccgccccccccaatcccctcctcccaaggtgctactccgtgccgctcggatcatcgtctcttggtgcgaatctccaatcgttttggtggagggaagaagggaggaaggaaagggggagaacccaaggtgatt

SEQ ID NO: 16186 - DNA, 2438 bp, Zea Mays
gtacgtgcccatctcctttgtccgacgtcgaggcttccagctccctgcgcgtcctcggcctcagctcgcccggcctccatcctgcttcctgcgccgcggcatcgcctgctccctaagctccttctttgccgcgccggagctccctccagggcgcccgagcgctctcttcctgctcaagctcaccctcggcgctcgcccctgatgcctgcgctcggctctgcgcatcttcctctgccgcgcgcccatttctctgttcgcctctgcgcacagctttccaagctccatggccggttccctgctcgtgtcgtggtctcccagctcgtcagcacttgttcagtcgtctcggctcgctcggcctcaaattccagcgcctcgccctgctctcgtggttcagcaacggccggcgcgaacctgaccgtggtggtgttgtggcatggcgacgtcgtgcgcgtcgcgacagcagtcttggtcgtgaagcagtccgcgccatagagttcgcccgagcacagtctcatcgaactgcgaagctcccttgccgtgcgctctggcatcggctgccgcagattccgccataatgttcacgagcgctccttactctgtttatttcgtcgtgggcaatttctccacgcttcaaatccgtgctgctcgccccgtgtgcgctcactcctcatcccatcgggtttcggcgtgttcacgtttgtcgtcgagtcgtcgaacccgtcatcccctgctcgacccccacctcaccagctctctccagacttcaatcgaaggtcgtcgtcgttccgtgcgtcgtcaagaaatcccaagcgtcgggtgaagacgaagctagccgcgtgatatttaccaagtactcgacagaaggcctcagcaagaatcagcaacgtttacttggaattttaattgaatcggtaaccgttctctagttcgttatttctttaattgattgagtcgatggatggaataaattaatgtgctagtgtgatgctcactaggtgctcgataaattgcgtgagtcccggaactctcgtcaacttcgcggttctcgcgattatctagccagattcagttatggcgagttatttcgctattccagtcagttagctgaattggtggaccgagtggaattttagtaggcatgtgtgatgatgaaatattttaatcacttataaagatgtgtatatatttgcgataaaaaaatgtttgatataggaacaaaaatttgaattactactttcagtaaaaagaatattggtagatatatatatggtatgattgtgttcgcgatggtgaagtagttgtgtcgcgtgaagcttagaattgaaatataaatcatacaagggaatgttgtggtggatgcatatgtcgattaggtttaaattggttctttgttgtggagtgaggagaagtagtagcgagaagaattaaattggtgcttcgtatctgatgagtggtcaatgtaacgttatggaaagtaggttttgtgtttgtgtttctagtgtctagtcgaagtatagcatgtggtgggtttcgtctaattgtatggagtcgatgccctgctgtaatatccatgatgcttaacgcttgttaattaattctaatgcttggttttaagtgtttcatcctttttagtgtagattatctatcttatactctttatactcgtgctcataaatgtgcatcttgcatctcatgaggtacgataaataatcgcgtgatgcggaagacgagccaagtcgaccccaagcgcgggctactccgcatggtgatgctgatggacgaacctgaagatggataaactgaactagtgttaagacaaagaatgatcgtcaagtggacgtcgtctaacaaacactaacgtagtgtttattccagggaagccccggtccatgcaacccattccttgtatttttaaataatttttatacactttaagtttagcgaaatgtgcattaggtttataggagttgcttggaaaccctttgatgcattgcctaccttgatatccatacctttatagatacttctgatgaagtatcaaaatatgatttacaaaaatgcttatcactgcttagatcttgtgaatacaggttgtcctttgcgttaatgcctagctcaggggttatcctaaggaaggatggcttttgcctgcaagaatattttcattgggagcaatggtggtatcttactgcaaagttccctataatgctcttttcatcctaaggaacacaaacaatcctaaggatggaagtacttaaatcgggacttgggctaggaacaggtgatgttctacccaggttgattaaggattatactgaatgtaggcttgatgatcgaggaccttttaactggtcacatgcctcatcgtgggtaagctttgcctcgggcagactaataccagaataagacaacacgtaatgggagtggagagatggcga

SEQ ID NO: 16187 - DNA, 2652 bp, Zea Mays
cttgtgttattttgatgatttctcgtggatctcgtctttagttaggttcaacccgtttgctacggcgttcttagatccatctgtgcattgaagtttgtttagcttgatggtgttagttttagttttagattgttccactgatctacgattcagctattgttggagatttgatatatatggtctgaataatagagataattgcatttttagaactccaaacatagcacttaacattattgccatcccaaacatttatttcgtagaaacaggaccatgaacatctactaattgattaacctgccattaaccgtatttgcttcgtttttctaattcatctccatctatttgtggtctacaagacagttttgcccctcacgcaataaacaagcaaagtatgaccggcaactctacagcatgcatacattaatcttcgtcatcgttcggatgctccgtggcattctgaatttgatacattaatcttcgtcatcgttcagatgctccttgacattctgaatatgagattaaccattaacattctcccagattgaataagttcttggcaactcgtatccttccggtctcaatgacagcgcaaactctggtagatcaggaacagattgaagcgcgctgcaccaggaaagtagtgaaagtgattaactcgcccctaaagccaaacaataaatatgaaccatgtaggttgttcatttatttatgttcttgagcctaattgaagcagactaccatttcagtttttaacatgttctgaatattatttttgggcaaaaagcaatcatcatcaaatacaaccctccaactctaaaattttccattttcacatgtagaactcatactgggatctatggatttacctatccttgttttgctcaaagagatggccatacacttggaacttcttctgccgtacacttggaactaatactgggatctatggatttacctatccttcttgatgtctggaatttttttgcatgattttcacgacacccaaggaggaggaaatccaagcaaagaagaaaaggctgcacatgaagaggctcaagaagcagaggcttttggctgaagtcaagttcctgcggaagagatacaaatccatgtctgagaacccttctcagacaattgtctgtagagtgaggaatccagcaatgtcgtctgcatcctggacagctggttcggcaggtgatacctggcaccagtcggttcgtgctgccgggagctccagtagaagccagctggtgcagagaacacacggtggttctccaagggcatctccagtgattgacctcaatgaggcctgtgagccgggttatgaggagatggaaatcgaagggcaacatggttacatgtctcctctaggcgtaaacaagtcaaagaggtaccctatggaaggtgctgctgccagcccaagccagatgagaatgcatgtgttctgggatgtccagaatccagcagggcgatctggaaagaggaagatctcatggcaggatcagttggccctgagagtataggtaaatgacaatgtttagctctagtacagcagtagtattctagtaggatcagtatgtgtcattgctagcctggtaaatgtaaagggatggctgggacaatctcgatggttatctgttcatgtttagtgatgctggaaacataggctgtctcacgatgaagtaaagtaggtgggcgtgtgtgtgatcaatcaccaaaatcttatggttcatactgttatggagtgctaatggttcaatgagagatgtagcttccaaggaagtaatctcctgttcatgtagagttggaaaaaatgtgtgcctgctctcttgacataaagttctagaaggaaacaatttttgcaatcttggtaaggtgttgtgaactatctgttgtcgttattgtacatatagccataatcaacgaacatcattatcacgtttaaatttatagaataaaataacttacttaaatttatagaataaaataacttaaataggaaggagagcaggtggcagagaaactgtaccttcagaaaagttggtggagcacttcagaaaagttggtggagcaggtcattagatgcttcagaaaatcgtgaaactgaagctataaatttttagaagacatttttcattttgataagtcattttgtttattatttagattaaaaatatttttaaaactgttgggggccttcggcttccgaaggtcctcaaaaacatgatttaacaatgtttttggagtataatgtgtgaacaggtatcttcggactcgaatcggtaccacagtgggagaagcccaaagaatacgaaggttgacacagcgccaaagctgtgagcaggaaagcttcggcgtgatagcagaaaaggaaaccgacttaaagatgaaaaggctgttcagacctcggtggattactatagaattactaccaaatgtaaagggcatggatgtaattttacatgagctatgtcccgtgcctataaataggtgaacagtgcccccgtactgttcacgcggactgggcatttacttttgcgtcacgcttgtgtttttaccttctttcaagccgaaggtacatttgtaatttaatatcatttctattttttcataataataatatagaaatgagttgataattatacataa

SEQ ID NO: 16188 - DNA, 1655 bp, Zea Mays
ggccaagcaagacaacctcttctcgcgcagaccggagagatgtgcggaagagagccggagagggacagcggcccactactccccaatccacgcaccattacgaccgccctcctgtctaccactactgctgataggatgatgggtacagggaggggtagttgaaactccatcagtccagtcgttgggtcggtggcgtttcttgacgagcatgcgtgcttcctcaaactagccccagcggcatgttgtcaacaatccatgggccttttggagttttcgacatcatctcacctcgcctcgcccacttcacccatgggtcagaggagctctccccttcacacgccgcccgcggcaggagagagaaagcgagggcgagcatcagcagggcaggcaggcgcaagaaacgtcccccacctcgtccaccccatcctcctcgccttccgcctttatttcttgtcgtctccttcctcggtcctatctcctcgcctgctccgcctttcctcatcggttcatcctcccgtatcctctcctcgtctcctgcgccccttttcttgggggcttgaggtgaggttatctcggccatggcggccatcaagaagaccaagatcgtcttggcgcagccagcggttggggctcagccgtcgcggccgccgttcttttctcgcgcgcccggctcggtgcgaggcgccggggacgaggcggcttacagggccagcctcaggtaccgggccctccaccaggactaccaggacctcatcaaggaaatccaagcaaagaagaaaaggctgcacatgaagaggctcaagaagcagaggcttttggctgaagtcaagttcctgcggaagagatacaaatccatgtctgagaacccttctcagacaattgtctgtagagtgaggaatccagcaatgtcgtctgcatcctggacagctggttcggcaggtgatacctggcaccagtcggttcgtgctgccgggagctccagtagaagccagctggtgcagagaacacacggtggttctccaagggcatctccagtgattgacctcaatgaggcctgtgagccgggttatgaggagatggaaatcgaagggcaacatggttacatgtctcctctaggcgtaaacaagtcaaagaggtaccctatggaaggtgctgctgccagcccaagccagatgagaatgcatgtgttctgggatgtccagaatccagcagggcgatctggaaagaggaagatctcatggcaggatcagttggccctgagagtataggtatcttcggactcgaatcggtaccacagtgggagaagcccaaagaatacgaaggttgacacagcgccaaagctgtgagcaggaaagcttcggcgtgatagcagaaaaggaaaccgacttaaagatgaaaaggctgttcagacctcggtggattactatagaattactaccaaatgtaaagggcatggatgtaattttacatgagctatgtcccgtgcctataaataggtgaacagtgcccccgtactgttcacgcggactgggcatttacttttgcgtcacgcttgtgtttttaccttctttcaagccgaaggtacatttgtaatttaatatcatttctattttttcataataataatatagaaatgagttgataattatacataa

SEQ ID NO: 16189 - DNA, 2386 bp, Zea Mays
ggccaagcaagacaacctcttctcgcgcagaccggagagatgtgcggaagagagccggagagggacagcggcccactactccccaatccacgcaccattacgaccgccctcctgtctaccactactgctgataggatgatgggtacagggaggggtagttgaaactccatcagtccagtcgttgggtcggtggcgtttcttgacgagcatgcgtgcttcctcaaactagccccagcggcatgttgtcaacaatccatgggccttttggagttttcgacatcatctcacctcgcctcgcccacttcacccatgggtcagaggagctctccccttcacacgccgcccgcggcaggagagagaaagcgagggcgagcatcagcagggcaggcaggcgcaagaaacgtcccccacctcgtccaccccatcctcctcgccttccgcctttatttcttgtcgtctccttcctcggtcctatctcctcgcctgctccgcctttcctcatcggttcatcctcccgtatcctctcctcgtctcctgcgccccttttcttgggggcttgaggtgaggttatctcggccatggcggccatcaagaagaccaagatcgtcttggcgcagccagcggttggggctcagccgtcgcggccgccgttcttttctcgcgcgcccggctcggtgcgaggcgccggggacgaggcggcttacagggccagcctcaggtaccgggccctccaccaggactaccaggacctcatcaaggaaatccaagcaaagaagaaaaggctgcacatgaagaggctcaagaagcagaggcttttggctgaagtcaagttcctgcggaagagatacaaatccatgtctgagaacccttctcagacaattgtctgtagagtgaggaatccagcaatgtcgtctgcatcctggacagctggttcggcaggtgatacctggcaccagtcggttcgtgctgccgggagctccagtagaagccagctggtgcagagaacacacggtggttctccaagggcatctccagtgattgacctcaatgaggcctggttatgaggagatggaaatcgaagggcaacatggttacatgtctcctctaggcgtaaacaagtcaaagaggtaccctatggaaggtgctgctgccagcccaagccagatgagaatgcatgtgttctgggatgtccagaatccagcagggcgatctggaaagaggaagatctcatggcaggatcagttggccctgagagtataggtaaatgacaatgtttagctctagtacagcagtagtattctagtaggatcagtatgtgtcattgctagcctggtaaatgtaaagggatggctgggacaatctcgatggttatctgttcatgtttagtgatgctggaaacataggctgtctcacgatgaagtaaagtaggtgggcgtgtgtgtgatcaatcaccaaaatcttatggttcatactgttatggagtgctaatggttcaatgagagatgtagcttccaaggaagtaatctcctgttcatgtagagttggaaaaaatgtgtgcctgctctcttgacataaagttctagaaggaaacaatttttgcaatcttggtaaggtgttgtgaactatctgttgtcgttattgtacatatagccataatcaacgaacatcattatcacgtttaaatttatagaataaaataacttacttaaatttatagaataaaataacttaaataggaaggagagcaggtggcagagaaactgtaccttcagaaaagttggtggagcacttcagaaaagttggtggagcaggtcattagatgcttcagaaaatcgtgaaactgaagctataaatttttagaagacatttttcattttgataagtcattttgtttattatttagattaaaaatatttttaaaactgttgggggccttcggcttccgaaggtcctcaaaaacatgatttaacaatgtttttggagtataatgtgtgaacaggtatcttcggactcgaatcggtaccacagtgggagaagcccaaagaatacgaaggttgacacagcgccaaagctgtgagcaggaaagcttcggcgtgatagcagaaaaggaaaccgacttaaagatgaaaaggctgttcagacctcggtggattactatagaattactaccaaatgtaaagggcatggatgtaattttacatgagctatgtcccgtgcctataaataggtgaacagtgcccccgtactgttcacgcggactgggcatttacttttgcgtcacgcttgtgtttttaccttctttcaagccgaaggtacatttgtaatttaatatcatttctattttttcataataataatatagaaatgagttgataattatacataa

SEQ ID NO: 16190 - DNA, 4970 bp, Zea Mays
cctcaatttcctcacgccgcgctccctggctccctgcccagagcgctggtctgcgcccccctccctgcatcgcccccaccagttcgccctcatctggcatgccgtgccgccgccctggagctcgcccctgctctcaacccctctccccttcgtccctgcgtttgaccgcacctgtcggacccgcccccttgcccctgcgcgcttgccatgggtgatgtccactggcctccctggcaagctcttcctcacgccgctccaagccaccgcgaccccaagtgctcgccaccttctgcagttcgtccacctcccagcgttccctgctccttgtttctatgcccagccgagctcctcagccccatggtggtgccctgctgcctccatcccctggcgtgccatctctctatgctcggtcgacgtccccagtgcctaacgcacgtccctctggattacgattgtctgtggacacggattcctagggaatgccctgtctatgagacggaattggaataaggattaatgtgcggataaatatgtcaagcgttcaaaagtactaaacacatgccaagaaatatggtaaatcggtaagtttagtacctaagtgaagtcgagcatagactttacccctcacgtgtcttgagacgtggtctccgttgccggattatggtggttacaagtatggtcacgtcacggcggcagccggggtcagtgaagcattatatgctgttggtctcttgttctcaaatgcttcgaataaaaaacaaggcaacacaagtgttattggttaaataccttcatccttcggaatattatctcccttaggacataatgattttcggatgaaggtcatgaagggcgtgccttcatcattccaatatgcaaagatataaactgggacatataaaacacagaaggaacatcaataatcatctttaatcatcagcttattcacattgttattatataatcgtaaacaaaacaccaatgatatttaagttacatttgtaccttcagctcgacagaaggtaaaaatctgaaagtgacgtgcgagtggttacaagtcagtgtgaacagtacggtgttactgttcatctatttataggcacatgacacaacttgggtaaatttacattcatgtccccaacatttactattagccaaaaggtaatctgtcgaggactgagcagtcttttccttttaagtcggtttcatcctccatcatcatcattgtgatgagccgaagcttctccagccatagcttcggagttggtctatccttcttccagatcacgttttttataccatacacacattcgtcttaaatccaaagcttcctatgatagtatactatactagaaaacatgttagtcgtgtttttgaggaccttcggaagatgaaagcccccaacagtagcccctcacagtgttaatttgttgtttaacaaattcagactgcgacgttaacgaaggtctttagccgaaggtccgaaaaacaccttccttcgctagaatagcgaaagttaatgacaaatggggcccgtcaagttgcaacgcactaggcatataaatagaaacctacagcggcatcatctgttgtgccatttcaattgcttgtgctgttttctcaagttttaaatttcttgttgtcagatttcaattgttttatgagcttcggcatttgtttaatttcccaccaaatggctgacgagaagaaggttgttgatcctgccctggctggtttttacgaggccatggaaaaaacaaacacagagaagattacaaacgagatactagttgatttgtctgaagattctgacgataatgatgactttgatgtggaaagcgggaatgaagatgccgaagaccgaccctggcggtcaagtcacaccatctttggaaagtcgtccattaaacagagtcagattgatgccatgaagggaagatactttcgtgacatgtctattatgagggttgggggagacagcgccgccccagcacccgaagaagatgaagttgttgtttacataagctttatgaaggcaggtcttcgattcccattgagcagatttttggttgaagttttgaagacatttgaaatcttccttcatcaaattactcccgaagttataataagaatgagtatttttgtttgggccgtgagaagccaagggctgtagccgagcgcgaagtgcttttgcaacatgcacgaactactgtacgagatgaaggccactggtaaagagcaatatcacaacaacttcggttgttatggcttcgttcctcgttccgatgtaagttatcccgttctaacatttcgaaaaaggtggcccggggcctagatggaggattggttttatgtcaagaataatctgattgaaagggaagacataaaggggattattcaacgccccatctggtctcgcttcggcctccgaaggccggctattgcgctcgagaatgataccgaagcatgccagaaggctttcaataatgtttgtgccttcataggcacgagggacctggttcaagagcacatagcctatagggtatagccacttgtggaaaactgggagatgccgaaggagactgctgccgggtccagtcaaggtggattgatttacttgaaatacaccttcagatatagagatcagtttgacaagccaaatgatgactagctgaaatatgttgaggcgactagcgatgagttacttggggtgtacacaagagccgaagatgatgctttgaccttagcctttggagggcgaggcaagaaaaggttgaacagagtttttgatgttatcggcttcatgtatctagactacatttacccctcacgaaagcaggggaagaaaaggaaaactgctgcctcggccatctctgttgtgccgaagggcaagaagattaaggttttgacccaccggccaagatacattgaaacggccacaatgccgaaatttggtgaaggaacatcttccactgtcgaagcagaacaagttgctcctgccggtcggagcgccaaagaatcggttgcagtaccgaaggtttttgcaaccggatcggccgaggtgttgatacaaactgccgaagctgaaggaaaaacagccgagaagccagaccgagaggaaacaacaggaccgtcggagccagaattaccgaaggtgacgaaaactcctgcaataactcccaagaggagaagaatggcatgcgtgctggacgatgtcatggagacaacaagggcattgacttctgctcctgcaaaaaaggttgtcgaagctgcggcggctcgtgctgaagccgaagctgagccctcagtgcccacggaggcagagcctgctgcaactgagagagctgagcaagaatctccagatgctggcatggctctggagaaggatgcgcctggaaaagccaaatcttctattcccgaagcatcgtccgaagattttgactttattattcgacatgctttagaaaaatactatctgaagaagaaattgcagaagccagacactacgcccgagaactgaaatacccgaagggggccttggtgtacaatggtacgaacgatgatgacttcctatactgtctcccacaataaggaaatatctgtctgccgagagatggctaaaaatatgggatttccgaagcttgaagttggcctctccgtcatgtcaaaaaatgacctcgctgatagccttgcatacaatagtctgaaggtacgaaagtgatgaatttaaaaatagattatcttgtcttgtattctcgtgctgatcctatctttttgcagggcttaattcttagcaacgctttgagggcgcaaaagaatgctgaagataaaagctgcgtgatagccctcggcaaccttcggtcagaagttattaagctgagaaatgaagccgtggaaaaagataaaattctgctttcattggtggataaagtgaaaaaagacgaagcaaaatttaacactcaatccgaagcttataaagccgaaattgaagaccttcggaaaaagcttgccgaagctaatgaaaattttgaacttgcaaaagctaagcaagaaataagtgaatgattgaacaaaaggctggagaaaaatgttgaggagcttcgcgaatccaaggagaggtgcttcgataaatccttggattgcgtaagaaaattgaaaaccagctttgccagggtgggtgcttattcttctgaagagaatttcattcgagttgaccctgagggtgttattgattggataagcggggaagccgaagcttttgaagagatcctcagcgatcccgagaacatttctgctttcaccggcgctcgagggattgcagcaattctggagaaggctggttgcgaccatgttaaagctacggcccagaccgaagccgccttctccacagacgacacgagagacccttcggccgaagctactttagtgggtggaaagttttaccttgatgtttgggtgaatggtagccgagaattggtcaacgaaatcataaagaaaaatgaaaaagaaacacatgatgcttcgagaaaaaagctaagcgagcagaagaagttgtcgagcgcgcaaggtgtatatgtattattttttaattttagcttcagtgtttattttctggcttcgaactaacagtttgtctactacatcttaactctcaccactgcccgagccatacgatcccctggccgatcccgtcatgaaagaagcgctggatgtaatgagcgtcgctaactccatcgtcgacgaagtcgtcgataggtgctgaatgaagccgctgagaaaatctttaaggaagattaggcttttgttgtaatgatacgatgtaacatgtgatgtatgaaacaattaatcagacatgtaaattattgtaatatatttctttgtgatgcatgaaatttatgcacataccgtttttgagccttcggcgaaaaaacacattgccttattttcatgctttgtaaagaaagaagccc

SEQ ID NO: 16191 - DNA, 8125 bp, Zea Mays
ctaagcaaactaaccccttttttccttcacctacacagcacctgcctttttattctccccatgccaatattccatctccttgtctcctctttgttcttccgtgaagcagccgccctcctcaatttcctcacgccgcgctccctggctccctgcccagagcgctggtctgcgcccccctccctgcatcgcccccaccagttcgccctcatctggcatgccgtgccgccgccctggagctcgcccctgctctcaacccctctccccttcgtccctgcgtttgaccgcacctgtcggacccgcccccttgcccctgcgcgcttgccatgggtgatgtccactggcctccctggcaagctcttcctcacgccgctccaagccaccgcgaccccaagtgctcgccaccttctgcagttcgtccacctcccagcgttccctgctccttgtttctatgcccagccgagctcctcagccccatggtggtgccctgctgcctccatcccctggcgtgccatctctctatgctcggtcgacgtccccagtgcctaacgcacgtccctctggaatcccattgttgtgtggagaagcaaatccaacacaacttcttcttggtgtttgatgaattgcttgaaccagacatcgtcatcgatctcacgatttcgagtcggatttagaaagtggttaaatgattcgcttgtccggctaattgatatgatgaatagattgatagatactctcgtcacaataattctttgtgggtctttaactaatgcgttgtggtatgttggtcagatccgttgttgtgcatatgtgtattgttctatggtgatgttagggaagaatctttcctctcctttctattttgtgatgctatggttgtatttagtgcttgcaaaaaaatgtttcattccatatcacccagtgacgtgaatgtgttcatggttgtggagtagttgtatagtgtggtaaaagttaggttggagtgtggtttatgcaaaggatgttctagtgtagatataagtctaatgctactctaattgattcgatgtatgtgaggattgtggccatgcttatggagttgttgtgtcacataaacctaaggtttaaaatgattgtgtaggatgagtatttaattgattaagtagtttctatgtctgtggaagatggtattgcttagccaaagaatgctttggaagatgagatgatgaggtgtgattaagtattcaaagaaaatgtttagagcatctagccctttgactgataagcgctattagtattacttgtgtgaactcttaatttatggtaacatgaatatcttgtcttagaggtatcaccttctatgttgttagctcaagataataaattatagaaggtagatatttaattatggttcattagtggtttatcatattgatttcatcatgtcaagaggttagaatttaatagaccagtcgacgagttcagttagagttgtttggtttaattggattgtttagtgaagggatgtcatgacttcatagctatcacaccaccaattgtgtgactatggttaggttttaaagcaactagagtagcgagtggatgataattgtaatggctatgtaaaaaatgaagcaaaatgtcgtcgttgtgaggattgcaggtacagtttcgagtatataattaatctagtaaagtaaaaatatgtttttatagatatgttctatataaaagttgtaattaacttaattatatagattgtactaaaatttcatgagctaatgattaatggtctagaagttatgcttctagcaagttcactgtccggatttacttgttttctgtacatatatctcaatgattgtgttgtttgactaacttagacttagaatcacttcttagagatattgtaagagttttagtgtttttcctaagatttctaaaaagtctagaaccatatgtatttgatatatagaacactgttcatgactattttaagttgcacattgaaatctaacaacattgctttttgctaacacttgtactagttaattactaaatcatcttaaggtgatcataagaaagttgtagataacttacttatctttgcttgtgttaaaatttaatgaccataggactgatagttttcagagatatgaattttacaaaaagattgttgtattctatccactctctgaatagatttcgaaaattgtgttgtttggattaattgaactaggaattacttttgatgattatagagtgtgtgtagtatttttaataggatttccaaaaagtcttggatcgcactttttgattgtctaaagctcaagttataaatgtttgaagtgtggagcatgaatctgtccaaatctggacagcaaggctttcctgatgtcctttacccttgatgcatattgaatcagcctagaatgtttataaatgttttgttggcaatttcattaaattttttagaaagtctaggatcgcttattttggatgcatgagcctctagttatggatttttgaagtaagaaatctgaatgtgtccaaatctggatagagtcatcgttttagcactaattgaccttgctaagggtctaatcacgttgagttgataatactaaagttatagagtactttgtaagctttttcgaaagtctttgttaactatttttggatgaatattttttgagttatgattaatagaataactgttatgctgctatccaaaaatctacaagtgctcattttattattgagttcacccttttgagtaaaaatacttggttagcgcttaattgatgtagacttgcaatggataaacttaaattaacatgtataccatgattaatgtgcttgctctctatagttggctgtgataggagttccatagtcatcaatgtccatggccaatttaaacttatgttgttctggttgctcttgtgtggtcaatagaagaactaatgaaagacaaacaaattggatgaatgcttgtacttgtgatttcttgtttgagttggttaactaaaggaagtgtttggtgtttttccagtgatgttgactttgtgtgcccgataacgtatagatagatagcgcttgcatatagttatttatggtgtcttacgatttaatgtttagtttgctaccatgtgccttggagtgtcttgtgtttttttcgtcatgttcatacatatgcatcatgcatctcatttagtaccgagagatgatgatcgtgtgaagtgaaggacgtgaaggggggtggaccacaagatgaagttggtggacaacccgaagaaggatggactgaaaaagtggatgctcgtcgagtgattaccctctagcaaacactagctagtgttggattctaggcaagtcccggttttatgcataaccgttattatgctattttactgcaattatttttgtaggcttgtattgtgcattaagtatagatgttgtttgaaatcctagatgcattgaattcaagttcctttatgagatgaatactagcatactaggtttagtagtagctttgctaaataaggatttcgataaagtcgagtgatttttctagcacacacgtgaggtcaagaaattgactgtatcctttttgatatcaggattacgattgtctgtggacacggattcctagggaatgccctgtctatgagacggaattggaataaggattaatgtgcggataaatatgtcaagcgttcaaaagtactaaacacatgccaagaaatatggtaaatcggtaagtttagtacctaagtgaagtcgagcatagactttacccctcacgtgtcttgagacgtggtctccgttgccggattatggtggttacaagtatggtcacgtcacggcggcagccggggtcagtgaagcattatatgctgttggtctcttgttctcaaatgcttcgaataaaaaacaaggcaacacaagtgttattggttaaataccttcatccttcggaatattatctcccttaggacataatgattttcggatgaaggtcatgaagggcgtgccttcatcattccaatatgcaaagatataaactgggacatataaaacacagaaggaacatcaataatcatctttaatcatcagcttattcacattgttattatataatcgtaaacaaaacaccaatgatatttaagttacatttgtaccttcagctcgacagaaggtaaaaatctgaaagtgacgtgcgagtggttacaagtcagtgtgaacagtacggtgttactgttcatctatttataggcacatgacacaacttgggtaaatttacattcatgtccccaacatttactattagccaaaaggtaatctgtcgaggactgagcagtcttttccttttaagtcggtttcatcctccatcatcatcattgtgatgagccgaagcttctccagccatagcttcggagttggtctatccttcttccagatcacgttttttataccatacacacattcgtcttaaatccaaagcttcctatgatagtatactatactagaaaacatgttagtcgtgtttttgaggaccttcggaagatgaaagcccccaacagtagcccctcacagtgttaatttgttgtttaacaaattcagactgcgacgttaacgaaggtctttagccgaaggtccgaaaaacaccttccttcgctagaatagcgaaagttaatgacaaatggggcccgtcaagttgcaacgcactaggcatataaatagaaacctacagcggcatcatctgttgtgccatttcaattgcttgtgctgttttctcaagttttaaatttcttgttgtcagatttcaattgttttatgagcttcggcatttgtttaatttcccaccaaatggctgacgagaagaaggttgttgatcctgccctggctggtttttacgaggccatggaaaaaacaaacacagagaagattacaaacgagatactagttgatttgtctgaagattctgacgataatgatgactttgatgtggaaagcgggaatgaagatgccgaagaccgaccctggcggtcaagtcacaccatctttggaaagtcgtccattaaacagagtcagattgatgccatgaagggaagatactttcgtgacatgtctattatgagggttgggggagacagcgccgccccagcacccgaagaagatgaagttgttgtttacataagctttatgaaggcaggtcttcgattcccattgagcagatttttggttgaagttttgaagacatttgaaatcttccttcatcaaattactcccgaagttataataagaatgagtatttttgtttgggccgtgagaagccaagggctgtagccgagcgcgaagtgcttttgcaacatgcacgaactactgtacgagatgaaggccactggtaaagagcaatatcacaacaacttcggttgttatggcttcgttcctcgttccgatgtaagttatcccgttctaacatttcgaaaaaggtggcccggggcctagatggaggattggttttatgtcaagaataatctgattgaaagggaagacataaaggggattattcaacgccccatctggtctcgcttcggcctccgaaggccggctattgcgctcgagaatgataccgaagcatgccagaaggctttcaataatgtttgtgccttcataggcacgagggacctggttcaagagcacatagcctatagggtatagccacttgtggaaaactgggagatgccgaaggagactgctgccgggtccagtcaaggtggattgatttacttgaaatacaccttcagatatagagatcagtttgacaagccaaatgatgactagctgaaatatgttgaggcgactagcgatgagttacttggggtgtacacaagagccgaagatgatgctttgaccttagcctttggagggcgaggcaagaaaaggttgaacagagtttttgatgttatcggcttcatgtatctagactacatttacccctcacgaaagcaggggaagaaaaggaaaactgctgcctcggccatctctgttgtgccgaagggcaagaagattaaggttttgacccaccggccaagatacattgaaacggccacaatgccgaaatttggtgaaggaacatcttccactgtcgaagcagaacaagttgctcctgccggtcggagcgccaaagaatcggttgcagtaccgaaggtttttgcaaccggatcggccgaggtgttgatacaaactgccgaagctgaaggaaaaacagccgagaagccagaccgagaggaaacaacaggaccgtcggagccagaattaccgaaggtgacgaaaactcctgcaataactcccaagaggagaagaatggcatgcgtgctggacgatgtcatggagacaacaagggcattgacttctgctcctgcaaaaaaggttgtcgaagctgcggcggctcgtgctgaagccgaagctgagccctcagtgcccacggaggcagagcctgctgcaactgagagagctgagcaagaatctccagatgctggcatggctctggagaaggatgcgcctggaaaagccaaatcttctattcccgaagcatcgtccgaagattttgactttattattcgacatgctttagaaaaatactatctgaagaagaaattgcagaagccagacactacgcccgagaactgaaatacccgaagggggccttggtgtacaatggtacgaacgatgatgacttcctatactgtctcccacaataaggaaatatctgtctgccgagagatggctaaaaatatgggatttccgaagcttgaagttggcctctccgtcatgtcaaaaaatgacctcgctgatagccttgcatacaatagtctgaaggtacgaaagtgatgaatttaaaaatagattatcttgtcttgtattctcgtgctgatcctatctttttgcagggcttaattcttagcaacgctttgagggcgcaaaagaatgctgaagataaaagctgcgtgatagccctcggcaaccttcggtcagaagttattaagctgagaaatgaagccgtggaaaaagataaaattctgctttcattggtggataaagtgaaaaaagacgaagcaaaatttaacactcaatccgaagcttataaagccgaaattgaagaccttcggaaaaagcttgccgaagctaatgaaaattttgaacttgcaaaagctaagcaagaaataagtgaatgattgaacaaaaggctggagaaaaatgttgaggagcttcgcgaatccaaggagaggtgcttcgataaatccttggattgcgtaagaaaattgaaaaccagctttgccagggtgggtgcttattcttctgaagagaatttcattcgagttgaccctgagggtgttattgattggataagcggggaagccgaagcttttgaagagatcctcagcgatcccgagaacatttctgctttcaccggcgctcgagggattgcagcaattctggagaaggctggttgcgaccatgttaaagctacggcccagaccgaagccgccttctccacagacgacacgagagacccttcggccgaagctactttagtgggtggaaagttttaccttgatgtttgggtgaatggtagccgagaattggtcaacgaaatcataaagaaaaatgaaaaagaaacacatgatgcttcgagaaaaaagctaagcgagcagaagaagttgtcgagcgcgcaaggtgtatatgtattattttttaattttagcttcagtgtttattttctggcttcgaactaacagtttgtctactacatcttaactctcaccactgcccgagccatacgatcccctggccgatcccgtcatgaaagaagcgctggatgtaatgagcgtcgctaactccatcgtcgacgaagtcgtcgataggtgctgaatgaagccgctgagaaaatctttaaggaagattaggcttttgttgtaatgatacgatgtaacatgtgatgtatgaaacaattaatcagacatgtaaattattgtaatatatttctttgtgatgcatgaaatttatgcacataccgtttttgagccttcggcgaaaaaacacattgccttattttcatgctttgtaaagaaagaagccc

SEQ ID NO: 16192 - DNA, 1061 bp, Zea Mays
atgtcgtggagagccgcagtgttgttgctcgcgtgcctcgtcgccgtgacagcggcgctggtggacggcgcgctgctccccgaactcgcctctgcgcctggctcctgctcgtcgaatctccagccgcgccatcgcagctccagctcgatccttttctgcgcgcgcacgctcctgccgagctccgtgcacgcgcgccccatccctcctgcgctcggaccgcgccctcgctgccggtgctcgccgaccgcggctgtcctactccctgctgcgctcgccctggtcgccgctgtcgagtttgccggtgtctgcgcgccatcgcccagctcgcccaagttacccttggctgcgcacagtgttcttgtcgatgatgtgccgttgccaatgctgtagagctcgtcttgctccttgcggcgccgttcgtcggtcgcggatgcttaagtttctggtcgcgcgtctgtttatctcgcgcgcgtgagtttgaagctctgcacgttcatcgtcctttggtcccagtccgacccattcgtgcgcgcgcgtgctcacgtttgttgtcgagtcgtcgaatccgttatcccctgctcaaccccacctcgtcagctcgctctagacataatcccgtcatcgttccgtgcatcgtcatgaaatcccaagcgtggggtgaagacgaagctagcagcatggtattcaccaagtgctcgaacaagtcatcgagtatcatcctcgtctacgccaagcccccaagccgtgaagacactctggtgttggtcacgcgtcaccagctcgacaaaataaatcccatgggtgtctgatcgagaagtaaagttgtgtacatcactcgccagacatgtgtgatcaaagacgtcaaccggaaatcatcgtcgtgcttgcgactatcgcgtcgaattagttaggggtaagttgattcgtattcccgttaactaggtctataaatagattaaatataattgttggtcccagtaaatattattaatttagcatgcgtatattgtgatgatcaatttagatagctcgctaaatcaagtaattaagttacacagttt

SEQ ID NO: 16193 - DNA, 701 bp, Zea Mays
aagtaatcaattaagacgaactaaaattgtcacttaagtatttcgctcggttcgagaaatctcgataaattcggtaaatgcgctacttgaggcaggctgttcaaataaaccgaaaccggaataattgctggacaattcggtttcctatttcaaaattcgagaaaataatatgcatattcgtatagcgcgtcgatcctttggtcatcgctaaaaatccccaattctaaaatatctgcgatactctgttaaataaaggaatggaaaaatctaaaaaaaaaatctctagctgccgcctctttccatctgccgggggtttagtttttcctttgtagtactatcgtcctgcatagtagctaggggattttaccatttctcttccggaaactgaccaagaacagtcactgccaatatcgagttcagactccaggctccatcgatgctatacatagttaaaagagaaaataaataaaaaaaatagaaaatatcttcctcccaccgctcgacatcactctatctctcttatccagttatccagttatcctctccagccatcgacttcatccgtcgctggattttttttgccgcgccgctcatctgctgttcttatcccctacgccgctcagttctgaagaaaaatcccgccgctcaagcacttggatactacagccgtcacactggatttttcttccccgcggtgcttc

SEQ ID NO: 16194 - DNA, 6402 bp, Zea Mays
gttatttctgaagtgtcgagcctagtgcccatttaaaagtaatcaattaagacgaactaaaattatcacttaagtatttcgctcggttcgagaaatctcgataaattcggtaaatgcgctacttgaggcaggctgttcaaataaaccgaaaccggaataattgctggacaattcggtttcctatttcaaaatccgagaaaataatatgcatattcgtatagcgtgtcgatcctttggtcatcgctaaaaatccctaattctaaaatatctgtgattctctgttaaataaaggaatggaaaaatctaaaaagaaaaagaaaaaaaatctatagctgccgcctctttccatctgccgggggtttagtttttcctttgtagtactatcgtcctgcatagtagctaggggattttaccatttctcttccggaaactgaccaagaacagccactgccaatttcgagttcagactccagactccatcgatgctatacatagttaaaagagaaaagaaattaaaaaaaataggaaaatatctttctcccaccgctcgacatcactctatttctcttatccagttatccagttatcctctccagccatcgacttcatctgtcgctggattttttttgccgcgccgctcatctgctgttcttatccctacaccgctcagttctgaagaaaaatcccgccgctcaagcacttggatactacagccgtcacactggatttttcttccccgcggtgcttcttctgcttctcccccagtgcgtctcctctatctctccctcagcgcgctccccggccgagcgctccttgtgccgcgtccggctccctggctcgccggcgccccatctcctctcaagctcgcgaacgccaatggcgcgggtccttctctcccttgcttctctctttcctcccccaagcgccctcgcttcctccctctgtccgctcgccaggcgcccaatccatggcgtacccagtcgcgtccctgtccatctgctcggccgcgagcttccctgcttccgtgattatcgaagctccaggtaggcacaggtccgtgacgatgtcgtggagagccgcagtgttgttgctcgcgtgcctcgtcgccgtgacagcggcgctggtggacggcgcgctgctccccgaactcgcctctgcgcctggctcctgctcgtcgaatctccagccgtgccgtcgcagctccagctcgatccttttctgcgcgcgcacgctcctcccgagctccgtgcacgcgcgccccatcccgcctgcgctcggaccgcgccctcgctgccggtgctcgccgaccgcggctgtcctactccctgctgcgcttgccctggtcgccgccgtcgagtttttcggtgtctgcgcgccatcgcccagctcgcccaagtcgcccttggctgcgcacagtgttcttgttgatgctgtgccgttgccaatgctgtagagctcgccttgctccttgcgtcgtcgttcgtcggtcgcggatgcttaagtctctggtcacgcgtctgtttatctcgtgcgcgtgagtttgaagctctgcacgttcatcgtcctttagtcccagtccgacccattcgtgcgctcgctttttgtccatcgggtttcgcgcgtgctcacgtttgctgtcgagtcgtcgaatccgttatcccctgctcaaccccacctcgtcagctcgctctagacataatcccgtcatcgttccgtgcatcgtcatgaaatctcaagtgtcgggtgaagacgaagcttgaagcattgtattcaccaagtgctcgaacaagtcatcgagcatcatcctcgtctacgccaagcccccaagccgtgaagacactctggtgttagccacgcgtcaccagctcgacaaaataaatcccatgggtgtctgatcgagaagtgaagttgtgtacatcactcgccagacatgtgtgatcaaagacgtcaaccggaaaccatcgtcgtgcttgcgactatatcgtcgaattagtgagggtaagttgattcgtattcccgttaactaggtctataaatagattaaatagaattgttggtcacagtaaatattaataatttagcatgcgtatattgtgatgatcaatttagatagctcgctaaatcaagtaattaagttacacaatttagagagttaataaaaagctaggaataaaaatagattttctaatgttattaggtcaatttggttaatgaatgtagtcaatgctctgctatgatatccatggtgcttaatgcttgattttaagtgtttcatcctttttagtatagagtatctatcttatactcgttctacttgtgctcatacatgtgcatcgtgcatctcatgaggtacgataaataatcacgtgatgcggaagacgagccaagtcgacccccaagcacgggctgaatccacaggatgaaagctgatggaccaacctgaagatggttaaattaagcaagtgctcggtcgaggggatactcgtcaagcggacatcgtctaacaaacactaacgtagtgttattccaggcaagctctgggtgcattcgcccctttcttgtgttttaaatgctttttcaccttatctgatgcattaggtgataggagttgtgtgataaacaattgatgcattaccatttcttggaaactccttaatctcggttttataaaaagaactgataatgcttagccctgcttagaaactgaaaaatcatttgttttcaaaaagaatgatcgtggaacattggttatgggcctttcgtttcaaaaatcaaagcaaacttatggtgatgattccacttcggccggagtgggttcatcatttggaaaagagtacccctgtcgggtaccaaaaatgggaaaatggtttgaatacatctagaccagacgctgagcggacaaggtcgcccgtctgtgtcgattaaggactgttcgatgtaggcctgttgtggtggagaccttgcaactatacacatgctccggtaagcctgaacctggctattccatacgtgaaaagacaactgtgcactgggcgtgggagatggtgggagtagcgtgtaccctcctggctagaggctggatggaggagtactgtgctcccggatagcacggaccggttcacgttgtggaggatctgtggaaacggttgacatatgcaaggattaagtgctacatatgtcgtgtggttaggaatccccagctgggtataatcgtttcgaatcgtcgttgctcctcggtcatggagactctaccctccgaccactcatcgtagttgacaagtgaaatatgaattggctaaaagaaagctagaccaggacaagtggatgctctagattaggcaaatctagaatcaggaaaaatactaaacttgtgaagtaaaattttggcataaggatttactactagtaagctcttctacaaagcagagtctttgattcttgataagtcataccttgaatccctctagccagcatacccttgagagtcttttctttagtcgggtaagtcttgctaagtaatttcatactcagggttttattccctgttgtttttcaggttatagttttgtgctgttattgatggtgttaagtaccggtgggctcggccttcttatataagtataccccatctttatcttcttattgaggatggtcacttgagctagcatatatttcaaacttacaaataatttataacatctcaaagttattcctttgaaccacttttgtaatcactacgataaatacaatgtaaacttgttgtaacttgtaaaatttggtaataagattttccgctgcaaaatgttggtgtgtgatttgtgtttacttaatcttgcgatcctggttgtaagtggtttatccgaggtccttggggcactcggacggatcctgttaagttatttggtgcacatgcatagccgtctgaggtctttgagacaaggacaggtgcatgtgggcccaataacttgggaggttctgccacagctggtatcggagcaggattaagtatatacggtcacatacgtattttcaaaacaaaagttttggtttcgaaaaacctattttcaactaaacacattgtttggctttgaaaaacagttttaaaaaactataatgctagcgacatcctatgttaagccctaaattaaggactattaggtggcttagtttaaaaccactaacccacaaccaggggtattgcatacatgtgtattgttatttttaaggccattcagttttgaatggatcgacgctcaaggtaaggtgagatgtgagagcatgaccgaacaaacgtcggtctagggaagagtataaaaagcgcttgattatatacatgttccacatatgtatatatgaaggctgcgatgtggagtaattacttttctgggaattcagtaccccatggatgtgtatgggtatacagacatgggaatactgagaagtgtaatgtacttgtaacgacgcacctacgctcaggtaagaaggtaagttaccataatgagttgccctatggttaaagtgtggcaacggcgcctatgcgtggctcggtgcttaatgatgagctgccctccatatagcaatatatggagtatacactgtgataaaattgtcatatgtgaattgcatcattggaaaattgggttgtgatggatttttctgcaggtacactaacctcgaaaacgtatgtgtagctgacgactagcaaaatactgtgagagtcgtaagtatgccaccgatatagaacattattgccacagtaagttgacaaactcgtgaggacgtataagacgagcatgcatcctgattgttgcatcatgtttgtcacctatacatccaaaatgcttctctcatccttattccagaaaccaatgattgtagataatctggtgtaatgttgaattatgaacttcggtaaaatagttgttctccgttccttaggtattatgtttagatgctacatgtgctcttgtgcttaatgtgtcgatagaaggttagtgacttgtttgcctaaacccaaatctaggccatgttcagagttggtgaaccatgaccaaagttgatttttccgttacccctccttgacccaaacttatacaaaataaaggcttagataatttttttgttggatataaagtgtacccaagcttaaaacaagaatctcaagtcatgtctccttctagaaccattttcttgatcagttgatgcaggttgaggtctctattgtatttggcctctccttgcggattatcttgtcactttatcaacccaacctagaaaatacatgtccgatcattttcttaagtttgaggcctttggttttcccatacctatcgagggcataccaacttaatccttgacttgtaattgttctaatgggcatagaaatatgcttgggctaaattatcagtctctcatcgtactccctcaccaaccaatttaggttatggccatgccttgttcatttcatcgggccatgatttgtttggctctctacttgtaaccgtgttgacaggtagagtctctttgtatagtcacccttgcttaatccattggtgttgcgtgagatttcttattggttatgtctggtaatggtgttatgactaaaatcggtgacaccgcgctgaaaccgagggcctcctgtgggtgcacacacatggttgcgctacttggcacgcgctagtatcacagttagtagtcataatccattataagactatattgatatgttatctctacacaaattattcttaccacgtgagattcattattggtgccagttcgataatggcgtctcgattaatgacttatggtaccacggcgaaactgagagcctcctgtgaatgtgcacacaggattctgctgcttggcgcatgctggtatcgaggtctctagtcatgatccattgtggaactacaccgatgtgtgatcttccgtggactcctcccttgaaacaatttccatgttgtttgtcaagtgaccaagcaacatctgtcatctccattggatcaaaagggcatacgactttcctgtgtggttttatttcttttgatcttggtagtgactactcatacaagttccctttacatcctttgggtaaacatgaagccttggagctttttagtgtcaagagacaactgattagctctcaagatagagatatgcttcccctgccactgaaatgcaggagtttgttcattcgctcttttattcaatccatgtattccctaaccaagttggttcatctcgtatagaagaaacggatgaacaaccagaccaaatggattcctgcccaaatgcatgatcaactgttaataagagtaaactctcaacccttggcttaccgatggtactgagaggacctgctcaatgtcaaatgtagttcaacaagttggttttactaac

SEQ ID NO: 16195 - DNA, 7719 bp, Zea Mays
ctcatgtgttatgaacttaccgtgaccacttgttggtaaacctctttctgtgtgtttttcccaagaggttgcatcttattctgtttgggcaaaatcgtatatctaccgctcgcccagcagactcagatagtatagtgtcatcagaaaaagcaaactgcgcacttggaaccttatgtgttcttctcacagacagtgtctctattggtggacatttctaaattagccctaaggcgatacatgttatgtccactagagaaacaacatcctgagacactcgcctttgcttagagctgtctcatgattatccctgatatagacatgggttacatacttctcttctcttaaaagtctttcgctccgaatctccggatgagattcttttaaggggagggctgtaacacccctggtgtttatattccgctcgacaacgagtataaatttaagcacgtaatattagtgaataaaacagatgctaaaatttattcatctttgtctatcgcgattttaatatcgcatctgtttcttctgtcgcgagttcgacatcatttttatctatccgggctcttccgaaattttcgtgatgttcggaacatagttgttccgaaaatcggtgcgtccggtgattatttaaaattcatcgctcgcgtgaatacgaattcggaagcccgtctcactcggatgattttaccccgaacatattaagtagaactcgacgactaagctttcggtgcaaataattctgtccccactcgtcaaccgagaaatcgcgtctaagaatttatatttgagattcgattctccacgtaaattatctgttgtcgtggaatcgggtgttaactgcggataaaattatttgatttcaaatcaaatggaacacagtctgaagtactgttgttaacatcattctgatttgttctgattgtgtctcgccccgatccaaaactttagatataaataacgagtgaaaattcatctgactccgaagtattcaccaaattaaatccggtccaaatattattggcgatcttattttgttcgacccttttatacattttgtataccctaattttataacctcaaaaatatctacatttcgctttagtctaaaaatggaaaaaaaaccaaattcccccaccgccttccctcatcctaatcacgtcgtctctcatcccttatccattggaactcatctccagcttatgccctccacgtactagctctagaaattcttgtaggcattcctttatctcctccacctccacgtagaaagcctaggattttctaccagccacgtctttcatctcctaggcgttatctgagcacagctcatttgttttcttatgccatttcttctctgttcctgaagtcacggctccctggagatgttcagctcgtctgcgcttggtctttgccggtagccgagctgctccctatgctcgagttcctagcgtcctgcatcagctcgccggcagccaagctctctggcacaagcgcctctaagccctgctccttctccaaccgtgccaatgctcgccagccctcagcccgcgtctctggtacaagtcgtcccgtcagctgccgctcgttcctgaccagttcctaccagcgccattgatgaaggttccaatcattgctttcaacctcggctccctatccttgcctagcctcacgtcgtcttcaatctagacgtcgcccagcaccagacctccgtctcccacatgccgctgtttgtgctcgacctccgttctgcagtcccgccctagcgccagttgtgttccgtccctgttcgtcaccacgtcgtcgacttcagctacctgcctcactgtcgacttactgctcatctcgctgcgctgtctgagttttgcctcgcctcgctgttcctcatccttgctttctggagtttcggcaagccgtcgtcctgttgtgttgtcgtgtggtgctctcgacgtcgacctaagcacactccacacgtcgtgacatctcactcatctcgtcgccatgctgtcgtgatatttggtatggtaatttctatttccttgggtattaaaatatgtgcgttgtgattgtaggtctaatatttattggaatacccgaatcgcttgcagtaatttattgaatgtcgtgtggtaaatcgccagtttgagatataggttatgggaatagagtttccgtgggtatatttgtcgagcatgtttaaactggttctaagtttgcagtgagtggtacatcggtggtgcgtaagttaaatttagtgttttaagaaattatcaataagtctatcgatgttaattatattcagtgtgtttcattatattatgtgattagtggtcaattaaatgccgtgattaaatgttactggctacataagaatttagaagcgagtagcatcgccaattcgatcttatgtgaaacccgagaatttcgtagtggttagtgtacatatgtagtctagatatttaagttgtcgcgaaaatagttttaccgaacgctatattatttgattatattttaaccgttagggtaaatattgtgatatttgattttgttaagtgtgtaattcaagttaagtaaaacacacaatttaaagagctaattaaattattcctaaacttattttaagtcgttggtaatcaataacgacgagtccaagtttatttagatttccgatgatatattttaataaggatgatagtgtgggttaaataatttattcttacttgatttcagaattagatccgattagaaagcaggaacgtgagtgttgcacttagtgtgtatggtttgctgtttcgtgatgtttgcgttagattcggttaatctagagaagcatgattattgcgcttggtcataaggcgatagctagcgtttgattatgaaatgtcatgatgccttcccattaagtgtttaattctttactgtgtaaaatcataatattatcttgcaatattcatcttgatattcatacatgtgcattgtgtatctcatgaggtacgataaataatcgcgtgatgcggaagatgagccaagtcgaccccaagcgcgggctactccgcatggtgatgctgatggacgaacctgcctgatcaagtgctaggacaaggatgatcgtcaagtggacatcgcctaacaaacactaaccttgtgttatccaggcaagccctgatgcatgcaaccccttccttatgtttttaaattatttttacacactttaagtctagtgaatgtgcattagattataagagttgcttggaaaccctttgatgcattggctaccttgaaatccattccttttatagatacttctggcgaagtatcaaaatatgatttacaaaaaatgcttagccctgcatttaagcagatagagtttgtcctttgcacttatgcctatctcaggtttatcttgaggaaggatgacttgtacctgcaagaatattttcattgggagcatggtgggatcttactgcaaagtttcctataatgctcttttcatcctaaggaacacaaacactcctaaggatggaagtacttaaattgagacttgggctaggaacaggtgatgctccacctaggttaattaaggattggatgtgtatataggcccgtatgatcaaggactatcttaactggccacatgccctggatatggacagggtaagcttgaacccagctattccatacgtgaaaagacaaccgcgcactggacgtgggagatggtgggagtagcgtgtaccctcctagctagaggctggatggaggagtactatgctcccgagtagcgcggaccgattcacgttgtagaggatctgtgggaacgtttgacatatgcaacggttaagtgctacatatgtcgtgtggttagagatcctcagctgagtaaatcgattcagatcgccgttatatccccggagagtggagacttgatcgttgccctgcaacctaagtcaggatgtgaacattatgaataaaaatggtgttgtattgataaaatggtgaaattagactagatgcaaccagagtctattaatatttaatctagtgttaaaatattgaaagtaaggactcactttagtaagctatttctgcaaaagtatctaagttgattcttgctaaagccttttccttgattcctatttaaccatcatatccttgagagtcttttctttagtcgggtaagtcttgctgagtacttgcgtacttagggttttattcccattattgctgcaggttacgagtcactttgattgtgattggtgttaagcgccggtgggcactgccttcttataagtttaagtacttcttctatacttattattgaggattgtcattgagctagcatatatttcaaacttataaataatttataacatttcaaagtttattctttgaaccacttttgtaaccactccgataaatataatgtaaatttgttgtaacttgtaaaatgtggtaataagatttccgctgcaaaattgttggtgtgtgatttgtgtttactgaatcctgcagttctggttgtaagtggtttatccgaggtccacgggacactcggacagatcctgttaagttatccggtgcacatgcatagccgtctgaggtctttgagacaaggacatgtgcatgtgggcccaataacttgggaggttctgccacacaaccagcacttagacctgcaccatcaagagatcgaggacatggaggcagaaggggccgatgaggacgtagatatcgaggaaggggaggagccggagcccgcatctagcgtggacactgctggctcaggaggaccaccttccctcgagtctagcgttgcctcgtttgctcgttagatttcagggttagggtagaagtgttcagcagtagctttcctcgaaactggattagcttttgcacattggatgtactaggctagaaatttgagtcttttgggcctgctgtaaccagtggaaactcttttggcaagatgaataatgaatggttttaagtttctttaaatttatgaatcaaattttatcctattggtaccagttgtgaaaggcgaggaaaaacatggaacccttgcataccttcgctgtttaagtattttatcgtaatgcatccacggattttaagtataacaacagaacctcctaaatttcagatggcaggaagagtgcgccgtggacagaatgagcattcctccaccactgccgcagcctcctaccatgcaggagctgatggctcagcagaatgagattctacggcagctcgctcagcgtcagccaccgcctcagcactatgggggtggtgatcaccaccagcgtgccccggcagcgacaacctaccaggagtttctcagtactcagccgacgttgttcaccagggcggaagatccgcttgatgctgatgtctggctcagggtggtggaatcaaagttttcactgcttaacagagagtgctcagatgcggccaaggtccatttcgctgcccagtagcttcgtggatccgctaggacatggtgggaccatttcctcgtcatgcagccggtcgaccacgtggttgagtgggaagagttaaagacagcattcagagggcatcacataccatcgggcatcatggaccgcaagctcaacgagtttttggcactaacgcagggaagtcgtaccgtgttgcagtacgcccaagctttcaatgatctgtgtcagtacgtaggctaccatgctgacactgatgataagaagagagacagtttcaggaggggcctcaacactaagctctgtgaccatctcaacacagtcagggccaacagctacaacgagttggtcaacttggccatctcctaggaggattgcatcacagctcgccaggcagagaagaagaggaagacccctatgacagggccatcagcactgcctcagcgcttcaggtttgtgtccgacactcagagcagaggaccccagcagcaatagggacgatgggtgatccgaccacaacagcagcagcaggcacccaaccgctctcaacccccagctcagaggaacaacaatctgcagcagccgcaacaacagcagtaccgccagggcaatgacaacagatgcttcaccagtggcagcaccagacactatgctaagaattgtcccagaaaccagcagaggaagggtcagaatgcaaatcagaaccatggcaagaggcagagggtgcaagtgaggtagggcaggctgaacttcaccacattagttgacattctggagggagcatccgtcatgaccgatatcttttcagttttaaagtaccctgcagtcattctttttgattctggtgcatcacatagcttcatcagcacagaatttagtgccaaatgtcagctaccttttcaccacacaaatggggccatcatgattgcaacacctggaggcagcgtagccacctatcaactcaaccggcaggtgccaataaaattgagtagtattatatttagaaccaccctccttatcatgggattggagagcgtggacatcatcttggggactgactggttatcacggcatcatgcattaattgatgtcgtagcaagagcctttgaaatacactcaccaatttgtggagaaatcactttgtacctacctaaccaaggttgtacccattcttgtgcactcactaggatagaatcacccgtggaaaggattccagtagtctgtgagtacccagatgtcttcccagacgaattgccagggatgccacctgacagggatatagagtttgccatagaattgcaaccagggactgcacatatttctaagagaccatataggatgcctccagcagaattggcagaactgaagaaacaattgcaagagttgctagacaaggggttcatgtgcaccaagtacttcaccatggggatgtttcggccttgttgtaaagaagaagggatgagagttttgagactatgtgttgaatactgccctctcaatgcggtaaccatcaaaaacaaagtatcatttaccccacattgatgttttgtttgatcagttggtcagagccaaggtgttttccaagatagaccttcgctctggctatcaccaaaatcaagatcagggccagcgatattccgaagacggctttctctaccagatatgggctttgagtacttggtgatgtcattcgggttgacaaatgctccggcatacttcatgtatttgatgaattcagtgtttatgccagaattggacaaatttgtggtggtcttcattgatgatatcctggtatattcaaaaagtgaagacgagcatacaaagcacttgcacaccgtacttcaccgattgcgggatcatcgcttgtatgccaaattctccaaatgtgacttctggctaagagagatcaagttcttaggtcacaccatttcgcaggacgggatagcagtttatcctgagaaagtacaagaagtgatggattggaagcctcctaccaccgtgcaacagattcggagttttctgggattggcaagatactgtcggcgattcattccggatttcttcagaattgctaaaccaatgactgagttgttgaagaaaggagtgaaatttgattggagtctgaaatgtgaagatgcctttcacgccttgaggcgacatctgacaacagcacccgtgctagcacagcctgacaacaccaaatcatttgatgtggattgtgatgcttcgggcactggactaggttgtgttttgatgcaagacaaccgag

SEQ ID NO: 16196 - DNA, 619 bp, Zea Mays
ccggtagccgagctgctccctatgctcgagttcctagcgtcctgcatcagctcgccggcagccaagctctctggcacaagcgcctctaagccctgctccttctccaaccgtgccaatgctcgccagccctcagcccgcgtctctggtacaagtcgtcccgtcagctgccgctcgttcctgaccagttcctaccagcgccattgatgaaggttccaatcattgctttcaacctcggctccctatccttgcctagcctcacgtcgtcttcaatctagacgtcgcccagcaccagacctccgtctcccacatgccgctgtttgtgctcgacctccgttctgcagtcccgccctagcgccagttgtgttccgtccctgttcgtcaccacgtcgtcgacttcagctacctgcctcactgtcgacttactgctcatctcgctgcgctgtctgagttttgcctcgcctcgctgttcctcatccttgctttctggagtttcggcaagccgtcgtcctgttgtgttgtcgtgtggtgctctcgacgtcgacctaagcacactccacacgtcgtgacatctcactcatctcgtcgccatgctgtcgtgatatttggtacgataaataat

SEQ ID NO: 16197 - DNA, 873 bp, Zea Mays
gtctgcgcttggtcttcgctagtagccgagctgctccctatgctcgagttcctagcgccctgcatcagctcgccgacagccaagctctctggcacaagtgcctctaagccctgctcattctccaaccgtgccaatgctcgccagcccttagcccgcgtctttggtacaagtcgtcccatcagctgccgctcgttcctgaccagctcctaccagcgcctttgatgaaggttccaatcattgctttcaacctcggctccctatccttgtctagcctcacgtcgtcttcaatctagacgtcgccaagcaccagacctccgtctcccacatgccgctatttgtgctcgacctcgtcgtggtcaggttgtctaactcgccaccgttctgcagtcccgccctagcgccagatgtgctccgtccctgttcgtcaccacgtcgtcgacttcagccacctgtctcactgtcgacttactgctcatctcgctgcgctgtcgagtattgcctcgcctcgctgttcctcatccttgctttcctgagtttcggcaagccgtcgtcctattgtgttgtcgtgtggtgctctcgacgtcgacctaagcacactccacacgtcgtgacgtctcagtcatcgccaagctatcgtgatatttggcatgaagacgagtcaagtcgaccctaagcgcgggctactccgcatggtgatgctgatggacgaacctgcctgatcaagtgctaggataaggatgatcgtcaagtggacatcgcctaataaacactaacctagtgttatccaggcaagccccggtgcatgcaaccccttccttgtgttttaaactatttttacacactttaagtctagtgaatgtgcattaggttata

SEQ ID NO: 16198 - DNA, 1414 bp, Zea Mays
ttttttttttgcaaagagttttatatttcaatttaaaataccagtttgagacattgttagtttgaggcatcgtatgctctaagaacgaaaccaatcatcagacgagatccccacaccaaatagatctctttcgcgtcagtcaatgccgtccgccgacgccggagatgctgacgcgatgcccgcgccgccgccgcaaacaagggccgccatctcgcatgtcatcttcgacatggacggcctcctcctcgatacggaggggttctacacaacggtacaggagaagatcctgatgaggttcggcaaggtgttcgactggtccgtgaaggccaagatgatgggcaagaccacggccgagtccacgcgcatcttgtttgaggagttcggcctcgccggcctgctcaccccggagcagttcctggaggaacgcgaaaccatgctcaagaagctcttgcccacttgcgttgccatgccaggtctgctacgtttgatcaatcttctccacacaaatggaataccgatagctgttgcaacagggagatgatccagaagtgaaggcgggcaagccatctcctgatattttccttgctgctatgagaagatttgaggctaatgtagaacctagtaattgcttggtatttgaagatgcaccgttgggtgtggcagcagccaaaacttcaggaaagcacgtggtgatggttccagatccaaggctagatgtttcacatcacaaaggagctgaccaagttctcacttcactattggaattcaatcctagcgaatggggcctgccaccttttgtggattagattattttcagagacatcaagcatgtttcacagacacacaagccctacaaccacacagtaaacgccccgtattcatattagggaaaattttttggttgcgtatagttagaaatttcaacataaaaaaaggaacacacctgtttctgcctagtagcgaaagggcctctagctgagttagttaggtggtctgagtagcactcctcaggtcctgagttcgactccccgtgggagcaaatttcaggctgtggttaaaaaaatcccctcgtctgtcccacgccaaagcacaggtctaaggctcagccccggtcgtggtcgttctcacatgggcttcgatgccgctgtgtatgggtggggcaggggttcgggggttttcttgacctgtgtgagaaggtcttcttcttaatacaatacccgggggctgtcttaccccccgcaggtcaagttttttttttgtttctgcctagtaatatactggtgtaactactactaaacatctgtgctgctactgcagtttacagtatttttaagaaacattcttcatatataaattttattttaatagaaatttcaattgattttggaattagtagcaaaattttcaattttct

SEQ ID NO: 16199 - DNA, 1411 bp, Zea Mays
ttttttttttgcaaagagttttatatttcaatttaaaataccagtttgagacattgttagtttgaggcatcgtatgctctaagaacgaaaccaatcatcagacgagatccccacaccaaatagatctctttcgcgtcagtcaatgccgtccgccgacgccggagatgctgacgcgatgcccgcgccgccgccgcaaacaagggccgccatctcgcatgtcatcttcgacatggacggcctcctcctcgatacggaggggttctacacaacggtacaggagaagatcctgatgaggttcggcaaggtgttcgactggtccgtgaaggccaagatgatgggcaagaccacggccgagtccacgcgcatcttgtttgaggagttcggcctcgccggcctgctcaccccggagcagttcctggaggaacgcgaaaccatgctcaagaagctcttgcccacttgcgttgccatgccaggtctgctacgtttgatcaatcttctccacacaaatggaataccgatagctgttgcaacaggatgatccagaagtgaaggcgggcaagccatctcctgatattttccttgctgctatgagaagatttgaggctaatgtagaacctagtaattgcttggtatttgaagatgcaccgttgggtgtggcagcagccaaaacttcaggaaagcacgtggtgatggttccagatccaaggctagatgtttcacatcacaaaggagctgaccaagttctcacttcactattggaattcaatcctagcgaatggggcctgccaccttttgtggattagattattttcagagacatcaagcatgtttcacagacacacaagccctacaaccacacagtaaacgccccgtattcatattagggaaaattttttggttgcgtatagttagaaatttcaacataaaaaaaggaacacacctgtttctgcctagtagcgaaagggcctctagctgagttagttaggtggtctgagtagcactcctcaggtcctgagttcgactccccgtgggagcaaatttcaggctgtggttaaaaaaatcccctcgtctgtcccacgccaaagcacaggtctaaggctcagccccggtcgtggtcgttctcacatgggcttcgatgccgctgtgtatgggtggggcaggggttcgggggttttcttgacctgtgtgagaaggtcttcttcttaatacaatacccgggggctgtcttaccccccgcaggtcaagttttttttttgtttctgcctagtaatatactggtgtaactactactaaacatctgtgctgctactgcagtttacagtatttttaagaaacattcttcatatataaattttattttaatagaaatttcaattgattttggaattagtagcaaaattttcaattttct

SEQ ID NO: 16200 - DNA, 1010 bp, Zea Mays
cgcatttgagaaagaaatggattgtgctacttgctagtgctgctatatttacaagtactgggatacaaggcaatcaaatcctgtgcatattcagcaacttcctgaacgttgctatgctcttactgtgaattatccccttatgattgttggaactgctgaccgtcatcttgttgtcttcaatttgcagaatcctcagacggagttcaagcgaatccaatcaccactaaaataccagacacggtgccttgctgcattccctgatcaacaagggtttttggttggttcaatagaaggaagagttggcgttcatcatatcgatgacgcacagcaaagcaaaaacttcacattcaaatgccacagggaaggaaatgatatattctctgtcaattcactcaacttccaccctgtccatcacacatttgcaactgctggatctgacggtgctttcaacttctgggataaggatagcaagcagaggctaaaggcttttagtagatgcccccttcccattccttgcagtaccttcaacagtgatggttccatatttgcttatgcggtttgctatgactggagccgtggggccgaaaatcacaaccctgcagctgcaaagacatccatctatctccacagtccacaggaaaccgaggtcaaaggaaagccgcgcattgcaacaggcaggaagtgattgcattgaaggtgttgcaaggaaccatgatgtcatccagcagttttgtcatgcctccctcctgtcttggaagtctggtagagtgtaaatttcagctaacttatgcgccgattatagggtttctgtagtacctggtgtttgtggtgtcttcaaaatagattctgtcgacgttctgtgatgatctccttactgcttatttctggcagtaaaatcagtgtatcttaaaaaggttgtgatgtaaattttcgtgcatatggaccccgatactaatggagttttacttcacagataaatcccgttctggtttacgaattacgatgaacat

SEQ ID NO: 16201 - DNA, 1457 bp, Zea Mays
cttctgttcttgctatgcgaaaccgagcacacgaaccctaactttagctatctggctgtttatattcggatctgatttagttaaaaatgcatagagagagatggcaagtctaaccggcctcaccgcgaaccctaatccgaacaagtcattcgagatactgccgaacccaggtgactctgtctccagcctcagctttagtcccaagagtaatctgcttgtggcaacctcctgggataaccaggtgaggtgctgggagattgttggtggtaacagtcagccaaaggcgtccatttctcatgatcagccggttctctgctcggcttggaaggatgatggaactactgtcttctctggaggctgtgacaagcaggtcaaaatgtggcctcttctgtcaggtgggcagcctcagacggttgctatgcatgatgcccctgtcaaggaggtcgcctggattcctcagatgaatcttcttgtatccggaagctgggataagactttaaggtactgggatacaaggcaatcaaatcctgtgcatattcagcaacttcctgaacgttgctatgctcttactgtgaattatccccttatgattgttggaactgctgaccgtcatcttgttgtcttcaatttgcagaatcctcagacggagttcaagcgaatccaatcaccactaaaataccagacacggtgccttgctgcattccctgatcaacaagggtttttggttggttcaatagaaggaagagttggcgttcatcatatcgatgacgcacagcaaagcaaaaacttcacattcaaatgccacagggaaggaaatgatatattctctgtcaattcactcaacttccaccctgtccatcacacatttgcaactgctggatctgacggtgctttcaacttctgggataaggatagcaagcagaggctaaaggcttttagtagatgcccccttcccattccttgcagtaccttcaacagtgatggttccatatttgcttatgcggtttgctatgactggagccgtggggccgaaaatcacaaccctgcagctgcaaagacatccatctatctccacagtccacaggaaaccgaggtcaaaggaaagccgcgcattgcaacaggcaggaagtgattgcattgaaggtgttgcaaggaaccatgatgtcatccagcagttttgtcatgcctccctcctgtcttggaagtctggtagagtgtaaatttcagctaacttatgcgccgattatagggtttctgtagtacctggtgtttgtggtgtcttcaaaatagattctgtcgacgttctgtgatgatctccttactgcttatttctggcagtaaaatcagtgtatcttaaaaaggttgtgatgtaaattttcgtgcatatggaccccgatactaatggagttttacttcacagataaatcccgttctggtttacgaattacgatgaacat

SEQ ID NO: 16202 - DNA, 1471 bp, Zea Mays
ctgccttctcttctgccgttcccccggcgagctctttctctctcgtgcggcaactgggctattggcgaccgccaacgccgacgattacatttacaccaagtgcccaagccgtcttcgactacaccaggtgccaagttttcttcgcgtccttcacccgcgacgagcacccaccaggcatagagagagatggcaagtctaaccggcctcaccgcgaaccctaatccgaacaagtcattcgagatactgccgaacccaggtgactctgtctccagcctcagctttagtcccaagagtaatctgcttgtggcaacctcctgggataaccaggtgaggtgctgggagattgttggtggtaacagtcagccaaaggcgtccatttctcatgatcagccggttctctgctcggcttggaaggatgatggaactactgtcttctctggaggctgtgacaagcaggtcgcctggattcctcagatgaatcttcttgtatccggaagctgggataagactttaaggtactgggatacaaggcaatcaaatcctgtgcatattcagcaacttcctgaacgttgctatgctcttactgtgaattatccccttatgattgttggaactgctgaccgtcatcttgttgtcttcaatttgcagaatcctcagacggagttcaagcgaatccaatcaccactaaaataccagacacggtgccttgctgcattccctgatcaacaagggtttttggttggttcaatagaaggaagagttggcgttcatcatatcgatgacgcacagcaaagcaaaaacttcacattcaaatgccacagggaaggaaatgatatattctctgtcaattcactcaacttccaccctgtccatcacacatttgcaactgctggatctgacggtgctttcaacttctgggataaggatagcaagcagaggctaaaggcttttagtagatgcccccttcccattccttgcagtaccttcaacagtgatggttccatatttgcttatgcggtttgctatgactggagccgtggggccgaaaatcacaaccctgcagctgcaaagacatccatctatctccacagtccacaggaaaccgaggtcaaaggaaagccgcgcattgcaacaggcaggaagtgattgcattgaaggtgttgcaaggaaccatgatgtcatccagcagttttgtcatgcctccctcctgtcttggaagtctggtagagtgtaaatttcagctaacttatgcgccgattatagggtttctgtagtacctggtgtttgtggtgtcttcaaaatagattctgtcgacgttctgtgatgatctccttactgcttatttctggcagtaaaatcagtgtatcttaaaaaggttgtgatgtaaattttcgtgcatatggaccccgatactaatggagttttacttcacagataaatcccgttctggtttacgaattacgatgaacat

SEQ ID NO: 16203 - DNA, 2804 bp, Zea Mays
ccgcagccatggttcgccgactcttcctccaccacgcacgccggcgcctccactctggcaccgcctcctccattcccctttctaccccaatcttcgccatttttggtgccaacaccggcgtcggcaagaccctcgtgtccgcgggcctagccactgcgctcctctcctccccctcccctgccgtctcgtccgtcgcctacctcaagccgctccagactggctaccccgttgactccgacgcgagcttcgtcttcagcaggacccccgcgctgctccgcgccttccctccctgccgagccacccgcctcatcgcctcatgccgcaccttcttccaatcacctgccgtggaggccaaggcggaatcccttcacgagagccaggagaaggtggtgacctacggagcgggtgccgcggagcagacgaaggtgctcgcgtgctgcacggcgtacgcgtggcgggagccggtgtcgccgcacctggcagcagagagggaaggaatggcggcgggggatgatgaggtcaagggttgcgtcgaacagtggctgctggaggaaggcattggggagggtggggaggtgtggaagatactggaaactgctggtggcgttgccagccccagtgcctcgggtacgctgcagtgcgacctctaccggccttttaggttacctgctattcttgttggagatggccgtcttggtggtatttcatccactttgtctgcgtatgaaactttgttgctaagagggtatgatgtgagcgcagttattttggaagatcgtgagttatcaaatgacaaattcttgctttcttacttgagaaacagggtacatgtgcttattttgccacaaattcctgaagatcctttagatgacctgactgattggttttctgagtcatcctcaatttttatttttcttaaagatgagctgcaatcatttcattctagaagaatagagaggttaaacagcatgcaaagaaaatcaaaggctttactgtggtggccttttactcagcacaatcttgtccctcaagattctgttacagtaatcgattcacgttatggtgagaatttttctgtgtacaagattaaagacaaaatgctcatccctcaatttgatgcatgcgcaagttggtggactcaagggcctgattctaacttgcagattgaacttgcaagagatatgggctatgctgccgcaagatatggtcatgtgatgtttccagagaatgttcatgagcctgctcttcattctgcggaagttttacttggaggagttggtaaaggatgggcttctcgagtctattattcagacaatggatccactgcaattgaaattgctctgaagatggcatttcgtaaattttctcttgatcatggaattatggccagcagtgaaaatagtacaagaaatgaaagaaacattcagttgaaggtacttgctctaaatggttcctatcatggtgatactctgggtgctatggaagctcaagctccatcggcttatacatcttttcttcagcagccatggtcggggactttttctagatcctccaactgtgtatattaaaagtgaggtctacaatatttctttgccccaatcaatgcagcatgatcctcagacatatggtgatacatgctttttttcacaagctgaagtcttttgcaagaccagggacaaaacttttgctgctgatttgtattcgtcctatataaaacagaaactatctgaattttctctatcaagtagttctgaacatcttgcagcactaattatagaaccagtaatacaaggtgcaggtggaatgctcatgatagatcctcttttccagcgagtacttgtcagtgagtgtagaagccgaaaaatacctgtcatatttgatgaggtatttacaggattctggcgtcttggtgtggagtctgcttctgagttacttggttgtttacctgatatcgcctgctatgcaaaattgatgactgggggaattataccattagctgcaaccttagcaacagaggaagtttttgaatccttcgaaagtgactctaagcttacggcgctcttacatggccattcctacactgctcatgctatgggctgtactgcagcactcaaggctatgcagtggtaccggggtccatccaccaattcaaaccttgatactgaccacatgaagctcaaggagttgtgggatggcacacttgttaagcagttgtcgtcactaccgaatgtgaaaagggtggtgtcattaggaactctgtgtgcaattgagctcaaggctgagggagctgatgctgggtacgcttcactctacgcaagttccttggtgcaacagctccgtaaagaggacgatatttacattaggcccctgggtaacgtgatatacctcatgtgcggtccatgcacaccccgagatagctgcactcgacaactcctcaaggtacaccgcaggctttgtgcgcttaattgagccggctgggaatatagttgagggcagtctgtcggagttgaacagccttgtggcaacttaagtttcaggccgtcaattgaccttcagatgttatacaatgttcattaccatcgaatctgagacgtcagacttattctgatgcagagggcgccgttcctaagctctatggtaggatgacagattagttttagacatcattagtgatgataaactatgctttgctgtgtttccaatcgatccgattgtatgtatggctccgtatgtaattttgtaggtgtatattgccgaaggttttgcgacgtttttttgcaacgaaagtttagagttgatgtgcg

SEQ ID NO: 16204 - DNA, 975 bp, Zea Mays
cctccgcttagcaaaaaaggacaggcctgacgcagtggtgaaaagtcttcccactatgccaaaggttctgaattcgacgcagcctctctgcaaaatgctgcgttttgttaggatcacagaaaggctcttgcagatagggagtttgaagcattacaggataggatttctgggaagatgataaattttcgaagagtttcttgcataaacgggactgttccactgtccccatcattaatgtcagctgaggaactttgttctatgtgcaagtttgtggaggatggaaaagagagattagtagttggtagtttagaccttaatcagtgtctttggctaccagatgaattgactggaaagaggcctggggtaaatgaagacatccagacaagagcatatctaagcaatgtctgtgttgccaaggagcttcagaaaaaaggcttaggctatacattagttgacaaatccaagaaattagctcttgaatggggcataacagatctgtatgttcatgtcgccatcaacaacgtagcagggcaaaagctgtacaagaagtgtggatttgtttatgaaggcgaagaacctgcatggaagggtaggtttctggggagaccaaggaggctgcttctttggcttgatatgagcaaagtgcttgtgcgatcgtgcatgtaaatacatatttagctatttgtaatcatattattgcaattgttggttttaatattcgacccaaatctccaattgattgcagtctgaatcatccctcttttctgaccacacctttctcaacgatgtcctacaaaagtttttggaggcagattaggaacaaaatcctagaaatgctttagatgttacacaaagggcagttggatttggaaagaattgattatgggggtgattgtgttgttgccaaaaattaaaggggcataccatgtaagagcaactcaaacaaaggtgttgaattatgtcatatcttaaaat

SEQ ID NO: 16205 - DNA, 1110 bp, Zea Mays
ggtcatgacttcaataccttatcgttgttttgtttaggctgtgtttgtttatgcagtggccggaaatgagttcgtaattattgtatcaactcgatgtaatgattgtgaattaataaaatcctccgcttagcaaaaaaggacaggcctgacgcagtggtgaaaagtcttcccactatgccaaaggttctgaattcgacgcagcctctctgcaaaatgctgcgttttgttaggatcacagaaaggctcttgcagatagggagtttgaagcattacaggataggatttctgggaagatgataaattttcgaagagtttcttgcataaacgggactgttccactgtccccatcattaatgtcagctgaggaactttgttctatgtgcaagttggctatacatgcagtttgtggaggatggaaaagagagattagtagttggtagtttagaccttaatcagtgtctttggctaccagatgaattgactggaaagaggcctggggtaaatgaagacatccagacaagagcatatctaagcaatgtctgtgttgccaaggagcttcagaaaaaaggcttaggctatacattagttgacaaatccaagaaattagctcttgaatggggcataacagatctgtatgttcatgtcgccatcaacaacgtagcagggcaaaagctgtacaagaagtgtggatttgtttatgaaggcgaagaacctgcatggaagggtaggtttctggggagaccaaggaggctgcttctttggcttgatatgagcaaagtgcttgtgcgatcgtgcatgtaaatacatatttagctatttgtaatcatattattgcaattgttggttttaatattcgacccaaatctccaattgattgcagtctgaatcatccctcttttctgaccacacctttctcaacgatgtcctacaaaagtttttggaggcagattaggaacaaaatcctagaaatgctttagatgttacacaaagggcagttggatttggaaagaattgattatgggggtgattgtgttgttgccaaaaattaaaggggcataccatgtaagagcaactcaaacaaaggtgttgaattatgtcatatcttaaaat

SEQ ID NO: 16206 - DNA, 2721 bp, Zea Mays
cttggtaggaggtggtgccggcaggggagctcggcccgagacgaagatgaggaggaggcacatcaggattgatttagggccaggctgatggtggttgacagtggatctggcagtgaaggatctgctgtaaccgtgcagggaggcggaggcgatgagggcgagtggcgcgtcggattcggtgttgtgtgcaggcatggatgtgggcggtagtcggtggaaggaggagggaagaagataaggcggagatagagattcaatctggtccttctattttatgtccaagggctgaaaagatcaagtgatggttgcctttggattagtcagttgttgcatagaaagactaaataaaacgttgagggagtgaggtagtgtgtagcgacacgagattggctgctgcaattggcattgtttttcctttaaatgaaacaaaccaagtgggagagctgcagattatattaatgaaaatgtaggcttagactaggcagacaaatacaatcagaaaagttgctctgatagtgcaacactaaaactaccatgttcgatacttaaatcatgtgtgttctcaagctctcgacgaactctggtaggcgctagacatattcctcctgccctgaggtcagacgacaccatctcaagctcccttccaccaaactctagtggtcacaatgggagcatgatgaaccaggttagtgatacaccatgcggtgaagtaggtcagaagcttagcaaagtaccaatggtcatgaaggaaaattaaaatgagtgatcctttttgacgaaggtgaagctccagatgcatgatctctaagatgccattgagattggtggcatcaacttgcaagaggagggactggtgtttgaaaccttttctaacgtaatgcttatggctggggccactactcttaggctagctagggaggagagattgatgtgggagatggtcgcggccaaatacctttcctatcttgctgccctcctccctgaggactagagtttttggagtggctttgagtcctagatgatttttttttcagttttctatgtttttggtctccataaggagtcccctgtattgggtctgacctctttcagacctttgtttccttccttcttaatataatgagacgcagctctcctgcgtgttcgagaaaaaaacgtaatgctgatggagataatatccatgccggtaggacagactggtgcttgaaacatgcacagttacaacgtcttcgtcacacctggacttcaaccaaagaaatgtaaagacactggtctctggtgatgcaactggtctctggtgatgcaactggtgcatcacaagttcacaatagaatactagaaagctaagtagataattgtttttttctgtgatgaactgcatgaagctttattatgttgttattgactggtccttcatcccaagcttgctgtgtctgtgtatcacattcttattttaaagagacatgtactgttgaggttaaccaacataatctgggaaaataaagggattacaattaagcatgtgtatcactaaaaagatagtttcttttctggaaatcacactctggtcaggtctattttggttgttagctgaaacaagttttcttgttgaaaagaacacaatatgactagactgggtcatgacttcaataccttatcgttgttttgtttaggctgtgtttgtttatgcagtggccggaaatgagttcgtaattattgtatcaactcgatgtaatgattgtgaattaataaaatcctccgcttagcaaaaaaggacaggcctgacgcagtggtgaaaagtcttcccactatgccaaaggttctgaattcgacgcagcctctctgcaaaatgctgcggatcacagaaaggctcttgcagatagggagtttgaagcattacaggataggatttctgggaagatgataaattttcgaagagtttcttgcataaacgggactgttccactgtccccatcattaatgtcagctgaggaactttgttctatgtgcaagtttgtggaggatggaaaagagagattagtagttggtagtttagaccttaatcagtgtctttggctaccagatgaattgactggaaagaggcctggggtaaatgaagacatccagacaagagcatatctaagcaatgtctgtgttgccaaggagcttcagaaaaaaggcttaggctatacattagttgacaaatccaagaaattagctcttgaatggggcataacagatctgtatgttcatgtcgccatcaacaacgtagcagggcaaaagctgtacaagaagtgtggatttgtttatgaaggcgaagaacctgcatggaagggtaggtttctggggagaccaaggaggctgcttctttggcttgatatgagcaaagtgcttgtgcgatcgtgcatgtaaatacatatttagctatttgtaatcatattattgcaattgttggttttaatattcgacccaaatctccaattgattgcagtctgaatcatccctcttttctgaccacacctttctcaacgatgtcctacaaaagtttttggaggcagattaggaacaaaatcctagaaatgctttagatgttacacaaagggcagttggatttggaaagaattgattatgggggtgattgtgttgttgccaaaaattaaaggggcataccatgtaagagcaactcaaacaaaggtgttgaattatgtcatatcttaaaat

SEQ ID NO: 16207 - DNA, 1123 bp, Zea Mays
ataagccaaacactccggcagctgtggtggagacgcctccgcctcccaaacacccgaatcaaactaacagccaccgatggcgtcgccatcgcggttgctcccgcccacgcctccttcggccgcccagccccgcggcccgcgggatcgcctcgccttgccgcgcctccggtgcctcgccgccgccgcagcctccgcctcgcccactgatggcgctgtgctgctggagcgtggcggttccgcggcggtggccgtgcgggagttcgtcacgcttgacgagctccgcgctgccgtgcgcctccgcgtccgcaccttccacgagtacgcagacgactccgtcggaaccgagttttgttaggatcacagaaaggctcttgcagatagggagtttgaagcattacaggataggatttctgggaagatgataaattttcgaagagtttcttgcataaacgggactgttccactgtccccatcattaatgtcagctgaggaactttgttctatgtgcaaggtaaatgaagacatccagacaagagcatatctaagcaatgtctgtgttgccaaggagcttcagaaaaaaggcttaggctatacattagttgacaaatccaagaaattagctcttgaatggggcataacagatctgtatgttcatgtcgccatcaacaacgtagcagggcaaaagctgtacaagaagtgtggatttgtttatgaaggcgaagaacctgcatggaagggtaggtttctggggagaccaaggaggctgcttctttggcttgatatgagcaaagtgcttgtgcgatcgtgcatgtaaatacatatttagctatttgtaatcatattattgcaattgttggttttaatattcgacccaaatctccaattgattgcagtctgaatcatccctcttttctgaccacacctttctcaacgatgtcctacaaaagtttttggaggcagattaggaacaaaatcctagaaatgctttagatgttacacaaagggcagttggatttggaaagaattgattatgggggtgattgtgttgttgccaaaaattaaaggggcataccatgtaagagcaactcaaacaaaggtgttgaattatgtcatatcttaaaat

SEQ ID NO: 16208 - DNA, 1235 bp, Zea Mays
ataagccaaacactccggcagctgtggtggagacgcctccgcctcccaaacacccgaatcaaactaacagccaccgatggcgtcgccatcgcggttgctcccgcccacgcctccttcggccgcccagccccgcggcccgcgggatcgcctcgccttgccgcgcctccggtgcctcgccgccgccgcagcctccgcctcgcccactgatggcgctgtgctgctggagcgtggcggttccgcggcggtggccgtgcgggagttcgtcacgcttgacgagctccgcgctgccgtgcgcctccgcgtccgcaccttccacgagtacgcagacgactccgtcggaaccgagttttgttaggatcacagaaaggctcttgcagatagggagtttgaagcattacaggataggatttctgggaagatgataaattttcgaagagtttcttgcataaacgggactgttccactgtccccatcattaatgtcagctgaggaactttgttctatgtgcaagttggctatacatgcagtttgtggaggatggaaaagagagattagtagttggtagtttagaccttaatcagtgtctttggctaccagatgaattgactggaaagaggcctggggtaaatgaagacatccagacaagagcatatctaagcaatgtctgtgttgccaaggagcttcagaaaaaaggcttaggctatacattagttgacaaatccaagaaattagctcttgaatggggcataacagatctgtatgttcatgtcgccatcaacaacgtagcagggcaaaagctgtacaagaagtgtggatttgtttatgaaggcgaagaacctgcatggaagggtaggtttctggggagaccaaggaggctgcttctttggcttgatatgagcaaagtgcttgtgcgatcgtgcatgtaaatacatatttagctatttgtaatcatattattgcaattgttggttttaatattcgacccaaatctccaattgattgcagtctgaatcatccctcttttctgaccacacctttctcaacgatgtcctacaaaagtttttggaggcagattaggaacaaaatcctagaaatgctttagatgttacacaaagggcagttggatttggaaagaattgattatgggggtgattgtgttgttgccaaaaattaaaggggcataccatgtaagagcaactcaaacaaaggtgttgaattatgtcatatcttaaaat

SEQ ID NO: 16209 - DNA, 631 bp, Zea Mays
ataagccaaacactccggcagctgtggtggagacgcctccgcctcccaaacacccgaatcaaactaacagccaccgatggcgtcgccatcgcggttgctcccgcccacgcctccttcggccgcccagccccgcggcccgcgggatcgcctcgccttgccgcgcctccggtgcctcgccgccgccgcagcctccgcctcgcccactgatggcgctgtgctgctggagcgtggcggttccgcggcggtggccgtgcgggagttcgtcacgcttgacgagctccgcgctgccgtgcgcctccgcgtccgcaccttccacgagtacgcagacgactccgtcggaaccgagttttgttaggatcacagaaaggctcttgcagatagggagtttgaagcattacaggataggatttctgggaagatgataaattttcgaagagtttcttgcataaacgggactgttccactgtccccatcattaatgtcagctgaggaactttgttctatgtgcaagtttgtggaggatggaaaagagagattagtagttggtagtttagaccttaatcagtgtctttggctaccagatgaattgactggaaagaggcctgggataaattgttcaatgggaagaatg

SEQ ID NO: 16210 - DNA, 1153 bp, Zea Mays
cgggcatggagctcgcccaagctccacctcccaagcgctctccctcacagccgcgctctcctccacctgcagctcgcccccatctcctcctctccccatggtggctccccctggatccctccctgcgcgggctccctgctccccatggttgtcggcttcccctacgagcagctcctccagggagcacggcctccctcctctcatgcgctctggagccgagctcctccttcaacaccggccgcggggcttgccctgcaccaactccggccgcgccccagttctgatgaaggttgtcttccctactcgccctccctctgtgccctgctccctgtgcgacgccctcctctgcgtcgtgctcgctagatcgggcctcgcgtcgtcgatctgcgcaactcctgttcggctatcggttccgcctccgtcgatctcctccatgcatgaacagcagcaaccccgagcctcctctgcatcgtgccatcgacccgcccgatggaatgccgcagcgagctctacccgatctgcagcgcttgcgcgctatcgtcgaaatccccgcaaccgtgttggtccgcaacagcacgtcgtcgatctgcaatccctggccttgtggtcgaccttggtacgctagttgatcacgtgatgtggaagtcgagctgagtcgaccatgagatgctgttaagcgtgggtttcttagcaagggatactgatgaatgaacttgaagatttgcgtgatcggatcaagcgccaggatgtgagatgctcgccaagtggacgtcatctaacaacactaaagtagtgtttatcctaggcaagccccggtgcatttgccacctccttgttgctttaaaaattttatcacttatatgctgcattaggtagtaggagttgaatgattaaacctttgttgcataacttccttgaactattgattaccatccttgatacatgttttaaaaagctagatgtgcttagtatgctcatagactaagaacaaaatgttttgatctatgaatcatgtttttacaaagaaaaagaggctggagtgatgaaggtatcaaaggccttgatgacttcatcatttcagtagggtacctctgacaggtaccaggtttttagaaataatttaatgtgagaccagacgttgagcaggaaaggt

SEQ ID NO: 16211 - DNA, 813 bp, Zea Mays
cggcatccccccccctgcagccggtgagctgctgtgagcctatccagtggcgattccattcctctccgtgtggacgcaaggactcagtgaaccacttccagatactcgctgcttctcccgtgcccatgttgcagcagctgcccttgccggtagatatagcatccaagcttggaatgcttataaggcccggcccgtagttccaaggatgcgcaaattctatgaaggtggtttccaacctacgatgacacgaagggaagctgctttaatccttggtgtcagggaaactgccagtgcagagaaggtcaaagaagcacacaagagagtgatggtggccaatcatccagatgcgggtggaagtcattaccttgcttcaaagattaacgaggcaaaggatgtaatgacagggaaaacaaaagggggtgggtctgccttttgatcggtacacggacaacgtgttcttccactgaaagagcaattttgtgtctccagactcgcattagaagatatgccgaaatctttgtgtgttttatgaaaatttgtggacaaaaaaaaaagtagtggacctttatggagcaggcaattcgttgcttagtaaagctcggctcagttgtgcttgtgcccgaatcaattggacattgttgctaattgagtcccctgtcctttgtttttccttttttttcattgatatcctgaaattcaccaacacaaagtatcatgaactgccttttattgataaattctgtatctgttttgaccaacgacctgtgtaatttcataccatcatcattgtggggctcagttgacaaaccggag

SEQ ID NO: 16212 - DNA, 662 bp, Zea Mays
cggcatccccccccctgcagccggtgagctgctgtgagcctatccagtggcgattccattcctctccgtgtggacgcaaggactcagtgaaccacttccagatactcgctgcttctcccgtgcccatgggaaactgccagtgcagagaaggtcaaagaagcacacaagagagtgatggtggccaatcatccagatgcgggtggaagtcattaccttgcttcaaagattaacgaggcaaaggatgtaatgacagggaaaacaaaagggggtgggtctgccttttgatcggtacacggacaacgtgttcttccactgaaagagcaattttgtgtctccagactcgcattagaagatatgccgaaatctttgtgtgttttatgaaaatttgtggacaaaaaaaaaagtagtggacctttatggagcaggcaattcgttgcttagtaaagctcggctcagttgtgcttgtgcccgaatcaattggacattgttgctaattgagtcccctgtcctttgtttttccttttttttcattgatatcctgaaattcaccaacacaaagtatcatgaactgccttttattgataaattctgtatctgttttgaccaacgacctgtgtaatttcataccatcatcattgtggggctcagttgacaaaccggag

SEQ ID NO: 16213 - DNA, 912 bp, Zea Mays
cggcatccccccccctgcagccggtgagctgctgtgagcctatccagtggcgattccattcctctccgtgtggacgcaaggactcagtgaaccacttccagatactcgctgcttctcccgtgcccatggctacaccacttatagcaggacttgcagttgcagcagctgcccttgccggtagatatagcatccaagcttggaatgcttataaggcccggcccgtagttccaaggatgcgcaaattctatgaaggtggtttccaacctacgatgacacgaagggaagctgctttaatccttggtgtcaggactagaccacaggaaacagtgaagtctttgggactcataaccattgattgtggatcaagtgaaggcaaagggaaactgccagtgcagagaaggtcaaagaagcacacaagagagtgatggtggccaatcatccagatgcgggtggaagtcattaccttgcttcaaagattaacgaggcaaaggatgtaatgacagggaaaacaaaagggggtgggtctgccttttgatcggtacacggacaacgtgttcttccactgaaagagcaattttgtgtctccagactcgcattagaagatatgccgaaatctttgtgtgttttatgaaaatttgtggacaaaaaaaaaagtagtggacctttatggagcaggcaattcgttgcttagtaaagctcggctcagttgtgcttgtgcccgaatcaattggacattgttgctaattgagtcccctgtcctttgtttttccttttttttcattgatatcctgaaattcaccaacacaaagtatcatgaactgccttttattgataaattctgtatctgttttgaccaacgacctgtgtaatttcataccatcatcattgtggggctcagttgacaaaccggag

SEQ ID NO: 16214 - DNA, 885 bp, Zea Mays
cggcatccccccccctgcagccggtgagctgctgtgagcctatgcctcctcatcggctcaccacccaggtttacccaccttgcagatccagtggcgattccattcctctccgtgtggacgcaaggactcagtgaaccacttccagatactcgctgcttctcccgtgcccatggctacaccacttatagcaggacttgcagttgcagcagctgcccttgccggtagatatagcatccaagcttggaatgcttataaggcccggcccgtagttccaaggatgcgcaaattctatgaaggtggtttccaacctacgatgacacgaagggaagctgctttaatccttggtgtcagggaaactgccagtgcagagaaggtcaaagaagcacacaagagagtgatggtggccaatcatccagatgcgggtggaagtcattaccttgcttcaaagattaacgaggcaaaggatgtaatgacagggaaaacaaaagggggtgggtctgccttttgatcggtacacggacaacgtgttcttccactgaaagagcaattttgtgtctccagactcgcattagaagatatgccgaaatctttgtgtgttttatgaaaatttgtggacaaaaaaaaaagtagtggacctttatggagcaggcaattcgttgcttagtaaagctcggctcagttgtgcttgtgcccgaatcaattggacattgttgctaattgagtcccctgtcctttgtttttccttttttttcattgatatcctgaaattcaccaacacaaagtatcatgaactgccttttattgataaattctgtatctgttttgaccaacgacctgtgtaatttcataccatcatcattgtggggctcagttgacaaaccggag

SEQ ID NO: 16215 - DNA, 326 bp, Zea Mays
cggcatccccccccctgcagccggtgagctgctgtgagcctatccagtggcgattccattcctctccgtgtggacgcaaggactcagtgaaccacttccagatactcgctgcttctcccgtgcccatggctacaccacttatagcaggacttgcagttgcagcagctgcccttgccggtagatatagcatccaagcttggaatgcttataaggcccggcccgtagttccaaggatgcgcaaattctatgaaggtggtttccaacctacgatgacacgaagggaagctgctttaatccttggtgtcaggtggtacaccaggcaagcg

SEQ ID NO: 16216 - DNA, 913 bp, Zea Mays
gtttaatgtcatatatctaaaaacacgggagcattcatgtttgtgactggatgttctcgtggccccctccttggatttcagtatctcgaaccgaaattttgcattcagagagctggtgttccaggtctggaggagcatgcagaccgcttgccgacatcagctacctgcatgaaccttctgaagctccccccctataaaagcaaggagcagatgcaaaccaaactattgtacgcgataaattcagaagctggttttgatctaagttgatcatgatcgggattcagtatttgcagttcagatagtcgctattaaaggcaccaagggccgaactcaaccaaccatcggccccatttgaagccccatgaatgaaggaaatgaaggaaaaaaagaaagaaacgcagttgtttctcagagtagttgaatgtctggagggaggctgcaatatagctgtctgctaactaagggcttcgttctccaagagaaataggcagacgctgtctaatcaatcatgggcatgtacatatgtgcatcattttatacagaaattttatatgtatctaatcaatgctggtttgcggtcatctggtcctttttggcgcatcacttgctcaccttatcccaatttagggctgatttgttaacaatagaattagatgggatacatgagaggaaatccattactatttaaaattaaataacaagggattttctctcatggatctcatccaattcttttgttaccaaatcagcacttagtctttggaaggaggggattgaggggtgtaatctagcttatcaattatataaacacttaatgacctatttatggattactataatctaggtatctagattatataatctacataataatctgtgttgtttgttagtatttttaacttttttaagctga

SEQ ID NO: 16217 - DNA, 2627 bp, Zea Mays
ttctttccaaaccaggcggctgacatcattgctgtttctacctcgttgttggataccttgccagcagtcacaacacctactgaaagggcagatgatgatgatgagacacccatggatgttgatattaaaattaatcttgatgttgatttggaaagacagataactgcagcaattgatccaaagctacttcaacatttggtgaatgctctcttcagaggtacattaagcataaatgattctgatctgtctgaaccatcagatgctgaagtggatgctgtaggatgtatttgtgcttttcttcatgtcacattcaatacattccctctagagcgaattatgactgtactggcctaccggactgaaattgttcctgcactgtggaacttcataaagcggtgccatgcaaaccgaagatggccatttttttcgaagtttgcatcttcattacctgctgatgctcctggttggctccttcccatgtctgtattctgtcccatatacaagcacatgttgaagatcattgataatggggagttttatgagcaagagaaacccctttcccttaaagatttgaagtccttggttcttattttaaagcaggcattatggcaacttttgtggattattccatcctcttctactcagaaagtgtcatccaacccttcaggccttaagaagttgtcagtggagaatgtcaagatcagagctagggttgggttgtctgaattgctcacacagttgcaagactggaacaaccgacttccattcacttctgcaagtgatttctattcccaagaagcaacaagcgaaaattttgtgtctcaggcaatacttggtaatactcgagcatcagagatcataaagcttgctccttttttggctccatttaccagtcgagtcaaaatattcacttcccaattaacgagttctagacaatcaatatcacattctgcattgacaagacaacggttcaaaataagaagaaaccgacttctggaagatgcttttgatcagctaagtttgctttctgaagaagatctcaaaggaccgattcgagtttcatttattaatgaacatggcgaggaagaggctggaatcgatggtggtggaattttcaaggatttcatggaaaatattactcgagccgcttttgatgtgcagtacggtctcttcaaggagacggctgatcatcttttgtacccaaacccaggatcaggattggttcatgaactacatctgcaatatttcaattttcttggaagtctacttgggaaggcaatgtatgaaggcatacttgttgacttgccatttgcaacgttcttcttgagcaaggtgaaacaaaaatacaattttttaaatgatcttccttcattggatccagaattgtatcgacatcttctatttttaaagcattacaatggtgatatctcagagttggaactgtattttgttattgtgaataatgaatatggtgaacaatgtgaagaagaacttctccctggtgggagggacatgcgtgttacgaatgataatgttattacttttatccatcttgttgccaatcatcggttaaactaccagatccgtgcacaaagtacacacttcttgagaggttttcaacagcttataccaaaagactggattgatatgttcaatgaacatgaaattcaggttcttatatctggctctttagaaagcttggatattgatgacttgcggtcgaacaccaactattctgcaggatatcatccagtttgtgactggatgttctcgtggccccctccttggatttcagtatctcgaaccgaaattttgcattcagagagctggtgttccaggtctggaggagcatgcagaccgcttgccgacatcagctacctgcatgaaccttctgaagctccccccctataaaagcaaggagcagatgcaaaccaaactattgtacgcgataaattcagaagctggttttgatctaagttgatcatgatcgggattcagtatttgcagttcagatagtcgctattaaaggcaccaagggccgaactcaaccaaccatcggccccatttgaagccccatgaatgaaggaaatgaaggaaaaaaagaaagaaacgcagttgtttctcagagtagttgaatgtctggagggaggctgcaatatagctgtctgctaactaagggcttcgttctccaagagaaataggcagacgctgtctaatcaatcatgggcatgtacatatgtgcatcattttatacagaaattttatatgtatctaatcaatgctggtttgcggtcatctggtcctttttggcgcatcacttgctcaccttatcccaatttagggctgatttgttaacaatagaattagatgggatacatgagaggaaatccattactatttaaaattaaataacaagggattttctctcatggatctcatccaattcttttgttaccaaatcagcacttagtctttggaaggaggggattgaggggtgtaatctagcttatcaattatataaacacttaatgacctatttatggattactataatctaggtatctagattatataatctacataataatctgtgttgtttgttagtatttttaacttttttaagctga

SEQ ID NO: 16218 - DNA, 2692 bp, Zea Mays
ttctttccaaaccaggcggctgacatcattgctgtttctacctcgttgttggataccttgccagcagtcacaacacctactgaaagggcagatgatgatgatgagacacccatggatgttgatattaaaattaatcttgatgttgatttggaaagacagataactgcagcaattgatccaaagctacttcaacatttggtgaatgctctcttcagaggtacattaagcataaatgattctgatctgtctgaaccatcagatgctgaagtggatgctgtaggatgtatttgtgcttttcttcatgtcacattcaatacattccctctagagcgaattatgactgtactggcctaccggactgaaattgttcctgcactgtggaacttcataaagcggtgccatgcaaaccgaagatggccatttttttcgaagtttgcatcttcattacctgctgatgctcctggttggctccttcccatgtctgtattctgtcccatatacaagcacatgttgaagatcattgataatggggagttttatgagcaagagaaacccctttcccttaaagatttgaagtccttggttcttattttaaagcaggcattatggcaacttttgtggattattccatcctcttctactcagaaagtgtcatccaacccttcaggccttaagaagttgtcagtggagaatgtcaagatcagagctagggttgggttgtctgaattgctcacacagttgcaagactggaacaaccgacttccattcacttctgcaagtgatttctattcccaagaagcaacaagcgaaaattttgtgtctcagaggcaatacttggtaatactcgagcatcagagatcataaagcttgctccttttttggctccatttaccagtcgagtcaaaatattcacttcccaattaacgagttctagacaatcaatatcacattctgcattgacaagacaacggttcaaaataagaagaaaccgacttctggaagatgcttttgatcagctaagtttgctttctgaagaagatctcaaaggaccgattcgagtttcatttattaatgaacatggcgaggaagaggctggaatcgatggtggtggaattttcaaggatttcatggaaaatattactcgagccgcttttgatgtgcagtacggtctcttcaaggagacggctgatcatcttttgtacccaaacccaggatcaggattggttcatgaactacatctgcaatatttcaattttcttggaagtctacttgggaaggcaatgtatgaaggcatacttgttgacttgccatttgcaacgttcttcttgagcaagatacaattttttaaatgatcttccttcattggatccagaattgtatcgacatcttctatttttaaagcattacaatggtgatatctcagagttggaactgtattttgttattgtgaataatgaatatggtgaacaatgtgaagaagaacttctccctggtgggagggacatgcgtgttacgaatgataatgttattacttttatccatcttgttgccaatcatcggttaaactaccagatccgtgcacaaagtacacacttcttgagaggttttcaacagcttataccaaaagactggattgatatgttcaatgaacatgaaattcaggttcttatatctggctctttagaaagcttggatattgatgacttgcggtcgaacaccaactattctgcaggatatcatccagatcatgagcttgttgagatgttttgggaggtcttgaagagcttaagttcagacaaccagaaaaaatttctcaagtttgtgactggatgttctcgtggccccctccttggatttcagtatctcgaaccgaaattttgcattcagagagctggtgttccaggtctggaggagcatgcagaccgcttgccgacatcagctacctgcatgaaccttctgaagctccccccctataaaagcaaggagcagatgcaaaccaaactattgtacgcgataaattcagaagctggttttgatctaagttgatcatgatcgggattcagtatttgcagttcagatagtcgctattaaaggcaccaagggccgaactcaaccaaccatcggccccatttgaagccccatgaatgaaggaaatgaaggaaaaaaagaaagaaacgcagttgtttctcagagtagttgaatgtctggagggaggctgcaatatagctgtctgctaactaagggcttcgttctccaagagaaataggcagacgctgtctaatcaatcatgggcatgtacatatgtgcatcattttatacagaaattttatatgtatctaatcaatgctggtttgcggtcatctggtcctttttggcgcatcacttgctcaccttatcccaatttagggctgatttgttaacaatagaattagatgggatacatgagaggaaatccattactatttaaaattaaataacaagggattttctctcatggatctcatccaattcttttgttaccaaatcagcacttagtctttggaaggaggggattgaggggtgtaatctagcttatcaattatataaacacttaatgacctatttatggattactataatctaggtatctagattatataatctacataataatctgtgttgtttgttagtatttttaacttttttaagctga

SEQ ID NO: 16219 - DNA, 2667 bp, Zea Mays
ttctttccaaaccaggcggctgacatcattgctgtttctacctcgttgttggataccttgccagcagtcacaacacctactgaaagggcagatgatgatgatgagacacccatggatgttgatattaaaattaatcttgatgttgatttggaaagacagataactgcagcaattgatccaaagctacttcaacatttggtgaatgctctcttcagaggtacattaagcataaatgattctgatctgtctgaaccatcagatgctgaagtggatgctgtaggatgtatttgtgcttttcttcatgtcacattcaatacattccctctagagcgaattatgactgtactggcctaccggactgaaattgttcctgcactgtggaacttcataaagcggtgccatgcaaaccgaagatggccatttttttcgaagtttgcatcttcattacctgctgatgctcctggttggctccttcccatgtctgtattctgtcccatatacaagcacatgttgaagatcattgataatggggagttttatgagcaagagaaacccctttcccttaaagatttgaagtccttggttcttattttaaagcaggcattatggcaacttttgtggattattccatcctcttctactcagaaagtgtcatccaacccttcaggccttaagaagttgtcagtggagaatgtcaagatcagagctagggttgggttgtctgaattgctcacacagttgcaagactggaacaaccgacttccattcacttctgcaagtgatttctattcccaagaagcaacaagcgaaaattttgtgtctcaggcaatacttggtaatactcgagcatcagagatcataaagcttgctccttttttggctccatttaccagtcgagtcaaaatattcacttcccaattaacgagttctagacaatcaatatcacattctgcattgacaagacaacggttcaaaataagaagaaaccgacttctggaagatgcttttgatcagctaagtttgctttctgaagaagatctcaaaggaccgattcgagtttcatttattaatgaacatggcgaggaagaggctggaatcgatggtggtggaattttcaaggatttcatggaaaatattactcgagccgcttttgatgtgcagtacggtctcttcaaggatcaggattggttcatgaactacatctgcaatatttcaattttcttggaagtctacttgggaaggcaatgtatgaaggcatacttgttgacttgccatttgcaacgttcttcttgagcaaggtgaaacaaaaatacaattttttaaatgatcttccttcattggatccagaattgtatcgacatcttctatttttaaagcattacaatggtgatatctcagagttggaactgtattttgttattgtgaataatgaatatggtgaacaatgtgaagaagaacttctccctggtgggagggacatgcgtgttacgaatgataatgttattacttttatccatcttgttgccaatcatcggttaaactaccagatccgtgcacaaagtacacacttcttgagaggttttcaacagcttataccaaaagactggattgatatgttcaatgaacatgaaattcaggttcttatatctggctctttagaaagcttggatattgatgacttgcggtcgaacaccaactattctgcaggatatcatccagatcatgagcttgttgagatgttttgggaggtcttgaagagcttaagttcagacaaccagaaaaaatttctcaagtttgtgactggatgttctcgtggccccctccttggatttcagtatctcgaaccgaaattttgcattcagagagctggtgttccaggtctggaggagcatgcagaccgcttgccgacatcagctacctgcatgaaccttctgaagctccccccctataaaagcaaggagcagatgcaaaccaaactattgtacgcgataaattcagaagctggttttgatctaagttgatcatgatcgggattcagtatttgcagttcagatagtcgctattaaaggcaccaagggccgaactcaaccaaccatcggccccatttgaagccccatgaatgaaggaaatgaaggaaaaaaagaaagaaacgcagttgtttctcagagtagttgaatgtctggagggaggctgcaatatagctgtctgctaactaagggcttcgttctccaagagaaataggcagacgctgtctaatcaatcatgggcatgtacatatgtgcatcattttatacagaaattttatatgtatctaatcaatgctggtttgcggtcatctggtcctttttggcgcatcacttgctcaccttatcccaatttagggctgatttgttaacaatagaattagatgggatacatgagaggaaatccattactatttaaaattaaataacaagggattttctctcatggatctcatccaattcttttgttaccaaatcagcacttagtctttggaaggaggggattgaggggtgtaatctagcttatcaattatataaacacttaatgacctatttatggattactataatctaggtatctagattatataatctacataataatctgtgttgtttgttagtatttttaacttttttaagctga

SEQ ID NO: 16220 - DNA, 2623 bp, Zea Mays
ttctttccaaaccaggcggctgacatcattgctgtttctacctcgttgttggataccttgccagcagtcacaacacctactgaaagggcagatgatgatgatgagacacccatggatgttgatattaaaattaatcttgatgttgatttggaaagacagataactgcagcaattgatccaaagctacttcaacatttggtgaatgctctcttcagaggtacattaagcataaatgattctgatctgtctgaaccatcagatgctgaagtggatgctgtaggatgtatttgtgcttttcttcatgtcacattcaatacattccctctagagcgaattatgactgtactggcctaccggactgaaattgttcctgcactgtggaacttcataaagcggtgccatgcaaaccgaagatggccatttttttcgaagtttgcatcttcattacctgctgatgctcctggttggctccttcccatgtctgtattctgtcccatatacaagcacatgttgaagatcattgataatggggagttttatgagcaagagaaacccctttcccttaaagatttgaagtccttggttcttattttaaagcaggccttaagaagttgtcagtggagaatgtcaagatcagagctagggttgggttgtctgaattgctcacacagttgcaagactggaacaaccgacttccattcacttctgcaagtgatttctattcccaagaagcaacaagcgaaaattttgtgtctcaggcaatacttggtaatactcgagcatcagagatcataaagcttgctccttttttggctccatttaccagtcgagtcaaaatattcacttcccaattaacgagttctagacaatcaatatcacattctgcattgacaagacaacggttcaaaataagaagaaaccgacttctggaagatgcttttgatcagctaagtttgctttctgaagaagatctcaaaggaccgattcgagtttcatttattaatgaacatggcgaggaagaggctggaatcgatggtggtggaattttcaaggatttcatggaaaatattactcgagccgcttttgatgtgcagtacggtctcttcaaggagacggctgatcatcttttgtacccaaacccaggatcaggattggttcatgaactacatctgcaatatttcaattttcttggaagtctacttgggaaggcaatgtatgaaggcatacttgttgacttgccatttgcaacgttcttcttgagcaagatacaattttttaaatgatcttccttcattggatccagaattgtatcgacatcttctatttttaaagcattacaatggtgatatctcagagttggaactgtattttgttattgtgaataatgaatatggtgaacaatgtgaagaagaacttctccctggtgggagggacatgcgtgttacgaatgataatgttattacttttatccatcttgttgccaatcatcggttaaactaccagatccgtgcacaaagtacacacttcttgagaggttttcaacagcttataccaaaagactggattgatatgttcaatgaacatgaaattcaggttcttatatctggctctttagaaagcttggatattgatgacttgcggtcgaacaccaactattctgcaggatatcatccagatcatgagcttgttgagatgttttgggaggtcttgaagagcttaagttcagacaaccagaaaaaatttctcaagtttgtgactggatgttctcgtggccccctccttggatttcagtatctcgaaccgaaattttgcattcagagagctggtgttccaggtctggaggagcatgcagaccgcttgccgacatcagctacctgcatgaaccttctgaagctccccccctataaaagcaaggagcagatgcaaaccaaactattgtacgcgataaattcagaagctggttttgatctaagttgatcatgatcgggattcagtatttgcagttcagatagtcgctattaaaggcaccaagggccgaactcaaccaaccatcggccccatttgaagccccatgaatgaaggaaatgaaggaaaaaaagaaagaaacgcagttgtttctcagagtagttgaatgtctggagggaggctgcaatatagctgtctgctaactaagggcttcgttctccaagagaaataggcagacgctgtctaatcaatcatgggcatgtacatatgtgcatcattttatacagaaattttatatgtatctaatcaatgctggtttgcggtcatctggtcctttttggcgcatcacttgctcaccttatcccaatttagggctgatttgttaacaatagaattagatgggatacatgagaggaaatccattactatttaaaattaaataacaagggattttctctcatggatctcatccaattcttttgttaccaaatcagcacttagtctttggaaggaggggattgaggggtgtaatctagcttatcaattatataaacacttaatgacctatttatggattactataatctaggtatctagattatataatctacataataatctgtgttgtttgttagtatttttaacttttttaagctga

SEQ ID NO: 16221 - DNA, 2692 bp, Zea Mays
ttctttccaaaccaggcggctgacatcattgctgtttctacctcgttgttggataccttgccagcagtcacaacacctactgaaagggcagatgatgatgatgagacacccatggatgttgatattaaaattaatcttgatgttgatttggaaagacagataactgcagcaattgatccaaagctacttcaacatttggtgaatgctctcttcagaggtacattaagcataaatgattctgatctgtctgaaccatcagatgctgaagtggatgctgtaggatgtatttgtgcttttcttcatgtcacattcaatacattccctctagagcgaattatgactgtactggcctaccggactgaaattgttcctgcactgtggaacttcataaagcggtgccatgcaaaccgaagatggccatttttttcgaagtttgcatcttcattacctgctgatgctcctggttggctccttcccatgtctgtattctgtcccatatacaagcacatgttgaagatcattgataatggggagttttatgagcaagagaaacccctttcccttaaagatttgaagtccttggttcttattttaaagcaggcattatggcaacttttgtggattattccatcctcttctactcagaaagtgtcatccaacccttcaggccttaagaagttgtcagtggagaatgtcaagatcagagctagggttgggttgtctgaattgctcacacagagttgcaagactggaacaaccgacttccattcacttctgcaagtgatttctattcccaagaagcaacaagcgaaaattttgtgtctcaggcaatacttggtaatactcgagcatcagagatcataaagcttgctccttttttggctccatttaccagtcgagtcaaaatattcacttcccaattaacgagttctagacaatcaatatcacattctgcattgacaagacaacggttcaaaataagaagaaaccgacttctggaagatgcttttgatcagctaagtttgctttctgaagaagatctcaaaggaccgattcgagtttcatttattaatgaacatggcgaggaagaggctggaatcgatggtggtggaattttcaaggatttcatggaaaatattactcgagccgcttttgatgtgcagtacggtctcttcaaggagacggctgatcatcttttgtacccaaacccaggatcaggattggttcatgaactacatctgcaatatttcaattttcttggaagtctacttgggaaggcaatgtatgaaggcatacttgttgacttgccatttgcaacgttcttcttgagcaagatacaattttttaaatgatcttccttcattggatccagaattgtatcgacatcttctatttttaaagcattacaatggtgatatctcagagttggaactgtattttgttattgtgaataatgaatatggtgaacaatgtgaagaagaacttctccctggtgggagggacatgcgtgttacgaatgataatgttattacttttatccatcttgttgccaatcatcggttaaactaccagatccgtgcacaaagtacacacttcttgagaggttttcaacagcttataccaaaagactggattgatatgttcaatgaacatgaaattcaggttcttatatctggctctttagaaagcttggatattgatgacttgcggtcgaacaccaactattctgcaggatatcatccagatcatgagcttgttgagatgttttgggaggtcttgaagagcttaagttcagacaaccagaaaaaatttctcaagtttgtgactggatgttctcgtggccccctccttggatttcagtatctcgaaccgaaattttgcattcagagagctggtgttccaggtctggaggagcatgcagaccgcttgccgacatcagctacctgcatgaaccttctgaagctccccccctataaaagcaaggagcagatgcaaaccaaactattgtacgcgataaattcagaagctggttttgatctaagttgatcatgatcgggattcagtatttgcagttcagatagtcgctattaaaggcaccaagggccgaactcaaccaaccatcggccccatttgaagccccatgaatgaaggaaatgaaggaaaaaaagaaagaaacgcagttgtttctcagagtagttgaatgtctggagggaggctgcaatatagctgtctgctaactaagggcttcgttctccaagagaaataggcagacgctgtctaatcaatcatgggcatgtacatatgtgcatcattttatacagaaattttatatgtatctaatcaatgctggtttgcggtcatctggtcctttttggcgcatcacttgctcaccttatcccaatttagggctgatttgttaacaatagaattagatgggatacatgagaggaaatccattactatttaaaattaaataacaagggattttctctcatggatctcatccaattcttttgttaccaaatcagcacttagtctttggaaggaggggattgaggggtgtaatctagcttatcaattatataaacacttaatgacctatttatggattactataatctaggtatctagattatataatctacataataatctgtgttgtttgttagtatttttaacttttttaagctga

SEQ ID NO: 16222 - DNA, 2788 bp, Zea Mays
ctcgaatactatgtaggttatgtgagctatgctgtcttagctagtttttcactgtccatatgtgtgatttatttgtttctaaatattttccatgcatattctttccaaaccaggcggctgacatcattgctgtttctacctcgttgttggataccttgccagcagtcacaacacctactgaaagggcagatgatgatgatgagacacccatggatgttgatattaaaattaatcttgatgttgatttggaaagacagataactgcagcaattgatccaaagctacttcaacatttggtgaatgctctcttcagaggtacattaagcataaatgattctgatctgtctgaaccatcagatgctgaagtggatgctgtaggatgtatttgtgcttttcttcatgtcacattcaatacattccctctagagcgaattatgactgtactggcctaccggactgaaattgttcctgcactgtggaacttcataaagcggtgccatgcaaaccgaagatggccatttttttcgaagtttgcatcttcattacctgctgatgctcctggttggctccttcccatgtctgtattctgtcccatatacaagcacatgttgaagatcattgataatggggagttttatgagcaagagaaacccctttcccttaaagatttgaagtccttggttcttattttaaagcaggcattatggcaacttttgtggattattccatcctcttctactcagaaagtgtcatccaacccttcaggccttaagaagttgtcagtggagaatgtcaagatcagagctagggttgggttgtctgaattgctcacacagttgcaagactggaacaaccgacttccattcacttctgcaagtgatttctattcccaagaagcaacaagcgaaaattttgtgtctcaggcaatacttggtaatactcgagcatcagagatcataaagcttgctccttttttggctccatttaccagtcgagtcaaaatattcacttcccaattaacgagttctagacaatcaatatcacattctgcattgacaagacaacggttcaaaataagaagaaaccgacttctggaagatgcttttgatcagctaagtttgctttctgaagaagatctcaaaggaccgattcgagtttcatttattaatgaacatggcgaggaagaggctggaatcgatggtggtggaattttcaaggatttcatggaaaatattactcgagccgcttttgatgtgcagtacggtctcttcaaggagacggctgatcatcttttgtacccaaacccaggatcaggattggttcatgaactacatctgcaatatttcaattttcttggaagtctacttgggaaggcaatgtatgaaggcatacttgttgacttgccatttgcaacgttcttcttgagcaagatacaattttttaaatgatcttccttcattggatccagaattgtatcgacatcttctatttttaaagcattacaatggtgatatctcagagttggaactgtattttgttattgtgaataatgaatatggtgaacaatgtgaagaagaacttctccctggtgggagggacatgcgtgttacgaatgataatgttattacttttatccatcttgttgccaatcatcggttaaactaccagatccgtgcacaaagtacacacttcttgagaggttttcaacagcttataccaaaagactggattgatatgttcaatgaacatgaaattcaggttcttatatctggctctttagaaagcttggatattgatgacttgcggtcgaacaccaactattctgcaggatatcatccagatcatgagcttgttgagatgttttgggaggtcttgaagagcttaagttcagacaaccagaaaaaatttctcaagtttgtgactggatgttctcgtggccccctccttggatttcagtatctcgaaccgaaattttgcattcagagagctggtgttccaggtctggaggagcatgcagaccgcttgccgacatcagctacctgcatgaaccttctgaagctccccccctataaaagcaaggagcagatgcaaaccaaactattgtacgcgataaattcagaagctggttttgatctaagttgatcatgatcgggattcagtatttgcagttcagatagtcgctattaaaggcaccaagggccgaactcaaccaaccatcggccccatttgaagccccatgaatgaaggaaatgaaggaaaaaaagaaagaaacgcagttgtttctcagagtagttgaatgtctggagggaggctgcaatatagctgtctgctaactaagggcttcgttctccaagagaaataggcagacgctgtctaatcaatcatgggcatgtacatatgtgcatcattttatacagaaattttatatgtatctaatcaatgctggtttgcggtcatctggtcctttttggcgcatcacttgctcaccttatcccaatttagggctgatttgttaacaatagaattagatgggatacatgagaggaaatccattactatttaaaattaaataacaagggattttctctcatggatctcatccaattcttttgttaccaaatcagcacttagtctttggaaggaggggattgaggggtgtaatctagcttatcaattatataaacacttaatgacctatttatggattactataatctaggtatctagattatataatctacataataatctgtgttgtttgttagtatttttaacttttttaagctga

SEQ ID NO: 16223 - DNA, 2828 bp, Zea Mays
gagctttccatgtcggttatatgttttttctcgaatactatgtaggttatgtgagctatgctgtcttagctagtttttcactgtccatatgtgtgatttatttgtttctaaatattttccatgcatattctttccaaaccaggcggctgacatcattgctgtttctacctcgttgttggataccttgccagcagtcacaacacctactgaaagggcagatgatgatgatgagacacccatggatgttgatattaaaattaatcttgatgttgatttggaaagacagataactgcagcaattgatccaaagctacttcaacatttggtgaatgctctcttcagaggtacattaagcataaatgattctgatctgtctgaaccatcagatgctgaagtggatgctgtaggatgtatttgtgcttttcttcatgtcacattcaatacattccctctagagcgaattatgactgtactggcctaccggactgaaattgttcctgcactgtggaacttcataaagcggtgccatgcaaaccgaagatggccatttttttcgaagtttgcatcttcattacctgctgatgctcctggttggctccttcccatgtctgtattctgtcccatatacaagcacatgttgaagatcattgataatggggagttttatgagcaagagaaacccctttcccttaaagatttgaagtccttggttcttattttaaagcaggcattatggcaacttttgtggattattccatcctcttctactcagaaagtgtcatccaacccttcaggccttaagaagttgtcagtggagaatgtcaagatcagagctagggttgggttgtctgaattgctcacacagttgcaagactggaacaaccgacttccattcacttctgcaagtgatttctattcccaagaagcaacaagcgaaaattttgtgtctcaggcaatacttggtaatactcgagcatcagagatcataaagcttgctccttttttggctccatttaccagtcgagtcaaaatattcacttcccaattaacgagttctagacaatcaatatcacattctgcattgacaagacaacggttcaaaataagaagaaaccgacttctggaagatgcttttgatcagctaagtttgctttctgaagaagatctcaaaggaccgattcgagtttcatttattaatgaacatggcgaggaagaggctggaatcgatggtggtggaattttcaaggatttcatggaaaatattactcgagccgcttttgatgtgcagtacggtctcttcaaggagacggctgatcatcttttgtacccaaacccaggatcaggattggttcatgaactacatctgcaatatttcaattttcttggaagtctacttgggaaggcaatgtatgaaggcatacttgttgacttgccatttgcaacgttcttcttgagcaaggtgaaacaaaaatacaattttttaaatgatcttccttcattggatccagaattgtatcgacatcttctatttttaaagcattacaatggtgatatctcagagttggaactgtattttgttattgtgaataatgaatatggtgaacaatgtgaagaagaacttctccctggtgggagggacatgcgtgttacgaatgataatgttattacttttatccatcttgttgccaatcatcggttaaactaccagatccgtgcacaaagtacacacttcttgagaggttttcaacagcttataccaaaagactggattgatatgttcaatgaacatgaaattcaggttcttatatctggctctttagaaagcttggatattgatgacttgcggtcgaacaccaactattctgcaggatatcatccagatcatgagcttgttgagatgttttgggaggtcttgaagagcttaagttcagacaaccagaaaaaatttctcaagtttgtgactggatgttctcgtggccccctccttggatttcagtatctcgaaccgaaattttgcattcagagagctggtgttccaggtctggaggagcatgcagaccgcttgccgacatcagctacctgcatgaaccttctgaagctccccccctataaaagcaaggagcagatgcaaaccaaactattgtacgcgataaattcagaagctggttttgatctaagttgatcatgatcgggattcagtatttgcagttcagatagtcgctattaaaggcaccaagggccgaactcaaccaaccatcggccccatttgaagccccatgaatgaaggaaatgaaggaaaaaaagaaagaaacgcagttgtttctcagagtagttgaatgtctggagggaggctgcaatatagctgtctgctaactaagggcttcgttctccaagagaaataggcagacgctgtctaatcaatcatgggcatgtacatatgtgcatcattttatacagaaattttatatgtatctaatcaatgctggtttgcggtcatctggtcctttttggcgcatcacttgctcaccttatcccaatttagggctgatttgttaacaatagaattagatgggatacatgagaggaaatccattactatttaaaattaaataacaagggattttctctcatggatctcatccaattcttttgttaccaaatcagcacttagtctttggaaggaggggattgaggggtgtaatctagcttatcaattatataaacacttaatgacctatttatggattactataatctaggtatctagattatataatctacataataatctgtgttgtttgttagtatttttaacttttttaagctga

SEQ ID NO: 16224 - DNA, 2096 bp, Zea Mays
aaacccctttcccttaaagatttgaagtccttggttcttattttaaagcagaaagtgtcatccaacccttcaggccttaagaagttgtcagtggagaatgtcaagatcagagctagggttgggttgtctgaattgctcacacagttgcaagactggaacaaccgacttccattcacttctgcaagtgatttctattcccaagaagcaacaagcgaaaattttgtgtctcaggcaatacttggtaatactcgagcatcagagatcataaagcttgctccttttttggctccatttaccagtcgagtcaaaatattcacttcccaattaacgagttctagacaatcaatatcacattctgcattgacaagacaacggttcaaaataagaagaaaccgacttctggaagatgcttttgatcagctaagtttgctttctgaagaagatctcaaaggaccgattcgagtttcatttattaatgaacatggcgaggaagaggctggaatcgatggtggtggaattttcaaggatttcatggaaaatattactcgagccgcttttgatgtgcagtacggtctcttcaaggagacggctgatcatcttttgtacccaaacccaggatcaggattggttcatgaactacatctgcaatatttcaattttcttggaagtctacttgggaaggcaatgtatgaaggcatacttgttgacttgccatttgcaacgttcttcttgagcaagatacaattttttaaatgatcttccttcattggatccagaattgtatcgacatcttctatttttaaagcattacaatggtgatatctcagagttggaactgtattttgttattgtgaataatgaatatggtgaacaatgtgaagaagaacttctccctggtgggagggacatgcgtgttacgaatgataatgttattacttttatccatcttgttgccaatcatcggttaaactaccagatccgtgcacaaagtacacacttcttgagaggttttcaacagcttataccaaaagactggattgatatgttcaatgaacatgaaattcaggttcttatatctggctctttagaaagcttggatattgatgacttgcggtcgaacaccaactattctgcaggatatcatccagatcatgagcttgttgagatgttttgggaggtcttgaagagcttaagttcagacaaccagaaaaaatttctcaagtttgtgactggatgttctcgtggccccctccttggatttcagtatctcgaaccgaaattttgcattcagagagctggtgttccaggtctggaggagcatgcagaccgcttgccgacatcagctacctgcatgaaccttctgaagctccccccctataaaagcaaggagcagatgcaaaccaaactattgtacgcgataaattcagaagctggttttgatctaagttgatcatgatcgggattcagtatttgcagttcagatagtcgctattaaaggcaccaagggccgaactcaaccaaccatcggccccatttgaagccccatgaatgaaggaaatgaaggaaaaaaagaaagaaacgcagttgtttctcagagtagttgaatgtctggagggaggctgcaatatagctgtctgctaactaagggcttcgttctccaagagaaataggcagacgctgtctaatcaatcatgggcatgtacatatgtgcatcattttatacagaaattttatatgtatctaatcaatgctggtttgcggtcatctggtcctttttggcgcatcacttgctcaccttatcccaatttagggctgatttgttaacaatagaattagatgggatacatgagaggaaatccattactatttaaaattaaataacaagggattttctctcatggatctcatccaattcttttgttaccaaatcagcacttagtctttggaaggaggggattgaggggtgtaatctagcttatcaattatataaacacttaatgacctatttatggattactataatctaggtatctagattatataatctacataataatctgtgttgtttgttagtatttttaacttttttaagctga

SEQ ID NO: 16225 - DNA, 876 bp, Zea Mays
  misc_feature (875)..(876): n is a, c, g, or t
gtcgccgcccgaccctcgctcgcctcttcccgaggtctccacgatattacatccccgatcgtgcccggggcttcgttccggtacgtgagggggtcggcgatgttcttctcgggtgacccgtcggcgcggcggcgggtcgacctcggcggccggagcagcaaggagcgggaccgcaaggtgctgctcgagcagacgcgcgaggagcggcgtcggcgccagggcctccgactacagaacacctccgccacgaagatccagagggaagaaggctttggaattggcacgctcagaggttcggaagaatttttgctcaacttttggggagcattgcgagcggatagagtggaacaacttcggaactaattctgactttcttcgtcaattactgtttttctttaatgcaaatgaagacaatgacatagctatactttgtcaaatctgcaacttgctgctgcaatatgttaaacaaggcggagatgttgtaactctctttactggtgtgaatggctcctcactgcaacctctcgttgctcacagagtaaaaaaaattactctcatctgtgtgcaagcagtctatcaaaagaggcatgattggggcagccaacttttgacaacacctggaagcacatcagtgccttctgtctcattactggaaactgtaggttgcttgataaatccaaaatttccttggaactgcaaagtagtaggttatcttcagcagagaaagatctattgcttattccgtggaattgtcatatctgtaccacaaaaggtcagaaattctgggcattttgatggtacatctgtgctggagcaagttctcatgcttgttgcttcacatgttggccatcatccctgttgttgtctgaaagtgnn

SEQ ID NO: 16226 - DNA, 900 bp, Zea Mays
  misc_feature (899)..(900): n is a, c, g, or t
ctcgtctcgtctcgtcgccgcccgaccctcgctcgcctcttcccgaggtctccacgatattacatccccgatcgtgcccggggcttcgttccggtacgtgagggggtcggcgatgttcttctcgggtgacccgtcggcgcggcggcgggtcgacctcggcggccggagcagcaaggagcgggaccgcaaggtgctgctcgagcagacgcgcgaggagcggcgtcggcgccagggcctccgactacagaacacctccgccacgaagatccagaaattcttcagagggaagaaggctttggaattggcacgctcagaggttcggaagaatttttgctcaacttttggggagcattgcgagcggatagagtggaacaacttcggaactaattctgactttcttcgtcaattactgtttttctttaatgcaaatgaagacaatgacatagctatactttgtcaaatctgcaacttgctgctgcaatatgttaaacaaggcggagatgttgtaactctctttactggtgtgaatggctcctcactgcaacctctcgttgctcacagagtaaaaaaaattactctcatctgtgtgcaagcagtctatcaaaagaggcatgattggggcagccaacttttgacaacacctggaagcacatcagtgccttctgtctcattactggaaactgtaggttgcttgataaatccaaaatttccttggaactgcaaagtagtaggttatcttcagcagagaaagatctattgcttattccgtggaattgtcatatctgtaccacaaaaggtcagaaattctgggcattttgatggtacatctgtgctggagcaagttctcatgcttgttgcttcacatgttggccatcatccctgttgttgtctgaaagtgnn

SEQ ID NO: 16227 - DNA, 857 bp, Zea Mays
  misc_feature (856)..(857): n is a, c, g, or t
cgtctcgtctcgtctcgtcgccgcccgaccctcgctcgcctcttcccgaggtacgtgagggggtcggcgatgttcttctcgggtgacccgtcggcgcggcggcgggtcgacctcggcggccggagcagcaaggagcgggaccgcaaggtgctgctcgagcagacgcgcgaggagcggcgtcggcgccagggcctccgactacagaacacctccgccacgaagatccagaaattcttcagagggaagaaggctttggaattggcacgctcagaggttcggaagaatttttgctcaacttttggggagcattgcgagcggatagagtggaacaacttcggaactaattctgactttcttcgtcaattactgtttttctttaatgcaaatgaagacaatgacatagctatactttgtcaaatctgcaacttgctgctgcaatatgttaaacaaggcggagatgttgtaactctctttactggtgtgaatggctcctcactgcaacctctcgttgctcacagagtaaaaaaaattactctcatctgtgtgcaagcagtctatcaaaagaggcatgattggggcagccaacttttgacaacacctggaagcacatcagtgccttctgtctcattactggaaactgtaggttgcttgataaatccaaaatttccttggaactgcaaagtagtaggttatcttcagcagagaaagatctattgcttattccgtggaattgtcatatctgtaccacaaaaggtcagaaattctgggcattttgatggtacatctgtgctggagcaagttctcatgcttgttgcttcacatgttggccatcatccctgttgttgtctgaaagtgnn

SEQ ID NO: 16228 - DNA, 968 bp, Zea Mays
ctccagcggcccatcgtcagagtcaacagttctggagtcatgcctatcatattttctacatcttcactggctttgcctggtactttggcacggttttctggcttagactttcttaagaaggctgccatagcccttaatccaggaggtgctctctatcttccaactaatgtattacttatagccttcttcaactattattacacgtttctccagttagatcctgatgatcttagtgaacaattgaagcggcaaggtgcttcgataccacttgttagaccaggaaaaagtacagctgcttatattaaaacagttcttagtcgcatatctgtcttgggatctgcatttctggctgtgctagctgctggaccatctttagttgaacagacaagtcacttgacagcattccgtggatttgctgggacttcagtgcttatccttgttggatgtgcaacagacacagctcgaaaagttcaagcagaaataatttcccagaaatataagaatattgagttctatgatgtcaaccgttttggccaatagttgatctcactggtcattcttttcaacctgtacttagatttttatttgtgtaattgaatatcggatccgtaaggccgtaactaagtatttccttgttgttcacttggatcttaatttttttctactgtgtatagtactgaaatctgtactcaaggtacacaaatcattcatctgtacgctaacatgtcagagcactcaaatcttaaacctatgaatgcttattgttattcacagttcttgttgctgatgatgtaacatgtattgttacattatgattcccttccatatttattgtgttcaactttattagatcaactgaagaattggcttagtcgtcatgatttctattagacaaggtgagatgtactgattaaatatggctggagagttaaactcagctgtttcattttgtacaccactgtgaacat

SEQ ID NO: 16229 - DNA, 1414 bp, Zea Mays
tgagaaccttagattttttctatattatgatattgtttcagcaatgaaacttctttgagctttgttttaaatgtgaggccattggacaagttctttatctccgtccctatgtgaatgatttcagcacagaatgggttctaacatctgtgacattattgacacttggatcggtctttactactttcattggtgaaagaatatctgatctgaaacttggaaatggaacatcacttcttatatttacaagtataatatcatatttgcctgcatcatttgggaggacagttgcgcaggcatttcaagatgggaattatgttggacttctcacaatcatattgtcattcttactattagtccttgggattgtctatgttcaagaagctgagcgcaaaatacccctcaattatgcttctcgttacagcagtcgaactggggaacttcagcgatctgcatatttaccatttaaggtcaacagttctggagtcatgcctatcatattttctacatcttcactggctttgcctggtactttggcacggttttctggcttagactttcttaagaaggctgccatagcccttaatccaggaggtgctctctatcttccaactaatgtattacttatagccttcttcaactattattacacgtttctccagttagatcctgatgatcttagtgaacaattgaagcggcaaggtgcttcgataccacttgttagaccaggaaaaagtacagctgcttatattaaaacagttcttagtcgcatatctgtcttgggatctgcatttctggctgtgctagctgctggaccatctttagttgaacagacaagtcacttgacagcattccgtggatttgctgggacttcagtgcttatccttgttggatgtgcaacagacacagctcgaaaagttcaagcagaaataatttcccagaaatataagaatattgagttctatgatgtcaaccgttttggccaatagttgatctcactggtcattcttttcaacctgtacttagatttttatttgtgtaattgaatatcggatccgtaaggccgtaactaagtatttccttgttgttcacttggatcttaatttttttctactgtgtatagtactgaaatctgtactcaaggtacacaaatcattcatctgtacgctaacatgtcagagcactcaaatcttaaacctatgaatgcttattgttattcacagttcttgttgctgatgatgtaacatgtattgttacattatgattcccttccatatttattgtgttcaactttattagatcaactgaagaattggcttagtcgtcatgatttctattagacaaggtgagatgtactgattaaatatggctggagagttaaactcagctgtttcattttgtacaccactgtgaacat

SEQ ID NO: 16230 - DNA, 2172 bp, Zea Mays
aaaaccactcgtcatcctgtgcccccctccggccaccctcggccccacgcctccatggtcaccgccacgacaaccccgccgcaatgctggcgagggctccccgccttggcccgggcacctccacccctctcctctcctcttcggccgcgtgccgtagcggctgcggctcccatctatcctctcaggcgccgcatcgctattactacaaccagaggaaggcgaggcacactggactgttcccccaggttccttctgtctgctgtgctcgtgcaggtgtacgctggaaaccgccggccctggcttctaccctctggggctctacgaggaggggtctaattctctgtcgcggtctcccctgtctaccttctttggtatcatggcgccggtatttgggagctccagcggcggtggtgcaagtagggagaaggcgtccgggcgaggagcagcagctgcaattgaggatagctccattgacattggtgacttcttcaagggccctctacctgggaagttcctgaagctccttggttttttggccttgtctcggcttggtgtgtatatacctttgggtggggtcaaccgagaagcttttgctgggaaccttgaccagaacagcctgctgggcactttagattctttctctggtggaggcattggccggcttggaatttgctcccttggcattgtaccatttatcaatgcacagattgtgtttcaactccttgcgcaactctacccaaaattgcaagaccttcagcggaaagaaggggaagcaggaagaaagaaggttcttcagtatacaagatatgcttctgttggatttgcaattgttcaggccattggacaagttctttatctccgtccctatgtgaatgatttcagcacagaatgggttctaacatctgtgacattattgacacttggatcggtctttactactttcattggtgaaagaatatctgatctgaaacttggaaatggaacatcacttcttatatttacaagtataatatcatatttgcctgcatcatttgggaggacagttgcgcaggcatttcaagatgggaattatgttggacttctcacaatcatattgtcattcttactattagtccttgggattgtctatgttcaagaagctgagcgcaaaatacccctcaattatgcttctcgttacagcagtcgaactggggaacttcagcgatctgcatatttaccatttaaggtcaacagttctggagtcatgcctatcatattttctacatcttcactggctttgcctggtactttggcacggttttctggcttagactttcttaagaaggctgccatagcccttaatccaggaggtgctctctatcttccaactaatgtattacttatagccttcttcaactattattacacgtttctccagttagatcctgatgatcttagtgaacaattgaagcggcaaggtgcttcgataccacttgttagaccaggaaaaagtacagctgcttatattaaaacagttcttagtcgcatatctgtcttgggatctgcatttctggctgtgctagctgctggaccatctttagttgaacagacaagtcacttgacagcattccgtggatttgctgggacttcagtgcttatccttgttggatgtgcaacagacacagctcgaaaagttcaagcagaaataatttcccagaaatataagaatattgagttctatgatgtcaaccgttttggccaatagttgatctcactggtcattcttttcaacctgtacttagatttttatttgtgtaattgaatatcggatccgtaaggccgtaactaagtatttccttgttgttcacttggatcttaatttttttctactgtgtatagtactgaaatctgtactcaaggtacacaaatcattcatctgtacgctaacatgtcagagcactcaaatcttaaacctatgaatgcttattgttattcacagttcttgttgctgatgatgtaacatgtattgttacattatgattcccttccatatttattgtgttcaactttattagatcaactgaagaattggcttagtcgtcatgatttctattagacaaggtgagatgtactgattaaatatggctggagagttaaactcagctgtttcattttgtacaccactgtgaacat

SEQ ID NO: 16231 - DNA, 2969 bp, Zea Mays
gctccagcgccgcacgccctacttctctccctggcagccgcgccctggatcgcgtgctccctgccggccgagctccccatggcgcgcccctcccttgctcctccagctcggcgctcctctgctcgccatggctggcgcgcgttctccctacgcccggccgctcctctctttccctctctgctcgccgtggagcttccttgccggcgctcctccttgttcagctctccagcgcgagttccgtcatcccctgtcgtgaccctgcagtggagctcccctgcagcgcgtcccttgcttcccatgtcacttgccctcttctcccctctgctcgctcgagcccagccgagctcgcctcagcccatgtgttaggagaggtgagtgagtctctggtacgtgaggctatgtccttgggtcactagtcagtggatcgtatgtaatagtataagtacgacgatggttgccttgtgcttgggaggaaaaactacgaagaaacggaatacagataagctctctgctgtctccttcccaacctaacctatctctctctcgcctacctccttctcctcttctccaatccaatccacttgtgatctatgtgctaacaattggtatcagaggagtcgatcctcgatctagttccatggatcccgctgctctcaagtttctccttgacgagatcggcaaaaagttcgacgaggccgagtctcgactcaatcggcgcttggccaggttacagcagcccgcacgcggagacacgccgtcctcctgcagcaacaactggggcgtcgtcccctttccgatccagtccgcgactgttagagccgaggtggtcgctgacaattggggcgacctctttggcagtggagacgactccgataagcagcgcgacgaggaacccatcatcgccgacaattggggtggcctgttcgagcagtctgcgcaaccttgggaggagcgcgacttcggtatttcctacgcgaccacgcccagtgctgcagtctccagtaccgatgaggtggaggccgtggtagcacgcgagatccatggcgaagtcactggagcagaggttgcaccacagcagcccatggcgtttccacgcttgtgtccaacgcaaccgacggatccatgtcggtgcaccacgtcgggcgtggcctggagcgcggcaccttcaccgacctcctcgacccggacgtccacgcctgacccatgaaagaggcgcaccgccttgccgaggtctccatccgctgctgcgagctctggcgcaagtaccgccccgatatcaccactttcgtgctctccgagctgggcatccgccagtggtgaagtccctcgcccaccacagtatcttggggcgcacctgctgcgaggatgatgaggttttccacacatcggcccccaagtgttcgacagaatgcctcattcaggacatcgacttgttgaagcctatcagtgttgcgccaatgtccacgctcgtgcctgctacaccaagagcagcggtcgagcttgccaacagcgtgttcacaaggtacattcccatcgattcattggcctccagtggtgctgttctattgcgctatgccattgaagttcatgggcctcctgaggggttggtggaaatggctattcaatgtttagtaataccagctttgaacagtacacatcatataccagcagcttcctgtaatatgtcaacatgtaaatttgtggcagaccgcgagtttctcactctaccttcttttgatctggtggttgggaagtattacatttttcccagacagcctccatggccaccacctgtgcagtttgtgcttcatggtgagattgagcaagaatacatatggcgagtggaagagctattgtttcaagttgctgtacatgaagatgatggaaacatgataattcagtatatgcaattgcatgatgtgttctacagattacattggcttgacagttatgcaagcggcatgtattacaactacagagactatacctggttgcaggtttcaataccggagctcgatgatgcggataatggttacacaaactgtatgaatgttaagaggacagtgaaaggatttagtaatgctggttttgctgaaataggaattattcttgaagattgggtgtcaccaaaggtatgcgaacatacacaagaaatgaaggttgtctcaagggaggtatcagttatacccatgaaagttgtggttgatgccaggcataagagcgactctgatcttgttattgtggcaaggaccgattctcgccaagctgggtctcttactgaagcattatgtagtgtacggacctttgctgatgttggagcagatgttatattcattgataccctggcctccagagaagacatgaaggcattgttcagcatgggaatggctgcccaagttcagtccatggtctcgcccatggcatttcaggttacacacaatgaaggtgtaaggttactatctattcagtctgttgcaacaatggtccttatgtacaggcccgatcctgctgttccatctgatcctccaactaaaacaacaacagaagaacacaaggacaacttggctgctctgatgtttttaataatgctgaaatcaatggtgtggagacagctgaatgtggtgccatgttcacctactgagcaagaggtttttcatgttccagtgcaaatgcttaacacactcatcatccagcgtgggggttctacgggcaccaggcacccgagggcactcctgccgcagcttgagaacaacaagcttgatcattggctttggcatgttcgcgttgctcgccgtcgagccgtcgtgctcgctgcccatcgcgacgtcccaaatctgtcgcgccgtactcggatctcgccaattgaccctgccatccttgttccctctggttgcgacagaatcaggttccaccaggttgtcggccgctgctcccagctcgccataggactcgctgaactcgccccatag

SEQ ID NO: 16232 - DNA, 3750 bp, Zea Mays
cccttatctccccaccgctcttgctttcagcatttatcttcactgccttatcctcctaggatttttttagcctccaccgctcacgccatttcttgattcctgctctcaatcttcagccgtccgtcgttagcctggctcactggccgctgctacccttctctgttgctcgtccggcccctgctcggatctgttgcgagctcttctctggtgctcgcgcagccgcgaccttgccgagctccgtccctgctcctccggccaccggatcaccatcgcagcgcgcgtggttttgaagttctgcgcattcgtcgtgccgcgctgtgtgccagtgttctcttccggcagatctcgccgtcgaccatattcaacttgcccctcaccgagctcgtggtcgtgctgctatgcctcgctcccctctgtgttcgatgaaaaacattaggaatcgatgacctcgcctcgtcctcgcaattgtggttggcttgtgtcgtcgtctgccccaccgtggtgctcgccaaaacacttgaacccgagtttcgtcgccgtccatgcgaatatcatgctggttcgatcttggtaagcagagtagttattcatgttatttaaattgatgaatggattggttgtatatgttaatcgtgatgggtgatgaattttaggcttgggtactatttacgagaaaaatattgttagacatatatatgatgctcgggcgagtcattgacatgtaaaataggcttaatgatttattcgactagtcggtaagttctatatgtattgttgtgtcaatttagtataattaagaaaattgataccttgctagtagtcgttatattctataattggtggttgatcaagtgttgtgatcgaatgttactagctacccaaagtatttagaagagagtagcatcgccatatcgatctttagtgaaatctaagaatttcgtagtagtcagtgtatatagtactctagctatttaagttgttgagaaattagctttatcgaacgctatgttaattgaaaatgttgtatttgtaagaataaatattgtgatgttcgatttagttaagtcggtaattcaggttaattaagacacacggtttaaagagttaattagattgttcctataactattttgaggtcgttggtatttaataatagcgagtctaggttttattagacttctgaaatatattttactaagtgtgataatgtgggttaaataatttattcttgctagatttcggaattagatccgattaaaaagcaggaacgtgagtgttgcacttagtgtgtatgatttgctgtttcgtgatgtttgctttagattcggttaatctagagaagtgtgattattgcgcttggtcatatggtgatagctagcgtttgcttatgaaatgtcgtgatgccttcccattaagtgtttaattttttactgagaaaattgtaatattatcttgcgatatttgttttgatattcatacatgtgcatcatgcatcccatgaggtacgttaattgatcacgtgatgtggaagacgagccgagtcgaccccaagatgtcgtaaagcacgacctgctccgaaaggtgatgctgatggacgaacctgaagatggataatctgaacaattgccaaaacaaaggctggtcgtcaagtggtcgccacctaacaaacactaacctagtgttattccaggcaagccccggtgcaagcaaccccttccttgtgtttttacatgatttttacacactttaagtctagcgaaatgtgcattaggtttataggagtttcttggaaaccctttgatgcattggctaccttgaaatccattccttttatatatacttctggtgaagtatcaaatatgatttacaaaattgcttagctctgcttagatcttgcggatagaggttgtcctttgcaataatgcctagctcaggggttatcctgaggaaggatgactctacctacaagactattttcatggtgggatcttactgcaagattcccttgaaattctattcatccttaggtacacaaataagtcctaaggatggaagtacttaaatcgagacttgggctaggaacaggtgatgttctgtccaggttgattaaggattatttcgatgtaggcctgttgtggtggagactttgcaactatccacataccctggtatgggacagggtaagctttaacctggctattccatacgtgaaaagacaagcacgcattgggcgtgggagatgttgggagtagtgcgtaccctcctgcgggctagaggctggacggaggagtactgtgctcctgggtagcacggaccagttcacgttgtggaggatctgtgggaacgattgacatatgcaagggttgagtgctacatatgtcgtgtggttagggatccccagttgggtataatcggttcgaatcgtcgttgctcctcggtcatggagactctaccctccgaccactcatcgtaagtcatggatggaatcacaatgagtaaaaatatggttgtattgattaatgggatgatgaatttagactagatgcaaacaaggttaattaatacctaatctggcattaaaatgttgaaagtaaggactcacttttagaaagcttttctgcaaaatgtctaagttgattcttgctaaaagcctctccttgattcctaaatccagcatatccttgagagtctttttctttagtcgggtaagacttgcgaaagtacacttcgtactcagggttttcgaacccatgttgttgcaggtactagttttgtgctgctgttgatggtgctaagtgccggtgggctcgaccttcttataggttaaagtagctcttcacttcttattgaggattgtcaatgagctagcttatatttcaaacttataaataatctataaaatttcagagtttatttctttgattcacttttgaaatcactctgataaatataatgtaaatttgttgaaacttgtaactttttgtaataaagaaattccgctgcaaaatgttggtgtatgatttgtgtttacataatcttgtgatcctggttgtaagtggtttatccggggtccttgggacactcagacggatcctgttaatttatccgatgcacatgcatagccgtctgaggtctgtgagacgaggacaggtgcatgtggatccaataacttgggaggttctgccacagccagtatcgaagcaagattaagtataatacgatcacatacgtattttaaaaacaaagttttgattttggaaaacctatttttaactaaacacattgtttggttttgaaaaactacagttttgaaaactacaatgctagcgacatcctctgttaatccctaaattaaggactattaggtggcttagttcaaaacactaacctacaaccggggggataattgcatacatatgtaattttatttttggggccattcaattgtgaatggatcgaagctcaggtaagataagatgtgagagcatgaccgaacaaacgtcggtctaggggagagtataaaaaacgcttgattatatacatgttgcacatatgtatatatgaaagctgcgatgtggagtatttacttttctgggattcagtaccccatggatgtgtatggttatacagacataggaatactgagaagtgtaatatacttgtaacgacgcacctacactcaggtaagaaggtgagttaccataatgggctgccctgtggttaaagtgtggcagcgacgcctatgcgtgg

SEQ ID NO: 16233 - DNA, 3753 bp, Zea Mays
cccttatctccccaccgctcttgctttcagcatttatcttcactgccttatcctcctaggatttttttagcctccaccgctcacgccatttcttgattcctgctctcaatcttcagccgtccgtcgttagcctggctcactggccgctgctacccttctctgttgctcgtccggcccctgctcggatctgttgcgagctcttctctggtgctcgcgcagccgcgaccttgccgagctccgtccctgctcctccggccaccggatcaccatcgcagcgcgcgtggttttgaagttctgcgcattcgtcgtgccgcgctgtgtgccagtgttctcttccggcagatctcgccgtcgaccatattcaacagcttgcccctcaccgagctcgtggtcgtgctgctatgcctcgctcccctctgtgttcgatgaaaaacattaggaatcgatgacctcgcctcgtcctcgcaattgtggttggcttgtgtcgtcgtctgccccaccgtggtgctcgccaaaacacttgaacccgagtttcgtcgccgtccatgcgaatatcatgctggttcgatcttggtaagcagagtagttattcatgttatttaaattgatgaatggattggttgtatatgttaatcgtgatgggtgatgaattttaggcttgggtactatttacgagaaaaatattgttagacatatatatgatgctcgggcgagtcattgacatgtaaaataggcttaatgatttattcgactagtcggtaagttctatatgtattgttgtgtcaatttagtataattaagaaaattgataccttgctagtagtcgttatattctataattggtggttgatcaagtgttgtgatcgaatgttactagctacccaaagtatttagaagagagtagcatcgccatatcgatctttagtgaaatctaagaatttcgtagtagtcagtgtatatagtactctagctatttaagttgttgagaaattagctttatcgaacgctatgttaattgaaaatgttgtatttgtaagaataaatattgtgatgttcgatttagttaagtcggtaattcaggttaattaagacacacggtttaaagagttaattagattgttcctataactattttgaggtcgttggtatttaataatagcgagtctaggttttattagacttctgaaatatattttactaagtgtgataatgtgggttaaataatttattcttgctagatttcggaattagatccgattaaaaagcaggaacgtgagtgttgcacttagtgtgtatgatttgctgtttcgtgatgtttgctttagattcggttaatctagagaagtgtgattattgcgcttggtcatatggtgatagctagcgtttgcttatgaaatgtcgtgatgccttcccattaagtgtttaattttttactgagaaaattgtaatattatcttgcgatatttgttttgatattcatacatgtgcatcatgcatcccatgaggtacgttaattgatcacgtgatgtggaagacgagccgagtcgaccccaagatgtcgtaaagcacgacctgctccgaaaggtgatgctgatggacgaacctgaagatggataatctgaacaattgccaaaacaaaggctggtcgtcaagtggtcgccacctaacaaacactaacctagtgttattccaggcaagccccggtgcaagcaaccccttccttgtgtttttacatgatttttacacactttaagtctagcgaaatgtgcattaggtttataggagtttcttggaaaccctttgatgcattggctaccttgaaatccattccttttatatatacttctggtgaagtatcaaatatgatttacaaaattgcttagctctgcttagatcttgcggatagaggttgtcctttgcaataatgcctagctcaggggttatcctgaggaaggatgactctacctacaagactattttcatggtgggatcttactgcaagattcccttgaaattctattcatccttaggtacacaaataagtcctaaggatggaagtacttaaatcgagacttgggctaggaacaggtgatgttctgtccaggttgattaaggattatttcgatgtaggcctgttgtggtggagactttgcaactatccacataccctggtatgggacagggtaagctttaacctggctattccatacgtgaaaagacaagcacgcattgggcgtgggagatgttgggagtagtgcgtaccctcctgcgggctagaggctggacggaggagtactgtgctcctgggtagcacggaccagttcacgttgtggaggatctgtgggaacgattgacatatgcaagggttgagtgctacatatgtcgtgtggttagggatccccagttgggtataatcggttcgaatcgtcgttgctcctcggtcatggagactctaccctccgaccactcatcgtaagtcatggatggaatcacaatgagtaaaaatatggttgtattgattaatgggatgatgaatttagactagatgcaaacaaggttaattaatacctaatctggcattaaaatgttgaaagtaaggactcacttttagaaagcttttctgcaaaatgtctaagttgattcttgctaaaagcctctccttgattcctaaatccagcatatccttgagagtctttttctttagtcgggtaagacttgcgaaagtacacttcgtactcagggttttcgaacccatgttgttgcaggtactagttttgtgctgctgttgatggtgctaagtgccggtgggctcgaccttcttataggttaaagtagctcttcacttcttattgaggattgtcaatgagctagcttatatttcaaacttataaataatctataaaatttcagagtttatttctttgattcacttttgaaatcactctgataaatataatgtaaatttgttgaaacttgtaactttttgtaataaagaaattccgctgcaaaatgttggtgtatgatttgtgtttacataatcttgtgatcctggttgtaagtggtttatccggggtccttgggacactcagacggatcctgttaatttatccgatgcacatgcatagccgtctgaggtctgtgagacgaggacaggtgcatgtggatccaataacttgggaggttctgccacagccagtatcgaagcaagattaagtataatacgatcacatacgtattttaaaaacaaagttttgattttggaaaacctatttttaactaaacacattgtttggttttgaaaaactacagttttgaaaactacaatgctagcgacatcctctgttaatccctaaattaaggactattaggtggcttagttcaaaacactaacctacaaccggggggataattgcatacatatgtaattttatttttggggccattcaattgtgaatggatcgaagctcaggtaagataagatgtgagagcatgaccgaacaaacgtcggtctaggggagagtataaaaaacgcttgattatatacatgttgcacatatgtatatatgaaagctgcgatgtggagtatttacttttctgggattcagtaccccatggatgtgtatggttatacagacataggaatactgagaagtgtaatatacttgtaacgacgcacctacactcaggtaagaaggtgagttaccataatgggctgccctgtggttaaagtgtggcagcgacgcctatgcgtgg

SEQ ID NO: 16234 - DNA, 684 bp, Zea Mays
attaagcagtggttcctttattaaaggtgtagtggccatgctgctacatccctcttttaccaaagcagaaatcaggtgcctgcattaaacaatgcaagagtgagatgacacatctcagcaagtaaacagagcaaaccacaattgggcaatgtaaaccaactgtgcttaaacaaccacatagttcaaaacttccttcttgaataataatttgcagcaagtaagcaagtaactaattacttaacgccaagaagaatgacaatgtaaaaatccacactatccacatccacataataaattccacacctctctcatgagtgcacatggctacagatgcagtaatgacttctgccttcatttctccgaggatatgaagctgcatcacacccaccacaggagaagaacaggtggttcaggaggagcaacacaacgaggagttcgacttgatctaggtggcgtctcctagttgactttatggcgccaaggatggactttagttcgttttatatttatcttttattgtgtaagacttccgctatgtaataagtactatgatgttattgtgatatttatctctatacactctgttattgtaacgccccaatcctctgggactaaaatgtgatacaattactagtcccaggaggctagtaaacacatttatacaacagatgattctagatctgc

SEQ ID NO: 16235 - DNA, 620 bp, Zea Mays
ccacacgtcatatccctccccaacagaatcgcccgcattcctggcacgaccggcgcacagtgcggaatcctcgaccatgactgctccgatccggtagcctcatcgtgcgtataaaggttggtcgcgctgcacgcccgcgaccctatttcaatgcctagacaactatggattcgtcctcccatcgtgagagagcttgtgggagccatgggagatcggaccgcgctgccggggaagcgtggaaggccaaatttgttgctccgatcgtcatgcagtaatgacttctgccttcatttctccgaggatatgaagctgcatcacacccaccacaggagaagaacaggtggttcaggaggagcaacacaacgaggagttcgacttgatctaggtggcgtctcctagttgactttatggcgccaaggatggactttagttcgttttatatttatcttttattgtgtaagacttccgctatgtaataagtactatgatgttattgtgatatttatctctatacactctgttattgtaacgccccaatcctctgggactaaaatgtgatacaattactagtcccaggaggctagtaaacacatttatacaacagatgattctagatctgc

SEQ ID NO: 16236 - DNA, 214 bp, Zea Mays
gcggaatcctcgaccatgactgctccgatccggtagcctcatcgtgcgtataaaggttggtcgcgctgcacgcccgcgaccctatttcaatgcctagacaactatggattcgtcctcccatcgtgagagagcttgtgggagccatgggagatcggaccgcgctgccggggaagcgtggaaggccaaatttgttgctccgatcgtcaaaagccag

SEQ ID NO: 16237 - DNA, 1297 bp, Zea Mays
cgacaactagcatcgccacaagagtttgttctggtgctcacattggtaagtgtggaactttcaccacagggtaaacatgaagaagtcatcgggctcgggctcggtgtcgttggcgcggagcatcccggagctgtacgaggagaggggagccagcagcctccgggagttcgggttccaggagctccgggccgccaccagcgacttcagccgcctgctcaaggtcggcgaggtggctttgggagcgtttacaagggcgtcgtctgccttcctggcaggcccgccggcggcacgaagttcaaggttatctcattctggcatatctcatttgcctgctgatgaagtgaagcctttggttaaatatgataatgatgaagatgcacactcacctagtggccgtggaaggggtcgtggtggtcgaggccgtgggcggggcaggggcagaggtggacgtggaaatgggttcaatgagtatgttgatgctggttgggaagacgatcacgcccctgcatatatgggcaatggatatgcccgtggaagaggtcgcagtttcaggggccgtggtaggagaggcgacgacgataactagcctgaataccaacaggtcggaggttatttcaagaagatccaattgaaccaaaaaccggaataaaatttccaacatttttggaagacgactccagtccatctgcagcggtccttgttgggataggtttcaaaggcatgagagtgatgagggtcaaaaatctgaacctctacgcttttggtttatatatgcaaccaacttctatccgtgagaagttgggtcctaagtatgcttcatttccaactaacaagctgatggagaaccctgatttctatagtgatcttctcaggaaatgggttcaatgagtatgctgatgctggttgggaagacgatcactcccctgcatatatgggcaatggatatgcccgtggaagaggtcgcggtttcaggggccgtggtaggagaggcggcgacaataaccagcctgaataccaacaggtcggaggttattacgaggaggcacctgttcatgctccagctttagattttcaccatttgtaatggaactgaaaccagcctctcatcgaagtggaaacctttttttagtcgtaaacatttacatggtttatccagtggtatgctgatgaaagatgctaagtttcgcttaatataatgtatatgaaggtcctgtgtacgtcaaattttgtccacattgaaccagtacgaatgacatcttccttgaaagttatagaaatgcttcaaagttcaaatggc

SEQ ID NO: 16238 - DNA, 2222 bp, Zea Mays
cttgtattgaggggcttccagtgcgcttttttccctcgatctcgtgtgatctgagtgtgagaaggcttatagtgtgcttgaggttcttcgacctctctataattcccctaagatactggaacaaaaggtaactgttgcgatatatgtcaatcttcaatttcgttgtcgcttagcagttgttgggctttggtacccagtctgtaattttgctgatgcaccagcgacacatatttatcattgtttattttttaatcaataacaaagcacaggtacaatataatcttatatagcttttaaggtatgtaaacatccactttagtgatgctaacaaatgtataaaataattattattattttttcatagcaatatattttatcatattgcatcttagttcatgctacctggatgtaaatgtggtgcggtttagtttagtaagatcttcactaatcactacatagtgcagcactgggctgttaatattttttgtaccatgtgtcataagcatgagatgttgcctgtagagtaccaatgctttattgcagtcttcctcctcgtctgccccaatgtcggcaagtcagccctcttcaacaggatcattgcgtctctgcgagctaatcagttctgtgagcgtctccctagccccaatggcgagtcaattgttgattgccatcagatctcaaagatgccaaatcttgcattcaccatagcaaacaagattttcaccttaacaccagagcagtacatagtgaagttggagcaagcaggacaaactatctgcatcagtgggtttatggcatttgacgtaccgcctccttgtggtcctctctgctatgctaaacatatctgtactactcttaagtgtgcaatgagggcgtccaccgagggcatcaccgtgcccccgctcgcccctccacgcccgcgcctgtctgtgtccgcccccttcgtctccccgcaatggccgcgtccctacctcatgtctacgacgacaactagggtaaacatgaagaagtcatcgggctcgggctcggtgtcgttggcgcggagcatcccggagctgtacgaggagaggggagccagcagcctccgggagttcgggttccaggagctccgggccgccaccagcgacttcagccgcctgctcaaggtcggcgaggtggctttgggagcgtttacaagggcgtcgtctgccttcctggcaggcccgccggcggcacgaagttcaaggttatctcattctggcatatctcatttgcctgctgatgaagtgaagcctttggttaaatatgataatgatgaagatgcacactcacctagtggccgtggaaggggtcgtggtggtcgaggccgtgggcggggcaggggcagaggtggacgtggaaatgggttcaatgagtatgttgatgctggttgggaagacgatcacgcccctgcatatatgggcaatggatatgcccgtggaagaggtcgcagtttcaggggccgtggtaggagaggcgacgacgataactagcctgaataccaacaggtcggaggttatttcaagaagatccaattgaaccaaaaaccggaataaaatttccaacatttttggaagacgactccagtccatctgcagcggtccttgttgggataggtttcaaaggcatgagagtgatgagggtcaaaaatctgaacctctacgcttttggtttatatatgcaaccaacttctatccgtgagaagttgggtcctaagtatgcttcatttccaactaacaagctgatggagaaccctgatttctatagtgatcttctcaggaaatgggttcaatgagtatgctgatgctggttgggaagacgatcactcccctgcatatatgggcaatggatatgcccgtggaagaggtcgcggtttcaggggccgtggtaggagaggcggcgacaataaccagcctgaataccaacaggtcggaggttattacgaggaggcacctgttcatgctccagctttagattttcaccatttgtaatggaactgaaaccagcctctcatcgaagtggaaacctttttttagtcgtaaacatttacatggtttatccagtggtatgctgatgaaagatgctaagtttcgcttaatataatgtatatgaaggtcctgtgtacgtcaaattttgtccacattgaaccagtacgaatgacatcttccttgaaagttatagaaatgcttcaaagttcaaatggc

SEQ ID NO: 16239 - DNA, 2429 bp, Zea Mays
cagacagatataaaacggagtgggaatgcctcgattgatatcatgtccaagttcttcaagctgatggtgttctacaattaatgaatgatttgaaccgaagtgttcaagatgccgctatctcttgtattgagttacatcccatatttacaagctggagagattgagacattttttataacatcttatctattaaaactccatgtcgtttgctccaccaggggcttccagtgcgcttttttccctcgatctcgtgtgatctgagtgtgagaaggcttatagtgtgcttgaggttcttcgacctctctataattcccctaagatactggaacaaaaggtaactgttgcgatatatgtcaatcttcaatttcgttgtcgcttagcagttgttgggctttggtacccagtctgtaattttgctgatgcaccagcgacacatatttatcattgtttattttttaatcaataacaaagcacaggtacaatataatcttatatagcttttaaggtatgtaaacatccactttagtgatgctaacaaatgtataaaataattattattattttttcatagcaatatattttatcatattgcatcttagttcatgctacctggatgtaaatgtggtgcggtttagtttagtaagatcttcactaatcactacatagtgcagcactgggctgttaatattttttgtaccatgtgtcataagcatgagatgttgcctgtagagtaccaatgctttattgcagtcttcctcctcgtctgccccaatgtcggcaagtcagccctcttcaacaggatcattgcgtctctgcgagctaatcagttctgtgagcgtctccctagccccaatggcgagtcaattgttgattgccatcagatctcaaagatgccaaatcttgcattcaccatagcaaacaagattttcaccttaacaccagagcagtacatagtgaagttggagcaagcaggacaaactatctgcatcagtgggtttatggcatttgacgtaccgcctccttgtggtcctctctgctatgctaaacatatctgtactactcttaagtgtgcaatgagggcgtccaccgagggcatcaccgtgcccccgctcgcccctccacgcccgcgcctgtctgtgtccgcccccttcgtctccccgcaatggccgcgtccctacctcatgtctacgacgacaactagggtaaacatgaagaagtcatcgggctcgggctcggtgtcgttggcgcggagcatcccggagctgtacgaggagaggggagccagcagcctccgggagttcgggttccaggagctccgggccgccaccagcgacttcagccgcctgctcaaggtcggcgaggtggctttgggagcgtttacaagggcgtcgtctgccttcctggcaggcccgccggcggcacgaagttcaaggttatctcattctggcatatctcatttgcctgctgatgaagtgaagcctttggttaaatatgataatgatgaagatgcacactcacctagtggccgtggaaggggtcgtggtggtcgaggccgtgggcggggcaggggcagaggtggacgtggaaatgggttcaatgagtatgttgatgctggttgggaagacgatcacgcccctgcatatatgggcaatggatatgcccgtggaagaggtcgcagtttcaggggccgtggtaggagaggcgacgacgataactagcctgaataccaacaggtcggaggttatttcaagaagatccaattgaaccaaaaaccggaataaaatttccaacatttttggaagacgactccagtccatctgcagcggtccttgttgggataggtttcaaaggcatgagagtgatgagggtcaaaaatctgaacctctacgcttttggtttatatatgcaaccaacttctatccgtgagaagttgggtcctaagtatgcttcatttccaactaacaagctgatggagaaccctgatttctatagtgatcttctcaggaaatgggttcaatgagtatgctgatgctggttgggaagacgatcactcccctgcatatatgggcaatggatatgcccgtggaagaggtcgcggtttcaggggccgtggtaggagaggcggcgacaataaccagcctgaataccaacaggtcggaggttattacgaggaggcacctgttcatgctccagctttagattttcaccatttgtaatggaactgaaaccagcctctcatcgaagtggaaacctttttttagtcgtaaacatttacatggtttatccagtggtatgctgatgaaagatgctaagtttcgcttaatataatgtatatgaaggtcctgtgtacgtcaaattttgtccacattgaaccagtacgaatgacatcttccttgaaagttatagaaatgcttcaaagttcaaatggc

SEQ ID NO: 16240 - DNA, 2867 bp, Zea Mays
cacatatctaggtcatattttcgacagacagatataaaacggagtgggaatgcctcgattgatatcatgtccaagttcttcaagctgatggtgccgacattgtgttttttctagacccatggtgactggtatgatctctatttctattggacttgttcaatttcccaatagttacatcccatatttacaagctggagagattgagacattttttataacatcttatctattaaaactccatgtcgtttgctccaccaggggcttccagtgcgcttttttccctcgatctcgtgtgatctgagtgtgagaaggttgttaaaatgtgcatctactcatatttttatttttaccagatatgtgtctaaattttctttcttgcgttttaatacaggcttatagtgtgcttgaggttcttcgacctctctataattcccctaagatactggaacaaaaggtaactgttgcgatatatgtcaatcttcaatttcgttgtcgcttagcagttgttgggctttggtacccagtctgtaattttgctgatgcaccagcgacacatatttatcattgtttattttttaatcaataacaaagcacaggtacaatataatcttatatagcttttaaggtatgtaaacatccactttagtgatgctaacaaatgtataaaataattattattattttttcatagcaatatattttatcatattgcatcttagttcatgctacctggatgtaaatgtggtgcggtttagtttagtaagatcttcactaatcactacatagtgcagcactgggctgttaatattttttgtaccatgtgtcataagcatgagatgttgcctgtagagtaccaatgctttattgcagtcttcctcctcgtctgccccaatgtcggcaagtcagccctcttcaacaggatcattgcgtctctgcgagctaatcagttctgtgagcgtctccctagccccaatggcgagtcaattgttgattgccatcagatctcaaagatgccaaatcttgcattcaccatagcaaacaagattttcaccttaacaccagagcagtacatagtgaagttggagcaagcaggacaaactatctgcatcagtgggtttatggcatttgacgtaccgcctccttgtggtcctctctgctatgctaaacatatctgtactactcttaagtgtgcaatgagggcgtccaccgagggcatcaccgtgcccccgctcgcccctccacgcccgcgcctgtctgtgtccgcccccttcgtctccccgcaatggccgcgtccctacctcatgtctacgacgacaactagggtaaacatgaagaagtcatcgggctcgggctcggtgtcgttggcgcggagcatcccggagctgtacgaggagaggggagccagcagcctccgggagttcgggttccaggagctccgggccgccaccagcgacttcagccgcctgctcaaggtcggcgaggtggctttgggagcgtttacaagggcgtcgtctgccttcctggcaggcccgccggcggcacggtagttgccataaaaaactcaatcccaatggtcatcaggtatggtcgtgtggatcagtgttttcttggctcacctgtgtcaataccatcttgtcgttgttgatcacgaattcgtcagcatttttacagtatatttcctaccatatacattatctctgtgtgtgtgtgggtgaaccctacatcccgtagaagtagaactacacagggtctctgttttttggatcatgaaatggaccgtaccttgcatgactctgtacaattcatctcgctaatgtgtctgtgaagtatctatcattttgatagccctgtttcatttcagaagttcaaggttatctcattctggcatatctcatttgcctgctgatgaagtgaagcctttggttaaatatgataatgatgaagatgcacactcacctagtggccgtggaaggggtcgtggtggtcgaggccgtgggcggggcaggggcagaggtggacgtggaaatgggttcaatgagtatgttgatgctggttgggaagacgatcacgcccctgcatatatgggcaatggatatgcccgtggaagaggtcgcagtttcaggggccgtggtaggagaggcgacgacgataactagcctgaataccaacaggtcggaggttatttcaagaagatccaattgaaccaaaaaccggaataaaatttccaacatttttggaagacgactccagtccatctgcagcggtccttgttgggataggtttcaaaggcatgagagtgatgagggtcaaaaatctgaacctctacgcttttggtttatatatgcaaccaacttctatccgtgagaagttgggtcctaagtatgcttcatttccaactaacaagctgatggagaaccctgatttctatagtgatcttctcaggaaatgggttcaatgagtatgctgatgctggttgggaagacgatcactcccctgcatatatgggcaatggatatgcccgtggaagaggtcgcggtttcaggggccgtggtaggagaggcggcgacaataaccagcctgaataccaacaggtcggaggttattacgaggaggcacctgttcatgctccagctttagattttcaccatttgtaatggaactgaaaccagcctctcatcgaagtggaaacctttttttagtcgtaaacatttacatggtttatccagtggtatgctgatgaaagatgctaagtttcgcttaatataatgtatatgaaggtcctgtgtacgtcaaattttgtccacattgaaccagtacgaatgacatcttccttgaaagttatagaaatgcttcaaagttcaaatggc

SEQ ID NO: 16241 - DNA, 2276 bp, Zea Mays
cacatatctaggtcatattttcgacagacagatataaaacggagtgggaatgcctcgattgatatcatgtccaagttcttcaagctgatggtgttctacaattaatgaatgatttgaaccgaagtgttcaagatgccgctatctcttgtattgaggttagttaattccatatttgatattgtctgtgtatgcctacttcagccgacattgtgttttttctagacccatggtgactggtatgatctctatttctattggacttgttcaatttcccaatagttacatcccatatttacaagctggagagattgagacattttttataacatcttatctattaaaactccatgtcgtttgctccaccaggggcttccagtgcgcttttttccctcgatctcgtgtgatctgagtgtgagaaggcttatagtgtgcttgaggttcttcgacctctctataattcccctaagatactggaacaaaagtttagtaagatcttcactaatcactacatagtgcagcactgggctgttaatattttttgtaccatgtgtcataagcatgagatgttgcctgtagagtaccaatgctttattgcagtcttcctcctcgtctgccccaatgtcggcaagtcagccctcttcaacaggatcattgcgtctctgcgagctaatcagttctgtgagcgtctccctagccccaatggcgagtcaattgttgattgccatcagatctcaaagatgccaaatcttgcattcaccatagcaaacaagattttcaccttaacaccagagcagtacatagtgaagttggagcaagcaggacaaactatctgcatcagtgggtttatggcatttgacgtaccgcctccttgtggtcctctctgctatgctaaacatatctgtactactcttaagtgtgcaatgagggcgtccaccgagggcatcaccgtgcccccgctcgcccctccacgcccgcgcctgtctgtgtccgcccccttcgtctccccgcaatggccgcgtccctacctcatgtctacgacgacaactagggtaaacatgaagaagtcatcgggctcgggctcggtgtcgttggcgcggagcatcccggagctgtacgaggagaggggagccagcagcctccgggagttcgggttccaggagctccgggccgccaccagcgacttcagccgcctgctcaaggtcggcgaggtggctttgggagcgtttacaagggcgtcgtctgccttcctggcaggcccgccggcggcacgaagttcaaggttatctcattctggcatatctcatttgcctgctgatgaagtgaagcctttggttaaatatgataatgatgaagatgcacactcacctagtggccgtggaaggggtcgtggtggtcgaggccgtgggcggggcaggggcagaggtggacgtggaaatgggttcaatgagtatgttgatgctggttgggaagacgatcacgcccctgcatatatgggcaatggatatgcccgtggaagaggtcgcagtttcaggggccgtggtaggagaggcgacgacgataactagcctgaataccaacaggtcggaggttatttcaagaagatccaattgaaccaaaaaccggaataaaatttccaacatttttggaagacgactccagtccatctgcagcggtccttgttgggataggtttcaaaggcatgagagtgatgagggtcaaaaatctgaacctctacgcttttggtttatatatgcaaccaacttctatccgtgagaagttgggtcctaagtatgcttcatttccaactaacaagctgatggagaaccctgatttctatagtgatcttctcaggaaatgggttcaatgagtatgctgatgctggttgggaagacgatcactcccctgcatatatgggcaatggatatgcccgtggaagaggtcgcggtttcaggggccgtggtaggagaggcggcgacaataaccagcctgaataccaacaggtcggaggttattacgaggaggcacctgttcatgctccagctttagattttcaccatttgtaatggaactgaaaccagcctctcatcgaagtggaaacctttttttagtcgtaaacatttacatggtttatccagtggtatgctgatgaaagatgctaagtttcgcttaatataatgtatatgaaggtcctgtgtacgtcaaattttgtccacattgaaccagtacgaatgacatcttccttgaaagttatagaaatgcttcaaagttcaaatggc

SEQ ID NO: 16242 - DNA, 2339 bp, Zea Mays
cacatatctaggtcatattttcgacagacagatataaaacggagtgggaatgcctcgattgatatcatgtccaagttcttcaagctgatggtgccgacattgtgttttttctagacccatggtgactggggcttccagtgcgcttttttccctcgatctcgtgtgatctgagtgtgagaaggcttatagtgtgcttgaggttcttcgacctctctataattcccctaagatactggaacaaaaggtaactgttgcgatatatgtcaatcttcaatttcgttgtcgcttagcagttgttgggctttggtacccagtctgtaattttgctgatgcaccagcgacacatatttatcattgtttattttttaatcaataacaaagcacaggtacaatataatcttatatagcttttaaggtatgtaaacatccactttagtgatgctaacaaatgtataaaataattattattattttttcatagcaatatattttatcatattgcatcttagttcatgctacctggatgtaaatgtggtgcggtttagtttagtaagatcttcactaatcactacatagtgcagcactgggctgttaatattttttgtaccatgtgtcataagcatgagatgttgcctgtagagtaccaatgctttattgcagtcttcctcctcgtctgccccaatgtcggcaagtcagccctcttcaacaggatcattgcgtctctgcgagctaatcagttctgtgagcgtctccctagccccaatggcgagtcaattgttgattgccatcagatctcaaagatgccaaatcttgcattcaccatagcaaacaagattttcaccttaacaccagagcagtacatagtgaagttggagcaagcaggacaaactatctgcatcagtgggtttatggcatttgacgtaccgcctccttgtggtcctctctgctatgctaaacatatctgtactactcttaagtgtgcaatgagggcgtccaccgagggcatcaccgtgcccccgctcgcccctccacgcccgcgcctgtctgtgtccgcccccttcgtctccccgcaatggccgcgtccctacctcatgtctacgacgacaactagggtaaacatgaagaagtcatcgggctcgggctcggtgtcgttggcgcggagcatcccggagctgtacgaggagaggggagccagcagcctccgggagttcgggttccaggagctccgggccgccaccagcgacttcagccgcctgctcaaggtcggcgaggtggctttgggagcgtttacaagggcgtcgtctgccttcctggcaggcccgccggcggcacgaagttcaaggttatctcattctggcatatctcatttgcctgctgatgaagtgaagcctttggttaaatatgataatgatgaagatgcacactcacctagtggccgtggaaggggtcgtggtggtcgaggccgtgggcggggcaggggcagaggtggacgtggaaatgggttcaatgagtatgttgatgctggttgggaagacgatcacgcccctgcatatatgggcaatggatatgcccgtggaagaggtcgcagtttcaggggccgtggtaggagaggcgacgacgataactagcctgaataccaacaggtcggaggttatttcaagaagatccaattgaaccaaaaaccggaataaaatttccaacatttttggaagacgactccagtccatctgcagcggtccttgttgggataggtttcaaaggcatgagagtgatgagggtcaaaaatctgaacctctacgcttttggtttatatatgcaaccaacttctatccgtgagaagttgggtcctaagtatgcttcatttccaactaacaagctgatggagaaccctgatttctatagtgatcttctcaggaaatgggttcaatgagtatgctgatgctggttgggaagacgatcactcccctgcatatatgggcaatggatatgcccgtggaagaggtcgcggtttcaggggccgtggtaggagaggcggcgacaataaccagcctgaataccaacaggtcggaggttattacgaggaggcacctgttcatgctccagctttagattttcaccatttgtaatggaactgaaaccagcctctcatcgaagtggaaacctttttttagtcgtaaacatttacatggtttatccagtggtatgctgatgaaagatgctaagtttcgcttaatataatgtatatgaaggtcctgtgtacgtcaaattttgtccacattgaaccagtacgaatgacatcttccttgaaagttatagaaatgcttcaaagttcaaatggc

SEQ ID NO: 16243 - DNA, 1876 bp, Zea Mays
atcacatatctaggtcatattttcgacagacagatataaaacggagtgggaatgcctcgattgatatcatgtccaagttcttcaagctgatggtgccgacattgtgttttttctagacccatggtgactggggcttccagtgcgcttttttccctcgatctcgtgtgatctgagtgtgagaaggcttatagtgtgcttgaggttcttcgacctctctataattcccctaagatactggaacaaaaggatcattgcgtctctgcgagctaatcagttctgtgagcgtctccctagccccaatggcgagtcaattgttgattgccatcagatctcaaagatgccaaatcttgcattcaccatagcaaacaagattttcaccttaacaccagagcagtacatagtgaagttggagcaagcaggacaaactatctgcatcagtgggtttatggcatttgacgtaccgcctccttgtggtcctctctgctatgctaaacatatctgtactactcttaagtgtgcaatgagggcgtccaccgagggcatcaccgtgcccccgctcgcccctccacgcccgcgcctgtctgtgtccgcccccttcgtctccccgcaatggccgcgtccctacctcatgtctacgacgacaactagggtaaacatgaagaagtcatcgggctcgggctcggtgtcgttggcgcggagcatcccggagctgtacgaggagaggggagccagcagcctccgggagttcgggttccaggagctccgggccgccaccagcgacttcagccgcctgctcaaggtcggcgaggtggctttgggagcgtttacaagggcgtcgtctgccttcctggcaggcccgccggcggcacgaagttcaaggttatctcattctggcatatctcatttgcctgctgatgaagtgaagcctttggttaaatatgataatgatgaagatgcacactcacctagtggccgtggaaggggtcgtggtggtcgaggccgtgggcggggcaggggcagaggtggacgtggaaatgggttcaatgagtatgttgatgctggttgggaagacgatcacgcccctgcatatatgggcaatggatatgcccgtggaagaggtcgcagtttcaggggccgtggtaggagaggcgacgacgataactagcctgaataccaacaggtcggaggttatttcaagaagatccaattgaaccaaaaaccggaataaaatttccaacatttttggaagacgactccagtccatctgcagcggtccttgttgggataggtttcaaaggcatgagagtgatgagggtcaaaaatctgaacctctacgcttttggtttatatatgcaaccaacttctatccgtgagaagttgggtcctaagtatgcttcatttccaactaacaagctgatggagaaccctgatttctatagtgatcttctcaggaaatgggttcaatgagtatgctgatgctggttgggaagacgatcactcccctgcatatatgggcaatggatatgcccgtggaagaggtcgcggtttcaggggccgtggtaggagaggcggcgacaataaccagcctgaataccaacaggtcggaggttattacgaggaggcacctgttcatgctccagctttagattttcaccatttgtaatggaactgaaaccagcctctcatcgaagtggaaacctttttttagtcgtaaacatttacatggtttatccagtggtatgctgatgaaagatgctaagtttcgcttaatataatgtatatgaaggtcctgtgtacgtcaaattttgtccacattgaaccagtacgaatgacatcttccttgaaagttatagaaatgcttcaaagttcaaatggc

SEQ ID NO: 16244 - DNA, 2631 bp, Zea Mays
atggctgggaggaccgcgcccgccctccctcccctccttctccttcacgcccgactccctcgctgcccctttatcctgggatctcgtcatggatgctaccacgacccaacgattgatatcatgtccaagttcttcaagctgatggtgttctacaattaatgaatgatttgaaccgaagtgttcaagatgccgctatctcttgtattgaggttagttaattccatatttgatattgtctgtgtatgcctacttcagccgacattgtgttttttctagacccatggtgactggtatgatctctatttctattggacttgttcaatttcccaatagttacatcccatatttacaagctggagagattgagacattttttataacatcttatctattaaaactccatgtcgtttgctccaccaggggcttccagtgcgcttttttccctcgatctcgtgtgatctgagtgtgagaaggcttatagtgtgcttgaggttcttcgacctctctataattcccctaagatactggaacaaaaggtaactgttgcgatatatgtcaatcttcaatttcgttgtcgcttagcagttgttgggctttggtacccagtctgtaattttgctgatgcaccagcgacacatatttatcattgtttattttttaatcaataacaaagcacaggtacaatataatcttatatagcttttaaggtatgtaaacatccactttagtgatgctaacaaatgtataaaataattattattattttttcatagcaatatattttatcatattgcatcttagttcatgctacctggatgtaaatgtggtgcggtttagtttagtaagatcttcactaatcactacatagtgcagcactgggctgttaatattttttgtaccatgtgtcataagcatgagatgttgcctgtagagtaccaatgctttattgcagtcttcctcctcgtctgccccaatgtcggcaagtcagccctcttcaacaggatcattgcgtctctgcgagctaatcagttctgtgagcgtctccctagccccaatggcgagtcaattgttgattgccatcagatctcaaagatgccaaatcttgcattcaccatagcaaacaagattttcaccttaacaccagagcagtacatagtgaagttggagcaagcaggacaaactatctgcatcagtgggtttatggcatttgacgtaccgcctccttgtggtcctctctgctatgctaaacatatctgtactactcttaagtgtgcaatgagggcgtccaccgagggcatcaccgtgcccccgctcgcccctccacgcccgcgcctgtctgtgtccgcccccttcgtctccccgcaatggccgcgtccctacctcatgtctacgacgacaactagggtaaacatgaagaagtcatcgggctcgggctcggtgtcgttggcgcggagcatcccggagctgtacgaggagaggggagccagcagcctccgggagttcgggttccaggagctccgggccgccaccagcgacttcagccgcctgctcaaggtcggcgaggtggctttgggagcgtttacaagggcgtcgtctgccttcctggcaggcccgccggcggcacgaagttcaaggttatctcattctggcatatctcatttgcctgctgatgaagtgaagcctttggttaaatatgataatgatgaagatgcacactcacctagtggccgtggaaggggtcgtggtggtcgaggccgtgggcggggcaggggcagaggtggacgtggaaatgggttcaatgagtatgttgatgctggttgggaagacgatcacgcccctgcatatatgggcaatggatatgcccgtggaagaggtcgcagtttcaggggccgtggtaggagaggcgacgacgataactagcctgaataccaacaggtcggaggttatttcaagaagatccaattgaaccaaaaaccggaataaaatttccaacatttttggaagacgactccagtccatctgcagcggtccttgttgggataggtttcaaaggcatgagagtgatgagggtcaaaaatctgaacctctacgcttttggtttatatatgcaaccaacttctatccgtgagaagttgggtcctaagtatgcttcatttccaactaacaagctgatggagaaccctgatttctatagtgatcttctcaggaaatgggttcaatgagtatgctgatgctggttgggaagacgatcactcccctgcatatatgggcaatggatatgcccgtggaagaggtcgcggtttcaggggccgtggtaggagaggcggcgacaataaccagcctgaataccaacaggtcggaggttattacgaggaggcacctgttcatgctccagctttagattttcaccatttgtaatggaactgaaaccagcctctcatcgaagtggaaacctttttttagtcgtaaacatttacatggtttatccagtggtatgctgatgaaagatgctaagtttcgcttaatataatgtatatgaaggtcctgtgtacgtcaaattttgtccacattgaaccagtacgaatgacatcttccttgaaagttatagaaatgcttcaaagttcaaatggc

SEQ ID NO: 16245 - DNA, 933 bp, Zea Mays
atataaaacggagtgggaatgcctcgattgatatcatgtccaagttcttcaagctgatggtgttctacaattaatgaatgatttgaaccgaagtgttcaagatgccgctatctcttgtattgagacccatggtgactggtatgatctctatttctattggacttgttcaatttcccaatagttacatcccatatttacaagctggagagattgagacattttttataacatcttatctattaaaactccatgtcgtttgctccaccaggggcttccagtgcgcttttttccctcgatctcgtgtgatctgagtgtgagaaggcttatagtgtgcttgaggttcttcgacctctctataattcccctaagatactggaacaaaaggtaactgttgcgatatatgtcaatcttcaatttcgttgtcgcttagcagttgttgggctttggtacccagtctgtaattttgctgatgcaccagcgacacatatttatcattgtttattttttaatcaataacaaagcacaggtacaatataatcttatatagcttttaaggtatgtaaacatccactttagtgatgctaacaaatgtataaaataattattattattttttcatagcaatatattttatcatattgcatcttagttcatgctacctggatgtaaatgtggtgcggtttagtttagtaagatcttcactaatcactacatagtgcagcactgggctgttaatattttttgtaccatgtgtcataagcatgagatgttgcctgtagagtaccaatgctttattgcagtcttcctcctcgtctgccccaatgtcggcaagtcagccctcttcaacagattctagatgatggtacgacaaattattttaggagcgctttgacataatttaaagcttggaagggagctttctatgatttattt

SEQ ID NO: 16246 - DNA, 1629 bp, Zea Mays
agagaaataggagctcttgctggtgtggcgccagtagattttgacgactcccgtcgcctatcgtgcaagcacttcttgggaatctgtgtgcagtcggggtggtgcgcctggagttggtgatcgtgggcgacgcctgcgctgggcagtcgtgtggtggtggggtgacaggggctccagcaattcctcaacggagctctgaacttccacccgagcggctgctcgtcgggggccggcttcactgcaacatcttcgacgattatattctgcaggtgctaaaggttcaacacaaactaataaaaagatccaagttagggttcaaaaagaaaggagcaaaagaaaccgaagtaaaccctggtctggcgcaccggactgtccggtgtgccacctgacagtgtccggtgccccagggaccgtacaggctgaactcttcaccttcgggtttctggacagccgctccgctatatttcaccggactatccggtgggtcatcggactgtccagtgtgccagggagcaatggctaagaaacgcaacggtcgactccaacggtcgcctgcaacgtgaacagtgcgcggacagttcgcgcagagtcagagcagcgccagaaggcgcactggacagtgaacagtacctgtccggtgcggcaccggactgtccggtgacccaagctgtcagagctccaacggtcaaaattgtcagaaccctaacggttgggtgacgtggctggcacactggacagtgtccggtggcgcaccggactatctagtgcgcccatcgacagcagccctccccaacgggtgttttggtggttggggctataaatacccccaaccaccaccactccaagcatccaagtttccagcatattgcattcaatacaagagctctagacttcactccaagacacaaacaagagatcaaatcctctccaaaatccaaaaccactccaaatacttagtgacttatgagagagagattttcgtgttcatctgagttcttgtcgcttggatcgatttcttcttcctctcatttttgttcttcaaacacttgtaatcaaagcaagagacaccaagttgtggtggtccttgtgaggggtctaagtgacccgtttgattaaagagaaaagctcactcggtctaggtgaccgtttgagagagggaaagggttgaaagagacccggtctttgtgaccacctcaacgaggactaggtttgtaagaaccgaacctcggtaaaacaaatcaccatgtcactcgctttatttcttggtcgatttgtttttgccctctcttttggactcgatcttatttctaacgctaaccccggcttgtagttgtgcttaaagtttgtaaatttcagtttccgcatattcacccacccccctttaggcgactttcatttggtatcagagcccggtacttcattagagtttaaccactcgaagtgatgtcaggagatcacaccaataagacaatcgtgaccggctgtgacaagtgtacaagccatgggaaggctccatcgggaaagtctagcaacaaaatgaagggatccccttcacatgccaagtcgcattagagcggcgacaagaaaaagaagatgaagaaggtggtctactacgagaccgattcttca

SEQ ID NO: 16247 - DNA, 2819 bp, Zea Mays
ctcgcctcgtcctcgggttgttctaatcccgcgtcgcaaactctaccgggaatcctccgatattcgccttcctcggcaacagatttggcaaccggggtataagaatcgagcctcccctgaccatctatccagtgcgccgccgagatttcaaaggagagagaaataggagctcttgctggtgtggcgccagtagattttgacgactcccgtcgcctatcgtgcaagcacttcttgggaatctgtgtgcagtcggggtggtgcgcctggagttggtgatcgtgggcgacgcctgcgctgggcagtcgtgtggtggtggggtgacaggggctccagcaattcctcaacggagctctgaacttccacccgagcggctgctcgtcgggggccggcttcactgcaacatcttcgacggtaaggtcttggtagaatgatttttcgtttcctctgtgtcacgtagcacctatcagtgcgggtcgttgggcactagatcgctggagcaccgttcgccggcgaggttgctaccgttgcgggccatgtgctgtcgccagattggtcctctggggaagaagggctccttgccgtcgatcgcgtagcgtacggttccgattaaaaatagagtactgttttggttaagtaaatctggaccctacatctaaatctaatggcctgcggacctcataaaacttgggccatcggatctcgatctaatggttaggacggcataccagttcggggtcggatctggcgcgttggatcttgatcgggcagcccacattacgctccggttcactttaagtccgaatctaatctggaccacaggattctgatcggatggcttagaattcacgataccccttcgtcgtggcattcttacttaaggacccctcagtgttcttattatcaacccgcagtcccgagtggtttaaagatccttacgatgaggccctggttttttataaaataacccctgatctttagtataataatgtgtacagtccagaacttgggggaattaaataattgagtaaggaaaatgaatttctagtgtacaaataatcccagaacttgtttaattcatagagaattcatacttagtccaaattaatccattccagttcgtataattttgtaataatgttgtttatcacctagtgtctctgttttgacatgaatttcacaataaaatttatatcctatttaattttgtacaaaacacataaaaccttcagaaattcataacttaaaatctatgactccaaaattaatgattcctgttcatagaatcttatttaaatgtgtagattattattatatattttgtttacatgtttggtgtgatgttaattttgcctatgtgaaaggaaaatagggtcaaacatttttctaaataattttggtggttgaaatgcccaacacaaataattggactaactagtttgctctagattatattctgcaggtgctaaaggttcaacacaaactaataaaaagatccaagttagggttcaaaaagaaaggagcaaaagaaaccgaagtaaaccctggtctggcgcaccggactgtccggtgtgccacctgacagtgtccggtgccccagggaccgtacaggctgaactcttcaccttcgggtttctggacagccgctccgctatatttcaccggactatccggtgggtcatcggactgtccagtgtgccagggagcaatggctaagaaacgcaacggtcgactccaacggtcgcctgcaacgtgaacagtgcgcggacagttcgcgcagagtcagagcagcgccagaaggcgcactggacagtgaacagtacctgtccggtgcggcaccggactgtccggtgacccaagctgtcagagctccaacggtcaaaattgtcagaaccctaacggttgggtgacgtggctggcacactggacagtgtccggtggcgcaccggactatctagtgcgcccatcgacagcagccctccccaacgggtgttttggtggttggggctataaatacccccaaccaccaccactccaagcatccaagtttccagcatattgcattcaatacaagagctctagacttcactccaagacacaaacaagagatcaaatcctctccaaaatccaaaaccactccaaatacttagtgacttatgagagagagattttcgtgttcatctgagttcttgtcgcttggatcgatttcttcttcctctcatttttgttcttcaaacacttgtaatcaaagcaagagacaccaagttgtggtggtccttgtgaggggtctaagtgacccgtttgattaaagagaaaagctcactcggtctaggtgaccgtttgagagagggaaagggttgaaagagacccggtctttgtgaccacctcaacgaggactaggtttgtaagaaccgaacctcggtaaaacaaatcaccatgtcactcgctttatttcttggtcgatttgtttttgccctctcttttggactcgatcttatttctaacgctaaccccggcttgtagttgtgcttaaagtttgtaaatttcagtttccgcatattcacccacccccctttaggcgactttcatttggtatcagagcccggtacttcattagagtttaaccactcgaagtgatgtcaggagatcacaccaataagacaatcgtgaccggctgtgacaagtgtacaagccatgggaaggctccatcgggaaagtctagcaacaaaatgaagggatccccttcacatgccaagtcgcattagagcggcgacaagaaaaagaagatgaagaaggtggtctactacgagaccgattcttca

SEQ ID NO: 16248 - DNA, 284 bp, Zea Mays
ggcgccagtagattttgacgactcccatcgcccgtcgtgcaagcacttcttgggaatctgtgtgcggtcggggtggtgcgcctggagttggtgatcgtgggcgacgcctgcgctggcagtggtgtggtggtggggtgaccgtggcttctgcaattcctcaacgaagctctgaacttccaatcgagcggctgctcatcggggaccagcttctctgcaacatctttgacgtgaggacaccgtgtcatctgaagagcaagttggtacctggaatctcaagtgccagg

SEQ ID NO: 16249 - DNA, 3009 bp, Zea Mays
gaatccgcacgtgtcccatagtcgtgtacaacccgttagaatggagtttgggggcacaggggtgtgctgcggcgaggcccgtctatgacttgtgggtaaagatatgcaacctctgagagtgtaaaactggtatatcaaccgtgctcacggtcatgagcagctcgggccctcacatgattaacttatggaactaaattcaatttgtcatctgcattgcattggtattattttactattacttttatttattattactatggtttgatatttacttacacttagtaactgctaataaaattttgaccaacttataaaagcaatgctcagcttcacctttattttgttgatcagccttacacttcacatgaactcccacctttggtgagttcatgcacattattccccacaacttgttgagctatgatcttttgtgagctcactcttgcgatatataaccccctccccccacaggtgaagagcaggtggtcgaagaggagccgcgcaacgaggagttcgacttgatctaggtgacgtctcccagtcagccttgtggcaccagggaaataataattagttcattttatgtttatcatttattttataagacttccgctatgtaataagtacatttatgatatttatgacatttatctctatgcactctgttattatatctattgttcttccttggcgcacatatgagacacacccgactttatcctttgaatctgggtgtgacagaaatttagcacacgacattgcattttccaatcactatctatgtagtatgcaaccaaacacatatgtgacaatgtttgattagaagtccataaatcagtggtcaatgaaatataatccactcctttaagggcctttgaaagtatttctttttcagactcatacaccttcaagcattctgctctaattgtcttcctaccaatgaactcatattgtggattcaaatacttcatgaaaatgttaaaccatgtatgctcaaccatcctaattgggtactgttggattaatgtggacttgacctaaattaatattcaataatagtcaatgctaaaggatcactttaatgctatggtatactaataatttagtaccatattggaagttcaaggaagaaatcaatcaacttaaataggtggagcattggtgcatctattgagaacttgagaaaaggatgaaggactgccacacgcgcgcgtgccgtcggccgggtcgggctatagccgtggctcgtggtagatcggaccttggtctgattattccttcctaacaattgtgcattgtgcctggagtaatgaccgtctatgtcctgtcttatggctagtaacggatgtctcttatggcacgtcggtttctagcggttgtcaatttctggctcttatggcgaccgttactatctgttcccctccctttacgcatgtttatggcgaccgttactgcccgttcccctccctttgcgtgtgtataaacacggaggaggtggacactctttcggttacgtgaacgcaaataggctctcagacatgttgcactcagcccattcctgtcgcaccttctgcgagcacagagctcctgaaggctactagcggaggaggacgcaggagcaggagcgccgtctcactgaggcacggaggcaccgagccaccaacaatcgaccacatgaggctgagtcctcgcaagctccaagcaggcgaggatgaggtgatggactggcagtggtcaactactcgacttcgactagatggtggagggcctagagggcggaggcggcatcgacgcgacgtcgtccagtgttctagtctcgagctctcggtcgtctctcgagtaaccagccaccacacagacgcaacatataggattaggggtggggtggttatgttgtgttccttacttgtaacctttgtaacctatgtacatgtaacatgttggtctattgcaagattaggccttgggattatgggacgttgtgggttgtagcctgtagcgttgtgcaagggctagcttgtgagccagcttgcgagctcatacgagttggattggcttgacccgcccctttaccgagctcagaaaaccggcttggctcggctctccaggagttcacgagctgtcttgagcggagccacaacgagctcgaggtggcttgtcgaacccgagctttttccagccccattgatggtactcaactatctttcaatgtacatttcagatctttcagcatctgaacagaagcgaacgacacagattagatctgtcctcatctgaataggtactgtacgtaggccctcatatctagatccaacgaccacagttttaaatagcgcggatcgcatggcatccgcctgatcgcgatccaacgaatcatatccaccttgtgaagggttatgccaaattccaatctcaaccattggttttatgatctatgggcacacatacgtcttcacctattccggcggcacgccgtggcagagcccagcgctccctggtaggaccttgccggcgagtggcacctcgacgcacagatgccctattataaaaatggatccactctagacgtaatagggaagatgacgaacttcagagaaggtgtcttactggcaattgcagcgcagacacccctggccacggcgcacggtgcacacgcggaggagctcgcactatgacgacgaattctgaggtctccagccaccaacccaccgcagcgagaccatcgattatgtccccgaagcacgcgagactcctaggcaccaattcgtggacccgacggcgatgagcccaccgaatcggacccagcaaccctctccccttcactcttctgtactggcgactttaactctccctcgtggtggtggttagacgaggcggatgagaggagtcaagagggattgggttcgcttttgtagttgggacaaggcgaggccgtgggcggtggagatatcaggcagcgcaacaacccgccagaggtgccctacgaggaagagaagcaggagagggggg

SEQ ID NO: 16250 - DNA, 1237 bp, Zea Mays
tacataagcagcttacattcttactagccataattaaagtattaaatacaactaataaattgcaacgtatattactagttgctctgcacaaagctttttggaaatgagatagtcttcataccatcgtcatcttgtatgccctaaaacaaacacaaatgtgaatcaaaatctgaaaacaaacataagaaatgaactctaataaacaataaaagagcaactaataaccacatatgttatgcttaaatcatgcgaaccccgaatccagctcgaggagcataccaaagcctccaccaagaagggatgagagaactccgataattatctaaagttctacccccgtgcaaaaagtagactctgaaggcacaaatgttgctcgtacaattaagaatttcattgccatccttgagacaaccagaaacctatgtgaattaaccttccactagctcaacaaatcaaactccttatctgctagactgacatttgtctcatctaaatagataagcaactcaccctttgatgggttagcttcagtggatgatataaatgactgaaatttgcatgaagcagaagacaagctacaagtagtatcaatggttaaatatgaagaacaaccactagatttgctttgaggagcttttctcactctatgttgcaactaacagtcctcaaataatttttccaactcacctcgaacttcatctatctcaaatctaacttggtcaccattagagatctaaccaaagcaccactcgatatacctcatcttacaccttggatctagaattgtagcaataaccataacattatgttttttcttcccagtacttattgatcttctccatcatcacagtacccatttttctcaatgcaatcttgacatccacatgtgaggatagaaaagatttgcagtaggatatgtagaagctaacaatgaactggttactttggctaaagaggcaagaattggctcaatcgcaacaaataaatcccattcctaatttgtagtttcccatttataatttaaatcagcatcgacacgtttgaattgcttctttgtaagctatactagtactcaacaacttgtatgttgaactccatctagttgacacatcaagactcaaaccctctccaatttgcaatgcaagagatctacaaatctctacaaatttatgcatatgagatggggatttcttaatgtatttcacagttgatcttaggttgtctatcaaagaagcca

SEQ ID NO: 16251 - DNA, 1703 bp, Zea Mays
gtgggatatccactccctgcactcacctcacgaattactcgctggaccactgctccatctttggaggtgtcgtcgctggacttcctgaatgtcgcactgctatcaacagttttcgacatcttgctcctccttggctctgataccacttgttggaaactgcgccggagagacaaccctgcaggttgccggcgagttcctacctcccaggtaagttcttcaggtatgagaaaacctcccagggactcacacgcacacgatttggagaggaacacagcagatttggtggcgtcctattgactgccttttcttagcctctaaggccatatatttatagactttcataaggaaacaaactagctattacaaggtaataatccggactgctatcagtcctgatcttgctgattggatccgtccatataagactgatccactaccatactagctatttcctaaaacagaataagtaaactagcaccaatcaaggattactttcctaacagcctctacatgttgatagtttaattttttgtgttcctatatttcttatctttatttggttctcactaggtggatttggaacttgcaaaggcagaagctgacaaagtagaagacgatgaagagcttaggaagaagctgtggcttaaggttgctaaacatgtcatcgagcaagagaaaggtgtcaagagagagaatataaagaaagcaatagaattcctttcggagaccaataacttgttaaagattgaggatatcttaccattcttcccagacttcgtattgattgacgatttcaaagaggaaatatgcaaatctctgaaggactacaacagccagattgagcagctcaagcaggagatggatgatgccacacgtggggcagataatatcagaagtgatattggtgccctcgctcagagatatacagtaattgaccgtgagcaggattgtggggtttgccggcgcaaaatattgactgttggagggttgcaccaggtagggagaagctatacatctgttggacacatggcccccttttatgtgtttccctgtggacatgccttccatgcaaattgcttgattggacatgtgactcgttgcagtaaccaggctgagagaatattggaccttcagaaacggcttagcttgatggacaggaaagcagcaaaagacaatggggcaagtgttaatggcgaacctattacgagcacaaccccagttgataagctgagatcacagttggatgatgctgtagcaagcgagtgccccttctgcggtgatttgatgatcaaggagatttcacagccgttcattctcccccaagagtcggatgaaaaggcatcatgggaaatcaaacctcaaccaacgcctcaaaagattctcccgatgaccatgtctatttgatgctacggacagtacagcctaagatggatttggttttaaatttttatattgtttttgacttttgacactccttttgaccatgttttaatcctttttatgttgtggtatatggtattcaatatcctactgctgttgggttatcttgttttatatttacccaacttgtaaccctagaacaatgtagtcatcaatcgcttaccttgtggttgtggttcttgtattggatgcatcgtgttggaacatctcggtacacttgttatttgggattgtttttttttctgaagtcttgctccggaaat

SEQ ID NO: 16252 - DNA, 1687 bp, Zea Mays
gtgagtgtgggatatccactccctgcactcacctcacgaattactcgctggaccactgctccatctttggaggtgtcgtcgctggacttcctgaatgtcgcactgctatcaacagttttcgacatcttgctcctccttggctctgataccacttgttggaaactgcgccggagagacaaccctgcaggttgccggcgagttcctacctcccaggtaagttcttcaggtatgagaaaacctcccagggactcacacgcacacgatttggagaggaacacagcagatttggtggcgtcctattgactgccttttcttagcctctaaggccatatatttatagactttcataaggaaacaaactagctattacaaggtaataatccggactgctatcagtcctgatcttgctgattggatccgtccatataagactgatccactaccatactagctatttcctaaaacagaataagtaaactagcaccaatcaaggattactttcctaacagcctctacatgttgatagtttaattttttgtgttcctatatttcttatctttatttggttctcactaggtggatttggaacttgcaaaggcagaagctgacaaagtagaagacgatgaagagcttaggaagaagctgtggcttaaggttgctaaacatgtcatcgagcaagagaaaggtgtcaagagagagaatataaagaaagcaatagaattcctttcggagaccaataacttgttaaagattgaggatatcttaccattcttcccagacttcgtattgattgacgatttcaaagaggaaatatgcaaatctctgaaggactacaacagccagattgagcagctcaagcaggagatggatgatgccacacgtggggcagataatatcagaagtgatattggtgccctcgctcagagatatacagtaattgaccgtgagcaggattgtggggtttgccggcgcaaaatattgactgttggagggttgcaccaggtagggagaagctatacatctgttggacacatggcccccttttatgtgtttccctgtggacatgccttccatgcaaattgcttgattggacatgtgactcgttgcagtaaccaggtgcaagctgagagaatattggaccttcagaaacggcttagcttgatggacaggaaagcagcaaaagacaatggggcaagtgttaatggcgaacctattacgagcacaaccccagttgataagcaagcgagtgccccttctgcggtgatttgatgatcaaggagatttcacagccgttcattctcccccaagagtcggatgaaaaggcatcatgggaaatcaaacctcaaccaacgcctcaaaagattctcccgatgaccatgtctatttgatgctacggacagtacagcctaagatggatttggttttaaatttttatattgtttttgacttttgacactccttttgaccatgttttaatcctttttatgttgtggtatatggtattcaatatcctactgctgttgggttatcttgttttatatttacccaacttgtaaccctagaacaatgtagtcatcaatcgcttaccttgtggttgtggttcttgtattggatgcatcgtgttggaacatctcggtacacttgttatttgggattgtttttttttctgaagtcttgctccggaaat

SEQ ID NO: 16253 - DNA, 832 bp, Zea Mays
gcaaagatatccttggtgatccaggagtgcagcagggggaaagagcattcggtccatcgtgtgtctgaatttgcctagtttttctggaggtttgaatccttggggcacacctggcacgaggagagcagaagatagggagttcactgcaccttttgtcgacgatggacttcttgaggttgttggcttccgtgacgcctggcacgggctggtcctgctggcccctaatggacacggcactcgcattgcccaggcccataggatccgctttgaattccacaaaggcgcagcagagcacacgttcatgagggttgacggagagccctggaagcagccccttcccaaggacgatgacacggttgtggtggaaatctctcaccttgggcaggtcaccatgctagcaaatgagccgtgcaggtccaagagcgtcaacgaccagtcgtcactgtcgccggcgcacgacagtcatggtgattacaatgatatcgctgaggaggacgaagacgagtgggaggacggcaggaggaagtttggggcggcagatacatttaagattcctgacgagattgacattgctcatttcagttgagctttgactagtgcatcgtcgtgtgcgttctgatcatacgagtatggtttggtttataaccatctcctttcttttgatttcatatatttgcgatatgattgttgcagccatgtgtaagtgaatcctaggtaaccaagtgctgcgttgctatatatgaccaatgtatgtatagattcagtggaacggtaaaaacacgcgaactctacggttttctccttaaaaataaaaaagaaaataaaataaaaa

SEQ ID NO: 16254 - DNA, 2046 bp, Zea Mays
aatgtaagaaatacacacaaaaaaaaagtcaaatcttaaaatggcgaacatgcgagcccctagaaacgatgacaaccaagagagtgcctcctgtcctcctaacatcgattttcctccggaatcgtaacctcagaaagccaaatctcattctccggcgctcaggcccacccaagcgtcgactctcccgatccaatcggtacctcctagttcctcgccggcggtagcggcgtcgggcgaacagcggtgacttggcgagggcgcttggccggcgacaatcatccactaggatggaaggtgaggcagagaccgtggttggttcttgttctaaaccatgtgggcctctggaggactactacattccagattacattctgaagccaggtgcccaacaagtacttgttgatcatgcggcaccctgccccgttgtagtgttcatcaactcaagatctggaggccaacttggaagtagtttaatcaaaacatatcgtgagcttctcaatgaagcacagttactttcaggtttttgatctctcaaaagaggctccagataaggtattgcatcgtttatatgccaaccttgaaaggctgaagatggaaggagacattcttgcagttcaaatttggaggacactgaggctaattgttgcaggcggtgatggtacagctagctggctgcttggggtagtcagtgaccttaagctttcccacccacctccagtggcaactgttcctctgggaaccggaaataacctccccttttcatttggatggggaaagaagaatccttctactgaccaagaggctgtaaaatcattcctcgggctagtaaagcatgcaaaagaaattaagattgatagttggcacatcattttgagaatgcgagttccagaggaaggtccatgtgatcctattgctccattagatttgcctcattcattgcatgcgttccatcgtgtctcaagtagtgattctctcaatatggaaggttaccacacattccgtggaggattttggaattactttagtatggggatggatgcagaagtgtcttatgcatttcattctgaaaggaagaagaatccagagaagttcaagaatcagctgacaaatcagggtacatacgctaagcttggacttaaacaaggatggttttgtgcttctcttagtcagccatcatcaaggaaccttgctcaaattgcaaaagtaaagatcatgaaaagagctggtagcctctgggaggaacttcacattcatcacagcattcggtccatcgtgtgtctgaatttgcctagtttttctggaggtttgaatccttggggcacacctggcacgaggagagcagaagatagggagttcactgcaccttttgtcgacgatggacttcttgaggttgttggcttccgtgacgcctggcacgggctggtcctgctggcccctaatggacacggcactcgcattgcccaggcccataggatccgctttgaattccacaaaggcgcagcagagcacacgttcatgagggttgacggagagccctggaagcagccccttcccaaggacgatgacacggttgtggtggaaatctctcaccttgggcaggtcaccatgctagcaaatgagccgtgcaggtccaagagcgtcaacgaccagtcgtcactgtcgccggcgcacgacagtcatggtgattacaatgatatcgctgaggaggacgaagacgagtgggaggacggcaggaggaagtttggggcggcagatacatttaagattcctgacgagattgacattgctcatttcagttgagctttgactagtgcatcgtcgtgtgcgttctgatcatacgagtatggtttggtttataaccatctcctttcttttgatttcatatatttgcgatatgattgttgcagccatgtgtaagtgaatcctaggtaaccaagtgctgcgttgctatatatgaccaatgtatgtatagattcagtggaacggtaaaaacacgcgaactctacggttttctccttaaaaataaaaaagaaaataaaataaaaa

SEQ ID NO: 16255 - DNA, 2396 bp, Zea Mays
aatgtaagaaatacacacaaaaaaaaagtcaaatcttaaaatggcgaacatgcgagcccctagaaacgatgacaaccaagagagtgcctcctgtcctcctaacatcgattttcctccggaatcgtaacctcagaaagccaaatctcattctccggcgctcaggcccacccaagcgtcgactctcccgatccaatcggtacctcctagttcctcgccggcggtagcggcgtcgggcgaacagcggtgacttggcgagggcgcttggccggcgacaatcatccactaggatggaaggtgaggcagagaccgtggttggttcttgttctaaaccatgtgggcctctggaggactactacattccagattacattctgaagccaggtgcccaacaagtacttgttgatcatgcggcaccctgccccgttgtagtgttcatcaactcaagatctggaggccaacttggaagtagtttaatcaaaacatatcgtgagcttctcaatgaagcacaggtttttgatctctcaaaagaggctccagataaggtattgcatcgtttatatgccaaccttgaaaggctgaagatggaaggagacattcttgcagttcaaatttggaggacactgaggctaattgcggtgatggtacagctagctggctgcttggggtagtcagtgaccttaagctttcccacccacctccagtggcaactgttcctctgggaaccggaaataacctccccttttcatttggatggggaaagaagaatccttctactgaccaagaggctgtaaaatcattcctcgggctagtaaagcatgcaaaagaaattaagattgatagttggcacatcattttgagaatgcgagttccagaggaaggtccatgtgatcctattgctccattagatttgcctcattcattgcatgcgttccatcgtgtctcaagtagtgattctctcaatatggtagtacactctttctattgcaacttttttttgctatgaattatgtttgcttgagaaaatgacatgcaccattaccatcaaaggcatttggttaatggatttaattcaaagcttccatgatcattcttgattacttcaggaaggttaccacacattccgtggaggattttggaattactttagtatgggtaaggcttcaatgttgttctcatctttattgttacacaaatgcggcaagaccattatgtacctatactatccagttgtttatttatattttttatcttgatatgtgatcctgggtagtagttcatgctacaaaggctagtgtttcgccaacccactaaggaaagtagtgcaagtctagtgagattattgttatggcatcattctctttttaattaaatctatatctgggatggatgcagaagtgtcttatgcatttcattctgaaaggaagaagaatccagagaagttcaagaatcagctgacaaatcagggtacatacgctaagcttggacttaaacaaggatggttttgtgcttctcttagtcagccatcatcaaggaaccttgctcaaattgcaaaagtaaagatcatgaaaagagctggtagcctctgggaggaacttcacattcatcacagcattcggtccatcgtgtgtctgaatttgcctagtttttctggaggtttgaatccttggggcacacctggcacgaggagagcagaagatagggagttcactgcaccttttgtcgacgatggacttcttgaggttgttggcttccgtgacgcctggcacgggctggtcctgctggcccctaatggacacggcactcgcattgcccaggcccataggatccgctttgaattccacaaaggcgcagcagagcacacgttcatgagggttgacggagagccctggaagcagccccttcccaaggacgatgacacggttgtggtggaaatctctcaccttgggcaggtcaccatgctagcaaatgagccgtgcaggtccaagagcgtcaacgaccagtcgtcactgtcgccggcgcacgacagtcatggtgattacaatgatatcgctgaggaggacgaagacgagtgggaggacggcaggaggaagtttggggcggcagatacatttaagattcctgacgagattgacattgctcatttcagttgagctttgactagtgcatcgtcgtgtgcgttctgatcatacgagtatggtttggtttataaccatctcctttcttttgatttcatatatttgcgatatgattgttgcagccatgtgtaagtgaatcctaggtaaccaagtgctgcgttgctatatatgaccaatgtatgtatagattcagtggaacggtaaaaacacgcgaactctacggttttctccttaaaaataaaaaagaaaataaaataaaaa

SEQ ID NO: 16256 - DNA, 2393 bp, Zea Mays
aatgtaagaaatacacacaaaaaaaaagtcaaatcttaaaatggcgaacatgcgagcccctagaaacgatgacaaccaagagagtgcctcctgtcctcctaacatcgattttcctccggaatcgtaacctcagaaagccaaatctcattctccggcgctcaggcccacccaagcgtcgactctcccgatccaatcggtacctcctagttcctcgccggcggtagcggcgtcgggcgaacagcggtgacttggcgagggcgcttggccggcgacaatcatccactaggatggaaggtgaggcagagaccgtggttggttcttgttctaaaccatgtgggcctctggaggactactacattccagattacattctgaagccaggtgcccaacaagtacttgttgatcatgcggcaccctgccccgttgtagtgttcatcaactcaagatctggaggccaacttggaagtagtttaatcaaaacatatcgtgagcttctcaatgaagcacaggtttttgatctctcaaaagaggctccagataaggttgcaggcggtgatggtacagctagctggctgcttggggtagtcagtgaccttaagctttcccacccacctccagtggcaactgttcctctgggaaccggaaataacctccccttttcatttggatggggaaagaagaatccttctactgaccaagaggctgtaaaatcattcctcgggctagtaaagcatgcaaaagaaattaagattgatagttggcacatcattttgagaatgcgagttccagaggaaggtccatgtgatcctattgctccattagatttgcctcattcattgcatgcgttccatcgtgtctcaagtagtgattctctcaatatggtagtacactctttctattgcaacttttttttgctatgaattatgtttgcttgagaaaatgacatgcaccattaccatcaaaggcatttggttaatggatttaattcaaagcttccatgatcattcttgattacttcaggaaggttaccacacattccgtggaggattttggaattactttagtatgggtaaggcttcaatgttgttctcatctttattgttacacaaatgcggcaagaccattatgtacctatactatccagttgtttatttatattttttatcttgatatgtgatcctgggtagtagttcatgctacaaaggctagtgtttcgccaacccactaaggaaagtagtgcaagtctagtgagattattgttatggcatcattctctttttaattaaatctatatctggtgagttcttaagcagataacaaattaaagaattcaggcactagagtcaaacatgatgatcatgacttgacatgttgcagggatggatgcagaagtgtcttatgcatttcattctgaaaggaagaagaatccagagaagttcaagaatcagctgacaaatcagggtacatacgctaagcttggacttaaacaaggatggttttgtgcttctcttagtcagccatcatcaaggaaccttgctcaaattgcaaaagtaaagatcatgaaaagagctggtagcctctgggaggaacttcacattcatcacagcattcggtccatcgtgtgtctgaatttgcctagtttttctggaggtttgaatccttggggcacacctggcacgaggagagcagaagatagggagttcactgcaccttttgtcgacgatggacttcttgaggttgttggcttccgtgacgcctggcacgggctggtcctgctggcccctaatggacacggcactcgcattgcccaggcccataggatccgctttgaattccacaaaggcgcagcagagcacacgttcatgagggttgacggagagccctggaagcagccccttcccaaggacgatgacacggttgtggtggaaatctctcaccttgggcaggtcaccatgctagcaaatgagccgtgcaggtccaagagcgtcaacgaccagtcgtcactgtcgccggcgcacgacagtcatggtgattacaatgatatcgctgaggaggacgaagacgagtgggaggacggcaggaggaagtttggggcggcagatacatttaagattcctgacgagattgacattgctcatttcagttgagctttgactagtgcatcgtcgtgtgcgttctgatcatacgagtatggtttggtttataaccatctcctttcttttgatttcatatatttgcgatatgattgttgcagccatgtgtaagtgaatcctaggtaaccaagtgctgcgttgctatatatgaccaatgtatgtatagattcagtggaacggtaaaaacacgcgaactctacggttttctccttaaaaataaaaaagaaaataaaataaaaa

SEQ ID NO: 16257 - DNA, 2498 bp, Zea Mays
aatgtaagaaatacacacaaaaaaaaagtcaaatcttaaaatggcgaacatgcgagcccctagaaacgatgacaaccaagagagtgcctcctgtcctcctaacatcgattttcctccggaatcgtaacctcagaaagccaaatctcattctccggcgctcaggcccacccaagcgtcgactctcccgatccaatcggtacctcctagttcctcgccggcggtagcggcgtcgggcgaacagcggtgacttggcgagggcgcttggccggcgacaatcatccactaggatggaaggtgaggcagagaccgtggttggttcttgttctaaaccatgtgggcctctggaggactactacattccagattacattctgaagccaggtgcccaacaagtacttgttgatcatgcggcaccctgccccgttgtagtgttcatcaactcaagatctggaggccaacttggaagtagtttaatcaaaacatatcgtgagcttctcaatgaagcacaggtttttgatctctcaaaagaggctccagataaggtattgcatcgtttatatgccaaccttgaaaggctgaagatggaaggagacattcttgcagttcaaatttggaggacactgaggctaattgttgcaggcggtgatggtacagctagctggctgcttggggtagtcagtgaccttaagctttcccacccacctccagtggcaactgttcctctgggaaccggaaataacctccccttttcatttggatggggaaagaagaatccttctactgaccaagaggctgtaaaatcattcctcgggctagtaaagcatgcaaaagaaattaagattgatagttggcacatcattttgagaatgcgagttccagaggaaggtccatgtgatcctattgctccattagatttgcctcattcattgcatgcgttccatcgtgtctcaagtagtgattctctcaatatggtagtacactctttctattgcaacttttttttgctatgaattatgtttgcttgagaaaatgacatgcaccattaccatcaaaggcatttggttaatggatttaattcaaagcttccatgatcattcttgattacttcaggaaggttaccacacattccgtggaggattttggaattactttagtatgggtaaggcttcaatgttgttctcatctttattgttacacaaatgcggcaagaccattatgtacctatactatccagttgtttatttatattttttatcttgatatgtgatcctgggtagtagttcatgctacaaaggctagtgtttcgccaacccactaaggaaagtagtgcaagtctagtgagattattgttatggcatcattctctttttaattaaatctatatctggtgagttcttaagcagataacaaattaaagaattcaggcactagagtcaaacatgatgatcatgacttgacatgttgcagggatggatgcagaagtgtcttatgcatttcattctgaaaggaagaagaatccagagaagttcaagaatcagctgacaaatcagggtacatacgctaagcttggacttaaacaaggatggttttgtgcttctcttagtcagccatcatcaagattgctttgtttcaggaaccttgctcaaattgcaaaagtaaagatcatgaaaagagctggtagcctctgggaggaacttcacattcatcacagcattcggtccatcgtgtgtctgaatttgcctagtttttctggaggtttgaatccttggggcacacctggcacgaggagagcagaagatagggagttcactgcaccttttgtcgacgatggacttcttgaggttgttggcttccgtgacgcctggcacgggctggtcctgctggcccctaatggacacggcactcgcattgcccaggcccataggatccgctttgaattccacaaaggcgcagcagagcacacgttcatgagggttgacggagagccctggaagcagccccttcccaaggacgatgacacggttgtggtggaaatctctcaccttgggcaggtcaccatgctagcaaatgagccgtgcaggtccaagagcgtcaacgaccagtcgtcactgtcgccggcgcacgacagtcatggtgattacaatgatatcgctgaggaggacgaagacgagtgggaggacggcaggaggaagtttggggcggcagatacatttaagattcctgacgagattgacattgctcatttcagttgagctttgactagtgcatcgtcgtgtgcgttctgatcatacgagtatggtttggtttataaccatctcctttcttttgatttcatatatttgcgatatgattgttgcagccatgtgtaagtgaatcctaggtaaccaagtgctgcgttgctatatatgaccaatgtatgtatagattcagtggaacggtaaaaacacgcgaactctacggttttctccttaaaaataaaaaagaaaataaaataaaaa

SEQ ID NO: 16258 - DNA, 2413 bp, Zea Mays
aatgtaagaaatacacacaaaaaaaaagtcaaatcttaaaatggcgaacatgcgagcccctagaaacgatgacaaccaagagagtgcctcctgtcctcctaacatcgattttcctccggaatcgtaacctcagaaagccaaatctcattctccggcgctcaggcccacccaagcgtcgactctcccgatccaatcggtacctcctagttcctcgccggcggtagcggcgtcgggcgaacagcggtgacttggcgagggcgcttggccggcgacaatcatccactaggatggaaggtgaggcagagaccgtggttggttcttgttctaaaccatgtgggcctctggaggactactacattccagattacattctgaagccaggtgcccaacaagtacttgttgatcatgcggcaccctgccccgttgtagtgttcatcaactcaagatctggaggccaacttggaagtagtttaatcaaaacatatcgtgagcttctcaatgaagcacagttactttcaggtttttgatctctcaaaagaggctccagataaggtattgcatcgtttatatgccaaccttgaaaggctgaagatggaaggagacattcttgcagttcaaatttggaggacactgaggctaattgttgcaggcggtgatggtacagctagctggctgcttggggtagtcagtgaccttaagctttcccacccacctccagtggcaactgttcctctgggaaccggaaataacctccccttttcatttggatggggaaagaagaatccttctactgaccaagaggctgtaaaatcattcctcgggctagtaaagcatgcaaaagaaattaagattgatagttggcacatcattttgagaatgcgagttccagaggaaggtccatgtgatcctattgctccattagatttgcctcattcattgcatgcgttccatcgtgtctcaagtagtgattctctcaatatggtagtacactctttctattgcaacttttttttgctatgaattatgtttgcttgagaaaatgacatgcaccattaccatcaaaggcatttggttaatggatttaattcaaagcttccatgatcattcttgattacttcaggaaggttaccacacattccgtggaggattttggaattactttagtatgggtaaggcttcaatgttgttctcatctttattgttacacaaatgcggcaagaccattatgtacctatactatccagttgtttatttatattttttatcttgatatgtgatcctgggtagtagttcatgctacaaaggctagtgtttcgccaacccactaaggaaagtagtgcaagtctagtgagattattgttatggcatcattctctttttaattaaatctatatctgggatggatgcagaagtgtcttatgcatttcattctgaaaggaagaagaatccagagaagttcaagaatcagctgacaaatcagggtacatacgctaagcttggacttaaacaaggatggttttgtgcttctcttagtcagccatcatcaaggaaccttgctcaaattgcaaaagtaaagatcatgaaaagagctggtagcctctgggaggaacttcacattcatcacagcattcggtccatcgtgtgtctgaatttgcctagtttttctggaggtttgaatccttggggcacacctggcacgaggagagcagaagatagggagttcactgcaccttttgtcgacgatggacttcttgaggttgttggcttccgtgacgcctggcacgggctggtcctgctggcccctaatggacacggcactcgcattgcccaggcccataggatccgctttgaattccacaaaggcgcagcagagcacacgttcatgagggttgacggagagccctggaagcagccccttcccaaggacgatgacacggttgtggtggaaatctctcaccttgggcaggtcaccatgctagcaaatgagccgtgcaggtccaagagcgtcaacgaccagtcgtcactgtcgccggcgcacgacagtcatggtgattacaatgatatcgctgaggaggacgaagacgagtgggaggacggcaggaggaagtttggggcggcagatacatttaagattcctgacgagattgacattgctcatttcagttgagctttgactagtgcatcgtcgtgtgcgttctgatcatacgagtatggtttggtttataaccatctcctttcttttgatttcatatatttgcgatatgattgttgcagccatgtgtaagtgaatcctaggtaaccaagtgctgcgttgctatatatgaccaatgtatgtatagattcagtggaacggtaaaaacacgcgaactctacggttttctccttaaaaataaaaaagaaaataaaataaaaa

SEQ ID NO: 16259 - DNA, 2143 bp, Zea Mays
gtcaatgtaagaaatacacacaaaaaaaaagtcaaatcttaaaatggcgaacatgcgagcccctagaaacgatgacaaccaagagagtgcctcctgtcctcctaacatcgattttcctccggaatcgtaacctcagaaagccaaatctcattctccggcgctcaggcccacccaagcgtcgactctcccgatccaatcggtacctcctagttcctcgccggcggtagcggcgtcgggcgaacagcggtgacttggcgagggcgcttggccggcgacaatcatccactaggatggaaggtgaggcagagaccgtggttggttcttgttctaaaccatgtgggcctctggaggactactacattccagattacattctgaagccaggtgcccaacaagtacttgttgatcatgcggcaccctgccccgttgtagtgttcatcaactcaagatctggaggccaacttggaagtagtttaatcaaaacatatcgtgagcttctcaatgaagcacaggtttttgatctctcaaaagaggctccagataaggtattgcatcgtttatatgccaaccttgaaaggctgaagatggaaggagacattcttgcagttcaaatttggaggacactgaggctaattgttgcaggcggtgatggtacagctagctggctgcttggggtagtcagtgaccttaagctttcccacccacctccagtggcaactgttcctctgggaaccggaaataacctccccttttcatttggatggggaaagaagaatccttctactgaccaagaggctgtaaaatcattcctcgggctagtaaagcatgcaaaagaaattaagattgataggaaggttaccacacattccgtggaggattttggaattactttagtatgggtaaggcttcaatgttgttctcatctttattgttacacaaatgcggcaagaccattatgtacctatactatccagttgtttatttatattttttatcttgatatgtgatcctgggtagtagttcatgctacaaaggctagtgtttcgccaacccactaaggaaagtagtgcaagtctagtgagattattgttatggcatcattctctttttaattaaatctatatctgggatggatgcagaagtgtcttatgcatttcattctgaaaggaagaagaatccagagaagttcaagaatcagctgacaaatcagggtacatacgctaagcttggacttaaacaaggatggttttgtgcttctcttagtcagccatcatcaaggaaccttgctcaaattgcaaaagtaaagatcatgaaaagagctggtagcctctgggaggaacttcacattcatcacagcattcggtccatcgtgtgtctgaatttgcctagtttttctggaggtttgaatccttggggcacacctggcacgaggagagcagaagatagggagttcactgcaccttttgtcgacgatggacttcttgaggttgttggcttccgtgacgcctggcacgggctggtcctgctggcccctaatggacacggcactcgcattgcccaggcccataggatccgctttgaattccacaaaggcgcagcagagcacacgttcatgagggttgacggagagccctggaagcagccccttcccaaggacgatgacacggttgtggtggaaatctctcaccttgggcaggtcaccatgctagcaaatgagccgtgcaggtccaagagcgtcaacgaccagtcgtcactgtcgccggcgcacgacagtcatggtgattacaatgatatcgctgaggaggacgaagacgagtgggaggacggcaggaggaagtttggggcggcagatacatttaagattcctgacgagattgacattgctcatttcagttgagctttgactagtgcatcgtcgtgtgcgttctgatcatacgagtatggtttggtttataaccatctcctttcttttgatttcatatatttgcgatatgattgttgcagccatgtgtaagtgaatcctaggtaaccaagtgctgcgttgctatatatgaccaatgtatgtatagattcagtggaacggtaaaaacacgcgaactctacggttttctccttaaaaataaaaaagaaaataaaataaaaa

SEQ ID NO: 16260 - DNA, 2046 bp, Zea Mays
acacaaagtcattcgtcaatgtaagaaatacacacaaaaaaaaagtcaaatcttaaaatggcgaacatgcgagcccctagaaacgatgacaaccaagagagtgcctcctgtcctcctaacatcgattttcctccggaatcgtaacctcagaaagccaaatctcattctccggcgctcaggcccacccaagcgtcgactctcccgatccaatcggtacctcctagttcctcgccggcggtagcggcgtcgggcgaacagcggtgacttggcgagggcgcttggccggcgacaatcatccactaggatggaaggtgaggcagagaccgtggttggttcttgttctaaaccatgtgggcctctggaggactactacattccagattacattctgaagccaggtgcccaacaagtacttgttgatcatgcggcaccctgccccgttgtagtgttcatcaactcaagatctggaggccaacttggaagtagtttaatcaaaacatatcgtgagcttctcaatgaagcacaggtttttgatctctcaaaagaggctccagataaggtattgcatcgtttatatgccaaccttgaaaggctgaagatggaaggagacattcttgcagttcaaatttggaggacactgaggctaattgcggtgatggtacagctagctggctgcttggggtagtcagtgaccttaagctttcccacccacctccagtggcaactgttcctctgggaaccggaaataacctccccttttcatttggatggggaaagaagaatccttctactgaccaagaggctgtaaaatcattcctcgggctagtaaagcatgcaaaagaaattaagattgatagttggcacatcattttgagaatgcgagttccagaggaaggtccatgtgatcctattgctccattagatttgcctcattcattgcatgcgttccatcgtgtctcaagtagtgattctctcaatatggaaggttaccacacattccgtggaggattttggaattactttagtatggggatggatgcagaagtgtcttatgcatttcattctgaaaggaagaagaatccagagaagttcaagaatcagctgacaaatcagggtacatacgctaagcttggacttaaacaaggatggttttgtgcttctcttagtcagccatcatcaaggaaccttgctcaaattgcaaaagtaaagatcatgaaaagagctggtagcctctgggaggaacttcacattcatcacagcattcggtccatcgtgtgtctgaatttgcctagtttttctggaggtttgaatccttggggcacacctggcacgaggagagcagaagatagggagttcactgcaccttttgtcgacgatggacttcttgaggttgttggcttccgtgacgcctggcacgggctggtcctgctggcccctaatggacacggcactcgcattgcccaggcccataggatccgctttgaattccacaaaggcgcagcagagcacacgttcatgagggttgacggagagccctggaagcagccccttcccaaggacgatgacacggttgtggtggaaatctctcaccttgggcaggtcaccatgctagcaaatgagccgtgcaggtccaagagcgtcaacgaccagtcgtcactgtcgccggcgcacgacagtcatggtgattacaatgatatcgctgaggaggacgaagacgagtgggaggacggcaggaggaagtttggggcggcagatacatttaagattcctgacgagattgacattgctcatttcagttgagctttgactagtgcatcgtcgtgtgcgttctgatcatacgagtatggtttggtttataaccatctcctttcttttgatttcatatatttgcgatatgattgttgcagccatgtgtaagtgaatcctaggtaaccaagtgctgcgttgctatatatgaccaatgtatgtatagattcagtggaacggtaaaaacacgcgaactctacggttttctccttaaaaataaaaaagaaaataaaataaaaa

SEQ ID NO: 16261 - DNA, 2210 bp, Zea Mays
ctttcctacacaaagtcattcgtcaatgtaagaaatacacacaaaaaaaaagtcaaatcttaaaatggcgaacatgcgagcccctagaaacgatgacaaccaagagagtgcctcctgtcctcctaacatcgattttcctccggaatcgtaacctcagaaagccaaatctcattctccggcgctcaggcccacccaagcgtcgactctcccgatccaatcggtacctcctagttcctcgccggcggtagcggcgtcgggcgaacagcggtgacttggcgagggcgcttggccggcgacaatcatccactaggatggaaggtgaggcagagaccgtggttggttcttgttctaaaccatgtgggcctctggaggactactacattccagattacattctgaagccaggtgcccaacaagtacttgttgatcatgcggcaccctgccccgttgtagtgttcatcaactcaagatctggaggccaacttggaagtagtttaatcaaaacatatcgtgagcttctcaatgaagcacaggtttttgatctctcaaaagaggctccagataaggtattgcatcgtttatatgccaaccttgaaaggctgaagatggaaggagacattcttgcagttcaaatttggaggacactgaggctaattatttcaattaggttgcaggcggtgatggtacagctagctggctgcttggggtagtcagtgaccttaagctttcccacccacctccagtggcaactgttcctctgggaaccggaaataacctccccttttcatttggatggggaaagaagaatccttctactgaccaagaggctgtaaaatcattcctcgggctagtaaagcatgcaaaagaaattaagattgatagttggcacatcattttgagaatgcgagttccagaggaaggtccatgtgatcctattgctccattagatttgcctcattcattgcatgcgttccatcgtgtctcaagtagtgattctctcaatatggtagtacactctttctattgcaacttttttttgctatgaattatgtttgcttgagaaaatgacatgcaccattaccatcaaaggcatttggttaatggatttaattcaaagcttccatgatcattcttgattacttcaggaaggttaccacacattccgtggaggattttggaattactttagtatggggatggatgcagaagtgtcttatgcatttcattctgaaaggaagaagaatccagagaagttcaagaatcagctgacaaatcagggtacatacgctaagcttggacttaaacaaggatggttttgtgcttctcttagtcagccatcatcaaggaaccttgctcaaattgcaaaagtaaagatcatgaaaagagctggtagcctctgggaggaacttcacattcatcacagcattcggtccatcgtgtgtctgaatttgcctagtttttctggaggtttgaatccttggggcacacctggcacgaggagagcagaagatagggagttcactgcaccttttgtcgacgatggacttcttgaggttgttggcttccgtgacgcctggcacgggctggtcctgctggcccctaatggacacggcactcgcattgcccaggcccataggatccgctttgaattccacaaaggcgcagcagagcacacgttcatgagggttgacggagagccctggaagcagccccttcccaaggacgatgacacggttgtggtggaaatctctcaccttgggcaggtcaccatgctagcaaatgagccgtgcaggtccaagagcgtcaacgaccagtcgtcactgtcgccggcgcacgacagtcatggtgattacaatgatatcgctgaggaggacgaagacgagtgggaggacggcaggaggaagtttggggcggcagatacatttaagattcctgacgagattgacattgctcatttcagttgagctttgactagtgcatcgtcgtgtgcgttctgatcatacgagtatggtttggtttataaccatctcctttcttttgatttcatatatttgcgatatgattgttgcagccatgtgtaagtgaatcctaggtaaccaagtgctgcgttgctatatatgaccaatgtatgtatagattcagtggaacggtaaaaacacgcgaactctacggttttctccttaaaaataaaaaagaaaataaaataaaaa

SEQ ID NO: 16262 - DNA, 1896 bp, Zea Mays
aatgtaagaaatacacacaaaaaaaaagtcaaatcttaaaatggcgaacatgcgagcccctagaaacgatgacaaccaagagagtgcctcctgtcctcctaacatcgattttcctccggaatcgtaacctcagaaagccaaatctcattctccggcgctcaggcccacccaagcgtcgactctcccgatccaatcggtacctcctagttcctcgccggcggtagcggcgtcgggcgaacagcggtgacttggcgagggcgcttggccggcgacaatcatccactaggatggaaggtgaggcagagaccgtggttggttcttgttctaaaccatgtgggcctctggaggactactacattccagattacattctgaagccaggtgcccaacaagtacttgttgatcatgcggcaccctgccccgttgtagtgttcatcaactcaagatctggaggccaacttggaagtagtttaatcaaaacatatcgtgagcttctcaatgaagcacaggtttttgatctctcaaaagaggctccagataaggtattgcatcgtttatatgccaaccttgaaaggctgaagatggaaggagacattcttgcagttcaaatttggaggacactgaggctaattgttgcaggcggtgatggtacagctagctggctgcttggggtagtcagtgaccttaagctttcccacccacctccagtggcaactgttcctctgggaaccggaaataacctccccttttcatttggatggggaaagaagaatccttctactgaccaagaggctgtaaaatcattcctcgggctagtaaagcatgcaaaagaaattaagattgatagttggcacatcattttgagaatgcgagttccagaggaaggtccatgtgatcctattgctccattagatttgcctcattcattgcatgcgttccatcgtgtctcaagtagtgattctctcaatatggtagtacactctttctattgcaacttttttttgctatgaattatgtttgcttgagaaaatgacatgcaccattaccatcaaaggcatttggttaatggatttaattcaaagcttccatgatcattcttgattacttcaggaaggttaccacacattccgtggaggattttggaattactttagtatgggtaaggcttcaatgttgttctcatctttattgttacacaaatgcggcaagaccattatgtacctatactatccagttgtttatttatattttttatcttgatatgtgatcctgggtagtagttcatgctacaaaggctagtgtttcgccaacccactaaggaaagtagtgcaagtctagtgagattattgttatggcatcattctctttttaattaaatctatatctggtgagttcttaagcagataacaaattaaagaattcaggcactagagtcaaacatgatgatcatgacttgacatgttgcagggatggatgcagaagtgtcttatgcatttcattctgaaaggaagaagaatccagagaagttcaagaatcagctgacaaatcagggtacatacgctaagcttggacttaaacaaggatggttttgtgcttctcttagtcagccatcatcaaggaaccttgctcaaattgcaaaagtaaagatcatgaaaagagctggtagcctctgggaggaacttcacattcatcacagaacgaaaccagcgcacatttgcgcccagggaagccctccacgtcatcatgatgcatatcatccgtaggatcttgatcgaacagtaagacctttctcgaagattgtcctcagtcctctgctatataaaaagaagaaaatgagtggagtctcacatcgtaccagtctgccaagcaaacagtctgccaggcaaaataccaaag

SEQ ID NO: 16263 - DNA, 1449 bp, Zea Mays
aatgtaagaaatacacacaaaaaaaaagtcaaatcttaaaatggcgaacatgcgagcccctagaaacgatgacaaccaagagagtgcctcctgtcctcctaacatcgattttcctccggaatcgtaacctcagaaagccaaatctcattctccggcgctcaggcccacccaagcgtcgactctcccgatccaatcggtacctcctagttcctcgccggcggtagcggcgtcgggcgaacagcggtgacttggcgagggcgcttggccggcgacaatcatccactaggatggaaggtgaggcagagaccgtggttggttcttgttctaaaccatgtgggcctctggaggactactacattccagattacattctgaagccaggtgcccaacaagtacttgttgatcatgcggcaccctgccccgttgtagtgttcatcaactcaagatctggaggccaacttggaagtagtttaatcaaaacatatcgtgagcttctcaatgaagcacaggtttttgatctctcaaaagaggctccagataaggtattgcatcgtttatatgccaaccttgaaaggctgaagatggaaggagacattcttgcagttcaaatttggaggacactgaggctaattgttgcaggcggtgatggtacagctagctggctgcttggggtagtcagtgaccttaagctttcccacccacctccagtggcaactgttcctctgggaaccggaaataacctccccttttcatttggatggggaaagaagaatccttctactgaccaagaggctgtaaaatcattcctcgggctagtaaagcatgcaaaagaaattaagattgatagttggcacatcattttgagaatgcgagttccagaggaaggtccatgtgatcctattgctccattagatttgcctcattcattgcatgcgttccatcgtgtctcaagtagtgattctctcaatatggaaggttaccacacattccgtggaggattttggaattactttagtatggggatggatgcagaagtgtcttatgcatttcattctgaaaggaagaagaatccagagaagttcaagaatcagctgacaaatcagggtacatacgctaagcttggacttaaacaaggatggttttgtgcttctcttagtcagccatcatcaaggaaccttgctcaaattgcaaaagtaaagatcatgaaaagagctggtagcctctgggaggaacttcacattcatcacagaacgaaaccagcgcacatttgcgcccagggaagccctccacgtcatcatgatgcatatcatccgtaggatcttgatcgaacagtaagacctttctcgaagattgtcctcagtcctctgctatataaaaagaagaaaatgagtggagtctcacatcgtaccagtctgccaagcaaacagtctgccaggcaaaataccaaag

SEQ ID NO: 16264 - DNA, 1663 bp, Zea Mays
cgcactaccacatgccacacccattactcgccactacatactcttgcatcgcatgcccggccgcccctcactcactctttctctctccctccccccctctctctctctctctcgctccaccacagctatctactatacctttctagcttagctacatacctaactaaactgccaagaatttggccaaagcaagatctcaatcccatataacacatcgatcggaccccgcccatgtatctgtagatagatagatatagatcgatatggcagatcaccagatgatccacccaccagctgctgccaccacgggcagcaagactcacggacatgccggcgattggtggaccacgacggtgtcgtgctcgccggaccagctacctgatggattcggcggcgccggctggtcgtctgctgcagctactactgcagctgaaggcaacaggtccaggtccggcaacgcggcagcctcctcggagtctcccggctccatccactcgctccccaccgccggcagctccataaccttccaggagtctgcagtcggcgccgccgtcggcgatcaaggcgtggtcgccatgccgccgcacccagtggcgtctggtcacgccggcagcagctggaaccagccttcttactacttcgaccagcaggctcatcacctcagtctgaggagcccctcatcgaataacaccagcacgatggtaccggactcccaccacgacgatccaaaccaccagttcctgtccaaccttgggctggagctgctctcgtcgtcgccgacttcgtcctccggcgggttccggacctcctcctcactgctcagaagcctcacggagccatcggcagttgccacgggcttccagcagtaccagcagcaggcggtgaaccaagcgccgcctgaaagcatcagggacgacgctctgcagttcgttaatagcacgccgttttggagcgcctctgccgtgtttgcttccgcggcggagggggctacaagccgcttaccagcgagtgccgccggaccaccgtccgcgcagtctatgccggcgaattttgcagtcaagagcgcattattagaaggtgcccgcggagactccagcagcatcactgcgaataagacgagcaccgatccaacgccgcggctaaaaaaatcgaggacagggacaccgtcaccattgcctgctaccttcaaggtgaggaaagagaagcttggtgacagaatcacagcgcttcagcaactagtctccccttttggaaagtcactcagtgttccttacctaaagaagaataggcagcaagaagtgccccctcacaaggtattgtgggacggaggtggtgaggcagcgggagcaaatggagaactcactggccgagggctgtgcctggttccgatatcgagcacctttgcggtggccagcgagacgacgacgacgccgccgctcgacttctggacaccgtttggaggccctgccttccggtagcagacgtgtagtatcatccgggagctggcttttactaattacaataatttgacagttgatctagctgtagtcacaatagatcaagtcctaactcacatcgtataatgcagttactagtgatcatatatatagcaatctatatatggctgacgttatggagtatatacaacaaaataaactttggc

SEQ ID NO: 16265 - DNA, 1807 bp, Zea Mays
gttgggatgaggacgaggagggggaggaggagcacccgcaggacggtggaggagacacagcaggatgacgacatccagtagcggtggagcagtaggccgatgtcgatgcggcgcagtaggacgacaatgatgctcaacaggaaggctcaggttctgacgccttaggttcgaggaacatctaactgcgaggtcccgcgagtttccctcagcatcccatacatagtgataggcggccactgattccacccgatgggaagaggcacataactttagatattcttgctgtttgctcatattatgtgttcaaattcataatataaactaatactttttacttatcacttgggcaggtcttggaaggttgtggagaatgcaaggggtcacggtcgcaactccaatggcatcctcggccttctgtgcagggaacacttccctggactggttgagtacgttggagtaacgggcctagcctacaccttcaaccactatgtcgtcgcttccaatgcagtacaccaagacgatagggaattcaacaagaaggcggagcgggtgaagcaagagatgtgggtaagtcttcctacattgtaaaatatgtcgcattcgttgcacagccttgaaataagtctttgtatgcaggatttcttcagatgcgaggctagatacgaggctagggcagatgtggtggctaccacgagctgtaagatgctcatcgtggatatgcactacaaggcgcaaatctaggccatcgtcagctaccatggctccgtccttggggaaaaggtgaccaagcagcacgcatgaaccatttcattgactggggaccaatacttgcagatgattccttattggtgcaccacacatcctcagtgccgagagcagatggtggataagtggtgctcgcctgagtgggacaaggcgcacaacgctagccgggaacgacgtctgatgatgcaagatctctcccaccaccaaggcagccgcaacctcggcaaatatgttgaagcatgggtataccctatttttgtttaggtatataacactggattagatatgatttctaagtatctcgttggttttcttgcagttggcgtcacatggtggctagccttgctccatcttctcagcttatggtatggcccacaagggcaaggcgacgtccgacgtcacctacaacccggatgatgggcccgaggcgtatagcaaccccgccgtctatagccgcctaagtgaatacactgccatggtgtcactcccggttttggaaggcaaaccgaatgcgaaccatgtatgtgccgagatcagaaattcacgtacacatcgattacatagttggacatcatcgcacattgctcaaaataaatagcggaaatagtacattattacatcaagatgtccaagacatccacagagtcattaacttaacatagtcatcaacataatcaaagtgcagaataagaaacgtagaggataaggccttcacaggcagttgactaggggtttgccactaaacatgactagaactcatcgtagtcctgaaactcttcaaagttctccatgttgccttcatctcctcctgagcactgattgcaatggggacaacctaggggttggggggtttaaagcaagggtgagtacacattaacgaactcagcaaatgtcatgtttggctaaagtggacaagctgtatatggggttaagcttaaagcagttgctttagttggttaggtatttattactagcataaaagccaagttttagtaataaacccaagttattacccaaaagtactccctccaagaggaaatac

SEQ ID NO: 16266 - DNA, 933 bp, Zea Mays
gaaaatcccaattttgtcgtgagagagagcactgccgagaaggagagataaagccgctgtcgtcagggcgaatctgtgctcgaggtgtctcgtcatttcgtcaagggtctgcgggcacctccatgtggagttcaggggccgtggacggtcagagctcggtatatttctcgttggagattgaatctaccgtagaccacgattctccatggtcaggcctctgtacatcgtccctgccgatgagtagtgatcgaggaacccagaagtcaacaggtggaaacctctaagcaggagctcgctgaaggcaagttgtgtccttgataactcttctttacctaataatgttcctgttaatcagtatggtcttcttaggtgaattttgatgggacccaataggtcatcatagtttggtcttctttataccttgtttaacactaaaatttgggtagtatatgttattgctctgtgtggttttgggtgttaagattcacattattcatgatcatgttgtttgttgtcaatgagttattactattcatgataagatcattatgttaattggaacatagagcgatcaccggtaaaacagtgacaccataagggtggtatgggacgcccttggctgactaattaggaaagctagcggaggactaccttacccgaaaggggcaagggtggtaggggagttgtcggtatatggaggttttcgggttgactatgttgtgatggattttcagacgggggattcctacatcgatctcctcattgtagtgcattttctgaagctagtggaactttgtaaaggctttgtagtgctaccctgccttgtctcctcagtagagatgaatgggaaagtcgctatcccttggcaaatgggtaacacgacttgtgggtaaagatgtgcaacctctatagagtgtaaaactgatatatcat

SEQ ID NO: 16267 - DNA, 3788 bp, Zea Mays
ccaaaccgcccgctccgatcggcggacgcacacgcacccactgtggaagaaccgttgagctgagccgagcagggagaaggacgcgagagcagcatggagacggcggagaggggcatcaccgtgtgcgtgaccggcgcggggggctttgtggcatcgtggctcgtcaagctcctcctctccaccggccgctacaccgtccggggcaccgtgcgtcatctcggtgatggcaagaatgcccatcttaagacactggaagatgctgaggagaggttgcagttggtcaaggctgacatgctggactatggcagcgttgcgtccgcggtcgccggctgtcagggtgtcttccatgtcgcgagccctgtcccctccggcaaatcctccaaccctgaggaagatgtcatagctcctgctgtaactggcacactgaatgtgttgaaagcttgctatgaggccaaagcgaagagagttgttgtggtatcttcagtggcggctgtgttcaataatcctgactggcctaagggcgaggcctttactgaggatagctggtcagatggggaatattgcagaaaaaatgaggaatggtatttcctttctaaaacattggcagaacatgaggcttttgcttatgcagccaaaactgggctagacattgtaactatttgcccatcattggtaattggacctttgttgcaacctgcagtaaatacaagtgttaaagtcttcctcagttatatcaaaggagatcaggagatagttaaagatggacccaaaaatcttgtggatgttcgtgatgtcgctggtgcccttctgttggcttacgaaaatctgcaggcatcaggacgatacctctgcagttcaccagcaataagagtctctgatattgtaaacatactgaagaccgaatatccaacatacacttaccctcaaaaattcgttgaagcggaaggtagcaacacatacaacacggagaagcttcggaagctagggtggacctctaggcccatggaggacaccctccgagacagcatcgaatgctacagagctatgggcatcctgaactgagcttcccttcagctttgggctttggctgctgctgctgctactacttttcagtttctttcttcttcatttcatacgagggcctcaatcgtatattggattagacagaaaaggctaatcttactacattagtctgcaaattacaatcattttctactgctgccgtggcagcgtcgggagtcgaaactaccattaggaaaccctatgaggctatgacacctaattagcgacaattgtttcagcctgcaatcatctgcacaattaacataaccaaatcatatttgtttgtttagagaactaagttcagaacttcagatcaagatgtaattgctttgctgttatcgtctatttgctacattcaggcagactgctgctgctcctcttcggggggctctgccgcttgcccttgcggcgtctgccacatataagtcactgggtgaccctgctggccaccatacatcatacctgctccttgcacctgctgagctggcacatagtaatatggatgagaaccatgatcagctggagcccccatagcaggcggcaggccaactatgggattatgtccgagcccctcctctttcatttcatccctcgggattatgtccaccaggaagtcatatatatcagtcctggtgatggcagctgcaatgtcgttcttctgcaaggtccggcgcttgttctcctctgtgtgcatccatgacctcaatgtcagctctaatatgaatacctcgcatgccttcgcaaacacaacaggagcttctgcagagatcatccgcacatcctcatcagccttcattatcttctttatccttgcaagtggcaaggtgtggatcttgaagtcatttgcttgcttgatctcatccatctgggtagtccagaactccctgagctgttgttcctgctgttgctgaagttgttgatgaaattgctgagcctgctggtacaccatctggtgctgagcactgagttgagttggattggggaatgctgctgctggctgtgagccaggaggaacagcaagagatccaggtactggcacatagggagcagcagcaggataaggttgtgacccaacacccatcattggttgaggctgtgaggatggttccatgctagatctttgttcaaaatcaataagtgtcctgacccttggaaaacaattggaaatttgatcattttttccatccagataaacaagaaagactacaaaattacaggttataacacataaaaatgcaaaagatgtatttcaggttacaacactaaaaattctcagatctatgttgatggatgggattgggaatgccttttgtgtatgaaaaaaatcactggcctttatcttatttattcttgtagcttgaacgctactcttgagagcagcaaataatctaactgaagttacaaaagatgcttgcttgtaaaattccatcttaagcaaaaatccatcttaaagcaactgcagtggtgcaatagcgcattggtataacattttatcctggtggttgatttgggtatcacaaacacagaaacttccattaaacatggaacaaacatatggttacattgaacaagtgaaatcaaaagggagcgtatcctcaaagaataaacagcaactggtaaacagcaaggtagacaagatttacttttcttaaaaaaatcacaacatctattaacgttgtccctagttccctataatgcatgacaggaccgcaaaattacctttcatgctcccactttcaataatttaaaagtaggtatttgcacaaccagtcagtccctgccagtattggtcaaacaggttacggatattgcaaattgctttgatgatggaaaaaacaatttagtttgatggttgactttccattactctgttacagatagcaaaggcatatttaaagttttcataataatctcttttcaaaatcagataacggaaatgaggtttaaagttttcaaagtaatctcttttcaaaatcacttacaaaaaatgaggtttagtatgttctgcacataagcttaagctgggctacaactacctaaataaaacctcttaaataacatggtgatttggtggtttcctgggtagttggcttaagtggagtaaagctgacatgaacatcgcactgtgaataactcaacatcttccaaaaatcaatttcaatagacgcattggagcaaaatttcgcttgtaaattaagatttacgagatgaggggtccagaatcaaattaatcatcacatctaagatcattaaagggcaatcccgacccagtgttggaggctcccacatgagaggggtctgaaaaaaggataaaccaaagcaagccttctctcgcaaatgtgcaaatgtggagagactgattcgaacccgtgacctggtgactcaatgagacagctctcaccagtgcaccaaacgttgcagaaacgtaatccatctgcaatctggaactagcactcagaaaaagtacttaattcccatgtcacacttacagaaattacttgccaaacttaagataacatgcatgccattagttacaatattatgaaagatagcttaaagctcaaattctattaaggtgggtccttgctgagattggatgtgctagcgatttcatatgggacatatgacgatgtatagcaaggcattacccaggtctcctttccctacataggcacaaacatgattcgatggctgaaaggaatattctcgattcttgggagtacatg

SEQ ID NO: 16268 - DNA, 1876 bp, Zea Mays
gtttggtcctaccctggtgaatttaaaagcaaagatgctgctggtcaagttcgtggttcccctaatgaatttcctgggattggtgctacatctcctcttctttggttaactagagggtttgtgattctgtctggtccgacaatcccaattatcggtgaaggcgatgaagaggccaatgacagatatgtggaacaactagtagtgcaagtgacccaaacttcttcagtgagagtcagaccgattcttcaatgccttgaaagcattgtctcctttggtaatacttccttttgagagccatgggtactctgccaaggagagtatcatgcacgtcctctaggagactgataggtggttgcagaactaccgtgtaaatggtactagcaaggttgactcagtgtcagaggctaacagtaaaaataaaacattgtcagctaatggtggcagtgtagcccgtgaaggtctaaaccctgaggaactctcatcattaccaagatcgcttctgtggtaaattttttccttggttgctgcttctcaagaagaaaaaagatacacttttctgtttgtttgtctgttgggttaattggcgctcctgatattgaccgtcgtaaggcgtcagttgtacccagtctattttggaccttgttcctttctatttttaatataatgatacacagctctcctatgtgttcgagaaaaaaagatattgtcttatgtagtatttgtgatacctgctttaaagctcactatacagactgaaaaaaaatctcatctccttaattatcttatatcaaagttcccacacggagcaggttctgtttatatggatttttgtatgtaagattgcattgttcttttgtatgaggctgcatatggcgaggcgatgtctagtcagcacagaccagactatgattggaggatctcacctattgaaccacaggttgtgtatgcaagtggtggaaaagctcatggaaggtgagggttcagcgtggaggttcatcgaggcctgctgctcgtagctcccgtcgctccactcaagatccagcagaagtggagcaactacgagaagaacttaggcgacatcaggattacttgaagcaacaagctgcgcaacgtgaatattatgctacacagattcaacaacagcaaacactcatacaacaactagcacaggcccaagggatacacgtcccgatgccccctccaccacctcccgttcattatccttggtcttcacctccacctatacctacatatccatctatcgaacatcagaccccttcagctaccttgtcgatgcatgaacaagaagacgggttagactttgtcaaaaccctcttcactagtggaggtatcgaccatcactcgtcactgtaacccgatggtgatcggcgaccgtgagcttccatgttattgtgttctgatacttgagacttttattatgactatgtatgagatattgtctcttattagtactggatgatgagatgtgtcttattatgactatggatgagacttttgtgatgtaattgatgagactatggatttaaatattgttatgagattgtgtgtgagatgttttatgtgaaaatatggtgttctatataactgttgatatatttgttatgttgtggaatgtggtgtaaaataaaaataaacagcatttgtaatgctggtcaaattaacttcctagaggcttattgggtcgtaggaagttagccagctaactttctagaggctacagtcagccgtaggaagttagccagctaacttcctaggggctacggtcagccgtaggaagttagtcgtaggaagttagtcagctaacggtgctgacggcgtgaagctactaacttccgagaatctactaacttccgag

SEQ ID NO: 16269 - DNA, 1468 bp, Zea Mays
gtttggtcctaccctggtgaatttaaaagcaaagatgctgctggtcaagttcgtggttcccctaatgaatttcctgggattggtgctacatctcctcttctttggttaactagagggtttgtgattctgtctggtccgacaatcccaattatcggtgaaggcgatgaagaggccaatgacagtcagaccgattcttcaatgccttgaaagcattgtctcctttggtaatacttccttttgagagccatgggtactctgccaaggagagtatcatgcacgtcctctaggagactgataggtggttgcagaactaccgtgtaaatggtactagcaaggttgactcagtgtcagaggctaacagtaaaaataaaacattgtcagctaatggtggcagtgtagcccgtgaaggtctaaaccctgaggaactctcatcattaccaagatcgcttctgtggctgcatatggcgaggcgatgtctagtcagcacagaccagactatgattggaggatctcacctattgaaccacaggttgtgtatgcaagtggtggaaaagctcatggaaggtgagggttcagcgtggaggttcatcgaggcctgctgctcgtagctcccgtcgctccactcaagatccagcagaagtggagcaactacgagaagaacttaggcgacatcaggattacttgaagcaacaagctgcgcaacgtgaatattatgctacacagattcaacaacagcaaacactcatacaacaactagcacaggcccaagggatacacgtcccgatgccccctccaccacctcccgttcattatccttggtcttcacctccacctatacctacatatccatctatcgaacatcagaccccttcagctaccttgtcgatgcatgaacaagaagacgggttagactttgtcaaaaccctcttcactagtggaggtatcgaccatcactcgtcactgtaacccgatggtgatcggcgaccgtgagcttccatgttattgtgttctgatacttgagacttttattatgactatgtatgagatattgtctcttattagtactggatgatgagatgtgtcttattatgactatggatgagacttttgtgatgtaattgatgagactatggatttaaatattgttatgagattgtgtgtgagatgttttatgtgaaaatatggtgttctatataactgttgatatatttgttatgttgtggaatgtggtgtaaaataaaaataaacagcatttgtaatgctggtcaaattaacttcctagaggcttattgggtcgtaggaagttagccagctaactttctagaggctacagtcagccgtaggaagttagccagctaacttcctaggggctacggtcagccgtaggaagttagtcgtaggaagttagtcagctaacggtgctgacggcgtgaagctactaacttccgagaatctactaacttccgag

SEQ ID NO: 16270 - DNA, 784 bp, Zea Mays
gttcgagctgtggcggactgcccgtgaagcgcggggagaagctcaaactccaacgggttttaataaaagtacgtgtgaatgggttgccctgcaaggatattaaggatgtcaaggtcgacgacttcttcctagcagccgacctcgacaagccaagggatacgacgatgagcaaggtcaagtcaaatgtcacattgatcaatgtgatgaagctggccggcctaaacaccttgggcatctccatggctaggattgactatgcccctcaaggacagaacccaccacatacgcatccccgtgccactgagatcttaacggttcttgaaggatcactctatgttggttttgtcacatctaacccagacaacaaattcattagcaagctactcaacaagggagatgttttcgtgttcccccaaggtctaatccactttcagttcaatccaagtcatgataagccagcggttgccattgccgcactcaacagccaaaaccctggtgccattaccatttctaacgctgtatttggatcgaaaccaccaatcgcggacgacgttcttgccaaggcatttcaggtggacaagaaggttgtggattggctccaagctcagttttgggaggacaaccataactaagtgaaggaggctattgccattgtttttacacaccgatgtaataagtaacaacactattttcattcatttgtttgatgtagcaaactgctatataccttttgacatacatatgtattttgttaaaatgtcaaatgaccacagttataaacgtg

SEQ ID NO: 16271 - DNA, 2055 bp, Zea Mays
atgacagacagaccagattatgctatggacacagattcttgtgatgcatgtttagtatttacaggaggcattgcccaatgtggatccatagcggctcccactcagaacagcccgaaggtgttctcgccgctgtacgtcatgtagaggaagccgtcctcgtccttgttctcctcgtagatggcggacatcagagcagctgcagggacaacaacgttacgggcggggggcaccgtggtaggttttgttttatttttccccaacactggtatgacaacagaaggaactactgtccggtacctgttggtgggagggtgttctttacgaagatgaagattgccttctcagcgctgagcttgatccgcttccgtaccacatacacaaactgtccgactgtgaggtcggcaggaacaaggtactcgtgaaatggctgactttttcttgtcaatgtctgggatgtcactcctctcggccttctcaacaatgacctatattacaagaaagcaggtttgaatgaacacaaaagctatcatggaaataatcagaggacatgggtaaaaattaattaaggcttacagggattctgtcagggtatttctccctgatgcggttagcctcagcttgcctcctttctgcgatataaaacatatgtacaaatgtataatgagaattctgtcattctaagataaaagggtatatgtacatctgtataaagaaaccaaaagatctacatgagacaggcaagtggtgaataagaacaagctaatggtaagacatgcacagaaacagaccacccattccctggatgtaggtacagcctaaacctactaagattgaagataaataaatggacactggagagttacaggttgtgtgtgcgtccagaaaatttagcaattaagtgtaccaaatacagaggaaggaatttactagttgctagagtttgtataaactctacatgatcatgtattcatgttacactgctacaagccaagagtggacccaagcgcaggcaagcttgggcaaagctatataaacttatagtgtgagtactatatttgcccaagatttctgggcccgccactgcttcaagcagagaattgatctgagtcagaacaacaaactacaaattgtgggtggcctagcaaatttgaaacgcaaccttcatcaagttccatcaatccagcctacagattactacgagcagtccggcaaacctgcagattctaagatgaatgggtacatgtacatctgtataaagaaaccaaaatatctacatgagacaggcaagtggtgaataagaacaagctaatggtaagacatgcacagaaacagaccacacattccctggatgtaggtacagcctaagattggagagttacaggttgcgtgtgcgtccagaaaatttagcaactaaagagtaccaaatacagaggaaggaatttactagttgctagagtttgtaagaactctacatgatcatgtattcatgttacgctgccaagtgcaggcgagcctgggctcttgcccagactcctccattagtgctaatgaacttgtaaacgtgtttaaacatggttaaaaattaggcgaagctatatgtttatagtatgagtactataattgcccaagctctctaagatttctaggtccgccacagaacaagcagataattgatctgagccagaacaacaaactgtgggtagcctagcgaatttgaaccgcaagtccgcaaccttcatcaagttccaacaatccaggctacagattactacgagcagtccggcaaagctgcagattctagctcaacctagaaaccaaaacaaaagaatctaaccaccgcaggatcgcgaaaccctgacatggtagcacaggccaatacccgacaaagtttcgctttattaacctattaaaattcaacggatcgtttgctggatgggtccgcacgcggcagcgtctaccagtactagcctgaggaccgaggccctagcacgagcagcagcaacaacaagttaaccccgttgatgaggggatcggaaacccgagagacgaaccgaa

SEQ ID NO: 16272 - DNA, 1379 bp, Zea Mays
gagaaaataataattaaaaaaaagcagtgaaccttctcgcgctcggcagttggcagtcctgtcctgtggaccgtatgacgtgtttatttatgggcggcgccttcgtctccactccccaccggaggaaggaagcgagaagaccagaaggtgagaagagagagagagagtgtgtgtgatcggtacaaggatcaccgctgtgcctgcgcgtgctgcttcaccgaatcgagtcagatcctgtccgaatccgagctaagggatggcaaccggtagtgaagcctcgaaggcagctgaggctgtggttgactggcataaacacgacagcaagaggatgctccatgcggtttaccgtgttggggatctggaccgcacaatcaagtactacacggaatgctttgggatgaaactgctgaggaaaagggatgttcctgatgagaagtacaccaatgccttccttggctttgggccagagaacaccaactttgcagttgaattgacatacaactatggcgttgacaagtatgacattggaacgggctttgggcatttcgcaattgctaatgatgatgtcatgcttcgtgttggtgaccttgagcgttctatcaagttttatgagaaggccctagggatgaagctcctaaggaagaaggatgtacctgattacaagtataccattgccatgttgggctatgctgatgaggacaagacaactgttctggagctgacgtacaactatggagtcacagaatacagcaagggcaatgcatatgctcaggttgccattggcaccaatgatgtgtacaagagcgccgaggcggttgatctggcgaccaaagaactaggtggcaagattttgcggcagccagggcctctacctgggatcaacactaagatcgcctcttttgttgatccagatggctggaaagtggttctggttgacaacaccgacttcctcaaggaactccactgaaggctcgggatacccaggtgctgtgctaggatgtagtaatgcttgtctgtggtgtaataagatgtgggtggtttgtttctgccctgatgaacttataatactgaatgttgctacagaggttgtgcttctgccagtgaggtttgggatttgctatgtaactgtgcctgcgggctccgattctggcgctgttcgtacactgtagaagccagtgaatcccaataaacccagcttcacaggctcctcttatcccgtagaccctagttgtttttgggtggagctggagccactgaccctagtcctttttttttacccgtttcatctcatgcatccacattcaataggaggtagcagacttacccattgcctgcttattgatgctaaacaaagcgatctgaagatcgtgtaatgcctg

SEQ ID NO: 16273 - DNA, 1442 bp, Zea Mays
gagaaaataataattaaaaaaaagcagtgaaccttctcgcgctcggcagttggcagtcctgtcctgtggaccgtatgacgtgtttatttatgggcggcgccttcgtctccactccccaccggaggaaggaagcgagaagaccagaaggtgagaagagagagagagagtgtgtgtgatcggtacaaggatcaccgctgtgcctgcgcgtgctgcttcaccgaatcgagtcagatcctgtccgaatccgagctaagggatggcaaccggtagtgaagcctcgaaggcagctgaggctgtggttgactggcataaacacgacagcaagaggatgctccatgcggtttaccgtgttggggatctggaccgcacaatcaagtactacacggaatgctttgggatgaaactgctgaggaaaagggatgttcctgatgagaagtacaccaatgccttccttggctttgggccagagaacaccaactttgcagttgaattgacatacaactatggcgttgacaagtatgacattggaacgggctttgggcatttcgcaattgctaatgatgatgtgtacaagttagctgagaatatcaaatccaagggtggtaagatcacccgcgaacctggtcctgtcaagggaggatccactgttattgccttcgcacaggatcctgatggctacatgtttgagcttatccagagggctgacacacctgagcctctttgccaggtcatgcttcgtgttggtgaccttgagcgttctatcaagttttatgagaaggccctagggatgaagctcctaaggaagaaggatgtacctgattacaagtataccattgccatgttgggctatgctgatgaggacaagacaactgttctggagctgacgtacaactatggagtcacagaatacagcaagggcaatgcatatgctcaggttgccattggcaccaatgatgtgtacaagagcgccgaggcggttgatctggcgaccaaagaactaggtggcaagattttgcggcagccagggcctctacctgggatcaacactaagatcgcctcttttgttgatccagatggctggaaagtggttctggttgacaacaccgacttcctcaaggaactccactgaaggctcgggatacccagaggttgtgcttctgccagtgaggtttgggatttgctatgtaactgtgcctgcgggctccgattctggcgctgttcgtacactgtagaagccagtgaatcccaataaacccagcttcacaggctcctcttatcccgtagaccctagttgtttttgggtggagctggagccactgaccctagtcctttttttttacccgtttcatctcatgcatccacattcaataggaggtagcagacttacccattgcctgcttattgatgctaaacaaagcgatctgaagatcgtgtaatgcctg

SEQ ID NO: 16274 - DNA, 2133 bp, Zea Mays
gttccctcgtcagtcgtcatccattcccaacacagatgcaaaacggggagagaccgggtttataagcagatagtcgaggaaggagaggttctccacacttcacctcgccgataaggctgccgcgccctccctcactcccgcggtcctgctccctatggagtcggcggcgattgggtcacagtctccgctctccttcccctccagcctctgcaaaggaaaagtatcatctagtttatcaatatacaatgtgaagatcaagagcaactgtaggcttgaggtggtttgccatgggatgttagctacaagaaagtttatgcaaaggaaaaagaaagaagaagttttcaaggatggtgctgatgagaccgagcagatgaattggaggagaatgatgagagagatagagcaggagggatcagctgtacccattctgaagacccagcgaaacaggaaagagccacttccacgggatgttattcttgggactcttattcggttcaaacaattgaaaaagtggaatattgtcagtgagattcttgaatggctcagaacacagcattggtgggacttcagtgagatggacttcttgatgcttgtgaccgcttatggaaagttgggggattttagcagggcagaaagggtcctaaagtacatgaacaagaaaggttaccagcctagcgttatatcacagactggtctgatggaggcttatggaagagggaagcagtaccgtaaggctgaagcagtattccgtaggatgcaaacatcaggccctcaaccatcacctgtgacatatcaaattattttgaaatctttagttgagggtgacaaatataaggaagctgaagctatatttgaagaccttcttaatgaaaaaagaacttcttttaaaccagaccagaagatgtttcacatgatgatttatatgtacaagaaagctggtgactatgcccaggctcgtaagctatttgcacagatgtcggagagaggaattccactatctacagtcacttttaatagtttgatgtcatttgagacagaatacaaggaagtttcaaatatttatgatcagatgcaaagagctggtctgaaaccagatgttgtgagctattccctgctcatcaaagcttatgggaaagccagaagggaagaagaggcattggcggtttttgaagagatgcttgatgctggagtcaggccgacacgcaaatcatataacattttgcttgatgcatttgcaatatctggattagtagaggaggctaatacagttttcagggcaatgagaagacacaggattaaagaggatggtctgaagcccaacgttgtggtttatggcactctgatgaaaggctattcaaagttaaataatcttgagaaagttatgcgtgtgtatgagagaatgcggatccagggtgttgaacccaaccagactatatataccactatcatggacgcacaaggcaggaactcggattttggaaatgctgtcatttggttcaaagaaatggaagctcgtggatacccaccagaccagaaagcaaaaaatatcctactttcgcttgccaagacaccagaagaggaacaagaagcgaatgatttggtagggaatggtccagttcagctggaagtgaaacctgatggagaggtggatggtgacgatgggcatgaagttatacaaactgatgccgaaaatcaccgtttgctagacgacacacgagcaagaaatcatgtaaatggtaggatcagagctggtgatgactataattttgatgaggaggatgatgatgacgattacgaggaagaggaggatgaagagttcgatcttgtttctttcaaagataagagaaaactgaattttgcaagttgatgtcataaatctttgtgtatatttttatccaacaaacacatcatcgcatgatggcctttcctatacagagactaacttgaaatgttagtagagtttggctcgaaccttgaaagatgtttctgttagccttgtcttttgaaggaatgtaatttaaggcaggacaatagtggatctgtggcgctggtagtttatcagggcaaggcattatatttatattacttatttacttattatttattaaaacttactcgtgcttggaggctcct

SEQ ID NO: 16275 - DNA, 1263 bp, Zea Mays
atttttctcacctatgatcctaacaattgttatctagagttagggttagacacacagtaaagccgtcgccgctggttattcgtccaacagattgcgctgctgccgccacacgtaagatctggttcgacgccgttctccaaatccgcgtgcgtggcgcgcgtcttgtgagcgccgatgggcgccttctctggtggaggcgaggcctcatctgtcaccgtcttctcacgtcttctcagtgctgctgtgcttgtaaccgagtgttaaaacagctcgttgttttgggatttgccgcctcaagtttcatctagctacctccaacaaaccctttaatctccatggctacatcggacaagaaaacaaggggctatgttccttggaatgatgagatggataaggtactccttgatacatttgtggactattacaataaaggtgatagctgtcagaatgggtggaagtctcatgtatacatagctgctgtgaagaatgtttgtgagaagtgtaatgtcaccattacaaaggaaaatattagctctcgcagcaagacctttgataagcactacaatatcattaatggtttggtgtccactagtggttttggatgggattgggagaagaacaagctcaaagtttatagtgacactatatgggatgagtacgttgagaggaataaggaagcaaaaggatatagacataaggttgtgaagttttgggatctactcagcctagtgtacaataaagaccaagcaaatggagagggtgctaaaatagcagctaaaagttcaaaggaaatggcaaaagataatgataccgtatgcaaggatgcttcatattctgtatcttcctcgagtagtctaaaaagacaaagatcagatgattcatttaactctatgtggtgtgataagtttgacatgcttacatctgcattgaaagatgatggtccaaagctaccgtcttccgtcgaagttctcaccgcattacaagaggttgagggacttgatgaagacacagaacttgagctttatgacatcctcacctctaatgcacgcaagtttgagtcgatgatggcactcccaatggaaaggaggaagaggtggattatgatgtagctaaggaagtgaaacaacttatatgtgaacttagatctctgtgttgaactgattgtgtgaacttgtctttgtgaaacttttgtgtgcgaacttgatggctatgtgaaactgttgtgtgcgaacttgatggctttatgaaactgctatgtgaaga

SEQ ID NO: 16276 - DNA, 868 bp, Zea Mays
cctataaatttctttgtgctagatattttgcaattttgcaacactaaagatttgtatttattcagtctagatttgtctttgtagctttataggcagcactgttcgtcgattcaagctgttagttaaatcaatcagggtccatctcagaagtttcatggtgaaaatcatacactttgtgacatgtgttatgtccctatcttgtttcagtgactgcatctaaactgtgagatgtgtgcaagattgggtttgttgtatttggagttcctcatagaaaaatcatacatatgctctagagttcctcatagatttggtgcccgcgatctgccatggatttgatttaaggtgagctccctttacttattttggcgtcttgcttggttggctcggattcgtgttatcggtcgacctatcgtggagccgagagagagatttggttctttcttcgcagatttggggagatcggtcgtgttcgcgctgcgagattcaattttttatgcctgttttattcacgaggttggctctcctcagatttcaagtcttcccgtgttcttgatcccttttttcccgttgattttgtctccactcactttctttctgttcgattttggcgcctgaaatttagttctagaaattcactgctaccagtctcaggaataggctgggttgaacttatacatgagatatccacatgtccaggtgcattgtctgaatttgattagaagtgtgtaatgttagttcttataaaaaagcaactcaaaaagggccaaagtttggatgtaccttctgggttattgacgcagatatctttatcgctatatgtgcttggtttgctaagtggcacatttaatctagagaattttagtctccc

SEQ ID NO: 16277 - DNA, 682 bp, Zea Mays
atggccagagtcctcggcatctatgacctcatcatcgccgccatcatctctgtcgggatcaaccccaaggccaagcccaagccctacttcttagacggctacgcacacctctccttcgaactcgcatgcagccttgctgtcctcgctgtcggcatggccatcagcatcgtcagagacaccagagtcagtgactgcatctaaactgtgagatgtgtgcaagattgggtttgttgtatttggagttcctcatagaaaaatcatacatatgctctagagttcctcatagatttggtgcccgcgatctgccatggatttgatttaagatttggggagatcggtcgtgttcgcgctgcgagattcaattttttatgcctgttttattcacgagattgcaagaacgggactgctaggcaagatgagtatacctgaaatttagttctagaaattcactgctaccagtctcaggaataggctgggttgaacttatacatgagatatccacatgtccaggtgcattgtctgaatttgattagaagtgtgtaatgttagttcttataaaaaagcaactcaaaaagggccaaagtttggatgtaccttctgggttattgacgcagatatctttatcgctatatgtgcttggtttgctaagtggcacatttaatctagagaattttagtctccc

SEQ ID NO: 16278 - DNA, 1739 bp, Zea Mays
atggccagagtcctcggcatctatgacctcatcatcgccgccatcatctctgtcgggatcaaccccaaggccaagcccaagccctacttcttagacggctacgcacacctctccttcgaactcgcatgcagccttgctgtcctcgctgtcggcatggccatcagcatcgtcagagacaccagagtcaggtattgtactactctgattgcagtgtgtatgcttgaacatatatgaataagcaaagctacaacattttttcatcagaaaaaataagcaagccaaactgatctagaatacactgtttttgagaaattaagcagcaacaaagaagtctatgtgccccttcttcaatagcaaggtattgttgtgcattgggttagatgatatgtttatgtgattgttacagtgttaggtcttgaggttatggctaaatagtcaatcatcaaaatggcagttacctcacaactttgtaagaaaaacaggttatgtgatcttaggtaacttctgaaattttgttgcttagtgtagcagattgccagggttaccttacctttttctgtctatctcggtaacaaaagactgtcagtctgcagacactaaaaaaagcacactccttttaaaccaaaggaccatgatcacaagagggcatcttctgctttcttgccatatctgatgcccgtctcagagatcaatttaagctgaaccttagtgtccggttctgtttcatggcaaagactagtttccagccttgaagtctttatagaatgtggacttccttgaaacaacgaagaacactgcacgcaaagtgatagtattattctccatcggatactaaaaatgttgcatgaactatatacgtagagtatgtaagggtgaagggacagaccaggaattgcaggaacaatacagtctttatccagcagcacctcctgcctataaatttctttgtgctagatattttgcaattttgcaacactaaagatttgtatttattcagtctagatttgtctttgtagctttataggcagcactgttcgtcgattcaagctgttagttaaatcaatcagggtccatctcagaagtttcatggtgaaaatcatacactttgtgacatgtgttatgtccctatcttgtttcagtgactgcatctaaactgtgagatgtgtgcaagattgggtttgttgtatttggagttcctcatagaaaaatcatacatatgctctagagttcctcatagatttggtgcccgcgatctgccatggatttgatttaaggtgagctccctttacttattttggcgtcttgcttggttggctcggattcgtgttatcggtcgacctatcgtggagccgagagagagatttggttctttcttcgcagatttggggagatcggtcgtgttcgcgctgcgagattcaattttttatgcctgttttattcacgagattgcaagaacgggactgctaggcaagatgagtatacctgaaatttagttctagaaattcactgctaccagtctcaggaataggctgggttgaacttatacatgagatatccacatgtccaggtgcattgtctgaatttgattagaagtgtgtaatgttagttcttataaaaaagcaactcaaaaagggccaaagtttggatgtaccttctgggttattgacgcagatatctttatcgctatatgtgcttggtttgctaagtggcacatttaatctagagaattttagtctccc

SEQ ID NO: 16279 - DNA, 617 bp, Zea Mays
atggccagagtcctcggcatctatgacctcatcatcgccgccatcatctctgtcgggatcaaccccaaggccaagcccaagccctacttcttagacggctacgcacacctctccttcgaactcgcatgcagccttgctgtcctcgctgtcggcatggccatcagcatcgtcagagacaccagagtcagtgactgcatctaaactgtgagatgtgtgcaagattgggtttgttgtatttggagttcctcatagaaaaatcatacatatgctctagagttcctcatagatttggtgcccgcgatctgccatggatttgatttaagattgcaagaacgggactgctaggcaagatgagtatacctgaaatttagttctagaaattcactgctaccagtctcaggaataggctgggttgaacttatacatgagatatccacatgtccaggtgcattgtctgaatttgattagaagtgtgtaatgttagttcttataaaaaagcaactcaaaaagggccaaagtttggatgtaccttctgggttattgacgcagatatctttatcgctatatgtgcttggtttgctaagtggcacatttaatctagagaattttagtctccc

SEQ ID NO: 16280 - DNA, 1536 bp, Zea Mays
cacagatttacctgatcctattatcgtgttgttcctgggaagttggctagtgagtgtcaggttgggttgccaaatgttggcaaatcaacttttttcaacatagtaacgaagttggctatcccagctgagaattttcctttctgtaccatcgaaccaaatgaagcacgggtgaatgttccagatgaacggtttgattggctttgcaaactttacaagccaaagagtgaggtgcctgcatatcttgaagtaactgacatagctgggcttattagaggtgctcatgctggggatggtctgggcaatgcattcctctcacatatacgtgctgttgatggaatcttccatgtcctaagagcatttgaagacgcagaaattactcatgttgacgatacagtagatcctgttagagacatggaaactattagtgaagagctcagactaaaggatatagagttcatgaaaaagaaacttgaggaccttgataagtcaatgaagaggagcaatgataagcagctcaaaattgagcatgaattatgtgagagggtcataggccatcttgaggaagggaaagatgtccgtttaggagattggaaagctgctgacattgagatcttgaatacattccagctactttcagctaagccagttgtctatttggtgaatatgagtgagaaggatttccagagaaaaaagaacaagtttctacccaagatacatgcttgggtgcaggaacatggtggtgaaaccatacttcctttcagctgtgcttttgaacagaaactagtggatatgccagaagatgaagccgccaaatattgtgctgaaaaccagataacaagcatgatcccaaaaattatcaagactggttttgcagcaattcatctgatatactttttcactgctggtcctgatgaggtaaaatgttggcagatcagacgccagactaaagctcctcaagctgctggtgcaattcacactgattttgaaaggggtttcatatgcgctgaggtaatgaagtttgaagatctgaaagaactgggcagtgaatctgctgtaaaggctgctggaaaatacaagcaggaggggaaaacctatgtggtccaggacggggacatcatctttttcaaattcaacgtgtctggtggcgggaagaagtgaataatgtatgaagatggtagcatcaacagtgttttacgtcttaccccgaatttctcattcaacagtgtttacaccttgccccgtatttccacatttttgaggtcgcttgccagtagctctaggttccggtatcgaaaacttgtacaacaaggctccagaccgttgaaggatttgtattaataacatgcacaattgtatggcttgtgcttgagctctcgctgttaccagaagcttagaatcgtttgagttctgtggttcggttttgcgtggtttattgtgtaagctggtctaactgcaaatgatttgatgcttgtggcgggaacaaatgtatcaaccgtgaagctagttgtggaagctatgtgtgggtcccctttgggc

SEQ ID NO: 16281 - DNA, 1433 bp, Zea Mays
gcacggagatagttgcttcggaggctcaggttgggttgccaaatgttggcaaatcaacttttttcaacatagtaacgaagttggctatcccagctgagaattttcctttctgtaccatcgaaccaaatgaagcacgggtgaatgttccagatgaacggtttgattggctttgcaaactttacaagccaaagagtgaggtgcctgcatatcttgaagtaactgacatagctgggcttattagaggtgctcatgctggggatggtctgggcaatgcattcctctcacatatacgtgctgttgatggaatcttccatgtcctaagagcatttgaagacgcagaaattactcatgttgacgatacagtagatcctgttagagacatggaaactattagtgaagagctcagactaaaggatatagagttcatgaaaaagaaacttgaggaccttgataagtcaatgaagaggagcaatgataagcagctcaaaattgagcatgaattatgtgagagggtcataggccatcttgaggaagggaaagatgtccgtttaggagattggaaagctgctgacattgagatcttgaatacattccagctactttcagctaagccagttgtctatttggaacatggtggtgaaaccatacttcctttcagctgtgcttttgaacagaaactagtggatatgccagaagatgaagccgccaaatattgtgctgaaaaccagataacaagcatgatcccaaaaattatcaagactggttttgcagcaattcatctgatatactttttcactgctggtcctgatgaggtaaaatgttggcagatcagacgccagactaaagctcctcaagctgctggtgcaattcacactgattttgaaaggggtttcatatgcgctgaggtaatgaagtttgaagatctgaaagaactgggcagtgaatctgctgtaaaggctgctggaaaatacaagcaggaggggaaaacctatgtggtccaggacggggacatcatctttttcaaattcaacgtgtctggtggcgggaagaagtgaataatgtatgaagatggtagcatcaacagtgttttacgtcttaccccgaatttctcattcaacagtgtttacaccttgccccgtatttccacatttttgaggtcgcttgccagtagctctaggttccggtatcgaaaacttgtacaacaaggctccagaccgttgaaggatttgtattaataacatgcacaattgtatggcttgtgcttgagctctcgctgttaccagaagcttagaatcgtttgagttctgtggttcggttttgcgtggtttattgtgtaagctggtctaactgcaaatgatttgatgcttgtggcgggaacaaatgtatcaaccgtgaagctagttgtggaagctatgtgtgggtcccctttgggc

SEQ ID NO: 16282 - DNA, 1540 bp, Zea Mays
gattcgagccgcgcggtacgtgtgctgccccttgtgcacggagatagttgcttcggaggctcaggttgggttgccaaatgttggcaaatcaacttttttcaacatagtaacgaagttggctatcccagctgagaattttcctttctgtaccatcgaaccaaatgaagcacgggtgaatgttccagatgaacggtttgattggctttgcaaactttacaagccaaagagtgaggtgcctgcatatcttgaagtaactgacatagctgggcttattagaggtgctcatgctggggatggtctgggcaatgcattcctctcacatatacgtgctgttgatggaatcttccatgtcctaagagcatttgaagacgcagaaattactcatgttgacgatacagtagatcctgttagagacatggaaactattagtgaagagctcagactaaaggatatagagttcatgaaaaagaaacttgaggaccttgataagtcaatgaagaggagcaatgataagcagctcaaaattgagcatgaattatgtgagagggtcataggccatcttgaggaagggaaagatgtccgtttaggagattggaaagctgctgacattgagatcttgaatacattccagctactttcagctaagccagttgtctatttggtgaatatgagtgagaaggatttccagagaaaaaagaacaagtttctacccaagatacatgcttgggtgcaggaacatggtggtgaaaccatacttcctttcagctgtgcttttgaacagaaactagtggatatgccagaagatgaagccgccaaatattgtgctgaaaaccagataacaagcatgatcccaaaaattatcaagactggttttgcagcaattcatctgatatactttttcactgctggtcctgatgaggtaaaatgttggcagatcagacgccagactaaagctcctcaagctgctggtgcaattcacactgattttgaaaggggtttcatatgcgctgaggtaatgaagtttgaagatctgaaagaactgggcagtgaatctgctgtaaaggctgctggaaaatacaagcaggaggggaaaacctatgtggtccaggacggggacatcatctttttcaaattcaacgtgtctggtggcgggaagaagtgaataatgtatgaagatggtagcatcaacagtgttttacgtcttaccccgaatttctcattcaacagtgtttacaccttgccccgtatttccacatttttgaggtcgcttgccagtagctctaggttccggtatcgaaaacttgtacaacaaggctccagaccgttgaaggatttgtattaataacatgcacaattgtatggcttgtgcttgagctctcgctgttaccagaagcttagaatcgtttgagttctgtggttcggttttgcgtggtttattgtgtaagctggtctaactgcaaatgatttgatgcttgtggcgggaacaaatgtatcaaccgtgaagctagttgtggaagctatgtgtgggtcccctttgggc

SEQ ID NO: 16283 - DNA, 1690 bp, Zea Mays
acagcacctcgatccatcgttcatctcacagcccaacccagcccagcaaccgcgaatccgtgttcatctccctactcgatcggcagccgcaagagctgaccctccgcttccccccaaaaaccctagccatcccaggttgctccggccgcatccccgccgaccgccgaccgccgacgatgcctcccaaggccaagaaggacgctgcgccgtctgagcgccccatccttggacgcttctcttcccacctcaagatcgggatcgttgggttgccaaatgttggcaaatcaacttttttcaacatagtaacgaagttggctatcccagctgagaattttcctttctgtaccatcgaaccaaatgaagcacgggtgaatgttccagatgaacggtttgattggctttgcaaactttacaagccaaagagtgaggtgctcatgctggggatggtctgggcaatgcattcctctcacatatacgtgctgttgatggaatcttccatgtcctaagagcatttgaagacgcagaaattactcatgttgacgatacagtagatcctgttagagacatggaaactattagtgaagagctcagactaaaggatatagagttcatgaaaaagaaacttgaggaccttgataagtcaatgaagaggagcaatgataagcagctcaaaattgagcatgaattatgtgagagggtcataggccatcttgaggaagggaaagatgtccgtttaggagattggaaagctgctgacattgagatcttgaatacattccagctactttcagctaagccagttgtctatttggtgaatatgagtgagaaggatttccagagaaaaaagaacaagtttctacccaagatacatgcttgggtgcaggaacatggtggtgaaaccatacttcctttcagctgtgcttttgaacagaaactagtggatatgccagaagatgaagccgccaaatattgtgctgaaaaccagataacaagcatgatcccaaaaattatcaagactggttttgcagcaattcatctgatatactttttcactgctggtcctgatgaggtaaaatgttggcagatcagacgccagactaaagctcctcaagctgctggtgcaattcacactgattttgaaaggggtttcatatgcgctgaggtaatgaagtttgaagatctgaaagaactgggcagtgaatctgctgtaaaggctgctggaaaatacaagcaggaggggaaaacctatgtggtccaggacggggacatcatctttttcaaattcaacgtgtctggtggcgggaagaagtgaataatgtatgaagatggtagcatcaacagtgttttacgtcttaccccgaatttctcattcaacagtgtttacaccttgccccgtatttccacatttttgaggtcgcttgccagtagctctaggttccggtatcgaaaacttgtacaacaaggctccagaccgttgaaggatttgtattaataacatgcacaattgtatggcttgtgcttgagctctcgctgttaccagaagcttagaatcgtttgagttctgtggttcggttttgcgtggtttattgtgtaagctggtctaactgcaaatgatttgatgcttgtggcgggaacaaatgtatcaaccgtgaagctagttgtggaagctatgtgtgggtcccctttgggc

SEQ ID NO: 16284 - DNA, 1728 bp, Zea Mays
acagcacctcgatccatcgttcatctcacagcccaacccagcccagcaaccgcgaatccgtgttcatctccctactcgatcggcagccgcaagagctgaccctccgcttccccccaaaaaccctagccatcccaggttgctccggccgcatccccgccgaccgccgaccgccgacgatgcctcccaaggccaagaaggacgctgcgccgtctgagcgccccatccttggacgcttctcttcccacctcaagatcgggatcgttgggttgccaaatgttggcaaatcaacttttttcaacatagtaacgaagttggctatcccagctgagaattttcctttctgtaccatcgaaccaaatgaagcacgggtgaatgttccagatgaacggtttgattggctttgcaaactttacaagccaaagagtgaggtgcctgcatatcttgaagtaactgacatagctgggcttattagaggtgctcatgctggggatggtctgggcaatgcattcctctcacatatacgtgctgttgatggaatcttccatgtcctaagagcatttgaagacgcagaaattactcatgttgacgatacagtagatcctgttagagacatggaaactattagtgaagagctcagactaaaggatatagagttcatgaaaaagaaacttgaggaccttgataagtcaatgaagaggagcaatgataagcagctcaaaattgagcatgaattatgtcataggccatcttgaggaagggaaagatgtccgtttaggagattggaaagctgctgacattgagatcttgaatacattccagctactttcagctaagccagttgtctatttggtgaatatgagtgagaaggatttccagagaaaaaagaacaagtttctacccaagatacatgcttgggtgcaggaacatggtggtgaaaccatacttcctttcagctgtgcttttgaacagaaactagtggatatgccagaagatgaagccgccaaatattgtgctgaaaaccagataacaagcatgatcccaaaaattatcaagactggttttgcagcaattcatctgatatactttttcactgctggtcctgatgaggtaaaatgttggcagatcagacgccagactaaagctcctcaagctgctggtgcaattcacactgattttgaaaggggtttcatatgcgctgaggtaatgaagtttgaagatctgaaagaactgggcagtgaatctgctgtaaaggctgctggaaaatacaagcaggaggggaaaacctatgtggtccaggacggggacatcatctttttcaaattcaacgtgtctggtggcgggaagaagtgaataatgtatgaagatggtagcatcaacagtgttttacgtcttaccccgaatttctcattcaacagtgtttacaccttgccccgtatttccacatttttgaggtcgcttgccagtagctctaggttccggtatcgaaaacttgtacaacaaggctccagaccgttgaaggatttgtattaataacatgcacaattgtatggcttgtgcttgagctctcgctgttaccagaagcttagaatcgtttgagttctgtggttcggttttgcgtggtttattgtgtaagctggtctaactgcaaatgatttgatgcttgtggcgggaacaaatgtatcaaccgtgaagctagttgtggaagctatgtgtgggtcccctttgggc

SEQ ID NO: 16285 - DNA, 1730 bp, Zea Mays
ctacaaaacagaaatagatatacaggacaggatagccttttcatattcccatgatatgcagatatctaggggcagactccgttgccggaggctctcacatgagtaaggtctatagaagggataaatcgaggcaagtcttccctgcaaatatcgctccacgatttgatgactcggtgagacagctgcccttcgatatagagatatctagatcctagtaaaatcctaagcagaagcacacaatgaaaaaatacaaatatacttcctccgacccaaaataactgatattttaggcttgtcctaattcaaacaattataaaattgataaaatttaataaaaacgattaatgtctatggtaccaaatgaatattgtagatttattatgatatatattttcatgttatacatatttgttgtcataaatattatgattattttctataaatttggaattaaaatggcttagccagtgactctattccccgtactcccccaaatgcaaattgttaagttcagtctttaaaggccaacgtaccagcaatgtaatataacgaactcaggtgggaaatcctgccacccccaccctaaaaaaacttaagggctagtctggaatctcaaatcccctctgggattgaaggggaatgagggtgaaattagtttatttccccttcaatttcctccaattctgaaggggatttgagtttcaaaactagccctaaatggcttgatttaagacaaacctaaagcatcagttattttgggatgcaagtgaaggtcaggcataaagaaagcaaatcaagcatcagttatgttgggatgaaagtgaagctcaggtataaagaaagcaaatcaatcacctgtcaaggattgcaagtatatccaaagcagcctgaatctcgactgattgcagcaagaacacaagaaccagatagtgatgtgctgctgccttctccaatccaccaagtcaacgggctcaggtcatcaaaaacttcgatacaggagttcagcgttgctttggaggggttcgttgcctttttataaagtggtggcatatgagagggtgagtgccaattgtagtgtaaaataacaaacgtaattaaaaactgcacctatcgacaaaccaacgggtagcaggtaggaatgaggcgggttgaccatcatctgcgagatgcaactgtgggccaaccggtccatcgtaagtgtgaggacttgaggggcaagagccggcggtggcggcaacgagcattggaaaactgggacgtcggcgccggagacgacgtcggcaggcaacgacatcgacggcaagtgaattaatgctggatgaatgcgacactttgggatgttgcagcagccagcagctgacggagaaaagcgacgcctacagcatcggcgtgctgatgctggaggagtggaggtggtcacggcgaggaagccgctggcgcgcggccaccggccggtacatcgtccgggacgaaggcggcgctggaccggaccaaggatctgtacggcctgcacgagctgctggaccaggcggtggcgggctggagcagtacatggacctggtgctgcgctgcgtcgaggaggccggcgccgaccggccgtcgatgggcgaggtggacggagagatcgagcaggtactgaagatggccggcggcacaggactccatccctacgctgagtcggcggcgtccattccaactccatgaggaggtacgccggtgaggccttacca
